United States Patent Application Publication US 2007/0214517 A1 - sequence listing, part 49

SEQ ID NO: 63408 - protein, 323 aa, Triticum aestivum
  peptide (1)..(323): Ceres Seq. ID no. 12617199
  misc_feature (8)..(268): Pfam Name: 3-beta hydroxysteroid dehydrogenase/isomerase family Pfam Description: 3-beta hydroxysteroid dehydrogenase/isomerase
  misc_feature (9)..(322): Homolog of NCBI NO: 9964087 NR Description: cinnamoyl CoA reductase [Lolium perenne]
  misc_feature (9)..(322): Homolog of NCBI NO: 3341511 NR Description: cinnamoyl-CoA reductase [Saccharum officinarum]
  misc_feature (9)..(322): Homolog of NCBI NO: 9998901 NR Description: cinnamoyl-CoA reductase [Populus balsamifera
  misc_feature (1)..(322): Homolog of NCBI NO: 3242328 NR Description: cinnamoyl-CoA reductase [Zea mays]
  misc_feature (9)..(320): Homolog of NCBI NO: 17978649 NR Description: cinnamoyl-CoA reductase [Pinus taeda]
  misc_feature (1)..(322): Homolog of NCBI NO: 7431410 NR Description: cinnamoyl CoA reductase - maize
  misc_feature (6)..(322): Homolog of NCBI NO: 6554472 NR Description: putative cinnamoyl-CoA reductase; 14056-15506
  misc_feature (6)..(322): Homolog of NCBI NO: 15223068 NR Description: putative cinnamoyl-CoA reductase; protein id:
  misc_feature (11)..(323): Homolog of NCBI NO: 15226134 NR Description: putative cinnamoyl-CoA reductase
  misc_feature (4)..(323): Homolog of NCBI NO: 15226135 NR Description: putative cinnamoyl-CoA reductase
MAAAAAARKSVCVTGAGGFVASWLVKLLLSKGHYAVRGTVRDPGNAKNAHLKALEGAGERLELLSADLLNYDSIASAVAGCEGVFHVASPVPSGRSTNPEEEVIAPAVTGTLNVLKACYEAKVKRVVMVSSVAAVSNNPNWPKDKLFDEDSWSDEDLCRKGEDWYFLSKTLAEREAFAYAAKTGLDIVTICPSLVIGPLMQSTVNTSSNILLNYLKGERDTVENKLRNVVDVRDVADALLLAYENPEASGRYICSSKPVKVSDMISVLKTLYPMYTYPKNFTEVEENTIYSSEKLQKLGWTFRPLEKTLGDSVESYKASGVLN

SEQ ID NO: 63409 - protein, 196 aa, Triticum aestivum
  peptide (1)..(196): Ceres Seq. ID no. 12617200
  misc_feature (1)..(141): Pfam Name: 3-beta hydroxysteroid dehydrogenase/isomerase family Pfam Description: 3-beta hydroxysteroid dehydrogenase/isomerase
  misc_feature (1)..(195): Homolog of NCBI NO: 9964087 NR Description: cinnamoyl CoA reductase [Lolium perenne]
  misc_feature (1)..(195): Homolog of NCBI NO: 3341511 NR Description: cinnamoyl-CoA reductase [Saccharum officinarum]
  misc_feature (1)..(195): Homolog of NCBI NO: 9998901 NR Description: cinnamoyl-CoA reductase [Populus balsamifera
  misc_feature (1)..(195): Homolog of NCBI NO: 3242328 NR Description: cinnamoyl-CoA reductase [Zea mays]
  misc_feature (1)..(193): Homolog of NCBI NO: 17978649 NR Description: cinnamoyl-CoA reductase [Pinus taeda]
  misc_feature (1)..(195): Homolog of NCBI NO: 7431410 NR Description: cinnamoyl CoA reductase - maize
  misc_feature (1)..(195): Homolog of NCBI NO: 6554472 NR Description: putative cinnamoyl-CoA reductase; 14056-15506
  misc_feature (1)..(195): Homolog of NCBI NO: 15223068 NR Description: putative cinnamoyl-CoA reductase; protein id:
  misc_feature (1)..(196): Homolog of NCBI NO: 15226134 NR Description: putative cinnamoyl-CoA reductase
  misc_feature (1)..(196): Homolog of NCBI NO: 15226135 NR Description: putative cinnamoyl-CoA reductase
MVSSVAAVSNNPNWPKDKLFDEDSWSDEDLCRKGEDWYFLSKTLAEREAFAYAAKTGLDIVTICPSLVIGPLMQSTVNTSSNILLNYLKGERDTVENKLRNVVDVRDVADALLLAYENPEASGRYICSSKPVKVSDMISVLKTLYPMYTYPKNFTEVEENTIYSSEKLQKLGWTFRPLEKTLGDSVESYKASGVLN

SEQ ID NO: 63410 - DNA, 1298 bp, Triticum aestivum
  misc_feature (1)..(1298): Ceres Seq. ID no. 14302434
agaacatcctaatcgaaaatcatcgagctcgcatcacaggagttatctctggctagtcacgtcgcatcaaagccgaagaagcaatggccgccttcgccaccaggtccgcggccttccttggcctcgccgtcgtgctctgtttcctcgccggcgcggcgagcgcgcagcagctctctcccaacttctactcgaggtcttgccccaacctggcgtccatcgtgcggtcggggatgaccgccgcattgcagacggagaggcggatgggcgcgtccatcctccgcctcttcttccacgactgcttcgtcaatgggtgtgacggctcgattctgcttgacgacacctcgacgttcaccggcgagaagaacgccgggccgaacgccaactcggcgcgtgggttcgaggtgatcgacgccatcaagacccgggtcgaagccgcgtgcagggccaccgtctcctgcgccgacatcctcgcgctcgccgcccgtgacggtgtcaacctgctcggaggtcccacgtggagcgtgccgctggggcgcaaggactcgcgcacggcgagccagagcgcggccaacgcgaacctcccggggccggggtccagcctcgccacgctcatcgccatgttcggcaacaagaacctgtcgccgcgggacatgacggcgctctccggcgcgcacaccatcgggcgctcgcagtgccagttcttccgcaaccgcatctacaacgagcgcaacatcaacgccagcttcgcggcgctgcggcagcggacgtgcccgcggtcgggcggcgacggcaacctcgcgcccttcgacgtgcagaccgccgacgggttcgacaacgcctactaccagaacctggtcgggcagcgcggcctcctgcactcggaccaggagctcttcaacggcgggtcgcaggacgcgctggtgcggcagtacagcagcagccccagccagttctccgccgacttcgtcacggccatgctgaagatgggcggcctgctgccgtcgtccgggacgcagacggaggtcaggttgaactgcaggagacccaactaaaaagtacacacataacaagtgtgctaaataatgattgatgccttggaaaaccaggcattggtcaggttcacgtatgtatgtgtatgtatgatgaagaacaccaaatgtacaaacgctcgtttgctcaatccggggcgaacgtgcaaactacaaagtatcaaaatgtatgttggtcgtaaaagtgtatcatgatcatcatcatcaatacagaacaatgggatggtgcaatcatcataattaaagaat

SEQ ID NO: 63411 - protein, 322 aa, Triticum aestivum
  peptide (1)..(322): Ceres Seq. ID no. 14302435
  misc_feature (46)..(286): Pfam Name: Peroxidase Pfam Description: Peroxidase
  misc_feature (14)..(322): Homolog of NCBI NO: 7433058 NR Description: peroxidase (EC 1.11.1.7) - radish
  misc_feature (8)..(322): Homolog of NCBI NO: 2117618 NR Description: peroxidase (EC 1.11.1.7) 1 precursor - wheat
  misc_feature (14)..(322): Homolog of NCBI NO: 5381253 NR Description: peroxidase [Nicotiana tabacum]
  misc_feature (16)..(319): Homolog of NCBI NO: 7433047 NR Description: probable peroxidase (EC 1.11.1.7) (clone PC23) -
  misc_feature (29)..(322): Homolog of NCBI NO: 464365 NR Description: Peroxidase P7 (TP7)
  misc_feature (29)..(322): Homolog of NCBI NO: 15239075 NR Description: peroxidase, putative [Arabidopsis thaliana]
  misc_feature (9)..(322): Homolog of NCBI NO: 34903770 NR Description: unnamed protein product [Oryza sativa (japonica
  misc_feature (5)..(322): Homolog of NCBI NO: 32351452 NR Description: class III peroxidase [Gossypium hirsutum]
  misc_feature (18)..(322): Homolog of NCBI NO: 7433049 NR Description: peroxidase (EC 1.11.1.7) - flax (fragment)
  misc_feature (14)..(322): Homolog of NCBI NO: 5453379 NR Description: bacterial-induced peroxidase precursor [Gossypium
MAAFATRSAAFLGLAVVLCFLAGAASAQQLSPNFYSRSCPNLASIVRSGMTAALQTERRMGASILRLFFHDCFVNGCDGSILLDDTSTFTGEKNAGPNANSARGFEVIDAIKTRVEAACRATVSCADILALAARDGVNLLGGPTWSVPLGRKDSRTASQSAANANLPGPGSSLATLIAMFGNKNLSPRDMTALSGAHTIGRSQCQFFRNRIYNERNINASFAALRQRTCPRSGGDGNLAPFDVQTADGFDNAYYQNLVGQRGLLHSDQELFNGGSQDALVRQYSSSPSQFSADFVTAMLKMGGLLPSSGTQTEVRLNCRRPN

SEQ ID NO: 63412 - protein, 273 aa, Triticum aestivum
  peptide (1)..(273): Ceres Seq. ID no. 14302436
  misc_feature (1)..(237): Pfam Name: Peroxidase Pfam Description: Peroxidase
  misc_feature (1)..(273): Homolog of NCBI NO: 7433058 NR Description: peroxidase (EC 1.11.1.7) - radish
  misc_feature (1)..(273): Homolog of NCBI NO: 2117618 NR Description: peroxidase (EC 1.11.1.7) 1 precursor - wheat
  misc_feature (1)..(273): Homolog of NCBI NO: 5381253 NR Description: peroxidase [Nicotiana tabacum]
  misc_feature (1)..(270): Homolog of NCBI NO: 7433047 NR Description: probable peroxidase (EC 1.11.1.7) (clone PC23) -
  misc_feature (1)..(273): Homolog of NCBI NO: 464365 NR Description: Peroxidase P7 (TP7)
  misc_feature (1)..(273): Homolog of NCBI NO: 15239075 NR Description: peroxidase, putative [Arabidopsis thaliana]
  misc_feature (1)..(273): Homolog of NCBI NO: 34903770 NR Description: unnamed protein product [Oryza sativa (japonica
  misc_feature (1)..(273): Homolog of NCBI NO: 32351452 NR Description: class III peroxidase [Gossypium hirsutum]
  misc_feature (1)..(273): Homolog of NCBI NO: 7433049 NR Description: peroxidase (EC 1.11.1.7) - flax (fragment)
  misc_feature (1)..(273): Homolog of NCBI NO: 5453379 NR Description: bacterial-induced peroxidase precursor [Gossypium
MTAALQTERRMGASILRLFFHDCFVNGCDGSILLDDTSTFTGEKNAGPNANSARGFEVIDAIKTRVEAACRATVSCADILALAARDGVNLLGGPTWSVPLGRKDSRTASQSAANANLPGPGSSLATLIAMFGNKNLSPRDMTALSGAHTIGRSQCQFFRNRIYNERNINASFAALRQRTCPRSGGDGNLAPFDVQTADGFDNAYYQNLVGQRGLLHSDQELFNGGSQDALVRQYSSSPSQFSADFVTAMLKMGGLLPSSGTQTEVRLNCRRPN

SEQ ID NO: 63413 - protein, 263 aa, Triticum aestivum
  peptide (1)..(263): Ceres Seq. ID no. 14302437
  misc_feature (1)..(227): Pfam Name: Peroxidase Pfam Description: Peroxidase
  misc_feature (1)..(263): Homolog of NCBI NO: 7433058 NR Description: peroxidase (EC 1.11.1.7) - radish
  misc_feature (1)..(263): Homolog of NCBI NO: 2117618 NR Description: peroxidase (EC 1.11.1.7) 1 precursor - wheat
  misc_feature (1)..(263): Homolog of NCBI NO: 5381253 NR Description: peroxidase [Nicotiana tabacum]
  misc_feature (1)..(260): Homolog of NCBI NO: 7433047 NR Description: probable peroxidase (EC 1.11.1.7) (clone PC23) -
  misc_feature (1)..(263): Homolog of NCBI NO: 464365 NR Description: Peroxidase P7 (TP7)
  misc_feature (1)..(263): Homolog of NCBI NO: 15239075 NR Description: peroxidase, putative [Arabidopsis thaliana]
  misc_feature (1)..(263): Homolog of NCBI NO: 34903770 NR Description: unnamed protein product [Oryza sativa (japonica
  misc_feature (1)..(263): Homolog of NCBI NO: 32351452 NR Description: class III peroxidase [Gossypium hirsutum]
  misc_feature (1)..(263): Homolog of NCBI NO: 7433049 NR Description: peroxidase (EC 1.11.1.7) - flax (fragment)
  misc_feature (1)..(263): Homolog of NCBI NO: 5453379 NR Description: bacterial-induced peroxidase precursor [Gossypium
MGASILRLFFHDCFVNGCDGSILLDDTSTFTGEKNAGPNANSARGFEVIDAIKTRVEAACRATVSCADILALAARDGVNLLGGPTWSVPLGRKDSRTASQSAANANLPGPGSSLATLIAMFGNKNLSPRDMTALSGAHTIGRSQCQFFRNRIYNERNINASFAALRQRTCPRSGGDGNLAPFDVQTADGFDNAYYQNLVGQRGLLHSDQELFNGGSQDALVRQYSSSPSQFSADFVTAMLKMGGLLPSSGTQTEVRLNCRRPN

SEQ ID NO: 63414 - DNA, 1136 bp, Triticum aestivum
  misc_feature (1)..(1136): Ceres Seq. ID no. 12616324
atccataattgcattcaaaggcgagcgcacaaaagagtgagactacctagagcactcagcaccgtcgtaggctcttcgccatccgttgagtgtcccaggttctcagcgtgcacgtctgatctgatggcggtaccagcaggagattcctccggcggcgacaagtacaggtctcacctggccggcgagggcgagaagaacaccgtgtggcggcacggcgcgccacccacgtacgacgccgtgaacagcctcttcgaggccgggaggactcaggagtgggcgaaggggtcgcttgaggaggtggtgcagaacgcgatcaagacgtgggagatggagctgtcgcacaaggcccgcatcgaggacttcaagtcggtgagccccggccggttcaccctgtccgtgaacggcgggcgggccctgacgggggaggagacgctggccatgggcagctacaacgcgctgctcgccagcccgatcctgccgggcaccggcgcgtacgacgccaccgccgagacgttcgagtcctcgcacgacctgttccgctccgccttcccgcgcgggttcgcgtgggaggtggtcaaggtctactccggcccgccggtgatcgccttcaagttccggcactggggccacatggaggggccctacaagggccacgcccccaccggggacaaagtcgagttctacggcgtcgccgtgctcaaggtggacgagcagctgcgggcggaggacgtggaggtgttctacgacccgggggagcttctcgcggggcttatcaagggtcccaaggaggaagacgaggcggcggcggcgctcgccgggaggctccgcgaggcggctacggtgtccgcatcaggtgctgacgcgcagccgcaggcctgccccttccttggctctggaaagcaggggtgatcgagtggcctcgtcgaataaaacgtgtcaagcctccagtcttcagggtgttgctgttgcatcactgttttgcaatcagatagatctttttcgtcagctttggagaccaactgaaagctcagttcaacgtgtaatcgtactgttaagtgcttgttgtttgttggaagttgttgggtccagatcagatcgatcgggatcagtgagtacagctctgtgaagaagtggtt

SEQ ID NO: 63415 - protein, 302 aa, Triticum aestivum
  peptide (1)..(302): Ceres Seq. ID no. 12616325
  misc_feature (69)..(269): Homolog of NCBI NO: 17227713 NR Description: similar to pathogenesis related protein [Nostoc
  misc_feature (46)..(188): Homolog of NCBI NO: 100602 NR Description: infection-related protein - barley
  misc_feature (110)..(295): Homolog of NCBI NO: 30699354 NR Description: expressed protein [Arabidopsis thaliana]
  misc_feature (46)..(270): Homolog of NCBI NO: 34904656 NR Description: putative pathogenesis related protein
  misc_feature (46)..(273): Homolog of NCBI NO: 34904652 NR Description: putative pathogenesis related protein
  misc_feature (46)..(268): Homolog of NCBI NO: 1346809 NR Description: Pathogen-related protein
  misc_feature (62)..(295): Homolog of NCBI NO: 25372796 NR Description: hypothetical protein F9K20.18 [imported] -
  misc_feature (53)..(295): Homolog of NCBI NO: 18412106 NR Description: expressed protein
  misc_feature (46)..(301): Homolog of NCBI NO: 34910864 NR Description: putative pathogenesis related protein
  misc_feature (42)..(301): Homolog of NCBI NO: 34910862 NR Description: putative pathogenesis related protein
IHNCIQRRAHKRVRLPRALSTVVGSSPSVECPRFSACTSDLMAVPAGDSSGGDKYRSHLAGEGEKNTVWRHGAPPTYDAVNSLFEAGRTQEWAKGSLEEVVQNAIKTWEMELSHKARIEDFKSVSPGRFTLSVNGGRALTGEETLAMGSYNALLASPILPGTGAYDATAETFESSHDLFRSAFPRGFAWEVVKVYSGPPVIAFKFRHWGHMEGPYKGHAPTGDKVEFYGVAVLKVDEQLRAEDVEVFYDPGELLAGLIKGPKEEDEAAAALAGRLREAATVSASGADAQPQACPFLGSGKQG

SEQ ID NO: 63416 - protein, 261 aa, Triticum aestivum
  peptide (1)..(261): Ceres Seq. ID no. 12616326
  misc_feature (28)..(228): Homolog of NCBI NO: 17227713 NR Description: similar to pathogenesis related protein [Nostoc
  misc_feature (5)..(147): Homolog of NCBI NO: 100602 NR Description: infection-related protein - barley
  misc_feature (69)..(254): Homolog of NCBI NO: 30699354 NR Description: expressed protein [Arabidopsis thaliana]
  misc_feature (5)..(229): Homolog of NCBI NO: 34904656 NR Description: putative pathogenesis related protein
  misc_feature (5)..(232): Homolog of NCBI NO: 34904652 NR Description: putative pathogenesis related protein
  misc_feature (5)..(227): Homolog of NCBI NO: 1346809 NR Description: Pathogen-related protein
  misc_feature (21)..(254): Homolog of NCBI NO: 25372796 NR Description: hypothetical protein F9K20.18 [imported] -
  misc_feature (12)..(254): Homolog of NCBI NO: 18412106 NR Description: expressed protein
  misc_feature (5)..(260): Homolog of NCBI NO: 34910864 NR Description: putative pathogenesis related protein
  misc_feature (1)..(260): Homolog of NCBI NO: 34910862 NR Description: putative pathogenesis related protein
MAVPAGDSSGGDKYRSHLAGEGEKNTVWRHGAPPTYDAVNSLFEAGRTQEWAKGSLEEVVQNAIKTWEMELSHKARIEDFKSVSPGRFTLSVNGGRALTGEETLAMGSYNALLASPILPGTGAYDATAETFESSHDLFRSAFPRGFAWEVVKVYSGPPVIAFKFRHWGHMEGPYKGHAPTGDKVEFYGVAVLKVDEQLRAEDVEVFYDPGELLAGLIKGPKEEDEAAAALAGRLREAATVSASGADAQPQACPFLGSGKQG

SEQ ID NO: 63417 - protein, 193 aa, Triticum aestivum
  peptide (1)..(193): Ceres Seq. ID no. 12616327
  misc_feature (1)..(160): Homolog of NCBI NO: 17227713 NR Description: similar to pathogenesis related protein [Nostoc
  misc_feature (1)..(79): Homolog of NCBI NO: 100602 NR Description: infection-related protein - barley
  misc_feature (1)..(186): Homolog of NCBI NO: 30699354 NR Description: expressed protein [Arabidopsis thaliana]
  misc_feature (1)..(161): Homolog of NCBI NO: 34904656 NR Description: putative pathogenesis related protein
  misc_feature (1)..(164): Homolog of NCBI NO: 34904652 NR Description: putative pathogenesis related protein
  misc_feature (1)..(159): Homolog of NCBI NO: 1346809 NR Description: Pathogen-related protein
  misc_feature (1)..(186): Homolog of NCBI NO: 25372796 NR Description: hypothetical protein F9K20.18 [imported] -
  misc_feature (1)..(186): Homolog of NCBI NO: 18412106 NR Description: expressed protein
  misc_feature (1)..(192): Homolog of NCBI NO: 34910864 NR Description: putative pathogenesis related protein
  misc_feature (1)..(192): Homolog of NCBI NO: 34910862 NR Description: putative pathogenesis related protein
MELSHKARIEDFKSVSPGRFTLSVNGGRALTGEETLAMGSYNALLASPILPGTGAYDATAETFESSHDLFRSAFPRGFAWEVVKVYSGPPVIAFKFRHWGHMEGPYKGHAPTGDKVEFYGVAVLKVDEQLRAEDVEVFYDPGELLAGLIKGPKEEDEAAAALAGRLREAATVSASGADAQPQACPFLGSGKQG

SEQ ID NO: 63418 - DNA, 1241 bp, Triticum aestivum
  misc_feature (1)..(1241): Ceres Seq. ID no. 13655720
gtccgtgtccaaaaccgagcaaaacctcaaagcgcagacaagagaaggtcgctcgccaccgaggggaatggcggcgccgccggacagcaagtctgataaatccccagaggagctcctgtgcgcggcggcggaggccggtaacgacgatgctatcgccgagatcatttcctctggcgccgaccccacctacttcgacgcctccggcatgacgccactcatgcgcgcggcctccggcggccacgccgctgccgcgcggctcctgctcgatgccggcgcgccctggaacgcgctctcccccgaaggtctctccgcgggtgaccttacctccgaccccgccacatacgacctgctcctcgaccacgccctgcgctccgagctcatcctcggcaccgtcgcccgccgccaggcggcctccgcgaactcctccgacggcgtccccgccgagacctacctcgactcgagggtttcgttcagcgaggaccgggtgatggatgcggagagcaaggcggtgatgatggagtgggagcgtccgctgatggaggcgcacgcgcgggcggtgtgcgccgccggcggcggcaaggtgctcaacgtggggttcgggatggggctcgtggaccaggcgatacagaggtacgagcccgaggagcacaccatcatcgaggcccacccggaggtttacgcccggatgctcaagcttgggtggggtgagaagaagaacgtcaggatcctcttcgggcgatggcaggatgtgatcccgcagctcggctcgtatgatggtatattcttcgacacctacggggagtactacgaggacatgagggagttccacgagcacctcccgaagctgctgaatccgggaggggtctactcctacttcaatgggctgtgcggcgacaatgccttcttccacgtggtgtactgccagctggtggcgatggagctggcgagcctcgggtactcgacgcagttcgtccctctccccgtcagggactgcctcaaggcggaggtgtgggagggggtgaagcagaagtactggcagctcgacacctaccacctcccggtctgccaggccgaatctgaatcagagtagaatttctaccgtgttgctactgatcgagttttcgctagctcttcgctgctgctgtaagtttgttcaggtcttcaggatcaggtcaagcttgcctgcgtgcgtgtttgtggattgcagtcgatgatagaactcccgtggaaaatttggttcc

SEQ ID NO: 63419 - protein, 362 aa, Triticum aestivum
  peptide (1)..(362): Ceres Seq. ID no. 13655721
  misc_feature (67)..(99): Pfam Name: Ankyrin repeat Pfam Description: Ankyrin repeat
  misc_feature (152)..(293): Homolog of NCBI NO: 27924205 NR Description: Similar to Guanidinoacetate methyltransferase
  misc_feature (241)..(355): Homolog of NCBI NO: 32416678 NR Description: hypothetical protein [Neurospora crassa]
  misc_feature (130)..(328): Homolog of NCBI NO: 32416678 NR Description: hypothetical protein [Neurospora crassa]
  misc_feature (85)..(353): Homolog of NCBI NO: 6320673 NR Description: Protein Arginine Methyltransferase
  misc_feature (127)..(356): Homolog of NCBI NO: 40738857 NR Description: hypothetical protein AN6072.2 [Aspergillus
  misc_feature (87)..(354): Homolog of NCBI NO: 19115072 NR Description: hypothetical protein [Schizosaccharomyces pombe]
  misc_feature (87)..(354): Homolog of NCBI NO: 25777560 NR Description: hypothetical protein SPAC26A3.17c - fission yeast
  misc_feature (87)..(354): Homolog of NCBI NO: 12644401 NR Description: Hypothetical protein C26A3.17c in chromosome I
  misc_feature (39)..(356): Homolog of NCBI NO: 15239183 NR Description: hypothetical protein [Arabidopsis thaliana]
  misc_feature (23)..(362): Homolog of NCBI NO: 14488376 NR Description: putative methyltransferase
SVSKTEQNLKAQTREGRSPPRGMAAPPDSKSDKSPEELLCAAAEAGNDDAIAEIISSGADPTYFDASGMTPLMRAASGGHAAAARLLLDAGAPWNALSPEGLSAGDLTSDPATYDLLLDHALRSELILGTVARRQAASANSSDGVPAETYLDSRVSFSEDRVMDAESKAVMMEWERPLMEAHARAVCAAGGGKVLNVGFGMGLVDQAIQRYEPEEHTIIEAHPEVYARMLKLGWGEKKNVRILFGRWQDVIPQLGSYDGIFFDTYGEYYEDMREFHEHLPKLLNPGGVYSYFNGLCGDNAFFHVVYCQLVAMELASLGYSTQFVPLPVRDCLKAEVWEGVKQKYWQLDTYHLPVCQAESESE

SEQ ID NO: 63420 - protein, 340 aa, Triticum aestivum
  peptide (1)..(340): Ceres Seq. ID no. 13655722
  misc_feature (45)..(77): Pfam Name: Ankyrin repeat Pfam Description: Ankyrin repeat
  misc_feature (130)..(271): Homolog of NCBI NO: 27924205 NR Description: Similar to Guanidinoacetate methyltransferase
  misc_feature (219)..(333): Homolog of NCBI NO: 32416678 NR Description: hypothetical protein [Neurospora crassa]
  misc_feature (108)..(306): Homolog of NCBI NO: 32416678 NR Description: hypothetical protein [Neurospora crassa]
  misc_feature (63)..(331): Homolog of NCBI NO: 6320673 NR Description: Protein Arginine Methyltransferase
  misc_feature (105)..(334): Homolog of NCBI NO: 40738857 NR Description: hypothetical protein AN6072.2 [Aspergillus
  misc_feature (65)..(332): Homolog of NCBI NO: 25777560 NR Description: hypothetical protein SPAC26A3.17c - fission yeast
  misc_feature (65)..(332): Homolog of NCBI NO: 19115072 NR Description: hypothetical protein [Schizosaccharomyces pombe]
  misc_feature (65)..(332): Homolog of NCBI NO: 12644401 NR Description: Hypothetical protein C26A3.17c in chromosome I
  misc_feature (17)..(334): Homolog of NCBI NO: 15239183 NR Description: hypothetical protein [Arabidopsis thaliana]
  misc_feature (1)..(340): Homolog of NCBI NO: 14488376 NR Description: putative methyltransferase
MAAPPDSKSDKSPEELLCAAAEAGNDDAIAEIISSGADPTYFDASGMTPLMRAASGGHAAAARLLLDAGAPWNALSPEGLSAGDLTSDPATYDLLLDHALRSELILGTVARRQAASANSSDGVPAETYLDSRVSFSEDRVMDAESKAVMMEWERPLMEAHARAVCAAGGGKVLNVGFGMGLVDQAIQRYEPEEHTIIEAHPEVYARMLKLGWGEKKNVRILFGRWQDVIPQLGSYDGIFFDTYGEYYEDMREFHEHLPKLLNPGGVYSYFNGLCGDNAFFHVVYCQLVAMELASLGYSTQFVPLPVRDCLKAEVWEGVKQKYWQLDTYHLPVCQAESESE

SEQ ID NO: 63421 - protein, 294 aa, Triticum aestivum
  peptide (1)..(294): Ceres Seq. ID no. 13655723
  misc_feature (1)..(31): Pfam Name: Ankyrin repeat Pfam Description: Ankyrin repeat
  misc_feature (84)..(225): Homolog of NCBI NO: 27924205 NR Description: Similar to Guanidinoacetate methyltransferase
  misc_feature (173)..(287): Homolog of NCBI NO: 32416678 NR Description: hypothetical protein [Neurospora crassa]
  misc_feature (62)..(260): Homolog of NCBI NO: 32416678 NR Description: hypothetical protein [Neurospora crassa]
  misc_feature (17)..(285): Homolog of NCBI NO: 6320673 NR Description: Protein Arginine Methyltransferase
  misc_feature (59)..(288): Homolog of NCBI NO: 40738857 NR Description: hypothetical protein AN6072.2 [Aspergillus
  misc_feature (19)..(286): Homolog of NCBI NO: 19115072 NR Description: hypothetical protein [Schizosaccharomyces pombe]
  misc_feature (19)..(286): Homolog of NCBI NO: 25777560 NR Description: hypothetical protein SPAC26A3.17c - fission yeast
  misc_feature (19)..(286): Homolog of NCBI NO: 12644401 NR Description: Hypothetical protein C26A3.17c in chromosome I
  misc_feature (1)..(288): Homolog of NCBI NO: 15239183 NR Description: hypothetical protein [Arabidopsis thaliana]
  misc_feature (1)..(294): Homolog of NCBI NO: 14488376 NR Description: putative methyltransferase
MTPLMRAASGGHAAAARLLLDAGAPWNALSPEGLSAGDLTSDPATYDLLLDHALRSELILGTVARRQAASANSSDGVPAETYLDSRVSFSEDRVMDAESKAVMMEWERPLMEAHARAVCAAGGGKVLNVGFGMGLVDQAIQRYEPEEHTIIEAHPEVYARMLKLGWGEKKNVRILFGRWQDVIPQLGSYDGIFFDTYGEYYEDMREFHEHLPKLLNPGGVYSYFNGLCGDNAFFHVVYCQLVAMELASLGYSTQFVPLPVRDCLKAEVWEGVKQKYWQLDTYHLPVCQAESESE

SEQ ID NO: 63422 - DNA, 1368 bp, Triticum aestivum
  misc_feature (1)..(1368): Ceres Seq. ID no. 13597205
actcctcccctaaaagaactccggtggcgtactactagaaaacagcagagacggctgtgccctgctcctccttctcgccggtgccttctgctggaggcaaacgaaactcctcctcctcctcctgcccctctctcccacgcttcccccttcgtctccgtcgacaggaagcaaccaggagaggcgaggcggcgacgatgcagatgaagcagaaggtctacgagctctacaaggggacggtggagcgggtcacgggcccgcgcaccgtctcggcgttcctcgagaagggcgtcctctccgtccccgagttcatcctcgccggcgacaacctcgtatccaagtgcccaacctggtcctgggaggcgggcgatccgagcaagaggaagccatacctcccctccgataagcagttcctcgtcaccaggaacgtgccctgcctaagacgagctgtggcggtcgaggaagagtatgatgcagcgggagctgaggttgttctcgatgatgatgaggatggcgaaggctggctcgcaacacatgggctgcaagcatcagagtcaaaagaggaggaagacataccgtctatggatacattggacatagggaaagtcgaagagatcaaatctatcccctcctactttggtgctagtgaaaagccagatgaggaggaggatatacctgacatggacacctatgaagacacaggagatcattctacagctacccctcagccttcatattttgtcgcagaagagcctgatgatgacaacattcttctcaccagaacatatgatgttagcatcacatatgacaagtactaccaaactccacgtgtctggcttacaggctatgatgaggcaagaatgccattaaagcctgaacttgtgtttcaagatatcagtcaagaccatgcacacaaaacggtgactatcgaagaccatcctcacttgttagtgggacagcacgcttccgtgcatccttgcaagcacgctgctgtgatgaaaaagatcattgatgttatagtgtctcaaggaggtgcaccagaagttgacaagtaccttttcatatttctcaaattcatggcttctgtcatacccaccattgagtatgattacactatggatttcgatctgggcagtacaagcacataagccgcccattgaagaaaagctgaaactcccgagaaggtgagctgttcatggtcgccgaataattgctgctcttcggaaggatctgtacattgtgtccgtgtgtgttggttcgtttggaaatgaactttcaattgtaaactctgatgctctgcaggaagattgtcctgattggtcctcttacggtgtggtgccgcactgatatgacatttgtgattcttcgccg

SEQ ID NO: 63423 - protein, 316 aa, Triticum aestivum
  peptide (1)..(316): Ceres Seq. ID no. 13597206
  misc_feature (6)..(161): Pfam Name: Autophagocytosis associated protein, N-terminal domain Pfam Description: Autophagocytosis associated protein, N-terminal
  misc_feature (5)..(311): Homolog of NCBI NO: 19705511 NR Description: preconditioning-inducible gene 1 protein [Rattus
  misc_feature (5)..(311): Homolog of NCBI NO: 13385890 NR Description: RIKEN cDNA 2610016C12 [Mus musculus]
  misc_feature (13)..(311): Homolog of NCBI NO: 34785406 NR Description: Unknown (protein for MGC:64156) [Danio rerio]
  misc_feature (155)..(310): Homolog of NCBI NO: 28828597 NR Description: hypothetical protein [Dictyostelium discoideum]
  misc_feature (4)..(167): Homolog of NCBI NO: 28828597 NR Description: hypothetical protein [Dictyostelium discoideum]
  misc_feature (1)..(235): Homolog of NCBI NO: 37536838 NR Description: autophagocytosis protein AUT1-like
  misc_feature (1)..(311): Homolog of NCBI NO: 9758466 NR Description: autophagocytosis protein AUT1-like [Arabidopsis
  misc_feature (1)..(316): Homolog of NCBI NO: 21595613 NR Description: autophagocytosis protein-like [Arabidopsis
  misc_feature (1)..(316): Homolog of NCBI NO: 18424474 NR Description: autophagocytosis protein - like [Arabidopsis
  misc_feature (1)..(315): Homolog of NCBI NO: 34903638 NR Description: B1015E06.2 [Oryza sativa (japonica
MQMKQKVYELYKGTVERVTGPRTVSAFLEKGVLSVPEFILAGDNLVSKCPTWSWEAGDPSKRKPYLPSDKQFLVTRNVPCLRRAVAVEEEYDAAGAEVVLDDDEDGEGWLATHGLQASESKEEEDIPSMDTLDIGKVEEIKSIPSYFGASEKPDEEEDIPDMDTYEDTGDHSTATPQPSYFVAEEPDDDNILLTRTYDVSITYDKYYQTPRVWLTGYDEARMPLKPELVFQDISQDHAHKTVTIEDHPHLLVGQHASVHPCKHAAVMKKIIDVIVSQGGAPEVDKYLFIFLKFMASVIPTIEYDYTMDFDLGSTST

SEQ ID NO: 63424 - protein, 314 aa, Triticum aestivum
  peptide (1)..(314): Ceres Seq. ID no. 13597207
  misc_feature (4)..(159): Pfam Name: Autophagocytosis associated protein, N-terminal domain Pfam Description: Autophagocytosis associated protein, N-terminal
  misc_feature (3)..(309): Homolog of NCBI NO: 19705511 NR Description: preconditioning-inducible gene 1 protein [Rattus
  misc_feature (3)..(309): Homolog of NCBI NO: 13385890 NR Description: RIKEN cDNA 2610016C12 [Mus musculus]
  misc_feature (11)..(309): Homolog of NCBI NO: 34785406 NR Description: Unknown (protein for MGC:64156) [Danio rerio]
  misc_feature (153)..(308): Homolog of NCBI NO: 28828597 NR Description: hypothetical protein [Dictyostelium discoideum]
  misc_feature (2)..(165): Homolog of NCBI NO: 28828597 NR Description: hypothetical protein [Dictyostelium discoideum]
  misc_feature (1)..(233): Homolog of NCBI NO: 37536838 NR Description: autophagocytosis protein AUT1-like
  misc_feature (1)..(309): Homolog of NCBI NO: 9758466 NR Description: autophagocytosis protein AUT1-like [Arabidopsis
  misc_feature (1)..(314): Homolog of NCBI NO: 21595613 NR Description: autophagocytosis protein-like [Arabidopsis
  misc_feature (1)..(314): Homolog of NCBI NO: 18424474 NR Description: autophagocytosis protein - like [Arabidopsis
  misc_feature (1)..(313): Homolog of NCBI NO: 34903638 NR Description: B1015E06.2 [Oryza sativa (japonica
MKQKVYELYKGTVERVTGPRTVSAFLEKGVLSVPEFILAGDNLVSKCPTWSWEAGDPSKRKPYLPSDKQFLVTRNVPCLRRAVAVEEEYDAAGAEVVLDDDEDGEGWLATHGLQASESKEEEDIPSMDTLDIGKVEEIKSIPSYFGASEKPDEEEDIPDMDTYEDTGDHSTATPQPSYFVAEEPDDDNILLTRTYDVSITYDKYYQTPRVWLTGYDEARMPLKPELVFQDISQDHAHKTVTIEDHPHLLVGQHASVHPCKHAAVMKKIIDVIVSQGGAPEVDKYLFIFLKFMASVIPTIEYDYTMDFDLGSTST

SEQ ID NO: 63425 - protein, 188 aa, Triticum aestivum
  peptide (1)..(188): Ceres Seq. ID no. 13597208
  misc_feature (61)..(179): Pfam Name: Autophagocytosis associated protein, C-terminal domain Pfam Description: Autophagocytosis associated protein, C-terminal
  misc_feature (1)..(183): Homolog of NCBI NO: 19705511 NR Description: preconditioning-inducible gene 1 protein [Rattus
  misc_feature (1)..(183): Homolog of NCBI NO: 13385890 NR Description: RIKEN cDNA 2610016C12 [Mus musculus]
  misc_feature (1)..(183): Homolog of NCBI NO: 34785406 NR Description: Unknown (protein for MGC:64156) [Danio rerio]
  misc_feature (27)..(182): Homolog of NCBI NO: 28828597 NR Description: hypothetical protein [Dictyostelium discoideum]
  misc_feature (1)..(39): Homolog of NCBI NO: 28828597 NR Description: hypothetical protein [Dictyostelium discoideum]
  misc_feature (1)..(107): Homolog of NCBI NO: 37536838 NR Description: autophagocytosis protein AUT1-like
  misc_feature (1)..(183): Homolog of NCBI NO: 9758466 NR Description: autophagocytosis protein AUT1-like [Arabidopsis
  misc_feature (1)..(188): Homolog of NCBI NO: 21595613 NR Description: autophagocytosis protein-like [Arabidopsis
  misc_feature (1)..(188): Homolog of NCBI NO: 18424474 NR Description: autophagocytosis protein - like [Arabidopsis
  misc_feature (1)..(187): Homolog of NCBI NO: 34903638 NR Description: B1015E06.2 [Oryza sativa (japonica
MDTLDIGKVEEIKSIPSYFGASEKPDEEEDIPDMDTYEDTGDHSTATPQPSYFVAEEPDDDNILLTRTYDVSITYDKYYQTPRVWLTGYDEARMPLKPELVFQDISQDHAHKTVTIEDHPHLLVGQHASVHPCKHAAVMKKIIDVIVSQGGAPEVDKYLFIFLKFMASVIPTIEYDYTMDFDLGSTST

SEQ ID NO: 63426 - DNA, 1542 bp, Triticum aestivum
  misc_feature (1)..(1542): Ceres Seq. ID no. 13597389
acattttgccacttgatcattaatggtctcccccttcgtcacccctaaacagaaatcaaatctgcctccctaaaccgcaaagcttcaagcaccagcgacctccctccatctccgtcccttctactcttctcacccatctcccctccctcccatggctggagtaaacacgaaccacaaggatagtacaaagtagtgcagcggagtggcgtggggagctggtcaagcgcagcagcctagctcagctccatcctcacagcatccaacctccaaccaccgccgcgaccatgcgtgccgccgtggcgctcctcctcgccgccgtcctctgcctcggcggcggcggtgcggcgtccgcgtcgccggactttgactacccggcggcgttcaacttcggcgactccaactccgacacgggcggccgcatcgccgcgggcttcgagcccatgcccccgccctacggctccaccttcttcggcgccccctccggccgcttctccgacggccgcctcatcctcgacttcctcatggatgcgatggatatgccattcctcaatgcatacttggattctcttggtgcgcctaacttccgggcaggtgttaattttgctcaagctggctgttcgattactccagcaagtgcaacatctgtcagcccgttttcatttggtcttcagattaagcaattctttgccttcaaggaaaaagtcactagcctgctctccaaaggagataggtaccgtcggtatattcctcagttggattacttttcgaagggactctacatgtttgatataggtcaaaatgaccttgctggtcaattctactccagaacagaggaccaagtcattgcatccattccgactattttgttggaatttgaaactgggctcaagactctatacgatcagggtgccaggaagttctggattcacaacacaggtcctcttggctgcttacctcaaaacatagatctttttggcaaagacccaacacaactggatgaacttcattgtgtagcaaagcacaatcgtgctgcaaagattttcaacttacagctgcatgcactttgcacaaagttgagaggccagtttgctggagctaatatcacttacatcgacatctactccatcaaatatgccctgattggcaattactctcgatatggatttgaaagtcccaccgaagcatgctgtggatacggaggaccacccctgaattatgatggccgagtgccgtgtggacagacgaaatctgttaacggtaatctcgtaaccgcgaaaggatgcagtgacagcactgagtatgtcaactgggatggaatacattacacggaagctgcaaatttccacgttacatcgcagattctgaccgggaagtactcagatcctccgttcgtcgacaagatgccattccttataaaaccgaggttctaatgagcgggtatttattcccacaactgaattagtaaaccaatgtaatgttgtattgaccacaacagatgtattatttatcacatgtcaataatcacatatagcttcttttttc

SEQ ID NO: 63427 - protein, 381 aa, Triticum aestivum
  peptide (1)..(381): Ceres Seq. ID no. 13597390
  misc_feature (34)..(359): Pfam Name: GDSL-like Lipase/Acylhydrolase Pfam Description: GDSL-like Lipase/Acylhydrolase
  misc_feature (3)..(368): Homolog of NCBI NO: 33147016 NR Description: putative early nodulin 8 precursor
  misc_feature (293)..(368): Homolog of NCBI NO: 34901120 NR Description: contains ESTs
  misc_feature (1)..(293): Homolog of NCBI NO: 34901120 NR Description: contains ESTs
  misc_feature (1)..(368): Homolog of NCBI NO: 33147015 NR Description: putative early nodulin 8 precursor
  misc_feature (28)..(366): Homolog of NCBI NO: 23397291 NR Description: putative nodulin [Arabidopsis thaliana]
  misc_feature (28)..(366): Homolog of NCBI NO: 15229919 NR Description: GDSL-motif lipase/hydrolase protein [Arabidopsis
  misc_feature (28)..(366): Homolog of NCBI NO: 21553789 NR Description: putative nodulin [Arabidopsis thaliana]
  misc_feature (22)..(381): Homolog of NCBI NO: 21537184 NR Description: early nodule-specific protein, putative
  misc_feature (22)..(381): Homolog of NCBI NO: 18405064 NR Description: GDSL-motif lipase/hydrolase protein [Arabidopsis
  misc_feature (29)..(381): Homolog of NCBI NO: 25405771 NR Description: hypothetical protein T22H22.20 [imported] -
MRAAVALLLAAVLCLGGGGAASASPDFDYPAAFNFGDSNSDTGGRIAAGFEPMPPPYGSTFFGAPSGRFSDGRLILDFLMDAMDMPFLNAYLDSLGAPNFRAGVNFAQAGCSITPASATSVSPFSFGLQIKQFFAFKEKVTSLLSKGDRYRRYIPQLDYFSKGLYMFDIGQNDLAGQFYSRTEDQVIASIPTILLEFETGLKTLYDQGARKFWIHNTGPLGCLPQNIDLFGKDPTQLDELHCVAKHNRAAKIFNLQLHALCTKLRGQFAGANITYIDIYSIKYALIGNYSRYGFESPTEACCGYGGPPLNYDGRVPCGQTKSVNGNLVTAKGCSDSTEYVNWDGIHYTEAANFHVTSQILTGKYSDPPFVDKMPFLIKPRF

SEQ ID NO: 63428 - protein, 329 aa, Triticum aestivum
  peptide (1)..(329): Ceres Seq. ID no. 13597391
  misc_feature (1)..(307): Pfam Name: GDSL-like Lipase/Acylhydrolase Pfam Description: GDSL-like Lipase/Acylhydrolase
  misc_feature (1)..(316): Homolog of NCBI NO: 33147016 NR Description: putative early nodulin 8 precursor
  misc_feature (241)..(316): Homolog of NCBI NO: 34901120 NR Description: contains ESTs
  misc_feature (1)..(241): Homolog of NCBI NO: 34901120 NR Description: contains ESTs
  misc_feature (1)..(316): Homolog of NCBI NO: 33147015 NR Description: putative early nodulin 8 precursor
  misc_feature (1)..(314): Homolog of NCBI NO: 23397291 NR Description: putative nodulin [Arabidopsis thaliana]
  misc_feature (1)..(314): Homolog of NCBI NO: 15229919 NR Description: GDSL-motif lipase/hydrolase protein [Arabidopsis
  misc_feature (1)..(314): Homolog of NCBI NO: 21553789 NR Description: putative nodulin [Arabidopsis thaliana]
  misc_feature (1)..(329): Homolog of NCBI NO: 21537184 NR Description: early nodule-specific protein, putative
  misc_feature (1)..(329): Homolog of NCBI NO: 18405064 NR Description: GDSL-motif lipase/hydrolase protein [Arabidopsis
  misc_feature (1)..(329): Homolog of NCBI NO: 25405771 NR Description: hypothetical protein T22H22.20 [imported] -
MPPPYGSTFFGAPSGRFSDGRLILDFLMDAMDMPFLNAYLDSLGAPNFRAGVNFAQAGCSITPASATSVSPFSFGLQIKQFFAFKEKVTSLLSKGDRYRRYIPQLDYFSKGLYMFDIGQNDLAGQFYSRTEDQVIASIPTILLEFETGLKTLYDQGARKFWIHNTGPLGCLPQNIDLFGKDPTQLDELHCVAKHNRAAKIFNLQLHALCTKLRGQFAGANITYIDIYSIKYALIGNYSRYGFESPTEACCGYGGPPLNYDGRVPCGQTKSVNGNLVTAKGCSDSTEYVNWDGIHYTEAANFHVTSQILTGKYSDPPFVDKMPFLIKPRF

SEQ ID NO: 63429 - protein, 302 aa, Triticum aestivum
  peptide (1)..(302): Ceres Seq. ID no. 13597392
  misc_feature (1)..(280): Pfam Name: GDSL-like Lipase/Acylhydrolase Pfam Description: GDSL-like Lipase/Acylhydrolase
  misc_feature (1)..(289): Homolog of NCBI NO: 33147016 NR Description: putative early nodulin 8 precursor
  misc_feature (214)..(289): Homolog of NCBI NO: 34901120 NR Description: contains ESTs
  misc_feature (1)..(214): Homolog of NCBI NO: 34901120 NR Description: contains ESTs
  misc_feature (1)..(289): Homolog of NCBI NO: 33147015 NR Description: putative early nodulin 8 precursor
  misc_feature (1)..(287): Homolog of NCBI NO: 23397291 NR Description: putative nodulin [Arabidopsis thaliana]
  misc_feature (1)..(287): Homolog of NCBI NO: 15229919 NR Description: GDSL-motif lipase/hydrolase protein [Arabidopsis
  misc_feature (1)..(287): Homolog of NCBI NO: 21553789 NR Description: putative nodulin [Arabidopsis thaliana]
  misc_feature (1)..(302): Homolog of NCBI NO: 21537184 NR Description: early nodule-specific protein, putative
  misc_feature (1)..(302): Homolog of NCBI NO: 18405064 NR Description: GDSL-motif lipase/hydrolase protein [Arabidopsis
  misc_feature (1)..(302): Homolog of NCBI NO: 25405771 NR Description: hypothetical protein T22H22.20 [imported] -
MDAMDMPFLNAYLDSLGAPNFRAGVNFAQAGCSITPASATSVSPFSFGLQIKQFFAFKEKVTSLLSKGDRYRRYIPQLDYFSKGLYMFDIGQNDLAGQFYSRTEDQVIASIPTILLEFETGLKTLYDQGARKFWIHNTGPLGCLPQNIDLFGKDPTQLDELHCVAKHNRAAKIFNLQLHALCTKLRGQFAGANITYIDIYSIKYALIGNYSRYGFESPTEACCGYGGPPLNYDGRVPCGQTKSVNGNLVTAKGCSDSTEYVNWDGIHYTEAANFHVTSQILTGKYSDPPFVDKMPFLIKPRF

SEQ ID NO: 63430 - DNA, 1470 bp, Triticum aestivum
  misc_feature (1)..(1470): Ceres Seq. ID no. 13584001
aaaaaaaacagagcagggaggtcggccgcgacctaggagctcggcggcggcgaccaccacgagcatcggcggctgcgcagccatgcttggccatctccggcgatcctctggcattctgcgccgcctaccgatcgccagcttcgctccctccgaccctgccgctgcatactcgggatggagttcacacgccgagtcactctcgtttgtttcatgttggtgtggcaagcatgctaccaggaatttctctacagatgataaagttaccaatggtcgtcgagggtatcggcaaaaggagttgaagaagccaagtacggccgtgaaggataatgatgcaatcattgatcgcatacaaaagagcacaagggggttgaaaaaagggccggttgggcacaccctttcatcagcagagaaaaggaaattccttatcaacactcttcttgatcttgaagactcaaaagaagctgtttacagcacccttgatgcatggatcgcctttgagcaggactttccactcgcctcattaaagcaagcaattgtagctcttgaaaaggaggaacaatggcatagagttgtccaagtaataaaatggatgttgagcaaagggcaaggaaataccatcagaacatacgagcaattagtgcgtgcacttgagaaggacaacagagcagaggaagcacataaaatctgggagaagaaaatagcccatgacctgcattcagttccttggcgtttctgcggtcttatgttggcaatttactacagaaacaatatgctagataggcttatcaagctcttcggtgcccttgaagcatgtggtcgcaagtgtcctagtaaagaatatatacggaaagttgaagttgcatatgaaatgcttggtctattagaagagaagaaggatttgcttgaaaagtacaaggatttgtacaataagccatcaaatagtgatagaaagaaagatcgacggttcaagaaggctgagaagaaagctgctgatgatggcagcaaacaattggagatggaaacatctgaaaacttaccagttaactcatgcccttcagataaggaactggttgccagcagttagtcaagataagaaatacaacaccgatggtgagatcagtatcagccaagaacgtgatgcagctagtaatctctaccagtaacacttactgggccaaccaatagtccattactaataggaaagaagcatgaacattgaaacccccttattcttccataaatcattgaagtgcggtgacttccatgttgccttggacaaatatttccgagtgttatcgttcgccaaaaaagttgtaatgtctgaatattggaataagtgggcgcataactgtagtcaacgaagggattacatgaggaaaccagtactttatctcatgtactcagtgtgagaattgttgtgctgacatttctgttttcatactagaaagccaaattcctgttatccatcgc

SEQ ID NO: 63431 - protein, 360 aa, Triticum aestivum
  peptide (1)..(360): Ceres Seq. ID no. 13584002
  misc_feature (148)..(349): Homolog of NCBI NO: 34909686 NR Description: B1131G08.1 [Oryza sativa (japonica
  misc_feature (134)..(321): Homolog of NCBI NO: 34393638 NR Description: pentatricopeptide (PPR) repeat-containing
  misc_feature (109)..(308): Homolog of NCBI NO: 7485419 NR Description: hypothetical protein F13C5.140 - Arabidopsis
  misc_feature (109)..(322): Homolog of NCBI NO: 18415213 NR Description: pentatricopeptide (PPR) repeat-containing protein
  misc_feature (131)..(355): Homolog of NCBI NO: 7486589 NR Description: hypothetical protein F7J7.130 - Arabidopsis
  misc_feature (131)..(355): Homolog of NCBI NO: 18415645 NR Description: pentatricopeptide (PPR) repeat-containing protein
  misc_feature (140)..(345): Homolog of NCBI NO: 25406795 NR Description: hypothetical protein [imported] - Arabidopsis
  misc_feature (102)..(345): Homolog of NCBI NO: 30678929 NR Description: expressed protein [Arabidopsis thaliana]
  misc_feature (102)..(345): Homolog of NCBI NO: 18390413 NR Description: expressed protein [Arabidopsis thaliana]
KKTEQGGRPRPRSSAAATTTSIGGCAAMLGHLRRSSGILRRLPIASFAPSDPAAAYSGWSSHAESLSFVSCWCGKHATRNFSTDDKVTNGRRGYRQKELKKPSTAVKDNDAIIDRIQKSTRGLKKGPVGHTLSSAEKRKFLINTLLDLEDSKEAVYSTLDAWIAFEQDFPLASLKQAIVALEKEEQWHRVVQVIKWMLSKGQGNTIRTYEQLVRALEKDNRAEEAHKIWEKKIAHDLHSVPWRFCGLMLAIYYRNNMLDRLIKLFGALEACGRKCPSKEYIRKVEVAYEMLGLLEEKKDLLEKYKDLYNKPSNSDRKKDRRFKKAEKKAADDGSKQLEMETSENLPVNSCPSDKELVASS

SEQ ID NO: 63432 - protein, 333 aa, Triticum aestivum
  peptide (1)..(333): Ceres Seq. ID no. 13584003
  misc_feature (121)..(322): Homolog of NCBI NO: 34909686 NR Description: B1131G08.1 [Oryza sativa (japonica
  misc_feature (107)..(294): Homolog of NCBI NO: 34393638 NR Description: pentatricopeptide (PPR) repeat-containing
  misc_feature (82)..(281): Homolog of NCBI NO: 7485419 NR Description: hypothetical protein F13C5.140 - Arabidopsis
  misc_feature (82)..(295): Homolog of NCBI NO: 18415213 NR Description: pentatricopeptide (PPR) repeat-containing protein
  misc_feature (104)..(328): Homolog of NCBI NO: 7486589 NR Description: hypothetical protein F7J7.130 - Arabidopsis
  misc_feature (104)..(328): Homolog of NCBI NO: 18415645 NR Description: pentatricopeptide (PPR) repeat-containing protein
  misc_feature (113)..(318): Homolog of NCBI NO: 25406795 NR Description: hypothetical protein [imported] - Arabidopsis
  misc_feature (75)..(318): Homolog of NCBI NO: 30678929 NR Description: expressed protein [Arabidopsis thaliana]
  misc_feature (75)..(318): Homolog of NCBI NO: 18390413 NR Description: expressed protein [Arabidopsis thaliana]
MLGHLRRSSGILRRLPIASFAPSDPAAAYSGWSSHAESLSFVSCWCGKHATRNFSTDDKVTNGRRGYRQKELKKPSTAVKDNDAIIDRIQKSTRGLKKGPVGHTLSSAEKRKFLINTLLDLEDSKEAVYSTLDAWIAFEQDFPLASLKQAIVALEKEEQWHRVVQVIKWMLSKGQGNTIRTYEQLVRALEKDNRAEEAHKIWEKKIAHDLHSVPWRFCGLMLAIYYRNNMLDRLIKLFGALEACGRKCPSKEYIRKVEVAYEMLGLLEEKKDLLEKYKDLYNKPSNSDRKKDRRFKKAEKKAADDGSKQLEMETSENLPVNSCPSDKELVASS

SEQ ID NO: 63433 - DNA, 1056 bp, Triticum aestivum
  misc_feature (1)..(1056): Ceres Seq. ID no. 15226227
gaggaacttttcgttggatccttcgcttttggggacgaaggaggagaaggtctctgtccctctccacccccacctccacctccgcctcccttcttggctggagaggagcaggaggaggagatgttcccccctggcctgatccaccaccgcacggacggccccgggcccggcgaggtgccgcgctccggcggcgcccccagcctcgtgctcacggcggaccccaagccccgcctccgctggacggccgacctccacgagcgcttcgtcgacgccgtcgcccagctcggcgggcccgagaaagcaacaccaaaaactatcttaaggacaatgggtgtaaagggactaacgcttttccacttgaagagtcatcttcagaaatacagaatgggaaaacaaactgggaaggagacgccggagcaatctaaagatgggtcctaccttcttgatgctcaaggtggaatgagcctgtctcccagagtttctactcaagatgcgaaagaaagccaagaagttaaagaagccctgagagcacagatggagatgcaacgaagcctgcatgaacaagtggaggttcagaagcatgtggacatcaggatggacgcgtacacgacgtacatcaacaccctgctggagaaggcctgcaagatcgtctcagagcagttcgcctcgagcggcttcagcgtctccgaccagagcctcccggagctgtcctccggcggtatcatgtgcggcaccgccaccgacgcgctgagctcctccgtgttccaccagctctccgtcagctcgatcaacatgcacagcccagggggcaagccttctccctcgggcatggaaggccagctgcttctccagaggtcacccgagttcaaacgcaagtcatcctgctgagtccaaaaatctgggtggaaaagttagcttaatcgtctgctgtagacatgtcgaatctcggccaatctgtaaactgacgccaatctgtaaactgactcttgtttctcttgccactgcatgccaagaagcaaggttttttatcgattaatcgtcgacctatgtttatac

SEQ ID NO: 63434 - protein, 295 aa, Triticum aestivum
  peptide (1)..(295): Ceres Seq. ID no. 15226228
  misc_feature (77)..(128): Pfam Name: Myb-like DNA-binding domain Pfam Description: Myb-like DNA-binding domain
  misc_feature (173)..(215): Homolog of NCBI NO: 15242435 NR Description: hypothetical protein [Arabidopsis thaliana]
  misc_feature (68)..(159): Homolog of NCBI NO: 15242435 NR Description: hypothetical protein [Arabidopsis thaliana]
  misc_feature (68)..(248): Homolog of NCBI NO: 32470629 NR Description: putative phosphate starvation response regulator
  misc_feature (68)..(237): Homolog of NCBI NO: 7485694 NR Description: hypothetical protein F18A5.30 - Arabidopsis
  misc_feature (64)..(224): Homolog of NCBI NO: 30699418 NR Description: transfactor -related [Arabidopsis thaliana]
  misc_feature (64)..(224): Homolog of NCBI NO: 25406584 NR Description: hypothetical protein T8K14.15 [imported] -
  misc_feature (48)..(237): Homolog of NCBI NO: 11994231 NR Description: contains similarity to transfactor~gene_id:MUJ8.2
  misc_feature (68)..(237): Homolog of NCBI NO: 18414049 NR Description: expressed protein [Arabidopsis thaliana]
  misc_feature (48)..(237): Homolog of NCBI NO: 18404044 NR Description: transfactor -related [Arabidopsis thaliana]
  misc_feature (41)..(293): Homolog of NCBI NO: 29647444 NR Description: transfactor-like [Oryza sativa (japonica
EELFVGSFAFGDEGGEGLCPSPPPPPPPPPFLAGEEQEEEMFPPGLIHHRTDGPGPGEVPRSGGAPSLVLTADPKPRLRWTADLHERFVDAVAQLGGPEKATPKTILRTMGVKGLTLFHLKSHLQKYRMGKQTGKETPEQSKDGSYLLDAQGGMSLSPRVSTQDAKESQEVKEALRAQMEMQRSLHEQVEVQKHVDIRMDAYTTYINTLLEKACKIVSEQFASSGFSVSDQSLPELSSGGIMCGTATDALSSSVFHQLSVSSINMHSPGGKPSPSGMEGQLLLQRSPEFKRKSSC

SEQ ID NO: 63435 - protein, 255 aa, Triticum aestivum
  peptide (1)..(255): Ceres Seq. ID no. 15226229
  misc_feature (37)..(88): Pfam Name: Myb-like DNA-binding domain Pfam Description: Myb-like DNA-binding domain
  misc_feature (133)..(175): Homolog of NCBI NO: 15242435 NR Description: hypothetical protein [Arabidopsis thaliana]
  misc_feature (28)..(119): Homolog of NCBI NO: 15242435 NR Description: hypothetical protein [Arabidopsis thaliana]
  misc_feature (28)..(208): Homolog of NCBI NO: 32470629 NR Description: putative phosphate starvation response regulator
  misc_feature (28)..(197): Homolog of NCBI NO: 7485694 NR Description: hypothetical protein F18A5.30 - Arabidopsis
  misc_feature (24)..(184): Homolog of NCBI NO: 30699418 NR Description: transfactor -related [Arabidopsis thaliana]
  misc_feature (24)..(184): Homolog of NCBI NO: 25406584 NR Description: hypothetical protein T8K14.15 [imported] -
  misc_feature (8)..(197): Homolog of NCBI NO: 11994231 NR Description: contains similarity to transfactor~gene_id:MUJ8.2
  misc_feature (28)..(197): Homolog of NCBI NO: 18414049 NR Description: expressed protein [Arabidopsis thaliana]
  misc_feature (8)..(197): Homolog of NCBI NO: 18404044 NR Description: transfactor -related [Arabidopsis thaliana]
  misc_feature (1)..(253): Homolog of NCBI NO: 29647444 NR Description: transfactor-like [Oryza sativa (japonica
MFPPGLIHHRTDGPGPGEVPRSGGAPSLVLTADPKPRLRWTADLHERFVDAVAQLGGPEKATPKTILRTMGVKGLTLFHLKSHLQKYRMGKQTGKETPEQSKDGSYLLDAQGGMSLSPRVSTQDAKESQEVKEALRAQMEMQRSLHEQVEVQKHVDIRMDAYTTYINTLLEKACKIVSEQFASSGFSVSDQSLPELSSGGIMCGTATDALSSSVFHQLSVSSINMHSPGGKPSPSGMEGQLLLQRSPEFKRKSSC

SEQ ID NO: 63436 - protein, 186 aa, Triticum aestivum
  peptide (1)..(186): Ceres Seq. ID no. 15226230
  misc_feature (64)..(106): Homolog of NCBI NO: 15242435 NR Description: hypothetical protein [Arabidopsis thaliana]
  misc_feature (1)..(50): Homolog of NCBI NO: 15242435 NR Description: hypothetical protein [Arabidopsis thaliana]
  misc_feature (1)..(139): Homolog of NCBI NO: 32470629 NR Description: putative phosphate starvation response regulator
  misc_feature (1)..(128): Homolog of NCBI NO: 7485694 NR Description: hypothetical protein F18A5.30 - Arabidopsis
  misc_feature (1)..(115): Homolog of NCBI NO: 30699418 NR Description: transfactor -related [Arabidopsis thaliana]
  misc_feature (1)..(115): Homolog of NCBI NO: 25406584 NR Description: hypothetical protein T8K14.15 [imported] -
  misc_feature (1)..(128): Homolog of NCBI NO: 11994231 NR Description: contains similarity to transfactor~gene_id:MUJ8.2
  misc_feature (1)..(128): Homolog of NCBI NO: 18414049 NR Description: expressed protein [Arabidopsis thaliana]
  misc_feature (1)..(128): Homolog of NCBI NO: 18404044 NR Description: transfactor -related [Arabidopsis thaliana]
  misc_feature (1)..(184): Homolog of NCBI NO: 29647444 NR Description: transfactor-like [Oryza sativa (japonica
MGVKGLTLFHLKSHLQKYRMGKQTGKETPEQSKDGSYLLDAQGGMSLSPRVSTQDAKESQEVKEALRAQMEMQRSLHEQVEVQKHVDIRMDAYTTYINTLLEKACKIVSEQFASSGFSVSDQSLPELSSGGIMCGTATDALSSSVFHQLSVSSINMHSPGGKPSPSGMEGQLLLQRSPEFKRKSSC

SEQ ID NO: 63437 - DNA, 1193 bp, Triticum aestivum
  misc_feature (1)..(1193): Ceres Seq. ID no. 14302004
ctcccatcaccggtttcgaaatccatccatccaaaccagcggaagaagaagaaaagaaaaagagaaaaatccacgcgaaagggcgagcgcaggacagggacgaacaaccttgcgtgcgaggcgaggccgctccgattcgacagacgcaggcgcagcgcagggatggacgccttctactcgacctcgtcggcggcggccagcggatggggctacgactccctcaagaacttccgcgagatctcccccgccgtgcagtcccacctcaagctcgtttacctgaccctatgctttgccctggcctcatctgccgtgggtgcttacctgcacattgccctgaacattggcgggatgctgacaatgctcgcgtgtatcggaaccatcgcctggatgttctcggtgccagtctatgaggagaggaagaggtttgggctgctgatgggtgcagccctcctggaaggggcttcagttggacctctgattgagcttgccatagactttgacccaagcatcctcgtgacagggtttgtcggaaccgccatcgccttcgggtgcttctctggcgccgccatcatcgccaagcgcagggagtacctgtacctcggcggcctgctctcctctggcctgtcgatcctgctctggctgcagtttgccacgtccatctttggccactcctctggcagcttcatgtttgaggtttactttggcctgttgatcttcctggggtacatggtgtacgacacgcaggagatcatcgagagggcgcaccacggtgacatggactacatcaagcacgcgctcaccctcttcaccgacttcgtcgccgtcctcgtccgcatcctcatcatcatgctcaagaacgcaggcgacaagtcggaggacaagaagaagaggaagaggaggtcctgaacgtgtcctctgcacatcgtagataccatcaccaccgcgctactggtaccaccaccactgctaagtacttgtaggaattaagctggcgcagtaacttggcgccgtgccacccttgttaattcgcgctcgtgtgaacattgtgtgagtttgatgctgctgatgaagcatttgcagatgctgtctgcgttccggatctcttgtgttcctgttaccgtcacgataatagaaacctgagacgatttggtttggtttacgaagaacatggctatgcttgtttgtgattgaag

SEQ ID NO: 63438 - protein, 301 aa, Triticum aestivum
  peptide (1)..(301): Ceres Seq. ID no. 14302005
  misc_feature (78)..(287): Pfam Name: Uncharacterised protein family UPF0005 Pfam Description: Uncharacterised protein family UPF0005
  misc_feature (71)..(295): Homolog of NCBI NO: 21311961 NR Description: testis enhanced gene transcript; Bax inhibitor-1
  misc_feature (69)..(295): Homolog of NCBI NO: 15236582 NR Description: Bax inhibitor-1 (BI1) family [Arabidopsis
  misc_feature (61)..(206): Homolog of NCBI NO: 27526517 NR Description: putative BAX inhibitor 1 [Hordeum vulgare subsp.
  misc_feature (55)..(297): Homolog of NCBI NO: 17981376 NR Description: bax inhibitor-like protein [Brassica oleracea]
  misc_feature (55)..(299): Homolog of NCBI NO: 14719274 NR Description: Bax inhibitor 1 [Brassica napus]
  misc_feature (55)..(298): Homolog of NCBI NO: 15238017 NR Description: Bax inhibitor-1 (BI-1), putative [Arabidopsis
  misc_feature (55)..(298): Homolog of NCBI NO: 21593125 NR Description: Bax inhibitor-1 like [Arabidopsis thaliana]
  misc_feature (58)..(298): Homolog of NCBI NO: 14719276 NR Description: Bax inhibitor 1 [Nicotiana tabacum]
  misc_feature (55)..(299): Homolog of NCBI NO: 12229685 NR Description: Bax inhibitor-1 (BI-1) (OsBI-1)
  misc_feature (55)..(301): Homolog of NCBI NO: 13940165 NR Description: BAX inhibitor 1 [Hordeum vulgare subsp. vulgare]
LPSPVSKSIHPNQRKKKKRKREKSTRKGERRTGTNNLACEARPLRFDRRRRSAGMDAFYSTSSAAASGWGYDSLKNFREISPAVQSHLKLVYLTLCFALASSAVGAYLHIALNIGGMLTMLACIGTIAWMFSVPVYEERKRFGLLMGAALLEGASVGPLIELAIDFDPSILVTGFVGTAIAFGCFSGAAIIAKRREYLYLGGLLSSGLSILLWLQFATSIFGHSSGSFMFEVYFGLLIFLGYMVYDTQEIIERAHHGDMDYIKHALTLFTDFVAVLVRILIIMLKNAGDKSEDKKKRKRRS

SEQ ID NO: 63439 - protein, 247 aa, Triticum aestivum
  peptide (1)..(247): Ceres Seq. ID no. 14302006
  misc_feature (24)..(233): Pfam Name: Uncharacterised protein family UPF0005 Pfam Description: Uncharacterised protein family UPF0005
  misc_feature (17)..(241): Homolog of NCBI NO: 21311961 NR Description: testis enhanced gene transcript; Bax inhibitor-1
  misc_feature (15)..(241): Homolog of NCBI NO: 15236582 NR Description: Bax inhibitor-1 (BI1) family [Arabidopsis
  misc_feature (7)..(152): Homolog of NCBI NO: 27526517 NR Description: putative BAX inhibitor 1 [Hordeum vulgare subsp.
  misc_feature (1)..(243): Homolog of NCBI NO: 17981376 NR Description: bax inhibitor-like protein [Brassica oleracea]
  misc_feature (1)..(245): Homolog of NCBI NO: 14719274 NR Description: Bax inhibitor 1 [Brassica napus]
  misc_feature (1)..(244): Homolog of NCBI NO: 15238017 NR Description: Bax inhibitor-1 (BI-1), putative [Arabidopsis
  misc_feature (1)..(244): Homolog of NCBI NO: 21593125 NR Description: Bax inhibitor-1 like [Arabidopsis thaliana]
  misc_feature (4)..(244): Homolog of NCBI NO: 14719276 NR Description: Bax inhibitor 1 [Nicotiana tabacum]
  misc_feature (1)..(245): Homolog of NCBI NO: 12229685 NR Description: Bax inhibitor-1 (BI-1) (OsBI-1)
  misc_feature (1)..(247): Homolog of NCBI NO: 13940165 NR Description: BAX inhibitor 1 [Hordeum vulgare subsp. vulgare]
MDAFYSTSSAAASGWGYDSLKNFREISPAVQSHLKLVYLTLCFALASSAVGAYLHIALNIGGMLTMLACIGTIAWMFSVPVYEERKRFGLLMGAALLEGASVGPLIELAIDFDPSILVTGFVGTAIAFGCFSGAAIIAKRREYLYLGGLLSSGLSILLWLQFATSIFGHSSGSFMFEVYFGLLIFLGYMVYDTQEIIERAHHGDMDYIKHALTLFTDFVAVLVRILIIMLKNAGDKSEDKKKRKRRS

SEQ ID NO: 63440 - protein, 185 aa, Triticum aestivum
  peptide (1)..(185): Ceres Seq. ID no. 14302007
  misc_feature (1)..(171): Pfam Name: Uncharacterised protein family UPF0005 Pfam Description: Uncharacterised protein family UPF0005
  misc_feature (1)..(179): Homolog of NCBI NO: 21311961 NR Description: testis enhanced gene transcript; Bax inhibitor-1
  misc_feature (1)..(179): Homolog of NCBI NO: 15236582 NR Description: Bax inhibitor-1 (BI1) family [Arabidopsis
  misc_feature (1)..(90): Homolog of NCBI NO: 27526517 NR Description: putative BAX inhibitor 1 [Hordeum vulgare subsp.
  misc_feature (1)..(181): Homolog of NCBI NO: 17981376 NR Description: bax inhibitor-like protein [Brassica oleracea]
  misc_feature (1)..(183): Homolog of NCBI NO: 14719274 NR Description: Bax inhibitor 1 [Brassica napus]
  misc_feature (1)..(182): Homolog of NCBI NO: 15238017 NR Description: Bax inhibitor-1 (BI-1), putative [Arabidopsis
  misc_feature (1)..(182): Homolog of NCBI NO: 21593125 NR Description: Bax inhibitor-1 like [Arabidopsis thaliana]
  misc_feature (1)..(182): Homolog of NCBI NO: 14719276 NR Description: Bax inhibitor 1 [Nicotiana tabacum]
  misc_feature (1)..(183): Homolog of NCBI NO: 12229685 NR Description: Bax inhibitor-1 (BI-1) (OsBI-1)
  misc_feature (1)..(185): Homolog of NCBI NO: 13940165 NR Description: BAX inhibitor 1 [Hordeum vulgare subsp. vulgare]
MLTMLACIGTIAWMFSVPVYEERKRFGLLMGAALLEGASVGPLIELAIDFDPSILVTGFVGTAIAFGCFSGAAIIAKRREYLYLGGLLSSGLSILLWLQFATSIFGHSSGSFMFEVYFGLLIFLGYMVYDTQEIIERAHHGDMDYIKHALTLFTDFVAVLVRILIIMLKNAGDKSEDKKKRKRRS

SEQ ID NO: 63441 - DNA, 1249 bp, Triticum aestivum
  misc_feature (1)..(1249): Ceres Seq. ID no. 13584416
caaaccaaatcaagcgcttcctccgccgctgcccaacagctcgcacccggctcccattcattctcttggcaaatcgcccagttcatcctaaattaccagctctcctcggcttcccttcctccaaatcgtcggcgttttcttcctctggttctctgcctgtgtgtccgagtttcttgatcgacaagggcatggcgacgacggtggactggcgcagctataggcccgatcttcctgccgcgatgtatcacatggtggacagcagggaccaggtaatgcacgcgtttgctccggcgacggcgcagggcgcggctccgaccatctcgttcgccttcccctgccccggcgcggagcagagcgccggcctgcttcgtggcgccagctacctcactcccgcgcaaatcctccagctccagtcgcagctgcaccacgtgcgccgggcgccgggcgcggccatggccgcggtggggcagccgatgaagcggcacggcgtggcagcgctcccggcgcggccggcgaccaagctttaccgcggcgtaaggcagcggcattgggggaagtgggtcgccgagatccgcctgccccgcaaccgcacccgcctctggctcggcaccttcgacaccgccgacgaggccgcgctggcctacgacgccgccgccttccggctccgcggcgagtccgccaggctcaacttccccgagctcaggcgcggcggcgagcaccacggcccgccgctcgacgccgcgatcgacgccaagctccgctccatctgccacggggaagacatgccccagagccagagcgatgagacgccggcgccgacgacgacactgacgccgatttctttcccggacgtcaagagcgagccagtctgctccgtctccgagagctcgtcgtcggctgacggcgaggtgtcctcgtgctccgacgtcgtcccggagatgcagcttcttgatttctcggaggctccatgggacgagttcctgctgcgcaagtacccgtcgctcgagatcgactgggacgcgatcctttcttgaatcaagttcatgcttgatccacagctcgtccaaagtgattacttctgctttcattaggctcttggataggttattatgggtttggtcaagtattcatgtgtaacatcaacccctgctctgcttggtttttgaatggcattgccaggaaggaggttttatgtagaaatttaagtctgtcatgtagttttgtgattcaataaagatacactttggtt

SEQ ID NO: 63442 - protein, 343 aa, Triticum aestivum
  peptide (1)..(343): Ceres Seq. ID no. 15222791
  misc_feature (173)..(236): Pfam Name: AP2 domain Pfam Description: AP2 domain
  misc_feature (107)..(341): Homolog of NCBI NO: 27436378 NR Description: dehydration-responsive element binding protein 3
  misc_feature (164)..(343): Homolog of NCBI NO: 2281633 NR Description: AP2 domain containing protein RAP2.4 [Arabidopsis
  misc_feature (124)..(341): Homolog of NCBI NO: 15238359 NR Description: AP2 domain transcription factor, putative
  misc_feature (64)..(307): Homolog of NCBI NO: 37533596 NR Description: putative AP2-domain transcriptional regulator
  misc_feature (87)..(341): Homolog of NCBI NO: 15236020 NR Description: AP2 domain transcription factor, putative
  misc_feature (117)..(343): Homolog of NCBI NO: 15218204 NR Description: AP2 domain transcription factor RAP2.4
  misc_feature (117)..(343): Homolog of NCBI NO: 6573771 NR Description: F28K19.29 [Arabidopsis thaliana]
  misc_feature (117)..(343): Homolog of NCBI NO: 13877779 NR Description: putative AP2 domain-containing protein
  misc_feature (136)..(343): Homolog of NCBI NO: 21908036 NR Description: DRE binding factor 1 [Zea mays]
  misc_feature (111)..(343): Homolog of NCBI NO: 37572971 NR Description: AP2-domain DRE binding factor DBF1
NQIKRFLRRCPTARTRLPFILLANRPVHPKLPALLGFPSSKSSAFSSSGSLPVCPSFLIDKGMATTVDWRSYRPDLPAAMYHMVDSRDQVMHAFAPATAQGAAPTISFAFPCPGAEQSAGLLRGASYLTPAQILQLQSQLHHVRRAPGAAMAAVGQPMKRHGVAALPARPATKLYRGVRQRHWGKWVAEIRLPRNRTRLWLGTFDTADEAALAYDAAAFRLRGESARLNFPELRRGGEHHGPPLDAAIDAKLRSICHGEDMPQSQSDETPAPTTTLTPISFPDVKSEPVCSVSESSSSADGEVSSCSDVVPEMQLLDFSEAPWDEFLLRKYPSLEIDWDAILS

SEQ ID NO: 63443 - protein, 281 aa, Triticum aestivum
  peptide (1)..(281): Ceres Seq. ID no. 15222792
  misc_feature (111)..(174): Pfam Name: AP2 domain Pfam Description: AP2 domain
  misc_feature (45)..(279): Homolog of NCBI NO: 27436378 NR Description: dehydration-responsive element binding protein 3
  misc_feature (102)..(281): Homolog of NCBI NO: 2281633 NR Description: AP2 domain containing protein RAP2.4 [Arabidopsis
  misc_feature (62)..(279): Homolog of NCBI NO: 15238359 NR Description: AP2 domain transcription factor, putative
  misc_feature (2)..(245): Homolog of NCBI NO: 37533596 NR Description: putative AP2-domain transcriptional regulator
  misc_feature (25)..(279): Homolog of NCBI NO: 15236020 NR Description: AP2 domain transcription factor, putative
  misc_feature (55)..(281): Homolog of NCBI NO: 15218204 NR Description: AP2 domain transcription factor RAP2.4
  misc_feature (55)..(281): Homolog of NCBI NO: 6573771 NR Description: F28K19.29 [Arabidopsis thaliana]
  misc_feature (55)..(281): Homolog of NCBI NO: 13877779 NR Description: putative AP2 domain-containing protein
  misc_feature (74)..(281): Homolog of NCBI NO: 21908036 NR Description: DRE binding factor 1 [Zea mays]
  misc_feature (49)..(281): Homolog of NCBI NO: 37572971 NR Description: AP2-domain DRE binding factor DBF1
MATTVDWRSYRPDLPAAMYHMVDSRDQVMHAFAPATAQGAAPTISFAFPCPGAEQSAGLLRGASYLTPAQILQLQSQLHHVRRAPGAAMAAVGQPMKRHGVAALPARPATKLYRGVRQRHWGKWVAEIRLPRNRTRLWLGTFDTADEAALAYDAAAFRLRGESARLNFPELRRGGEHHGPPLDAAIDAKLRSICHGEDMPQSQSDETPAPTTTLTPISFPDVKSEPVCSVSESSSSADGEVSSCSDVVPEMQLLDFSEAPWDEFLLRKYPSLEIDWDAILS

SEQ ID NO: 63444 - protein, 264 aa, Triticum aestivum
  peptide (1)..(264): Ceres Seq. ID no. 15222793
  misc_feature (94)..(157): Pfam Name: AP2 domain Pfam Description: AP2 domain
  misc_feature (28)..(262): Homolog of NCBI NO: 27436378 NR Description: dehydration-responsive element binding protein 3
  misc_feature (85)..(264): Homolog of NCBI NO: 2281633 NR Description: AP2 domain containing protein RAP2.4 [Arabidopsis
  misc_feature (45)..(262): Homolog of NCBI NO: 15238359 NR Description: AP2 domain transcription factor, putative
  misc_feature (1)..(228): Homolog of NCBI NO: 37533596 NR Description: putative AP2-domain transcriptional regulator
  misc_feature (8)..(262): Homolog of NCBI NO: 15236020 NR Description: AP2 domain transcription factor, putative
  misc_feature (38)..(264): Homolog of NCBI NO: 15218204 NR Description: AP2 domain transcription factor RAP2.4
  misc_feature (38)..(264): Homolog of NCBI NO: 6573771 NR Description: F28K19.29 [Arabidopsis thaliana]
  misc_feature (38)..(264): Homolog of NCBI NO: 13877779 NR Description: putative AP2 domain-containing protein
  misc_feature (57)..(264): Homolog of NCBI NO: 21908036 NR Description: DRE binding factor 1 [Zea mays]
  misc_feature (32)..(264): Homolog of NCBI NO: 37572971 NR Description: AP2-domain DRE binding factor DBF1
MYHMVDSRDQVMHAFAPATAQGAAPTISFAFPCPGAEQSAGLLRGASYLTPAQILQLQSQLHHVRRAPGAAMAAVGQPMKRHGVAALPARPATKLYRGVRQRHWGKWVAEIRLPRNRTRLWLGTFDTADEAALAYDAAAFRLRGESARLNFPELRRGGEHHGPPLDAAIDAKLRSICHGEDMPQSQSDETPAPTTTLTPISFPDVKSEPVCSVSESSSSADGEVSSCSDVVPEMQLLDFSEAPWDEFLLRKYPSLEIDWDAILS

SEQ ID NO: 63445 - DNA, 1359 bp, Triticum aestivum
  misc_feature (1)..(1359): Ceres Seq. ID no. 13584004
acgtccctcggcagtagatcgaagtacgtcagaggatctcgttcccccctcccctcccgtccgccgccgcctttctaccccactttcccggcgccagcttgttagatcccggcgccagcttcagccacgatattcaactattgggtgtgttaaattctcgaggatgatgaatcgtcagtttgcgaatatgatagtacacaattaccccaagggagtttattccctgcgccggatcaacctcatggagtatctcttctacccttcaacagaagctgccgaaaaggcagaagtgaataagaagggatggttatccaccatgttgaaagggagccccaagcagagtctgcccaagacgaacatcaacttctcatcactgcctaacatggccgacttaactaccaggcatttcttctccctgctgagagggcagggggagggctctgtcatgtttgtcagccctaacgtccacacgatgatgtacgacactagcacggacttcgtctttggcatgccacaagccaacttctgtaagcagagtgactcaatcgccctgtccatcactcggcggagctatggccaggacaaccacaagctctatgtcataggaaaaggagaggacaatgccttgttcgaggtcttgaactataccaggacaactgatctgaacaactcgtcttggtactggcgacctctaccctgcccgccactgtttcggccgtgcctgcctggcagcaacagcaaagtttgtcctccctctgcagccgctgtgttggatgccgccacaatatgtgtctcatctgtggatgctggagcctgcgccttctttgacacggcaacgcgcgagtggaggcaggctggcagctgggtgctgcccatccacggtgcggcggagtatgtccctgagtttgacctctggtttggcctcgacgatgtcattggcaaccccaaccattgcctgcgtgcttttgacttcgattcctccaggcgaccggtggtgcggcactcctggaactatctcagcgtcctgcccgatgagtggttgccgcggcagaggcacctgctaaacatgggctcaggcaagttctgcatcgccaccagctttcgaaatctcttgaggcacacctcgtgcagaccacttcatggtgcagtcaatgagcttactgtcttgaccggcgtggaggtggtgcgcaatgtcaatggtttccagatcatcaagcacaagtctgaatgttacagcttggaggacaatagaatccactgtgtgctctgaggaaaacttatctatgtttcactgttattggatggatccttccatgttttttcttctcagatgtgaatgaaaatatttgcttacctttt

SEQ ID NO: 63446 - protein, 422 aa, Triticum aestivum
  peptide (1)..(422): Ceres Seq. ID no. 13584005
  misc_feature (275)..(367): Homolog of NCBI NO: 27818009 NR Description: OSJNBb0041J06.17 [Oryza sativa (japonica
  misc_feature (268)..(400): Homolog of NCBI NO: 38345446 NR Description: OSJNBa0042L16.1 [Oryza sativa (japonica
  misc_feature (210)..(340): Homolog of NCBI NO: 34907070 NR Description: OSJNBa0093F16.24 [Oryza sativa (japonica
  misc_feature (56)..(397): Homolog of NCBI NO: 34907072 NR Description: OSJNBa0093F16.25 [Oryza sativa (japonica
  misc_feature (148)..(394): Homolog of NCBI NO: 37531434 NR Description: hypothetical protein [Oryza sativa (japonica
  misc_feature (194)..(422): Homolog of NCBI NO: 38344193 NR Description: OSJNBa0064G10.9 [Oryza sativa (japonica
  misc_feature (188)..(408): Homolog of NCBI NO: 15451605 NR Description: Hypothetical protein [Oryza sativa]
  misc_feature (210)..(408): Homolog of NCBI NO: 34902348 NR Description: Hypothetical protein [Oryza sativa (japonica
  misc_feature (59)..(394): Homolog of NCBI NO: 15451604 NR Description: Hypothetical protein [Oryza sativa]
  misc_feature (56)..(367): Homolog of NCBI NO: 34904128 NR Description: unnamed protein product [Oryza sativa (japonica
RPSAVDRSTSEDLVPPSPPVRRRLSTPLSRRQLVRSRRQLQPRYSTIGCVKFSRMMNRQFANMIVHNYPKGVYSLRRINLMEYLFYPSTEAAEKAEVNKKGWLSTMLKGSPKQSLPKTNINFSSLPNMADLTTRHFFSLLRGQGEGSVMFVSPNVHTMMYDTSTDFVFGMPQANFCKQSDSIALSITRRSYGQDNHKLYVIGKGEDNALFEVLNYTRTTDLNNSSWYWRPLPCPPLFRPCLPGSNSKVCPPSAAAVLDAATICVSSVDAGACAFFDTATREWRQAGSWVLPIHGAAEYVPEFDLWFGLDDVIGNPNHCLRAFDFDSSRRPVVRHSWNYLSVLPDEWLPRQRHLLNMGSGKFCIATSFRNLLRHTSCRPLHGAVNELTVLTGVEVVRNVNGFQIIKHKSECYSLEDNRIHCVL

SEQ ID NO: 63447 - protein, 368 aa, Triticum aestivum
  peptide (1)..(368): Ceres Seq. ID no. 13584006
  misc_feature (221)..(313): Homolog of NCBI NO: 27818009 NR Description: OSJNBb0041J06.17 [Oryza sativa (japonica
  misc_feature (214)..(346): Homolog of NCBI NO: 38345446 NR Description: OSJNBa0042L16.1 [Oryza sativa (japonica
  misc_feature (156)..(286): Homolog of NCBI NO: 34907070 NR Description: OSJNBa0093F16.24 [Oryza sativa (japonica
  misc_feature (2)..(343): Homolog of NCBI NO: 34907072 NR Description: OSJNBa0093F16.25 [Oryza sativa (japonica
  misc_feature (94)..(340): Homolog of NCBI NO: 37531434 NR Description: hypothetical protein [Oryza sativa (japonica
  misc_feature (140)..(368): Homolog of NCBI NO: 38344193 NR Description: OSJNBa0064G10.9 [Oryza sativa (japonica
  misc_feature (134)..(354): Homolog of NCBI NO: 15451605 NR Description: Hypothetical protein [Oryza sativa]
  misc_feature (156)..(354): Homolog of NCBI NO: 34902348 NR Description: Hypothetical protein [Oryza sativa (japonica
  misc_feature (5)..(340): Homolog of NCBI NO: 15451604 NR Description: Hypothetical protein [Oryza sativa]
  misc_feature (2)..(313): Homolog of NCBI NO: 34904128 NR Description: unnamed protein product [Oryza sativa (japonica
MMNRQFANMIVHNYPKGVYSLRRINLMEYLFYPSTEAAEKAEVNKKGWLSTMLKGSPKQSLPKTNINFSSLPNMADLTTRHFFSLLRGQGEGSVMFVSPNVHTMMYDTSTDFVFGMPQANFCKQSDSIALSITRRSYGQDNHKLYVIGKGEDNALFEVLNYTRTTDLNNSSWYWRPLPCPPLFRPCLPGSNSKVCPPSAAAVLDAATICVSSVDAGACAFFDTATREWRQAGSWVLPIHGAAEYVPEFDLWFGLDDVIGNPNHCLRAFDFDSSRRPVVRHSWNYLSVLPDEWLPRQRHLLNMGSGKFCIATSFRNLLRHTSCRPLHGAVNELTVLTGVEVVRNVNGFQIIKHKSECYSLEDNRIHCVL

SEQ ID NO: 63448 - protein, 367 aa, Triticum aestivum
  peptide (1)..(367): Ceres Seq. ID no. 13584007
  misc_feature (220)..(312): Homolog of NCBI NO: 27818009 NR Description: OSJNBb0041J06.17 [Oryza sativa (japonica
  misc_feature (213)..(345): Homolog of NCBI NO: 38345446 NR Description: OSJNBa0042L16.1 [Oryza sativa (japonica
  misc_feature (155)..(285): Homolog of NCBI NO: 34907070 NR Description: OSJNBa0093F16.24 [Oryza sativa (japonica
  misc_feature (1)..(342): Homolog of NCBI NO: 34907072 NR Description: OSJNBa0093F16.25 [Oryza sativa (japonica
  misc_feature (93)..(339): Homolog of NCBI NO: 37531434 NR Description: hypothetical protein [Oryza sativa (japonica
  misc_feature (139)..(367): Homolog of NCBI NO: 38344193 NR Description: OSJNBa0064G10.9 [Oryza sativa (japonica
  misc_feature (133)..(353): Homolog of NCBI NO: 15451605 NR Description: Hypothetical protein [Oryza sativa]
  misc_feature (155)..(353): Homolog of NCBI NO: 34902348 NR Description: Hypothetical protein [Oryza sativa (japonica
  misc_feature (4)..(339): Homolog of NCBI NO: 15451604 NR Description: Hypothetical protein [Oryza sativa]
  misc_feature (1)..(312): Homolog of NCBI NO: 34904128 NR Description: unnamed protein product [Oryza sativa (japonica
MNRQFANMIVHNYPKGVYSLRRINLMEYLFYPSTEAAEKAEVNKKGWLSTMLKGSPKQSLPKTNINFSSLPNMADLTTRHFFSLLRGQGEGSVMFVSPNVHTMMYDTSTDFVFGMPQANFCKQSDSIALSITRRSYGQDNHKLYVIGKGEDNALFEVLNYTRTTDLNNSSWYWRPLPCPPLFRPCLPGSNSKVCPPSAAAVLDAATICVSSVDAGACAFFDTATREWRQAGSWVLPIHGAAEYVPEFDLWFGLDDVIGNPNHCLRAFDFDSSRRPVVRHSWNYLSVLPDEWLPRQRHLLNMGSGKFCIATSFRNLLRHTSCRPLHGAVNELTVLTGVEVVRNVNGFQIIKHKSECYSLEDNRIHCVL

SEQ ID NO: 63449 - DNA, 1314 bp, Triticum aestivum
  misc_feature (1)..(1314): Ceres Seq. ID no. 12616332
atttcaatttttgccccatcggcggagcaaaacagggtgtgggagtgttcgcttttcaggtgggctcggtcggagccgtcggaggagatcgccgccatccatggaaacgctggccagcgccatgcggcgcgacaaccgccgcttcaagaccccgccctcctcctccgccgccgccgcctccgccggcagggtccccctcgtcatggccttcctcgcctgcctcgcctgggtgtacgtcgccggccggctatggcaggacgcgcagacccgggcgatcctctccggcctcctcgagaagagcaccggcagtctccccaaggagatctcggtggacgacaagctgagggacctcggatgcactgggattgggaggaagatcgccgaggcggagatggacattgccaaggccaagagcgagggctacctgtggggaaatgggactggtgccggtgctgggggttccgaccggaagaagttcctcgcggtcattggagtttacaccggctttggctcccggctcaagaggaacaccttccgtggctcctggatgcccagaggtgatgctttaaagacgcttgaggaaaagggtgtggttattcgttttgttattgaccggagtcctaatcgaggtgatagcttggaccgtaatattaacgaagaaagcagaaagacaaacgatttcttgattctggaaagtcacgaggaagctgcagaggaattacctaaaaaagttaagtttttcttcagtgcagcaatagaagcttgggatgcagagttctacgtcaagattgacgataacattaatcttgacttggctgggttaattgagatgcttaacgcccgtcgaggtagccaagggttgtacatgggctgcatgaaatcaggagctgtcgttagtgaagaggagcaacaatggtatgaacctgaatggtggaaatttggagattcaaggacgtattttcgccatgctgctggttctttatttatcctctcaaacaatttggctcgctacatcaacataaacagtgcatcgctgcagagctatgcgcatgatgacatatcagttggttcatggatgatggggcttaatgccacttacgttgatgacgaccgtctgtgttgcctcagtccggtacaagagaaagtatgttcctttggatgagcggaaggaccagccgcccccccttctgatggtggtgtcctgatgaagaggtgtttttgtacattagccattttgtacacacctatagcaggcagcctatgtgaatgattgaatgaatgcaagaaatatatgaagaaactactttgagatgt

SEQ ID NO: 63450 - protein, 386 aa, Triticum aestivum
  peptide (1)..(386): Ceres Seq. ID no. 12616333
  misc_feature (173)..(370): Pfam Name: Galactosyltransferase Pfam Description: Galactosyltransferase
  misc_feature (122)..(377): Homolog of NCBI NO: 15220440 NR Description: putative AVR9 elicitor response protein
  misc_feature (55)..(374): Homolog of NCBI NO: 9759181 NR Description: Avr9 elicitor response protein-like [Arabidopsis
  misc_feature (55)..(384): Homolog of NCBI NO: 18423501 NR Description: Avr9 elicitor response protein-like
  misc_feature (66)..(384): Homolog of NCBI NO: 20372915 NR Description: beta 1,3-glycosyltransferase-like protein I
  misc_feature (66)..(376): Homolog of NCBI NO: 22553068 NR Description: beta 1,3-glycosyltransferase-like protein I
  misc_feature (58)..(384): Homolog of NCBI NO: 40253477 NR Description: putative Avr9 elicitor response protein
  misc_feature (105)..(384): Homolog of NCBI NO: 26451702 NR Description: unknown protein [Arabidopsis thaliana]
  misc_feature (34)..(376): Homolog of NCBI NO: 15224704 NR Description: unknown protein; protein id: At2g25300.1
  misc_feature (34)..(384): Homolog of NCBI NO: 15236681 NR Description: putative protein
  misc_feature (34)..(384): Homolog of NCBI NO: 34898462 NR Description: ESTs D47620(S13223),AU029621(E31157) correspond a region of the predicted gene.~Similar to Arabidopsis thaliana
FQFLPHRRSKTGCGSVRFSGGLGRSRRRRSPPSMETLASAMRRDNRRFKTPPSSSAAAASAGRVPLVMAFLACLAWVYVAGRLWQDAQTRAILSGLLEKSTGSLPKEISVDDKLRDLGCTGIGRKIAEAEMDIAKAKSEGYLWGNGTGAGAGGSDRKKFLAVIGVYTGFGSRLKRNTFRGSWMPRGDALKTLEEKGVVIRFVIDRSPNRGDSLDRNINEESRKTNDFLILESHEEAAEELPKKVKFFFSAAIEAWDAEFYVKIDDNINLDLAGLIEMLNARRGSQGLYMGCMKSGAVVSEEEQQWYEPEWWKFGDSRTYFRHAAGSLFILSNNLARYININSASLQSYAHDDISVGSWMMGLNATYVDDDRLCCLSPVQEKVCSFG

SEQ ID NO: 63451 - protein, 353 aa, Triticum aestivum
  peptide (1)..(353): Ceres Seq. ID no. 12616334
  misc_feature (140)..(337): Pfam Name: Galactosyltransferase Pfam Description: Galactosyltransferase
  misc_feature (89)..(344): Homolog of NCBI NO: 15220440 NR Description: putative AVR9 elicitor response protein
  misc_feature (22)..(341): Homolog of NCBI NO: 9759181 NR Description: Avr9 elicitor response protein-like [Arabidopsis
  misc_feature (22)..(351): Homolog of NCBI NO: 18423501 NR Description: Avr9 elicitor response protein-like
  misc_feature (33)..(351): Homolog of NCBI NO: 20372915 NR Description: beta 1,3-glycosyltransferase-like protein I
  misc_feature (33)..(343): Homolog of NCBI NO: 22553068 NR Description: beta 1,3-glycosyltransferase-like protein I
  misc_feature (25)..(351): Homolog of NCBI NO: 40253477 NR Description: putative Avr9 elicitor response protein
  misc_feature (72)..(351): Homolog of NCBI NO: 26451702 NR Description: unknown protein [Arabidopsis thaliana]
  misc_feature (1)..(343): Homolog of NCBI NO: 15224704 NR Description: unknown protein; protein id: At2g25300.1
  misc_feature (1)..(351): Homolog of NCBI NO: 15236681 NR Description: putative protein
  misc_feature (1)..(351): Homolog of NCBI NO: 34898462 NR Description: ESTs D47620(S13223),AU029621(E31157) correspond a region of the predicted gene.~Similar to Arabidopsis thaliana
METLASAMRRDNRRFKTPPSSSAAAASAGRVPLVMAFLACLAWVYVAGRLWQDAQTRAILSGLLEKSTGSLPKEISVDDKLRDLGCTGIGRKIAEAEMDIAKAKSEGYLWGNGTGAGAGGSDRKKFLAVIGVYTGFGSRLKRNTFRGSWMPRGDALKTLEEKGVVIRFVIDRSPNRGDSLDRNINEESRKTNDFLILESHEEAAEELPKKVKFFFSAAIEAWDAEFYVKIDDNINLDLAGLIEMLNARRGSQGLYMGCMKSGAVVSEEEQQWYEPEWWKFGDSRTYFRHAAGSLFILSNNLARYININSASLQSYAHDDISVGSWMMGLNATYVDDDRLCCLSPVQEKVCSFG

SEQ ID NO: 63452 - protein, 346 aa, Triticum aestivum
  peptide (1)..(346): Ceres Seq. ID no. 12616335
  misc_feature (133)..(330): Pfam Name: Galactosyltransferase Pfam Description: Galactosyltransferase
  misc_feature (82)..(337): Homolog of NCBI NO: 15220440 NR Description: putative AVR9 elicitor response protein
  misc_feature (15)..(334): Homolog of NCBI NO: 9759181 NR Description: Avr9 elicitor response protein-like [Arabidopsis
  misc_feature (15)..(344): Homolog of NCBI NO: 18423501 NR Description: Avr9 elicitor response protein-like
  misc_feature (26)..(344): Homolog of NCBI NO: 20372915 NR Description: beta 1,3-glycosyltransferase-like protein I
  misc_feature (26)..(336): Homolog of NCBI NO: 22553068 NR Description: beta 1,3-glycosyltransferase-like protein I
  misc_feature (18)..(344): Homolog of NCBI NO: 40253477 NR Description: putative Avr9 elicitor response protein
  misc_feature (65)..(344): Homolog of NCBI NO: 26451702 NR Description: unknown protein [Arabidopsis thaliana]
  misc_feature (1)..(336): Homolog of NCBI NO: 15224704 NR Description: unknown protein; protein id: At2g25300.1
  misc_feature (1)..(344): Homolog of NCBI NO: 15236681 NR Description: putative protein
  misc_feature (1)..(344): Homolog of NCBI NO: 34898462 NR Description: ESTs D47620(S13223),AU029621(E31157) correspond a region of the predicted gene.~Similar to Arabidopsis thaliana
MRRDNRRFKTPPSSSAAAASAGRVPLVMAFLACLAWVYVAGRLWQDAQTRAILSGLLEKSTGSLPKEISVDDKLRDLGCTGIGRKIAEAEMDIAKAKSEGYLWGNGTGAGAGGSDRKKFLAVIGVYTGFGSRLKRNTFRGSWMPRGDALKTLEEKGVVIRFVIDRSPNRGDSLDRNINEESRKTNDFLILESHEEAAEELPKKVKFFFSAAIEAWDAEFYVKIDDNINLDLAGLIEMLNARRGSQGLYMGCMKSGAVVSEEEQQWYEPEWWKFGDSRTYFRHAAGSLFILSNNLARYININSASLQSYAHDDISVGSWMMGLNATYVDDDRLCCLSPVQEKVCSFG

SEQ ID NO: 63453 - DNA, 1356 bp, Triticum aestivum
  misc_feature (1)..(1356): Ceres Seq. ID no. 13597393
attacctagtacatcctaatcgaaaaaagagccctatagcccaaatggcagctctcctgaaccctacggctcggcgcctcaccctcgctgcctgccgccgcctctctacggcgccggcggtggagcccctcgtggctcactggagcacccaagcaagatacaattccagtctggtggaggttaatggcggatttggggagatggttgccgacacaaagaggtactacgtgcttggaggcaaaggtggtgttgggacaacaagcatggcagcatcgcttgctatgaagtttgccaaccatggtgaaccgacgctcatagtttctatgcacccagcacattcactgggtgatacatttgaacaagacctgagtggcggtaatattgtacctgtcaatggagtcgactctctttttgctgccgagattggccatgttaatacaaaggaggaatcttctaatagtggatcttttatgcgtaatatactggacaagatagggcttggagtccttgctgatccgctgggaaagaataagctgcatgaaatgctgatgaaaactcctggatttggagaagccgttgcaatttcgaagctgatgcaaatcgtcgaactgcaagagagcaataaatttaggcgcatagttttggataccgcggcaactgggcatacacttaaccttttatctgctacaactttaatggagaagctccttggtatggccaataaggctgtgaatttagcgtcatccttcccagctcttaaatcagctttcgggaaagaccaaatagatcctgccaggatagaggtgctaagaaagcagattgccagagtacatgagcttatgcaagatccacaatcaactgaatttatcattctgacgattcctacggtgatggctatcaccgagtcgtcaaggtttcatgcatctttgaagaaggatggtgcgtcagcaacaaggcttgtcgtaaatcaagtattgcccccctctacatctgagtgcagattttgttctacaaaacgcaaggaagaagcacgtgccctgaatatgataagcaatgatcgtgaacttggcggcctagagctaatccaagcgccacttctcgatgtggaggtcagaggcgcccctgctctcagattcttcggcgatgtggtctggaaatagacgctaggatgccaggccgtgacgagaattttgttatttcatctgaaactccacagtactggtggcggcactcaaattgtctagaaatgtggttgaatctggagaaaagatgaaacccagcaggataccagactgttcaggctgtagacgtttggtaggttcttaaataagaaacggagtattagttgctgccctc

SEQ ID NO: 63454 - protein, 385 aa, Triticum aestivum
  peptide (1)..(385): Ceres Seq. ID no. 15222088
  misc_feature (72)..(385): Pfam Name: Anion-transporting ATPase Pfam Description: Anion-transporting ATPase
  misc_feature (73)..(376): Homolog of NCBI NO: 34557874 NR Description: ARSENICAL PUMP-DRIVING ATPASE [Wolinella
  misc_feature (71)..(381): Homolog of NCBI NO: 17557003 NR Description: Anion-transporting ATPase (37.6 kD)
  misc_feature (74)..(376): Homolog of NCBI NO: 15679508 NR Description: arsenical pump-driving ATPase
  misc_feature (70)..(384): Homolog of NCBI NO: 15669329 NR Description: arsenical pump-driving ATPase (arsA)
  misc_feature (63)..(384): Homolog of NCBI NO: 20095116 NR Description: Arsenite transporting ATPase [Methanopyrus
  misc_feature (48)..(385): Homolog of NCBI NO: 6056208 NR Description: putative ATPase [Arabidopsis thaliana]
  misc_feature (63)..(358): Homolog of NCBI NO: 5824321 NR Description: ATPase [Solanum tuberosum]
  misc_feature (55)..(385): Homolog of NCBI NO: 9759337 NR Description: arsenite translocating ATPase-like protein
  misc_feature (50)..(385): Homolog of NCBI NO: 30697424 NR Description: ATPase - like protein [Arabidopsis thaliana]
  misc_feature (48)..(385): Homolog of NCBI NO: 30681260 NR Description: ATPase -related [Arabidopsis thaliana]
YLVHPNRKKSPIAQMAALLNPTARRLTLAACRRLSTAPAVEPLVAHWSTQARYNSSLVEVNGGFGEMVADTKRYYVLGGKGGVGTTSMAASLAMKFANHGEPTLIVSMHPAHSLGDTFEQDLSGGNIVPVNGVDSLFAAEIGHVNTKEESSNSGSFMRNILDKIGLGVLADPLGKNKLHEMLMKTPGFGEAVAISKLMQIVELQESNKFRRIVLDTAATGHTLNLLSATTLMEKLLGMANKAVNLASSFPALKSAFGKDQIDPARIEVLRKQIARVHELMQDPQSTEFIILTIPTVMAITESSRFHASLKKDGASATRLVVNQVLPPSTSECRFCSTKRKEEARALNMISNDRELGGLELIQAPLLDVEVRGAPALRFFGDVVWK

SEQ ID NO: 63455 - protein, 371 aa, Triticum aestivum
  peptide (1)..(371): Ceres Seq. ID no. 15222089
  misc_feature (58)..(371): Pfam Name: Anion-transporting ATPase Pfam Description: Anion-transporting ATPase
  misc_feature (59)..(362): Homolog of NCBI NO: 34557874 NR Description: ARSENICAL PUMP-DRIVING ATPASE [Wolinella
  misc_feature (57)..(367): Homolog of NCBI NO: 17557003 NR Description: Anion-transporting ATPase (37.6 kD)
  misc_feature (60)..(362): Homolog of NCBI NO: 15679508 NR Description: arsenical pump-driving ATPase
  misc_feature (56)..(370): Homolog of NCBI NO: 15669329 NR Description: arsenical pump-driving ATPase (arsA)
  misc_feature (49)..(370): Homolog of NCBI NO: 20095116 NR Description: Arsenite transporting ATPase [Methanopyrus
  misc_feature (34)..(371): Homolog of NCBI NO: 6056208 NR Description: putative ATPase [Arabidopsis thaliana]
  misc_feature (49)..(344): Homolog of NCBI NO: 5824321 NR Description: ATPase [Solanum tuberosum]
  misc_feature (41)..(371): Homolog of NCBI NO: 9759337 NR Description: arsenite translocating ATPase-like protein
  misc_feature (36)..(371): Homolog of NCBI NO: 30697424 NR Description: ATPase - like protein [Arabidopsis thaliana]
  misc_feature (34)..(371): Homolog of NCBI NO: 30681260 NR Description: ATPase -related [Arabidopsis thaliana]
MAALLNPTARRLTLAACRRLSTAPAVEPLVAHWSTQARYNSSLVEVNGGFGEMVADTKRYYVLGGKGGVGTTSMAASLAMKFANHGEPTLIVSMHPAHSLGDTFEQDLSGGNIVPVNGVDSLFAAEIGHVNTKEESSNSGSFMRNILDKIGLGVLADPLGKNKLHEMLMKTPGFGEAVAISKLMQIVELQESNKFRRIVLDTAATGHTLNLLSATTLMEKLLGMANKAVNLASSFPALKSAFGKDQIDPARIEVLRKQIARVHELMQDPQSTEFIILTIPTVMAITESSRFHASLKKDGASATRLVVNQVLPPSTSECRFCSTKRKEEARALNMISNDRELGGLELIQAPLLDVEVRGAPALRFFGDVVWK

SEQ ID NO: 63456 - protein, 319 aa, Triticum aestivum
  peptide (1)..(319): Ceres Seq. ID no. 15222090
  misc_feature (6)..(319): Pfam Name: Anion-transporting ATPase Pfam Description: Anion-transporting ATPase
  misc_feature (7)..(310): Homolog of NCBI NO: 34557874 NR Description: ARSENICAL PUMP-DRIVING ATPASE [Wolinella
  misc_feature (5)..(315): Homolog of NCBI NO: 17557003 NR Description: Anion-transporting ATPase (37.6 kD)
  misc_feature (8)..(310): Homolog of NCBI NO: 15679508 NR Description: arsenical pump-driving ATPase
  misc_feature (4)..(318): Homolog of NCBI NO: 15669329 NR Description: arsenical pump-driving ATPase (arsA)
  misc_feature (1)..(318): Homolog of NCBI NO: 20095116 NR Description: Arsenite transporting ATPase [Methanopyrus
  misc_feature (1)..(319): Homolog of NCBI NO: 6056208 NR Description: putative ATPase [Arabidopsis thaliana]
  misc_feature (1)..(292): Homolog of NCBI NO: 5824321 NR Description: ATPase [Solanum tuberosum]
  misc_feature (1)..(319): Homolog of NCBI NO: 9759337 NR Description: arsenite translocating ATPase-like protein
  misc_feature (1)..(319): Homolog of NCBI NO: 30697424 NR Description: ATPase - like protein [Arabidopsis thaliana]
  misc_feature (1)..(319): Homolog of NCBI NO: 30681260 NR Description: ATPase -related [Arabidopsis thaliana]
MVADTKRYYVLGGKGGVGTTSMAASLAMKFANHGEPTLIVSMHPAHSLGDTFEQDLSGGNIVPVNGVDSLFAAEIGHVNTKEESSNSGSFMRNILDKIGLGVLADPLGKNKLHEMLMKTPGFGEAVAISKLMQIVELQESNKFRRIVLDTAATGHTLNLLSATTLMEKLLGMANKAVNLASSFPALKSAFGKDQIDPARIEVLRKQIARVHELMQDPQSTEFIILTIPTVMAITESSRFHASLKKDGASATRLVVNQVLPPSTSECRFCSTKRKEEARALNMISNDRELGGLELIQAPLLDVEVRGAPALRFFGDVVWK

SEQ ID NO: 63457 - DNA, 942 bp, Triticum aestivum
  misc_feature (1)..(942): Ceres Seq. ID no. 13597394
ccacccagttcccctcttcactccacgccgtgctccctctctttcccctctccccgatctccgtctccgtctccgtcctcccgccgctgccgccatggacggcgtcatcggccagatcttggagaagcaggtcctgtcggccgcgaaggcggtcgaggacaagctagatgagcagatcgccgcgctcgagcggctcgacccggacgacatcgaggcgctccgcgagcgccggatgctgcagatgcgccgcgcggccgagcgccgggccaagtggcgcgccctggggcacggcgagtatacggaggtccccgagaaagagttcttctccaccgccaaggccagcgagcgcatggtgtgccacttctaccgcgacaactggccgtgcaaggttatggacaaacacatgtcgattctcgctaaacagcatgtagaaacacggtttatcaaagtccatgctgaaaaggctccctttctgaccgaaaaactaagggttgttgtgctcccaactcttgccctagtgaagaatgccaaggttgaggattatgtggttggatttgatgagctgggtggtaaagatgacttcagcactgaggatctggaggaacgcattgccaaagctcaagtgatcttcctcgacggagaggggcctgcaaatccttccaagcaagctgctgccagcaagcgaagcgttcgacaatcagatactggcaactcagactcagactagttctgttcctgtattgaaggcgtgtgcgccaaggatttttatatataggatttatgccaagctgttatgctatccttactagtaataggaaagaagtttgtgtttcgatggcgatttgaaccgcaattgtcactgttgtagagtgctcttgtttttaccatgcgtccatacctggtttggtttgtttatttgagtggaaatgtttttncgttgct

SEQ ID NO: 63458 - protein, 241 aa, Triticum aestivum
  peptide (1)..(241): Ceres Seq. ID no. 15222091
  misc_feature (146)..(184): Pfam Name: Thioredoxin Pfam Description: Thioredoxin
  misc_feature (28)..(209): Homolog of NCBI NO: 19683948 NR Description: Similar to ATP binding protein associated with
  misc_feature (35)..(241): Homolog of NCBI NO: 25286717 NR Description: ATP binding protein associated with cell
  misc_feature (28)..(241): Homolog of NCBI NO: 2342477 NR Description: ATP binding protein [Homo sapiens]
  misc_feature (28)..(241): Homolog of NCBI NO: 18104959 NR Description: ATP binding protein associated with cell
  misc_feature (28)..(241): Homolog of NCBI NO: 28277604 NR Description: Similar to ATP binding protein associated with
  misc_feature (85)..(241): Homolog of NCBI NO: 26452365 NR Description: unknown protein [Arabidopsis thaliana]
  misc_feature (32)..(241): Homolog of NCBI NO: 21594045 NR Description: putative ATP binding protein [Arabidopsis
  misc_feature (32)..(241): Homolog of NCBI NO: 18404574 NR Description: expressed protein [Arabidopsis thaliana]
  misc_feature (32)..(241): Homolog of NCBI NO: 15224267 NR Description: ATP binding protein -related [Arabidopsis
  misc_feature (32)..(241): Homolog of NCBI NO: 40253924 NR Description: putative ATP binding protein associated with cell
HPVPLFTPRRAPSLSPLPDLRLRLRPPAAAAMDGVIGQILEKQVLSAAKAVEDKLDEQIAALERLDPDDIEALRERRMLQMRRAAERRAKWRALGHGEYTEVPEKEFFSTAKASERMVCHFYRDNWPCKVMDKHMSILAKQHVETRFIKVHAEKAPFLTEKLRVVVLPTLALVKNAKVEDYVVGFDELGGKDDFSTEDLEERIAKAQVIFLDGEGPANPSKQAAASKRSVRQSDTGNSDSD

SEQ ID NO: 63459 - protein, 210 aa, Triticum aestivum
  peptide (1)..(210): Ceres Seq. ID no. 15222092
  misc_feature (115)..(153): Pfam Name: Thioredoxin Pfam Description: Thioredoxin
  misc_feature (1)..(178): Homolog of NCBI NO: 19683948 NR Description: Similar to ATP binding protein associated with
  misc_feature (4)..(210): Homolog of NCBI NO: 25286717 NR Description: ATP binding protein associated with cell
  misc_feature (1)..(210): Homolog of NCBI NO: 2342477 NR Description: ATP binding protein [Homo sapiens]
  misc_feature (1)..(210): Homolog of NCBI NO: 18104959 NR Description: ATP binding protein associated with cell
  misc_feature (1)..(210): Homolog of NCBI NO: 28277604 NR Description: Similar to ATP binding protein associated with
  misc_feature (54)..(210): Homolog of NCBI NO: 26452365 NR Description: unknown protein [Arabidopsis thaliana]
  misc_feature (1)..(210): Homolog of NCBI NO: 21594045 NR Description: putative ATP binding protein [Arabidopsis
  misc_feature (1)..(210): Homolog of NCBI NO: 18404574 NR Description: expressed protein [Arabidopsis thaliana]
  misc_feature (1)..(210): Homolog of NCBI NO: 15224267 NR Description: ATP binding protein -related [Arabidopsis
  misc_feature (1)..(210): Homolog of NCBI NO: 40253924 NR Description: putative ATP binding protein associated with cell
MDGVIGQILEKQVLSAAKAVEDKLDEQIAALERLDPDDIEALRERRMLQMRRAAERRAKWRALGHGEYTEVPEKEFFSTAKASERMVCHFYRDNWPCKVMDKHMSILAKQHVETRFIKVHAEKAPFLTEKLRVVVLPTLALVKNAKVEDYVVGFDELGGKDDFSTEDLEERIAKAQVIFLDGEGPANPSKQAAASKRSVRQSDTGNSDSD

SEQ ID NO: 63460 - protein, 164 aa, Triticum aestivum
  peptide (1)..(164): Ceres Seq. ID no. 15222093
  misc_feature (69)..(107): Pfam Name: Thioredoxin Pfam Description: Thioredoxin
  misc_feature (1)..(132): Homolog of NCBI NO: 19683948 NR Description: Similar to ATP binding protein associated with
  misc_feature (1)..(164): Homolog of NCBI NO: 25286717 NR Description: ATP binding protein associated with cell
  misc_feature (1)..(164): Homolog of NCBI NO: 2342477 NR Description: ATP binding protein [Homo sapiens]
  misc_feature (1)..(164): Homolog of NCBI NO: 18104959 NR Description: ATP binding protein associated with cell
  misc_feature (1)..(164): Homolog of NCBI NO: 28277604 NR Description: Similar to ATP binding protein associated with
  misc_feature (8)..(164): Homolog of NCBI NO: 26452365 NR Description: unknown protein [Arabidopsis thaliana]
  misc_feature (1)..(164): Homolog of NCBI NO: 21594045 NR Description: putative ATP binding protein [Arabidopsis
  misc_feature (1)..(164): Homolog of NCBI NO: 18404574 NR Description: expressed protein [Arabidopsis thaliana]
  misc_feature (1)..(164): Homolog of NCBI NO: 15224267 NR Description: ATP binding protein -related [Arabidopsis
  misc_feature (1)..(164): Homolog of NCBI NO: 40253924 NR Description: putative ATP binding protein associated with cell
MLQMRRAAERRAKWRALGHGEYTEVPEKEFFSTAKASERMVCHFYRDNWPCKVMDKHMSILAKQHVETRFIKVHAEKAPFLTEKLRVVVLPTLALVKNAKVEDYVVGFDELGGKDDFSTEDLEERIAKAQVIFLDGEGPANPSKQAAASKRSVRQSDTGNSDSD

SEQ ID NO: 63461 - DNA, 1393 bp, Triticum aestivum
  misc_feature (1)..(1393): Ceres Seq. ID no. 13598234
acacaaaattccgttcagcgcgtgcagtagagagctccccgcttctcctcatcctcctccccaactccaatactctccacagaaatctccgctccttctcgtcccctctcgctcgcgtgcgcgtgaggtgcgcaatggcggcggcggcggtggcgttgtcgaacggctccggtggcgactccaaggccgagttcgcggaaatatacagcaggctcaaggaggagatgctcgaggaccccgccttcgagttcaccgacgagtcgctccagtggatcgaccgcatgctggattacaatgtcctaggaggaaagtgcaaccgtgggctctctgtcatcgatagctacaagacattgaaaggtgtagatgttttgaggaaggaggagacatttcttgcctgcacccttggttggtgtattgaatggcttcaagcatattttcttgtgcttgatgatatcatggacaactcccagacacgacggggccagccttgctggtttagggtgcctcaggttggccttattgctgtaaacgatgggattatccttcgcaaccatatttcacggatccttcaacgccacttcagaggaaaaccgtattatgttgatctcattgatttgttcaatgaggttgaattcaagacagcttcagggcagttgttggatcttatcactactcacgagggagaaaaggatctcacaaaatataacttgaatgttcaccggcgcattgtgcaatacaagacagcgtactattcattttatcttccggttgcatgtgcattgctgctgtcgggtgagaatttggataacttcggcgatgtaaagaacattcttgttgaaatgggaacatactttcaagttcaggatgattatctagattgttttggagatcctgaatctattggcaagattggaactgacattgaagactacaagtgttcctggttagttgtgcaagctcttgagcatgcagatgagagccaaaagggcattctacttgaaaattatgggaagtcagatccagagtctgttgcaaaagtgaaggatctgtataaagaacttgatctggagacggcatttcacaagtatgagcgggagagctacaataagctgatcgccgacatcgaggcccagccaagcaaagctgttcagaaagttttgatgtctttcctggagaagatctacaagaggcagaagtagagctaagctcttggagaggttgttgtgcctttccgtgctttggtaacttattccatgttctgtgtgtgttggtcttattaccataatgtacagcgtgttattccttccaacaataaactacggtgctattttttagtggtgcgtgaacctgctgtgccataaccatgttatttgaagctctctaatgtttttct

SEQ ID NO: 63462 - protein, 398 aa, Triticum aestivum
  peptide (1)..(398): Ceres Seq. ID no. 13598235
  misc_feature (90)..(361): Pfam Name: Polyprenyl synthetase Pfam Description: Polyprenyl synthetase
  misc_feature (59)..(398): Homolog of NCBI NO: 1346028 NR Description: Farnesyl pyrophosphate synthetase 1 (FPP
  misc_feature (59)..(398): Homolog of NCBI NO: 1076319 NR Description: farnesyl-pyrophosphate synthetase FPS1 -
  misc_feature (59)..(398): Homolog of NCBI NO: 7433992 NR Description: farnesyl-pyrophosphate synthetase - Para rubber
  misc_feature (59)..(398): Homolog of NCBI NO: 1146159 NR Description: farnesyl diphosphate synthase short form
  misc_feature (26)..(398): Homolog of NCBI NO: 15238801 NR Description: farnesyl pyrophosphate synthetase 1 (FPS1)
  misc_feature (59)..(398): Homolog of NCBI NO: 1346029 NR Description: Farnesyl pyrophosphate synthetase 2 (FPP
  misc_feature (44)..(95): Homolog of NCBI NO: 25458583 NR Description: probable farnesyl pyrophosphate synthase
  misc_feature (102)..(398): Homolog of NCBI NO: 25458583 NR Description: probable farnesyl pyrophosphate synthase
  misc_feature (45)..(398): Homolog of NCBI NO: 18958450 NR Description: farnesyl pyrophosphare synthase [Musa acuminata]
  misc_feature (54)..(398): Homolog of NCBI NO: 1346033 NR Description: Farnesyl pyrophosphate synthetase (FPP
TKFRSARAVESSPLLLILLPNSNTLHRNLRSFSSPLARVRVRCAMAAAAVALSNGSGGDSKAEFAEIYSRLKEEMLEDPAFEFTDESLQWIDRMLDYNVLGGKCNRGLSVIDSYKTLKGVDVLRKEETFLACTLGWCIEWLQAYFLVLDDIMDNSQTRRGQPCWFRVPQVGLIAVNDGIILRNHISRILQRHFRGKPYYVDLIDLFNEVEFKTASGQLLDLITTHEGEKDLTKYNLNVHRRIVQYKTAYYSFYLPVACALLLSGENLDNFGDVKNILVEMGTYFQVQDDYLDCFGDPESIGKIGTDIEDYKCSWLVVQALEHADESQKGILLENYGKSDPESVAKVKDLYKELDLETAFHKYERESYNKLIADIEAQPSKAVQKVLMSFLEKIYKRQK

SEQ ID NO: 63463 - protein, 354 aa, Triticum aestivum
  peptide (1)..(354): Ceres Seq. ID no. 13598236
  misc_feature (46)..(317): Pfam Name: Polyprenyl synthetase Pfam Description: Polyprenyl synthetase
  misc_feature (15)..(354): Homolog of NCBI NO: 1346028 NR Description: Farnesyl pyrophosphate synthetase 1 (FPP
  misc_feature (15)..(354): Homolog of NCBI NO: 1076319 NR Description: farnesyl-pyrophosphate synthetase FPS1 -
  misc_feature (15)..(354): Homolog of NCBI NO: 7433992 NR Description: farnesyl-pyrophosphate synthetase - Para rubber
  misc_feature (15)..(354): Homolog of NCBI NO: 1146159 NR Description: farnesyl diphosphate synthase short form
  misc_feature (1)..(354): Homolog of NCBI NO: 15238801 NR Description: farnesyl pyrophosphate synthetase 1 (FPS1)
  misc_feature (15)..(354): Homolog of NCBI NO: 1346029 NR Description: Farnesyl pyrophosphate synthetase 2 (FPP
  misc_feature (1)..(51): Homolog of NCBI NO: 25458583 NR Description: probable farnesyl pyrophosphate synthase
  misc_feature (58)..(354): Homolog of NCBI NO: 25458583 NR Description: probable farnesyl pyrophosphate synthase
  misc_feature (1)..(354): Homolog of NCBI NO: 18958450 NR Description: farnesyl pyrophosphare synthase [Musa acuminata]
  misc_feature (10)..(354): Homolog of NCBI NO: 1346033 NR Description: Farnesyl pyrophosphate synthetase (FPP
MAAAAVALSNGSGGDSKAEFAEIYSRLKEEMLEDPAFEFTDESLQWIDRMLDYNVLGGKCNRGLSVIDSYKTLKGVDVLRKEETFLACTLGWCIEWLQAYFLVLDDIMDNSQTRRGQPCWFRVPQVGLIAVNDGIILRNHISRILQRHFRGKPYYVDLIDLFNEVEFKTASGQLLDLITTHEGEKDLTKYNLNVHRRIVQYKTAYYSFYLPVACALLLSGENLDNFGDVKNILVEMGTYFQVQDDYLDCFGDPESIGKIGTDIEDYKCSWLVVQALEHADESQKGILLENYGKSDPESVAKVKDLYKELDLETAFHKYERESYNKLIADIEAQPSKAVQKVLMSFLEKIYKRQK

SEQ ID NO: 63464 - protein, 324 aa, Triticum aestivum
  peptide (1)..(324): Ceres Seq. ID no. 13598237
  misc_feature (16)..(287): Pfam Name: Polyprenyl synthetase Pfam Description: Polyprenyl synthetase
  misc_feature (1)..(324): Homolog of NCBI NO: 1346028 NR Description: Farnesyl pyrophosphate synthetase 1 (FPP
  misc_feature (1)..(324): Homolog of NCBI NO: 1076319 NR Description: farnesyl-pyrophosphate synthetase FPS1 -
  misc_feature (1)..(324): Homolog of NCBI NO: 7433992 NR Description: farnesyl-pyrophosphate synthetase - Para rubber
  misc_feature (1)..(324): Homolog of NCBI NO: 1146159 NR Description: farnesyl diphosphate synthase short form
  misc_feature (1)..(324): Homolog of NCBI NO: 15238801 NR Description: farnesyl pyrophosphate synthetase 1 (FPS1)
  misc_feature (1)..(324): Homolog of NCBI NO: 1346029 NR Description: Farnesyl pyrophosphate synthetase 2 (FPP
  misc_feature (1)..(21): Homolog of NCBI NO: 25458583 NR Description: probable farnesyl pyrophosphate synthase
  misc_feature (28)..(324): Homolog of NCBI NO: 25458583 NR Description: probable farnesyl pyrophosphate synthase
  misc_feature (1)..(324): Homolog of NCBI NO: 18958450 NR Description: farnesyl pyrophosphare synthase [Musa acuminata]
  misc_feature (1)..(324): Homolog of NCBI NO: 1346033 NR Description: Farnesyl pyrophosphate synthetase (FPP
MLEDPAFEFTDESLQWIDRMLDYNVLGGKCNRGLSVIDSYKTLKGVDVLRKEETFLACTLGWCIEWLQAYFLVLDDIMDNSQTRRGQPCWFRVPQVGLIAVNDGIILRNHISRILQRHFRGKPYYVDLIDLFNEVEFKTASGQLLDLITTHEGEKDLTKYNLNVHRRIVQYKTAYYSFYLPVACALLLSGENLDNFGDVKNILVEMGTYFQVQDDYLDCFGDPESIGKIGTDIEDYKCSWLVVQALEHADESQKGILLENYGKSDPESVAKVKDLYKELDLETAFHKYERESYNKLIADIEAQPSKAVQKVLMSFLEKIYKRQK

SEQ ID NO: 63465 - DNA, 1061 bp, Triticum aestivum
  misc_feature (1)..(1061): Ceres Seq. ID no. 13584254
gaaaaacccacgcgaccgagaccagcagcagcaccacctcctccctccatcctgatccgatctgactgagccggccatggcggttagggtttggctctccgccatcctcctcgccttcctcctcgccgcctcccccttcgcccaagttgctagagctcagtctgaggaagatgctgctatgcaagaagttgttgatggggctgatctaggatatgtgggtgatgatactccggtttccagtgaagagcctttaagccctgctcctggtgtggagactgtttgcgtcttccccaaaaacgctgggaaaattgtaccagcaggtgaagaaactgagcttttggttggcctgcaaaatgagggtgaatcaactttgaatgttgttgctgtccattcaaccctgcatcttccttatgatcacaaaatgtatggacaaaaccttacagttcagagtttctacaacgcgtcagttcctgtctctgtgcaagcaacctttccctatacatttgccgtgagcaaattcttgcagcctggagcatatgatcttgttggttacattgtgtacgagattgatcagcacccttaccagaacgtattctacaatggcaccattgaggttgttgaggtcggagggttactgagtgttgaatctgtgttccttattacccttggaattgcacttcttggtctcctaggattgtgggcttatggtcaagtgcaacagctctcgaagaaaacaaagaaaggccccaaggtggaactcggaactggaacaactgacgccaacatggacgagtggctggagggtaccgcgtttgcaaaggacaaggccaagaaaaacaaatagattcgaggttgatgggcctagctagacatttcaggatctagaatgagacaaatcgagggtagcccttcacaagtaacctggatagatgagagagcagaggtgtttgaactagtctcgtggctgcacatcttgttgacaccattttcgaccttgctgtgtactttacagatagttttccttgaaacacaattttgttgaaggtatatgttatctatgg

SEQ ID NO: 63466 - protein, 255 aa, Triticum aestivum
  peptide (1)..(255): Ceres Seq. ID no. 13584255
  misc_feature (28)..(241): Homolog of NCBI NO: 1174450 NR Description: TRANSLOCON-ASSOCIATED PROTEIN, ALPHA SUBUNIT
  misc_feature (28)..(241): Homolog of NCBI NO: 34783867 NR Description: Unknown (protein for MGC:64448) [Xenopus laevis]
  misc_feature (28)..(241): Homolog of NCBI NO: 4507237 NR Description: signal sequence receptor, alpha; TRAP alpha [Homo
  misc_feature (124)..(255): Homolog of NCBI NO: 15227250 NR Description: TRAP protein -related [Arabidopsis thaliana]
  misc_feature (10)..(255): Homolog of NCBI NO: 547391 NR Description: alpha-subunit; putative
  misc_feature (7)..(255): Homolog of NCBI NO: 25335776 NR Description: hypothetical protein At2g21160 [imported] -
  misc_feature (7)..(255): Homolog of NCBI NO: 18399609 NR Description: signal sequence receptor, alpha subunit
  misc_feature (7)..(255): Homolog of NCBI NO: 21555380 NR Description: putative signal sequence receptor, alpha subunit
MAVRVWLSAILLAFLLAASPFAQVARAQSEEDAAMQEVVDGADLGYVGDDTPVSSEEPLSPAPGVETVCVFPKNAGKIVPAGEETELLVGLQNEGESTLNVVAVHSTLHLPYDHKMYGQNLTVQSFYNASVPVSVQATFPYTFAVSKFLQPGAYDLVGYIVYEIDQHPYQNVFYNGTIEVVEVGGLLSVESVFLITLGIALLGLLGLWAYGQVQQLSKKTKKGPKVELGTGTTDANMDEWLEGTAFAKDKAKKNK

SEQ ID NO: 63467 - protein, 221 aa, Triticum aestivum
  peptide (1)..(221): Ceres Seq. ID no. 13584256
  misc_feature (1)..(207): Homolog of NCBI NO: 1174450 NR Description: TRANSLOCON-ASSOCIATED PROTEIN, ALPHA SUBUNIT
  misc_feature (1)..(207): Homolog of NCBI NO: 34783867 NR Description: Unknown (protein for MGC:64448) [Xenopus laevis]
  misc_feature (1)..(207): Homolog of NCBI NO: 4507237 NR Description: signal sequence receptor, alpha; TRAP alpha [Homo
  misc_feature (90)..(221): Homolog of NCBI NO: 15227250 NR Description: TRAP protein -related [Arabidopsis thaliana]
  misc_feature (1)..(221): Homolog of NCBI NO: 547391 NR Description: alpha-subunit; putative
  misc_feature (1)..(221): Homolog of NCBI NO: 25335776 NR Description: hypothetical protein At2g21160 [imported] -
  misc_feature (1)..(221): Homolog of NCBI NO: 18399609 NR Description: signal sequence receptor, alpha subunit
  misc_feature (1)..(221): Homolog of NCBI NO: 21555380 NR Description: putative signal sequence receptor, alpha subunit
MQEVVDGADLGYVGDDTPVSSEEPLSPAPGVETVCVFPKNAGKIVPAGEETELLVGLQNEGESTLNVVAVHSTLHLPYDHKMYGQNLTVQSFYNASVPVSVQATFPYTFAVSKFLQPGAYDLVGYIVYEIDQHPYQNVFYNGTIEVVEVGGLLSVESVFLITLGIALLGLLGLWAYGQVQQLSKKTKKGPKVELGTGTTDANMDEWLEGTAFAKDKAKKNK

SEQ ID NO: 63468 - protein, 140 aa, Triticum aestivum
  peptide (1)..(140): Ceres Seq. ID no. 13584257
  misc_feature (1)..(126): Homolog of NCBI NO: 1174450 NR Description: TRANSLOCON-ASSOCIATED PROTEIN, ALPHA SUBUNIT
  misc_feature (1)..(126): Homolog of NCBI NO: 34783867 NR Description: Unknown (protein for MGC:64448) [Xenopus laevis]
  misc_feature (1)..(126): Homolog of NCBI NO: 4507237 NR Description: signal sequence receptor, alpha; TRAP alpha [Homo
  misc_feature (9)..(140): Homolog of NCBI NO: 15227250 NR Description: TRAP protein -related [Arabidopsis thaliana]
  misc_feature (1)..(140): Homolog of NCBI NO: 547391 NR Description: alpha-subunit; putative
  misc_feature (1)..(140): Homolog of NCBI NO: 25335776 NR Description: hypothetical protein At2g21160 [imported] -
  misc_feature (1)..(140): Homolog of NCBI NO: 18399609 NR Description: signal sequence receptor, alpha subunit
  misc_feature (1)..(140): Homolog of NCBI NO: 21555380 NR Description: putative signal sequence receptor, alpha subunit
MYGQNLTVQSFYNASVPVSVQATFPYTFAVSKFLQPGAYDLVGYIVYEIDQHPYQNVFYNGTIEVVEVGGLLSVESVFLITLGIALLGLLGLWAYGQVQQLSKKTKKGPKVELGTGTTDANMDEWLEGTAFAKDKAKKNK

SEQ ID NO: 63469 - DNA, 1092 bp, Triticum aestivum
  misc_feature (1)..(1092): Ceres Seq. ID no. 13584012
aatttctgctaacctgctgctgcggtcgccggcggcgaggaggaggaggaaggggctgagagatggcgggcgccggcggcacgagggagcgggaggaggaagaggaggacgacttcgtctgcctggatccctccttcttcatgaaccgcaactacgagatgaagaccttcacctacggctcccaggagctccagctcctctgcctcagctccgcctgcactgattatgatcttactggacaattagtgtggccaggtgctgttctgatgaacacgtacctatctgaacaccctgagactgtgaaggggcgttcactaattgagttaggatctgggatcggcattaccggcatattgtgcagccgtttctgcaaagaggtggtattgactgatcacaatgatgaagttctagagattataaagaaaaatatagagatgcagtcatgttctggcaatgcggatgcagtgttgactgctgagaagctagaatggggaaatcatgatcatctaagcaatatcattgaaaaacatcctgttggatttgatctcattcttggagccgatatctgcttccagcaagctagcattccatgtctctttgatactgtagagaagcttcttcgtatgcaggccaataaatgtagatttatactggcttatgtatcacgaaccaaagtcatggacgcactggtactgaaggaagctgaaaaacgtggaatgcttgtcgaggaagtggacgggacaagaacaaccatcacagatctcgaaggcgtcatattcgacatcaccctcaaatgacgcctccgatgaaatgcttgggtgacaattccatcagacaggaacaagatgtggagcctcctcccatcaggaaagccaatgttaccgccttcatgatctgctgagctggccctgaacatgatgtggtctctagtccgcatctctccactccatgggagaaaacagttgcacaacaccagcatcagtcctgatatggcgctgattgattcagcgtaacttttaaatgattcgtcggtcgtgacccctttcgctaaatcaagaagcgattcggggtcacgagcatcgcatcgccgtc

SEQ ID NO: 63470 - protein, 244 aa, Triticum aestivum
  peptide (1)..(244): Ceres Seq. ID no. 13584013
  misc_feature (33)..(185): Homolog of NCBI NO: 34877084 NR Description: similar to RIKEN cDNA 2310038H17 [Rattus
  misc_feature (58)..(218): Homolog of NCBI NO: 25407826 NR Description: hypothetical protein At2g26200 [imported] -
  misc_feature (58)..(218): Homolog of NCBI NO: 20197178 NR Description: hypothetical protein [Arabidopsis thaliana]
  misc_feature (58)..(221): Homolog of NCBI NO: 28950234 NR Description: conserved hypothetical protein [Neurospora crassa]
  misc_feature (58)..(218): Homolog of NCBI NO: 30683042 NR Description: expressed protein [Arabidopsis thaliana]
  misc_feature (3)..(92): Homolog of NCBI NO: 30683273 NR Description: expressed protein [Arabidopsis thaliana]
  misc_feature (3)..(92): Homolog of NCBI NO: 7460191 NR Description: hypothetical protein At2g26810 [imported] -
  misc_feature (119)..(244): Homolog of NCBI NO: 30683273 NR Description: expressed protein [Arabidopsis thaliana]
  misc_feature (3)..(244): Homolog of NCBI NO: 26449997 NR Description: unknown protein [Arabidopsis thaliana]
  misc_feature (6)..(244): Homolog of NCBI NO: 33146643 NR Description: unknown protein [Oryza sativa (japonica
MAGAGGTREREEEEEDDFVCLDPSFFMNRNYEMKTFTYGSQELQLLCLSSACTDYDLTGQLVWPGAVLMNTYLSEHPETVKGRSLIELGSGIGITGILCSRFCKEVVLTDHNDEVLEIIKKNIEMQSCSGNADAVLTAEKLEWGNHDHLSNIIEKHPVGFDLILGADICFQQASIPCLFDTVEKLLRMQANKCRFILAYVSRTKVMDALVLKEAEKRGMLVEEVDGTRTTITDLEGVIFDITLK

SEQ ID NO: 63471 - protein, 218 aa, Triticum aestivum
  peptide (1)..(218): Ceres Seq. ID no. 13584014
  misc_feature (7)..(159): Homolog of NCBI NO: 34877084 NR Description: similar to RIKEN cDNA 2310038H17 [Rattus
  misc_feature (32)..(192): Homolog of NCBI NO: 25407826 NR Description: hypothetical protein At2g26200 [imported] -
  misc_feature (32)..(192): Homolog of NCBI NO: 20197178 NR Description: hypothetical protein [Arabidopsis thaliana]
  misc_feature (32)..(195): Homolog of NCBI NO: 28950234 NR Description: conserved hypothetical protein [Neurospora crassa]
  misc_feature (32)..(192): Homolog of NCBI NO: 30683042 NR Description: expressed protein [Arabidopsis thaliana]
  misc_feature (1)..(66): Homolog of NCBI NO: 30683273 NR Description: expressed protein [Arabidopsis thaliana]
  misc_feature (1)..(66): Homolog of NCBI NO: 7460191 NR Description: hypothetical protein At2g26810 [imported] -
  misc_feature (93)..(218): Homolog of NCBI NO: 30683273 NR Description: expressed protein [Arabidopsis thaliana]
  misc_feature (1)..(218): Homolog of NCBI NO: 26449997 NR Description: unknown protein [Arabidopsis thaliana]
  misc_feature (1)..(218): Homolog of NCBI NO: 33146643 NR Description: unknown protein [Oryza sativa (japonica
MNRNYEMKTFTYGSQELQLLCLSSACTDYDLTGQLVWPGAVLMNTYLSEHPETVKGRSLIELGSGIGITGILCSRFCKEVVLTDHNDEVLEIIKKNIEMQSCSGNADAVLTAEKLEWGNHDHLSNIIEKHPVGFDLILGADICFQQASIPCLFDTVEKLLRMQANKCRFILAYVSRTKVMDALVLKEAEKRGMLVEEVDGTRTTITDLEGVIFDITLK

SEQ ID NO: 63472 - protein, 212 aa, Triticum aestivum
  peptide (1)..(212): Ceres Seq. ID no. 13584015
  misc_feature (1)..(153): Homolog of NCBI NO: 34877084 NR Description: similar to RIKEN cDNA 2310038H17 [Rattus
  misc_feature (26)..(186): Homolog of NCBI NO: 25407826 NR Description: hypothetical protein At2g26200 [imported] -
  misc_feature (26)..(186): Homolog of NCBI NO: 20197178 NR Description: hypothetical protein [Arabidopsis thaliana]
  misc_feature (26)..(189): Homolog of NCBI NO: 28950234 NR Description: conserved hypothetical protein [Neurospora crassa]
  misc_feature (26)..(186): Homolog of NCBI NO: 30683042 NR Description: expressed protein [Arabidopsis thaliana]
  misc_feature (1)..(60): Homolog of NCBI NO: 30683273 NR Description: expressed protein [Arabidopsis thaliana]
  misc_feature (1)..(60): Homolog of NCBI NO: 7460191 NR Description: hypothetical protein At2g26810 [imported] -
  misc_feature (87)..(212): Homolog of NCBI NO: 30683273 NR Description: expressed protein [Arabidopsis thaliana]
  misc_feature (1)..(212): Homolog of NCBI NO: 26449997 NR Description: unknown protein [Arabidopsis thaliana]
  misc_feature (1)..(212): Homolog of NCBI NO: 33146643 NR Description: unknown protein [Oryza sativa (japonica
MKTFTYGSQELQLLCLSSACTDYDLTGQLVWPGAVLMNTYLSEHPETVKGRSLIELGSGIGITGILCSRFCKEVVLTDHNDEVLEIIKKNIEMQSCSGNADAVLTAEKLEWGNHDHLSNIIEKHPVGFDLILGADICFQQASIPCLFDTVEKLLRMQANKCRFILAYVSRTKVMDALVLKEAEKRGMLVEEVDGTRTTITDLEGVIFDITLK

SEQ ID NO: 63473 - DNA, 920 bp, Triticum aestivum
  misc_feature (1)..(920): Ceres Seq. ID no. 13503003
attttgactgattagcctcatgtgagcttacacttgcacgtttccaaaattggtctacgctttcacgtggtttactttcttcgtttcaaattgcttaaattttcgcaaagttaactacagacagtgctagtgtagagtagcatcatcagttcactgcgcaccgacagccaaactagcaccggggtccgaggcagacgccatggccgacgacgaggtggtcgtcgcgtccgcggaggagtcgctgaccactccgctgctcgagccagccgcgagcccccgcgacccgtcggtggaggtgagtctgtaccggcggggcgccggcccgcccaaggtcttccggtcgggcctgaggggccctcgccgcgaccgcctcgacgtgcgcggcatccaggcagagcacgagctccgcgccctcttcgccttcaagccgggggtctcccgccgcggcctccggatccggcccgacccggcgaccggccactccgccgtgcccttccgcgacggcgccgccatcgccctcgacggcgagcccaaggtgcaggtgtcgtggaccaagcctgcctcgatgatcgtcgtcggtctgctggtgctggcgttgatggcggtggtggctttcaacggggtgccggagtcgctactgtcgtcgagcgtagtcaaagccctcttctcgccgtggatcctcgccagcgcggttatcgtcttcgtccgtctcaggatgcggccacaagctcctccccgtctcaggatgcggccacaagctcctccatgaacggaaccgagctatggtactgtaataactctcctttgtgatatccagagaagcccttcttctctggtttctcttcaggaattatgtgcaatggagacaaaattccagaataaatgtgtgtgcagtttgcttcaacgcgaataatcatctc

SEQ ID NO: 63474 - protein, 189 aa, Triticum aestivum
  peptide (1)..(189): Ceres Seq. ID no. 13503004
  misc_feature (16)..(174): Homolog of NCBI NO: 25373323 NR Description: hypothetical protein F14O23.16 [imported] -
  misc_feature (16)..(174): Homolog of NCBI NO: 18409911 NR Description: expressed protein [Arabidopsis thaliana]
  misc_feature (1)..(174): Homolog of NCBI NO: 34910596 NR Description: B1131B07.26 [Oryza sativa (japonica
  misc_feature (1)..(120): Homolog of NCBI NO: 34906292 NR Description: unnamed protein product [Oryza sativa (japonica
MADDEVVVASAEESLTTPLLEPAASPRDPSVEVSLYRRGAGPPKVFRSGLRGPRRDRLDVRGIQAEHELRALFAFKPGVSRRGLRIRPDPATGHSAVPFRDGAAIALDGEPKVQVSWTKPASMIVVGLLVLALMAVVAFNGVPESLLSSSVVKALFSPWILASAVIVFVRLRMRPQAPPRLRMRPQAPP

SEQ ID NO: 63475 - DNA, 1539 bp, Triticum aestivum
  misc_feature (1)..(1539): Ceres Seq. ID no. 15224912
atatcagataatcagagttctggacttgaagtagagttcgatgatgagatcaggctgaagcttcaagagctggagcatgctttacttgatgatggagatgacatcttgttcgaaatttcccaggcgggttgcatcagtgatgaatgggccgatcccatgaaggatgtcttgcttgcaacttctccgaaagaatcggaatcaagcattagttgtgcaggtagcaacagcggagaagcacggaccccaaagcagttgctctttgactgtgccacggcattagctgaatataacgtagatgaagcacaggcaatcataacggacctccggcagatggtctcaatccaaggggacccttctcacaggattgcagcttatctggtggagggccttgctgcaagaatagtagcttcagggacgggcatctacaaggcattgacatgcaaggaccctccaaccctgtatcagctgtcagcaatgcaaatcctctttgagatctgcccatgctatcgatttggtttcatggctgctaattatgccatacttgaagcctgcaaaggcgaagaaaggatgcatattatagactttgacatcaatcaaggcagccagtatattacactgatgcagtttatgaaagatgatgcaaacaagccacgccatttgagaataactggtgtggatgatcacgagacagtacagaggactgttggaggtctgaaggtcattgggcaacgcctggagaagcttgcggaggactgcggaatatcttttgagttcagggcagtgggtgccgacatcggggatgttacacctgcaatgctagattgccgtcccggggaagcactagttgtgaattttgcattccagctgcaccaccttcctgatgaaagtgtttcgatcatgaacgaacgggatcagctccttcgtatggtgaagggccttcaaccaaagcttgtgaccctggttgagcaggatgccaataccaatactgctccatttcagacaaggttccgtgaggtctatgactactactccgctcttttcgattcactggacgcaacacttccaagggaaagtccggacagaatgaatgtggagaggcagtgccttgctagagaaattgttaacatcttggcttgcgaaggccctgatcgcgtggagaggtacgaagttgctgggaaatggagggcgagaatgacgatggctggattcgcaccgtgcccatttagcagcaacgtcatcggaggaataagatcgctgctgagctcgtactgcgacaggtacaagttcgaggaggaccatgggggacttcacttcggctggggagagaaaacgctcatcgtcgcctccgcgtggcaataggccgagctcgctgacttgggttgcattagcactgctgtattttaggagcttctggtgcagagattgtaaaaagggtgtgaaccacggaggagttcttggctgatcttatctaattttaggagtctgcttgtcagaataattgagtttggctgatcgcccgggtgaaaaaaaaaaaaaaaa

SEQ ID NO: 63476 - protein, 452 aa, Triticum aestivum
  peptide (1)..(452): Ceres Seq. ID no. 15224913
  misc_feature (58)..(362): Pfam Name: GRAS family transcription factor Pfam Description: GRAS family transcription factor
  misc_feature (83)..(452): Homolog of NCBI NO: 30694805 NR Description: scarecrow-like transcription factor 5 (SCL5)
  misc_feature (83)..(452): Homolog of NCBI NO: 25405382 NR Description: scarecrow-like protein [imported] - Arabidopsis
  misc_feature (83)..(452): Homolog of NCBI NO: 23397333 NR Description: putative scarecrow protein [Arabidopsis thaliana]
  misc_feature (83)..(451): Homolog of NCBI NO: 25989334 NR Description: chitin-inducible gibberellin-responsive protein
  misc_feature (55)..(452): Homolog of NCBI NO: 26450054 NR Description: putative SCARECROW gene regulator [Arabidopsis
  misc_feature (55)..(452): Homolog of NCBI NO: 15238903 NR Description: phytochrome A signal transduction 1 (PAT1)
  misc_feature (16)..(451): Homolog of NCBI NO: 37533564 NR Description: putative SCARECROW gene regulator-like
  misc_feature (103)..(452): Homolog of NCBI NO: 11358822 NR Description: scarecrow-like protein 1
  misc_feature (1)..(452): Homolog of NCBI NO: 15218990 NR Description: scarecrow-like transcription factor 1 (SCL1)
  misc_feature (1)..(452): Homolog of NCBI NO: 34907424 NR Description: scarecrow-like protein [Oryza sativa (japonica
ISDNQSSGLEVEFDDEIRLKLQELEHALLDDGDDILFEISQAGCISDEWADPMKDVLLATSPKESESSISCAGSNSGEARTPKQLLFDCATALAEYNVDEAQAIITDLRQMVSIQGDPSHRIAAYLVEGLAARIVASGTGIYKALTCKDPPTLYQLSAMQILFEICPCYRFGFMAANYAILEACKGEERMHIIDFDINQGSQYITLMQFMKDDANKPRHLRITGVDDHETVQRTVGGLKVIGQRLEKLAEDCGISFEFRAVGADIGDVTPAMLDCRPGEALVVNFAFQLHHLPDESVSIMNERDQLLRMVKGLQPKLVTLVEQDANTNTAPFQTRFREVYDYYSALFDSLDATLPRESPDRMNVERQCLAREIVNILACEGPDRVERYEVAGKWRARMTMAGFAPCPFSSNVIGGIRSLLSSYCDRYKFEEDHGGLHFGWGEKTLIVASAWQ

SEQ ID NO: 63477 - protein, 400 aa, Triticum aestivum
  peptide (1)..(400): Ceres Seq. ID no. 15224914
  misc_feature (6)..(310): Pfam Name: GRAS family transcription factor Pfam Description: GRAS family transcription factor
  misc_feature (31)..(400): Homolog of NCBI NO: 30694805 NR Description: scarecrow-like transcription factor 5 (SCL5)
  misc_feature (31)..(400): Homolog of NCBI NO: 25405382 NR Description: scarecrow-like protein [imported] - Arabidopsis
  misc_feature (31)..(400): Homolog of NCBI NO: 23397333 NR Description: putative scarecrow protein [Arabidopsis thaliana]
  misc_feature (31)..(399): Homolog of NCBI NO: 25989334 NR Description: chitin-inducible gibberellin-responsive protein
  misc_feature (3)..(400): Homolog of NCBI NO: 26450054 NR Description: putative SCARECROW gene regulator [Arabidopsis
  misc_feature (3)..(400): Homolog of NCBI NO: 15238903 NR Description: phytochrome A signal transduction 1 (PAT1)
  misc_feature (1)..(399): Homolog of NCBI NO: 37533564 NR Description: putative SCARECROW gene regulator-like
  misc_feature (51)..(400): Homolog of NCBI NO: 11358822 NR Description: scarecrow-like protein 1
  misc_feature (1)..(400): Homolog of NCBI NO: 15218990 NR Description: scarecrow-like transcription factor 1 (SCL1)
  misc_feature (1)..(400): Homolog of NCBI NO: 34907424 NR Description: scarecrow-like protein [Oryza sativa (japonica
MKDVLLATSPKESESSISCAGSNSGEARTPKQLLFDCATALAEYNVDEAQAIITDLRQMVSIQGDPSHRIAAYLVEGLAARIVASGTGIYKALTCKDPPTLYQLSAMQILFEICPCYRFGFMAANYAILEACKGEERMHIIDFDINQGSQYITLMQFMKDDANKPRHLRITGVDDHETVQRTVGGLKVIGQRLEKLAEDCGISFEFRAVGADIGDVTPAMLDCRPGEALVVNFAFQLHHLPDESVSIMNERDQLLRMVKGLQPKLVTLVEQDANTNTAPFQTRFREVYDYYSALFDSLDATLPRESPDRMNVERQCLAREIVNILACEGPDRVERYEVAGKWRARMTMAGFAPCPFSSNVIGGIRSLLSSYCDRYKFEEDHGGLHFGWGEKTLIVASAWQ

SEQ ID NO: 63478 - protein, 342 aa, Triticum aestivum
  peptide (1)..(342): Ceres Seq. ID no. 15224915
  misc_feature (1)..(252): Pfam Name: GRAS family transcription factor Pfam Description: GRAS family transcription factor
  misc_feature (1)..(342): Homolog of NCBI NO: 30694805 NR Description: scarecrow-like transcription factor 5 (SCL5)
  misc_feature (1)..(342): Homolog of NCBI NO: 25405382 NR Description: scarecrow-like protein [imported] - Arabidopsis
  misc_feature (1)..(342): Homolog of NCBI NO: 23397333 NR Description: putative scarecrow protein [Arabidopsis thaliana]
  misc_feature (1)..(341): Homolog of NCBI NO: 25989334 NR Description: chitin-inducible gibberellin-responsive protein
  misc_feature (1)..(342): Homolog of NCBI NO: 26450054 NR Description: putative SCARECROW gene regulator [Arabidopsis
  misc_feature (1)..(342): Homolog of NCBI NO: 15238903 NR Description: phytochrome A signal transduction 1 (PAT1)
  misc_feature (1)..(341): Homolog of NCBI NO: 37533564 NR Description: putative SCARECROW gene regulator-like
  misc_feature (1)..(342): Homolog of NCBI NO: 11358822 NR Description: scarecrow-like protein 1
  misc_feature (1)..(342): Homolog of NCBI NO: 15218990 NR Description: scarecrow-like transcription factor 1 (SCL1)
  misc_feature (1)..(342): Homolog of NCBI NO: 34907424 NR Description: scarecrow-like protein [Oryza sativa (japonica
MVSIQGDPSHRIAAYLVEGLAARIVASGTGIYKALTCKDPPTLYQLSAMQILFEICPCYRFGFMAANYAILEACKGEERMHIIDFDINQGSQYITLMQFMKDDANKPRHLRITGVDDHETVQRTVGGLKVIGQRLEKLAEDCGISFEFRAVGADIGDVTPAMLDCRPGEALVVNFAFQLHHLPDESVSIMNERDQLLRMVKGLQPKLVTLVEQDANTNTAPFQTRFREVYDYYSALFDSLDATLPRESPDRMNVERQCLAREIVNILACEGPDRVERYEVAGKWRARMTMAGFAPCPFSSNVIGGIRSLLSSYCDRYKFEEDHGGLHFGWGEKTLIVASAWQ

SEQ ID NO: 63479 - DNA, 1278 bp, Triticum aestivum
  misc_feature (1)..(1278): Ceres Seq. ID no. 13597033
cacttccgccagcgaccgatccattcccacttcgcacagacgcatccgcatccgcatccacccccggtagtacagatcggatccccacccatggccgggcacttcgacctccagggcaggcatggcaagtcccgcgtccgcgtctcccgcgtctggcgccgccccgccgatgccggcggccacctcttcgtcgagtggagcgtcgccgtcagcgtcgtctccgactgcctcccatcctacacctccgacgacaactccgccatcgtcgccaccgactccatcaagaacaccgtgtatgtgaaggccaaggagtgcacggaggtggtgtccatggaggaattcgcggtcatcctcgggaggcatttcacctcactgtacccgcaggtctcagaggctgcagtgacaatcgtggagcgcccatgggagcgtgtggctgtggacgggaagccccattcgcatgggttcaaacttggttctgaaaagcacaccacagaggtcacggtgaagaagtctggaagcctgcttataaattctgggatacaaggatactccctgctaaagacaactcagtctggatttgaaggattcatgagggaccgctacactcttcttcctgaaacaagagaaagaattgtagcaacagaagtaactgcttggtggaggtatccgttcgagcatatttcccagcttccgtcaaagccattttgcttcacacaaagataccaggatgtaaagaaggttcttgcagacacattctttggtccttctgatgttggtgtatatagtccatccgtgcagaatacattatacctcatggctagggaagttcttaccaggttcccagacatagcatccgttcagcttaggatgccaaacctccactttcttcccgtgaacctaggggggaaagaaaatccaggattggtgaagtttgctgatgatgtgtacatgccgactgacgagccgcatggaaccatcgaagcaacgttgagccgtgccaactcaaagctgtaatttcacttgatgcttgtggccaggctcatgatttggtttggtttcttgaagatcacaatcgccaataaacaaagtgatagggggaaagctagcacaaccaccccttgcaaaagggtaaaaggacgtaaactttgcatatgtattcagctaattgacttgtacatggctagctagagttcccccatcgtaaattttactgttgtacaaaaccttcaatgtttcgttgtctccacaatgctataatatagcctgttttttctttcc

SEQ ID NO: 63480 - protein, 337 aa, Triticum aestivum
  peptide (1)..(337): Ceres Seq. ID no. 15222019
  misc_feature (175)..(328): Pfam Name: Uricase Pfam Description: Uricase
  misc_feature (35)..(337): Homolog of NCBI NO: 170033 NR Description: uricase II subunit
  misc_feature (35)..(337): Homolog of NCBI NO: 7242493 NR Description: urate oxidase [Cicer arietinum]
  misc_feature (35)..(337): Homolog of NCBI NO: 81803 NR Description: urate oxidase (EC 1.7.3.3) - soybean
  misc_feature (35)..(337): Homolog of NCBI NO: 170031 NR Description: nodulin 35
  misc_feature (35)..(337): Homolog of NCBI NO: 4996846 NR Description: uricase (Nod-35) [Medicago sativa]
  misc_feature (35)..(337): Homolog of NCBI NO: 6175091 NR Description: Uricase II (Urate oxidase) (Nodule specific
  misc_feature (35)..(337): Homolog of NCBI NO: 11414898 NR Description: uricase [Lotus japonicus]
  misc_feature (37)..(337): Homolog of NCBI NO: 15225267 NR Description: uricase subunit -related [Arabidopsis thaliana]
  misc_feature (37)..(337): Homolog of NCBI NO: 6175090 NR Description: Uricase (Urate oxidase) (Nodulin 35 homolog)
  misc_feature (31)..(337): Homolog of NCBI NO: 34908558 NR Description: putative uricase [Oryza sativa (japonica
HFRQRPIHSHFAQTHPHPHPPPVVQIGSPPMAGHFDLQGRHGKSRVRVSRVWRRPADAGGHLFVEWSVAVSVVSDCLPSYTSDDNSAIVATDSIKNTVYVKAKECTEVVSMEEFAVILGRHFTSLYPQVSEAAVTIVERPWERVAVDGKPHSHGFKLGSEKHTTEVTVKKSGSLLINSGIQGYSLLKTTQSGFEGFMRDRYTLLPETRERIVATEVTAWWRYPFEHISQLPSKPFCFTQRYQDVKKVLADTFFGPSDVGVYSPSVQNTLYLMAREVLTRFPDIASVQLRMPNLHFLPVNLGGKENPGLVKFADDVYMPTDEPHGTIEATLSRANSKL

SEQ ID NO: 63481 - protein, 307 aa, Triticum aestivum
  peptide (1)..(307): Ceres Seq. ID no. 15222020
  misc_feature (145)..(298): Pfam Name: Uricase Pfam Description: Uricase
  misc_feature (5)..(307): Homolog of NCBI NO: 170033 NR Description: uricase II subunit
  misc_feature (5)..(307): Homolog of NCBI NO: 7242493 NR Description: urate oxidase [Cicer arietinum]
  misc_feature (5)..(307): Homolog of NCBI NO: 81803 NR Description: urate oxidase (EC 1.7.3.3) - soybean
  misc_feature (5)..(307): Homolog of NCBI NO: 170031 NR Description: nodulin 35
  misc_feature (5)..(307): Homolog of NCBI NO: 4996846 NR Description: uricase (Nod-35) [Medicago sativa]
  misc_feature (5)..(307): Homolog of NCBI NO: 6175091 NR Description: Uricase II (Urate oxidase) (Nodule specific
  misc_feature (5)..(307): Homolog of NCBI NO: 11414898 NR Description: uricase [Lotus japonicus]
  misc_feature (7)..(307): Homolog of NCBI NO: 15225267 NR Description: uricase subunit -related [Arabidopsis thaliana]
  misc_feature (7)..(307): Homolog of NCBI NO: 6175090 NR Description: Uricase (Urate oxidase) (Nodulin 35 homolog)
  misc_feature (1)..(307): Homolog of NCBI NO: 34908558 NR Description: putative uricase [Oryza sativa (japonica
MAGHFDLQGRHGKSRVRVSRVWRRPADAGGHLFVEWSVAVSVVSDCLPSYTSDDNSAIVATDSIKNTVYVKAKECTEVVSMEEFAVILGRHFTSLYPQVSEAAVTIVERPWERVAVDGKPHSHGFKLGSEKHTTEVTVKKSGSLLINSGIQGYSLLKTTQSGFEGFMRDRYTLLPETRERIVATEVTAWWRYPFEHISQLPSKPFCFTQRYQDVKKVLADTFFGPSDVGVYSPSVQNTLYLMAREVLTRFPDIASVQLRMPNLHFLPVNLGGKENPGLVKFADDVYMPTDEPHGTIEATLSRANSKL

SEQ ID NO: 63482 - protein, 227 aa, Triticum aestivum
  peptide (1)..(227): Ceres Seq. ID no. 15222021
  misc_feature (65)..(218): Pfam Name: Uricase Pfam Description: Uricase
  misc_feature (1)..(227): Homolog of NCBI NO: 170033 NR Description: uricase II subunit
  misc_feature (1)..(227): Homolog of NCBI NO: 7242493 NR Description: urate oxidase [Cicer arietinum]
  misc_feature (1)..(227): Homolog of NCBI NO: 81803 NR Description: urate oxidase (EC 1.7.3.3) - soybean
  misc_feature (1)..(227): Homolog of NCBI NO: 170031 NR Description: nodulin 35
  misc_feature (1)..(227): Homolog of NCBI NO: 4996846 NR Description: uricase (Nod-35) [Medicago sativa]
  misc_feature (1)..(227): Homolog of NCBI NO: 6175091 NR Description: Uricase II (Urate oxidase) (Nodule specific
  misc_feature (1)..(227): Homolog of NCBI NO: 11414898 NR Description: uricase [Lotus japonicus]
  misc_feature (1)..(227): Homolog of NCBI NO: 15225267 NR Description: uricase subunit -related [Arabidopsis thaliana]
  misc_feature (1)..(227): Homolog of NCBI NO: 6175090 NR Description: Uricase (Urate oxidase) (Nodulin 35 homolog)
  misc_feature (1)..(227): Homolog of NCBI NO: 34908558 NR Description: putative uricase [Oryza sativa (japonica
MEEFAVILGRHFTSLYPQVSEAAVTIVERPWERVAVDGKPHSHGFKLGSEKHTTEVTVKKSGSLLINSGIQGYSLLKTTQSGFEGFMRDRYTLLPETRERIVATEVTAWWRYPFEHISQLPSKPFCFTQRYQDVKKVLADTFFGPSDVGVYSPSVQNTLYLMAREVLTRFPDIASVQLRMPNLHFLPVNLGGKENPGLVKFADDVYMPTDEPHGTIEATLSRANSKL

SEQ ID NO: 63483 - DNA, 1352 bp, Triticum aestivum
  misc_feature (1)..(1352): Ceres Seq. ID no. 12616285
atagtgcggtccgtcccgtcgcgtgctttcacatccatgatcagggcctgcctcagcgagctctgcgccagctgctgctcctgcgtgctcccgccgccgtcctcgccgcgcgccgccgaccaagagatggactccgacggcgccatcacgcaccgcagcgtcgaggccaacggcgtgcgcctccacgtggcggaggccggcccggccggcgcgccggtcgcgctgctgctgcacgggttcccggaggtgtggtacacctggcgccaccagatgcgcgcgctggccgccgcgggctaccgcgccgtcgcgcccgacatgcgcggctacggcggctccgacgcgccccccggcgggccggaccagtacacggcgctgcacgtcgtcggcgaccttgttgctctgattgattcgctcggcgagaagcaggtgttcgtcgtggcgcacgactggggcgccatgatcgcgtggagcctgtgcctgttccggccggacagggtgaaggcgctcgtcgccctcagcgtgcccttcagtccccggagccccgcgaggaagcccgtcgacggcttgaaggctctgtacggggacgagtactacatctgccgtatccaggagcctggggcaattgaagcagaattcgcacggctcggcacggagctggtgctaagaaagtttttcacttatcgaactcctggccctctgtttatccccaagagcggctggggctcaccagatgatgaggtgcccttgccgagctggatcacggaggaggacatcaaatactacgcgagtcagtttgacaagtctggcttcactggggcattgaactactaccgtgccctgaacaagacatgggaactcacgtcgccatggaccggagctgagataaaggtaccgaccaagtttatagttggtgatgtggacttgtcataccatgttgcaggcgcacatgattttattaacaaaggtggcctcaagaagtttgttccattactggacgatgtggtggtaatgaaagatgtcgggcatttcataaatgaagaaaaaccagaagaaattagtgcccatataatcagtttcttaaagaaattcgactgaaatgaggagtaacgaacacatcatggaacatggtcaaaatgtagatgcttgatggaaaatttgtattaagcccattgtattattgtgtcgcacaatttcacatatgtatgcaactattattttctttacatttcactctttgtttaatttttcatgtctagtgccgctaccctgctttctagtgtgtgtgcttgggttgtttcttcttaactaaaataaaagtgacagcggctagtcactgtcgcccgagttctttt

SEQ ID NO: 63484 - protein, 364 aa, Triticum aestivum
  peptide (1)..(364): Ceres Seq. ID no. 12616286
  misc_feature (99)..(356): Pfam Name: alpha/beta hydrolase fold Pfam Description: alpha/beta hydrolase fold
  misc_feature (49)..(363): Homolog of NCBI NO: 7489256 NR Description: probable epoxide hydrolase (EC 3.3.2.3) (clone
  misc_feature (49)..(363): Homolog of NCBI NO: 7489254 NR Description: probable epoxide hydrolase (EC 3.3.2.3) (clone
  misc_feature (51)..(363): Homolog of NCBI NO: 15225781 NR Description: epoxide hydrolase (ATsEH)
  misc_feature (49)..(363): Homolog of NCBI NO: 18411917 NR Description: coded for by A. thaliana cDNA T04215
  misc_feature (49)..(363): Homolog of NCBI NO: 25044843 NR Description: epoxide hydrolase [Ananas comosus]
  misc_feature (49)..(363): Homolog of NCBI NO: 34902880 NR Description: unnamed protein product [Oryza sativa (japonica
IVRSVPSRAFTSMIRACLSELCASCCSCVLPPPSSPRAADQEMDSDGAITHRSVEANGVRLHVAEAGPAGAPVALLLHGFPEVWYTWRHQMRALAAAGYRAVAPDMRGYGGSDAPPGGPDQYTALHVVGDLVALIDSLGEKQVFVVAHDWGAMIAWSLCLFRPDRVKALVALSVPFSPRSPARKPVDGLKALYGDEYYICRIQEPGAIEAEFARLGTELVLRKFFTYRTPGPLFIPKSGWGSPDDEVPLPSWITEEDIKYYASQFDKSGFTGALNYYRALNKTWELTSPWTGAEIKVPTKFIVGDVDLSYHVAGAHDFINKGGLKKFVPLLDDVVVMKDVGHFINEEKPEEISAHIISFLKKFD

SEQ ID NO: 63485 - protein, 352 aa, Triticum aestivum
  peptide (1)..(352): Ceres Seq. ID no. 12616287
  misc_feature (87)..(344): Pfam Name: alpha/beta hydrolase fold Pfam Description: alpha/beta hydrolase fold
  misc_feature (37)..(351): Homolog of NCBI NO: 7489256 NR Description: probable epoxide hydrolase (EC 3.3.2.3) (clone
  misc_feature (37)..(351): Homolog of NCBI NO: 7489254 NR Description: probable epoxide hydrolase (EC 3.3.2.3) (clone
  misc_feature (39)..(351): Homolog of NCBI NO: 15225781 NR Description: epoxide hydrolase (ATsEH)
  misc_feature (37)..(351): Homolog of NCBI NO: 18411917 NR Description: coded for by A. thaliana cDNA T04215
  misc_feature (37)..(351): Homolog of NCBI NO: 25044843 NR Description: epoxide hydrolase [Ananas comosus]
  misc_feature (37)..(351): Homolog of NCBI NO: 34902880 NR Description: unnamed protein product [Oryza sativa (japonica
MIRACLSELCASCCSCVLPPPSSPRAADQEMDSDGAITHRSVEANGVRLHVAEAGPAGAPVALLLHGFPEVWYTWRHQMRALAAAGYRAVAPDMRGYGGSDAPPGGPDQYTALHVVGDLVALIDSLGEKQVFVVAHDWGAMIAWSLCLFRPDRVKALVALSVPFSPRSPARKPVDGLKALYGDEYYICRIQEPGAIEAEFARLGTELVLRKFFTYRTPGPLFIPKSGWGSPDDEVPLPSWITEEDIKYYASQFDKSGFTGALNYYRALNKTWELTSPWTGAEIKVPTKFIVGDVDLSYHVAGAHDFINKGGLKKFVPLLDDVVVMKDVGHFINEEKPEEISAHIISFLKKFD

SEQ ID NO: 63486 - protein, 322 aa, Triticum aestivum
  peptide (1)..(322): Ceres Seq. ID no. 12616288
  misc_feature (57)..(314): Pfam Name: alpha/beta hydrolase fold Pfam Description: alpha/beta hydrolase fold
  misc_feature (7)..(321): Homolog of NCBI NO: 7489256 NR Description: probable epoxide hydrolase (EC 3.3.2.3) (clone
  misc_feature (7)..(321): Homolog of NCBI NO: 7489254 NR Description: probable epoxide hydrolase (EC 3.3.2.3) (clone
  misc_feature (9)..(321): Homolog of NCBI NO: 15225781 NR Description: epoxide hydrolase (ATsEH)
  misc_feature (7)..(321): Homolog of NCBI NO: 18411917 NR Description: coded for by A. thaliana cDNA T04215
  misc_feature (7)..(321): Homolog of NCBI NO: 25044843 NR Description: epoxide hydrolase [Ananas comosus]
  misc_feature (7)..(321): Homolog of NCBI NO: 34902880 NR Description: unnamed protein product [Oryza sativa (japonica
MDSDGAITHRSVEANGVRLHVAEAGPAGAPVALLLHGFPEVWYTWRHQMRALAAAGYRAVAPDMRGYGGSDAPPGGPDQYTALHVVGDLVALIDSLGEKQVFVVAHDWGAMIAWSLCLFRPDRVKALVALSVPFSPRSPARKPVDGLKALYGDEYYICRIQEPGAIEAEFARLGTELVLRKFFTYRTPGPLFIPKSGWGSPDDEVPLPSWITEEDIKYYASQFDKSGFTGALNYYRALNKTWELTSPWTGAEIKVPTKFIVGDVDLSYHVAGAHDFINKGGLKKFVPLLDDVVVMKDVGHFINEEKPEEISAHIISFLKKFD

SEQ ID NO: 63487 - DNA, 999 bp, Triticum aestivum
  misc_feature (1)..(999): Ceres Seq. ID no. 12616336
aatgccgcgccggtcactgtccccccagccccatcccgattttaacctcctcccctcgcactgaccaaaaccatgatttgcctcagagccatcccctcccctcgactcctccacctacccctaccccgcctcgcctcctccccgctccgccgcctcaggccctccgccgcagccatgtcctcctccccctccgtcgccgcgcccaccgtagcggcaccggtcgagcacatcgtgctcatcaaggtccgcccggaggccgtggcctcgggggccgccgcggcgatggtctccgcgctgcaggcgctctccacgctcgtcccgggggtctcctacatccacgcgggccccgtgctccgcctccgctccccggccgccgaggcgctgggccccacccacctcctccactcccgctacgccaccaaggccgacctcgccgcctacgccccgcacccggcccacgtggccgccgtgcaggcgcacgtcgcccccaacgctctcgacgccaccgccgttgactgggtcaacgccgcgggcgccccgtcccccgtcgcccccggcgccgccgtgcgcctcaccctcgccaaggtcaagcagggcgtggaggtcgggcagctcgtcgagaaggtggccgcggccaccaaggacgccggcgaggccagcggcgccaaggtcagcttcggggagaacttctcccccgcgcgggccaaggggtaccagttcgggatggtggccgtgttcgggagcgtcgaggagctggacgccgtggagggcgacggcaaggtggaggaggccaaggccgccctcaggcccatgctcgacgaggtcatggtgctggacttcgtcgtcgacgctccggcggccgcgagcctctgatggggggtttcaggttgatttcggatccgagtgtgctgccgatttgggaataatggagtcctttgtgatatctgtatcgatcttgagatgaataaccaatcaattgatgtgccagaaaaaaaaaaa

SEQ ID NO: 63488 - protein, 266 aa, Triticum aestivum
  peptide (1)..(266): Ceres Seq. ID no. 12616337
  misc_feature (50)..(258): Homolog of NCBI NO: 15223825 NR Description: unknown protein; protein id: At1g51360.1
  misc_feature (1)..(265): Homolog of NCBI NO: 15225120 NR Description: unknown protein; protein id: At2g31670.1
  misc_feature (46)..(264): Homolog of NCBI NO: 14192877 NR Description: Hypothetical protein [Oryza sativa]
  misc_feature (1)..(264): Homolog of NCBI NO: 34394190 NR Description: unknown protein [Oryza sativa (japonica
  misc_feature (1)..(266): Homolog of NCBI NO: 14192878 NR Description: Hypothetical protein [Oryza sativa]
MICLRAIPSPRLLHLPLPRLASSPLRRLRPSAAAMSSSPSVAAPTVAAPVEHIVLIKVRPEAVASGAAAAMVSALQALSTLVPGVSYIHAGPVLRLRSPAAEALGPTHLLHSRYATKADLAAYAPHPAHVAAVQAHVAPNALDATAVDWVNAAGAPSPVAPGAAVRLTLAKVKQGVEVGQLVEKVAAATKDAGEASGAKVSFGENFSPARAKGYQFGMVAVFGSVEELDAVEGDGKVEEAKAALRPMLDEVMVLDFVVDAPAAASL

SEQ ID NO: 63489 - protein, 232 aa, Triticum aestivum
  peptide (1)..(232): Ceres Seq. ID no. 12616338
  misc_feature (16)..(224): Homolog of NCBI NO: 15223825 NR Description: unknown protein; protein id: At1g51360.1
  misc_feature (1)..(231): Homolog of NCBI NO: 15225120 NR Description: unknown protein; protein id: At2g31670.1
  misc_feature (12)..(230): Homolog of NCBI NO: 14192877 NR Description: Hypothetical protein [Oryza sativa]
  misc_feature (1)..(230): Homolog of NCBI NO: 34394190 NR Description: unknown protein [Oryza sativa (japonica
  misc_feature (1)..(232): Homolog of NCBI NO: 14192878 NR Description: Hypothetical protein [Oryza sativa]
MSSSPSVAAPTVAAPVEHIVLIKVRPEAVASGAAAAMVSALQALSTLVPGVSYIHAGPVLRLRSPAAEALGPTHLLHSRYATKADLAAYAPHPAHVAAVQAHVAPNALDATAVDWVNAAGAPSPVAPGAAVRLTLAKVKQGVEVGQLVEKVAAATKDAGEASGAKVSFGENFSPARAKGYQFGMVAVFGSVEELDAVEGDGKVEEAKAALRPMLDEVMVLDFVVDAPAAASL

SEQ ID NO: 63490 - protein, 196 aa, Triticum aestivum
  peptide (1)..(196): Ceres Seq. ID no. 12616339
  misc_feature (1)..(188): Homolog of NCBI NO: 15223825 NR Description: unknown protein; protein id: At1g51360.1
  misc_feature (1)..(195): Homolog of NCBI NO: 15225120 NR Description: unknown protein; protein id: At2g31670.1
  misc_feature (1)..(194): Homolog of NCBI NO: 14192877 NR Description: Hypothetical protein [Oryza sativa]
  misc_feature (1)..(194): Homolog of NCBI NO: 34394190 NR Description: unknown protein [Oryza sativa (japonica
  misc_feature (1)..(196): Homolog of NCBI NO: 14192878 NR Description: Hypothetical protein [Oryza sativa]
MVSALQALSTLVPGVSYIHAGPVLRLRSPAAEALGPTHLLHSRYATKADLAAYAPHPAHVAAVQAHVAPNALDATAVDWVNAAGAPSPVAPGAAVRLTLAKVKQGVEVGQLVEKVAAATKDAGEASGAKVSFGENFSPARAKGYQFGMVAVFGSVEELDAVEGDGKVEEAKAALRPMLDEVMVLDFVVDAPAAASL

SEQ ID NO: 63491 - DNA, 1099 bp, Triticum aestivum
  misc_feature (1)..(1099): Ceres Seq. ID no. 12616706
aaaagcactgcattattcatcgctccgacagtcgacacagagcgagtcctcacccagagcaagcaagcaagaagatcgggaggagggtcggagtttgatcgccatttgattcgatggcgccggagtttgggtggtggccgatgtcgccgtggctgagcccaggcacggcgtcgttcatcttcttcaacgtcctcgtcggcgccatcgcggtcatgtcgtcgtcccgggggccggaaccggccgcccggcgcaagctcgttcgcacggcctcgaccgtcgtgctggagagcctgcgctcgatctccaacttccccttccactcactgggcgactacagcgtcgcgtgctctgcaccggcgtcgtcgcagctccaccacatgcaagcgcagtactatagtgctacgatccaagagcaagaagcgcgggaggtgagcgcggtggagcccgagccggcatcagtcgcccgagaagaagctgtagtggcggccgcaacgaccacctcgccgcagagcgcgcctgccgtggcagaggaggtgaacaggatggagcccgagccagcgtcagacgcccaagaagaaactgtagcggcggccacaacaactacctcgccgcagagcgcggcaccggcagcactcgacgcgtcagcgacggcgactcagggcgaggtcgaagacggggagtccatcagcttggacgaggcgtacgcactggcgcgcgcagggcggcagtccgccgccgacacggtggccacggtgccgaagaaggccaagggacgaggagcctacggatgcgggcggggaacggaggacgtccaagggaaggcggaggtggacgcgcgggcggagcagttcatccggcagttccgggaggagctcaagctggagcgcatcaactccatcctcaaccacacccacgcgctgcgccgcaccgccggggcacgctagccgaccggcgccgctcggccgatcctctcgtttgatcgtgtagagagagcagaatatttcatttgcttgtacagccattcatgggtcatttccgcagagaatgatgcgacagcacacagttttggattatttactgtaaccatatagtggcaggc

SEQ ID NO: 63492 - protein, 276 aa, Triticum aestivum
  peptide (1)..(276): Ceres Seq. ID no. 12616707
  misc_feature (158)..(271): Homolog of NCBI NO: 37572996 NR Description: unknown protein [Oryza sativa (japonica
MAPEFGWWPMSPWLSPGTASFIFFNVLVGAIAVMSSSRGPEPAARRKLVRTASTVVLESLRSISNFPFHSLGDYSVACSAPASSQLHHMQAQYYSATIQEQEAREVSAVEPEPASVAREEAVVAAATTTSPQSAPAVAEEVNRMEPEPASDAQEETVAAATTTTSPQSAAPAALDASATATQGEVEDGESISLDEAYALARAGRQSAADTVATVPKKAKGRGAYGCGRGTEDVQGKAEVDARAEQFIRQFREELKLERINSILNHTHALRRTAGAR

SEQ ID NO: 63493 - protein, 267 aa, Triticum aestivum
  peptide (1)..(267): Ceres Seq. ID no. 12616708
  misc_feature (149)..(262): Homolog of NCBI NO: 37572996 NR Description: unknown protein [Oryza sativa (japonica
MSPWLSPGTASFIFFNVLVGAIAVMSSSRGPEPAARRKLVRTASTVVLESLRSISNFPFHSLGDYSVACSAPASSQLHHMQAQYYSATIQEQEAREVSAVEPEPASVAREEAVVAAATTTSPQSAPAVAEEVNRMEPEPASDAQEETVAAATTTTSPQSAAPAALDASATATQGEVEDGESISLDEAYALARAGRQSAADTVATVPKKAKGRGAYGCGRGTEDVQGKAEVDARAEQFIRQFREELKLERINSILNHTHALRRTAGAR

SEQ ID NO: 63494 - protein, 243 aa, Triticum aestivum
  peptide (1)..(243): Ceres Seq. ID no. 12616709
  misc_feature (125)..(238): Homolog of NCBI NO: 37572996 NR Description: unknown protein [Oryza sativa (japonica
MSSSRGPEPAARRKLVRTASTVVLESLRSISNFPFHSLGDYSVACSAPASSQLHHMQAQYYSATIQEQEAREVSAVEPEPASVAREEAVVAAATTTSPQSAPAVAEEVNRMEPEPASDAQEETVAAATTTTSPQSAAPAALDASATATQGEVEDGESISLDEAYALARAGRQSAADTVATVPKKAKGRGAYGCGRGTEDVQGKAEVDARAEQFIRQFREELKLERINSILNHTHALRRTAGAR

SEQ ID NO: 63495 - DNA, 1204 bp, Triticum aestivum
  misc_feature (1)..(1204): Ceres Seq. ID no. 13597250
aaagagcagcagcgaccgcgcccatcaccaccaccacccgcctgacggagcccttccctcccatcggcggcggagatggtggggtggctcaaggcgctggtgtactgcgcagggggcatggcggtggtgggcctggcggcgctggtggcgctgcaggagcgcctcgtctacgtgcccgtgctccctggcctcccgcgcgcttaccccatcaagccctcgcgcctccgcctcatctacgaggacgtctggctccgcgccgccgacggcgtgcgcctccactcctggttcctccgccactctcccacctgccgaggtccgaccattctgttctttcaggaaaatgccggcaatattgcacatcgtttggaatgcgttcgactaatgatgcagcggctacagtgcaatgtgtttatgctttcttatagagggtatggtgagagcgagggttatccttctcagagtggcatcacaaaagatgcacaggccgcacttgatcatctagttcagaggaaggacattgacacatccaggatagttatctttgggagatctttaggaggtgctgttggagcagttcttgcaaaaaacaatcctgacaaggtgtctgctctaatattggaaaatacttttacatctatattggatatggctggtatcatgctgcccttcttaagatggttcataggcggtagttctgccaaaggcccaaaacttcttaactgcgttgttcgctctccatggagtacacttgatgttgttgcagaggtcaaacaacccattctcttcctttctggattgcaagatgaactggttcccccgtcacacatgaggatgctgtatgacaaagctgttgaacataacaggaattgtaggtttgttgattttcccagtggtatgcatatggatacctggatttctggaggggaccgctactggaggacaatcgaattgtttctggaccaatataccccagaagtacagagttctgatgccagctgcacaagtgaaattgctgatgatggtaattactaattagtatttaccaattcattataacattttcctgcgaatattgttctatcatgttttttcttgtacgtgtagggatacattatgttgtcatatttgtgtatttaactacatagtgtagttttactaatgttaatggcaatactgaatagtgaatacaaccatttgtatcttc

SEQ ID NO: 63496 - protein, 318 aa, Triticum aestivum
  peptide (1)..(318): Ceres Seq. ID no. 13597251
  misc_feature (111)..(201): Pfam Name: alpha/beta hydrolase fold Pfam Description: alpha/beta hydrolase fold
  misc_feature (4)..(294): Homolog of NCBI NO: 6324009 NR Description: Hypothetical ORF; Ynl320wp [Saccharomyces
  misc_feature (30)..(296): Homolog of NCBI NO: 40740775 NR Description: hypothetical protein AN3757.2 [Aspergillus
  misc_feature (1)..(307): Homolog of NCBI NO: 17137566 NR Description: CG18642-PA [Drosophila melanogaster]
  misc_feature (15)..(310): Homolog of NCBI NO: 34879678 NR Description: similar to 1110065L07Rik protein [Rattus
  misc_feature (15)..(310): Homolog of NCBI NO: 28483207 NR Description: RIKEN cDNA 1110065L07 [Mus musculus]
  misc_feature (15)..(294): Homolog of NCBI NO: 19112401 NR Description: supressor of bem1/bud5 [Schizosaccharomyces
  misc_feature (1)..(294): Homolog of NCBI NO: 2257503 NR Description: BEM46 PROTEIN [Schizosaccharomyces pombe]
  misc_feature (1)..(294): Homolog of NCBI NO: 987287 NR Description: temperature sensitive supressor of Saccharomyces
  misc_feature (1)..(305): Homolog of NCBI NO: 18420236 NR Description: expressed protein [Arabidopsis thaliana]
  misc_feature (1)..(315): Homolog of NCBI NO: 34395138 NR Description: putative membrane protein [Oryza sativa (japonica
MVGWLKALVYCAGGMAVVGLAALVALQERLVYVPVLPGLPRAYPIKPSRLRLIYEDVWLRAADGVRLHSWFLRHSPTCRGPTILFFQENAGNIAHRLECVRLMMQRLQCNVFMLSYRGYGESEGYPSQSGITKDAQAALDHLVQRKDIDTSRIVIFGRSLGGAVGAVLAKNNPDKVSALILENTFTSILDMAGIMLPFLRWFIGGSSAKGPKLLNCVVRSPWSTLDVVAEVKQPILFLSGLQDELVPPSHMRMLYDKAVEHNRNCRFVDFPSGMHMDTWISGGDRYWRTIELFLDQYTPEVQSSDASCTSEIADDGNY

SEQ ID NO: 63497 - protein, 304 aa, Triticum aestivum
  peptide (1)..(304): Ceres Seq. ID no. 13597252
  misc_feature (97)..(187): Pfam Name: alpha/beta hydrolase fold Pfam Description: alpha/beta hydrolase fold
  misc_feature (1)..(280): Homolog of NCBI NO: 6324009 NR Description: Hypothetical ORF; Ynl320wp [Saccharomyces
  misc_feature (16)..(282): Homolog of NCBI NO: 40740775 NR Description: hypothetical protein AN3757.2 [Aspergillus
  misc_feature (1)..(293): Homolog of NCBI NO: 17137566 NR Description: CG18642-PA [Drosophila melanogaster]
  misc_feature (1)..(296): Homolog of NCBI NO: 34879678 NR Description: similar to 1110065L07Rik protein [Rattus
  misc_feature (1)..(296): Homolog of NCBI NO: 28483207 NR Description: RIKEN cDNA 1110065L07 [Mus musculus]
  misc_feature (1)..(280): Homolog of NCBI NO: 19112401 NR Description: supressor of bem1/bud5 [Schizosaccharomyces
  misc_feature (1)..(280): Homolog of NCBI NO: 2257503 NR Description: BEM46 PROTEIN [Schizosaccharomyces pombe]
  misc_feature (1)..(280): Homolog of NCBI NO: 987287 NR Description: temperature sensitive supressor of Saccharomyces
  misc_feature (1)..(291): Homolog of NCBI NO: 18420236 NR Description: expressed protein [Arabidopsis thaliana]
  misc_feature (1)..(301): Homolog of NCBI NO: 34395138 NR Description: putative membrane protein [Oryza sativa (japonica
MAVVGLAALVALQERLVYVPVLPGLPRAYPIKPSRLRLIYEDVWLRAADGVRLHSWFLRHSPTCRGPTILFFQENAGNIAHRLECVRLMMQRLQCNVFMLSYRGYGESEGYPSQSGITKDAQAALDHLVQRKDIDTSRIVIFGRSLGGAVGAVLAKNNPDKVSALILENTFTSILDMAGIMLPFLRWFIGGSSAKGPKLLNCVVRSPWSTLDVVAEVKQPILFLSGLQDELVPPSHMRMLYDKAVEHNRNCRFVDFPSGMHMDTWISGGDRYWRTIELFLDQYTPEVQSSDASCTSEIADDGNY

SEQ ID NO: 63498 - protein, 216 aa, Triticum aestivum
  peptide (1)..(216): Ceres Seq. ID no. 13597253
  misc_feature (9)..(99): Pfam Name: alpha/beta hydrolase fold Pfam Description: alpha/beta hydrolase fold
  misc_feature (1)..(192): Homolog of NCBI NO: 6324009 NR Description: Hypothetical ORF; Ynl320wp [Saccharomyces
  misc_feature (1)..(194): Homolog of NCBI NO: 40740775 NR Description: hypothetical protein AN3757.2 [Aspergillus
  misc_feature (1)..(205): Homolog of NCBI NO: 17137566 NR Description: CG18642-PA [Drosophila melanogaster]
  misc_feature (1)..(208): Homolog of NCBI NO: 34879678 NR Description: similar to 1110065L07Rik protein [Rattus
  misc_feature (1)..(208): Homolog of NCBI NO: 28483207 NR Description: RIKEN cDNA 1110065L07 [Mus musculus]
  misc_feature (1)..(192): Homolog of NCBI NO: 19112401 NR Description: supressor of bem1/bud5 [Schizosaccharomyces
  misc_feature (1)..(192): Homolog of NCBI NO: 2257503 NR Description: BEM46 PROTEIN [Schizosaccharomyces pombe]
  misc_feature (1)..(192): Homolog of NCBI NO: 987287 NR Description: temperature sensitive supressor of Saccharomyces
  misc_feature (1)..(203): Homolog of NCBI NO: 18420236 NR Description: expressed protein [Arabidopsis thaliana]
  misc_feature (1)..(213): Homolog of NCBI NO: 34395138 NR Description: putative membrane protein [Oryza sativa (japonica
MMQRLQCNVFMLSYRGYGESEGYPSQSGITKDAQAALDHLVQRKDIDTSRIVIFGRSLGGAVGAVLAKNNPDKVSALILENTFTSILDMAGIMLPFLRWFIGGSSAKGPKLLNCVVRSPWSTLDVVAEVKQPILFLSGLQDELVPPSHMRMLYDKAVEHNRNCRFVDFPSGMHMDTWISGGDRYWRTIELFLDQYTPEVQSSDASCTSEIADDGNY

SEQ ID NO: 63499 - DNA, 847 bp, Triticum aestivum
  misc_feature (1)..(847): Ceres Seq. ID no. 13597058
agtggaagatttgatcatcgcgttccaggagagcagagcgggctgagcgattcggatcgctctccaccttccgccgccgtcccccttcctccccccgatccccaatccaatggtgctggtcctagcgctgggggatctgcacatcccgcaccgtgcgcccgacctgcccgccaagttcaagtccatgctcgtcccgggcaagatccagcacatcatctgcaccgggaacctctgcatcaaggaagttcacgactaccttaaaagcctctgtcctgatctccacattaccagaggtgaatatgatgaggatgctcgctacccagagactaaaacagttactattggtcagttcaagctagggctatgccatggccatcaggttgttccatggggcgacctggactccctagcgatgctccagaggcagctggatgtggacatcctcgtcaccgggcacacccatcagttcaaggcctacaagcacgaggggggtgtcgtcatcaaccctggctcaggcacgggcgcccacagcagcatcacatatgacgtcaacccgagctttgtgctcatggacatcgatggcctccgtgttgttgtctacgtgtacgagctcattgacggcgaggtgaaggttgaccagatcgacttcaagaagaccgccacgatgcatggctgatggtgcttacgcatgacagaaatctgatcctgtttgttcttaccccccacccccactccacaccacaccaccaccaccacaatttccccgacctggagctctttttcctttgtacccttctgctcgatatgaaaaactagagctgtgtatacatattagtgaatgggatat

SEQ ID NO: 63500 - protein, 188 aa, Triticum aestivum
  peptide (1)..(188): Ceres Seq. ID no. 13597059
  misc_feature (2)..(120): Pfam Name: Calcineurin-like phosphoesterase Pfam Description: Calcineurin-like phosphoesterase
  misc_feature (2)..(182): Homolog of NCBI NO: 12052754 NR Description: hypothetical protein [Homo sapiens]
  misc_feature (3)..(182): Homolog of NCBI NO: 9295176 NR Description: DC15 [Homo sapiens]
  misc_feature (3)..(183): Homolog of NCBI NO: 34872362 NR Description: similar to vacuolar protein sorting 29 isoform 2
  misc_feature (3)..(182): Homolog of NCBI NO: 17402912 NR Description: vacuolar protein sorting 29 isoform 2
  misc_feature (3)..(183): Homolog of NCBI NO: 12835154 NR Description: unnamed protein product [Mus musculus]
  misc_feature (2)..(182): Homolog of NCBI NO: 7706441 NR Description: vacuolar protein sorting 29 isoform 1
  misc_feature (2)..(183): Homolog of NCBI NO: 9790285 NR Description: vacuolar protein sorting 29
  misc_feature (2)..(183): Homolog of NCBI NO: 28279210 NR Description: Similar to vacuolar protein sorting 29 (S. pombe)
  misc_feature (44)..(185): Homolog of NCBI NO: 30692933 NR Description: calcineurin-like phosphoesterase family
  misc_feature (1)..(185): Homolog of NCBI NO: 7487365 NR Description: VPS29-like phosphoesterase-related protein
MVLVLALGDLHIPHRAPDLPAKFKSMLVPGKIQHIICTGNLCIKEVHDYLKSLCPDLHITRGEYDEDARYPETKTVTIGQFKLGLCHGHQVVPWGDLDSLAMLQRQLDVDILVTGHTHQFKAYKHEGGVVINPGSGTGAHSSITYDVNPSFVLMDIDGLRVVVYVYELIDGEVKVDQIDFKKTATMHG

SEQ ID NO: 63501 - protein, 163 aa, Triticum aestivum
  peptide (1)..(163): Ceres Seq. ID no. 13597060
  misc_feature (1)..(95): Pfam Name: Calcineurin-like phosphoesterase Pfam Description: Calcineurin-like phosphoesterase
  misc_feature (1)..(157): Homolog of NCBI NO: 12052754 NR Description: hypothetical protein [Homo sapiens]
  misc_feature (1)..(157): Homolog of NCBI NO: 9295176 NR Description: DC15 [Homo sapiens]
  misc_feature (1)..(158): Homolog of NCBI NO: 34872362 NR Description: similar to vacuolar protein sorting 29 isoform 2
  misc_feature (1)..(157): Homolog of NCBI NO: 17402912 NR Description: vacuolar protein sorting 29 isoform 2
  misc_feature (1)..(158): Homolog of NCBI NO: 12835154 NR Description: unnamed protein product [Mus musculus]
  misc_feature (1)..(157): Homolog of NCBI NO: 7706441 NR Description: vacuolar protein sorting 29 isoform 1
  misc_feature (1)..(158): Homolog of NCBI NO: 9790285 NR Description: vacuolar protein sorting 29
  misc_feature (1)..(158): Homolog of NCBI NO: 28279210 NR Description: Similar to vacuolar protein sorting 29 (S. pombe)
  misc_feature (19)..(160): Homolog of NCBI NO: 30692933 NR Description: calcineurin-like phosphoesterase family
  misc_feature (1)..(160): Homolog of NCBI NO: 7487365 NR Description: VPS29-like phosphoesterase-related protein
MLVPGKIQHIICTGNLCIKEVHDYLKSLCPDLHITRGEYDEDARYPETKTVTIGQFKLGLCHGHQVVPWGDLDSLAMLQRQLDVDILVTGHTHQFKAYKHEGGVVINPGSGTGAHSSITYDVNPSFVLMDIDGLRVVVYVYELIDGEVKVDQIDFKKTATMHG

SEQ ID NO: 63502 - DNA, 1359 bp, Triticum aestivum
  misc_feature (1)..(1359): Ceres Seq. ID no. 13597041
taatcgaaaaatttggtctgttgttagttcgatcgttctcattcaggtccttgaaacggcatggatgcttttctcgcatgcccggatcacagcccggcggccgggcggtcgctgacgccggcgcgcggcgctcccgcctcgtccccggcgctcatctcggccgtccaggacctgtacgagttcatctgcagcggcccactggtggaaaggattggctacacccgggagaggatcgccgagtccatcgaccggtggctgtggtgcggctcgcaggtgagccggttgttccgcatcgacgagctccggctgacggacgccgagaagtcgaggatataccacttctacatacccgtcttcctctggtgcgaggaccaggtcgccgaccacaggtccaagtacaacgacggcgacgagatcccgccattagtgattggagtcagcgctccccaaggcagcgggaagacaactcttgttttcgctcttgattatctttttcgggtttctggtaggaactctgccacattgtctatcgatgacttctatttgactgcagcagaacagggtaaactgagggaaacacatgctggaaatgctcttttagagtttcgtggaaatgccggaagccacgatctccaattctcaattgacacacttgagtcactgatcaaactaacaaaggaaggtacgaagatgaagcttccacggtatgacaagtccgcttttggtggaagaggtgaccgagctgacccttcgacatggccagaggttgaagggcctacagaggttgttctctttgaaggatggatgcttgggtttaaacctcttccaaatgaagttgtaacagcagtggatcctcagcttgaggtgattaataagaacctagaagcatactatgacgcgtgggacagattcattgagtcatggattgtcataaaaattaaggagcctaactgtgtatttcagtggagactacaggcagaggtagctatgagagctgatggtaaagcaggaatgtctgacgaggaggttatggattttgtatcgcgctacctaccagcataccatgcctatttgcccacgctatataaagaaggaccaaatggcgcgaagaaagaccatctgctggtcattgacatagacgaagagaggactcctatatctggtagttgagtgctgagtgtacattctgaaatggatatcttgacttggtggttgagcttgggatttctgatctttctgagaccacttctgccaagcaagcaccaccgtcctcttgtttcttacagcttaaatatatcctaaacgtgtaaattcgatgtatatcaatttttgctatctatttaaagaaactggcatccc

SEQ ID NO: 63503 - protein, 369 aa, Triticum aestivum
  peptide (1)..(369): Ceres Seq. ID no. 13597042
  misc_feature (123)..(355): Pfam Name: Phosphoribulokinase / Uridine kinase family Pfam Description: Phosphoribulokinase / Uridine kinase family
  misc_feature (25)..(120): Homolog of NCBI NO: 21537005 NR Description: unknown [Arabidopsis thaliana]
  misc_feature (213)..(366): Homolog of NCBI NO: 21537005 NR Description: unknown [Arabidopsis thaliana]
  misc_feature (25)..(120): Homolog of NCBI NO: 18412831 NR Description: auxin-regulated protein [Arabidopsis thaliana]
  misc_feature (213)..(366): Homolog of NCBI NO: 18412831 NR Description: auxin-regulated protein [Arabidopsis thaliana]
  misc_feature (25)..(157): Homolog of NCBI NO: 25406658 NR Description: unknown protein F5I6.13 [imported] - Arabidopsis
  misc_feature (150)..(366): Homolog of NCBI NO: 25406658 NR Description: unknown protein F5I6.13 [imported] - Arabidopsis
  misc_feature (25)..(366): Homolog of NCBI NO: 16226442 NR Description: At1g80380/F5I6_13 [Arabidopsis thaliana]
  misc_feature (25)..(366): Homolog of NCBI NO: 30699506 NR Description: auxin-regulated protein [Arabidopsis thaliana]
  misc_feature (266)..(368): Homolog of NCBI NO: 34911206 NR Description: P0019E03.19 [Oryza sativa (japonica
  misc_feature (3)..(242): Homolog of NCBI NO: 34911206 NR Description: P0019E03.19 [Oryza sativa (japonica
MDAFLACPDHSPAAGRSLTPARGAPASSPALISAVQDLYEFICSGPLVERIGYTRERIAESIDRWLWCGSQVSRLFRIDELRLTDAEKSRIYHFYIPVFLWCEDQVADHRSKYNDGDEIPPLVIGVSAPQGSGKTTLVFALDYLFRVSGRNSATLSIDDFYLTAAEQGKLRETHAGNALLEFRGNAGSHDLQFSIDTLESLIKLTKEGTKMKLPRYDKSAFGGRGDRADPSTWPEVEGPTEVVLFEGWMLGFKPLPNEVVTAVDPQLEVINKNLEAYYDAWDRFIESWIVIKIKEPNCVFQWRLQAEVAMRADGKAGMSDEEVMDFVSRYLPAYHAYLPTLYKEGPNGAKKDHLLVIDIDEERTPISGS

SEQ ID NO: 63504 - DNA, 827 bp, Triticum aestivum
  misc_feature (1)..(827): Ceres Seq. ID no. 13597065
cccaagtaagcaaagcagccaggtcggacccaatcaaacccaaagaaagcaagaactttccccggccgtccatggccacctaccccctcctcctcctcttcgccgccgtcgccgtagccgtagcggcggcgtcgtccgcgggggacaagccaacggcgtacgagatgctggagcggtacgacttcccgcggggcatcctgccggagggggtggaggggtacgagctcgatccggacggcggcttccaggtgtacttcccgcgggagtgcgagttcctgctagcgaagcagtggctggtcaagtacgacacgcgcatcgccggcgccgccagcgcgggcaagctcgcggcgctgcagggcatctacgtcaaggtactcttcctgtggatccccgtcgccgaggtcgaccgcgccggcgaccgcctcagcttctacatcggccccgtctccacgtccttcccgctaagcgacttcgccagcagcccgcactgtcgcggctaccacgaccgcgccgccgtcgctgcggccgtctcgtgaatcatatgctttttacatgtactcctacttagctactgctgctggggggaaatagtatatttcacatggaaaactctattgatacggcctgattatttgaacaagacgcacaagagtcattgtttcaattaaccttctgtgccgtggtggttcgtggatatcacaatgagctctatacgattccagtttagcttgagagccaatgttggcgtttcgcaggagccagcgtttatctagaattttcttgagatgtactggtatgtatttatagatcacagattagtttatggt

SEQ ID NO: 63505 - protein, 188 aa, Triticum aestivum
  peptide (1)..(188): Ceres Seq. ID no. 13597066
PSKQSSQVGPNQTQRKQELSPAVHGHLPPPPPLRRRRRSRSGGVVRGGQANGVRDAGAVRLPAGHPAGGGGGVRARSGRRLPGVLPAGVRVPASEAVAGQVRHAHRRRRQRGQARGAAGHLRQGTLPVDPRRRGRPRRRPPQLLHRPRLHVLPAKRLRQQPALSRLPRPRRRRCGRLVNHMLFTCTPT

SEQ ID NO: 63506 - protein, 177 aa, Triticum aestivum
  peptide (1)..(177): Ceres Seq. ID no. 13597067
  misc_feature (30)..(163): Pfam Name: Protein of unknown function, DUF538 Pfam Description: Protein of unknown function, DUF538
  misc_feature (16)..(163): Homolog of NCBI NO: 18405296 NR Description: expressed protein [Arabidopsis thaliana]
  misc_feature (24)..(163): Homolog of NCBI NO: 28273408 NR Description: unknown protein [Oryza sativa (japonica
  misc_feature (24)..(163): Homolog of NCBI NO: 34912320 NR Description: P0451D05.23 [Oryza sativa (japonica
  misc_feature (30)..(163): Homolog of NCBI NO: 29824472 NR Description: hypothetical protein [Oryza sativa (japonica
  misc_feature (24)..(163): Homolog of NCBI NO: 21553750 NR Description: unknown [Arabidopsis thaliana]
  misc_feature (24)..(163): Homolog of NCBI NO: 18379012 NR Description: expressed protein [Arabidopsis thaliana]
  misc_feature (29)..(163): Homolog of NCBI NO: 15235335 NR Description: expressed protein [Arabidopsis thaliana]
  misc_feature (32)..(163): Homolog of NCBI NO: 18379014 NR Description: expressed protein [Arabidopsis thaliana]
  misc_feature (24)..(163): Homolog of NCBI NO: 21554037 NR Description: unknown [Arabidopsis thaliana]
  misc_feature (24)..(163): Homolog of NCBI NO: 18411923 NR Description: expressed protein [Arabidopsis thaliana]
QVSKAARSDPIKPKESKNFPRPSMATYPLLLLFAAVAVAVAAASSAGDKPTAYEMLERYDFPRGILPEGVEGYELDPDGGFQVYFPRECEFLLAKQWLVKYDTRIAGAASAGKLAALQGIYVKVLFLWIPVAEVDRAGDRLSFYIGPVSTSFPLSDFASSPHCRGYHDRAAVAAAVS

SEQ ID NO: 63507 - protein, 154 aa, Triticum aestivum
  peptide (1)..(154): Ceres Seq. ID no. 13597068
  misc_feature (7)..(140): Pfam Name: Protein of unknown function, DUF538 Pfam Description: Protein of unknown function, DUF538
  misc_feature (1)..(140): Homolog of NCBI NO: 18405296 NR Description: expressed protein [Arabidopsis thaliana]
  misc_feature (1)..(140): Homolog of NCBI NO: 28273408 NR Description: unknown protein [Oryza sativa (japonica
  misc_feature (1)..(140): Homolog of NCBI NO: 34912320 NR Description: P0451D05.23 [Oryza sativa (japonica
  misc_feature (7)..(140): Homolog of NCBI NO: 29824472 NR Description: hypothetical protein [Oryza sativa (japonica
  misc_feature (1)..(140): Homolog of NCBI NO: 21553750 NR Description: unknown [Arabidopsis thaliana]
  misc_feature (1)..(140): Homolog of NCBI NO: 18379012 NR Description: expressed protein [Arabidopsis thaliana]
  misc_feature (6)..(140): Homolog of NCBI NO: 15235335 NR Description: expressed protein [Arabidopsis thaliana]
  misc_feature (9)..(140): Homolog of NCBI NO: 18379014 NR Description: expressed protein [Arabidopsis thaliana]
  misc_feature (1)..(140): Homolog of NCBI NO: 21554037 NR Description: unknown [Arabidopsis thaliana]
  misc_feature (1)..(140): Homolog of NCBI NO: 18411923 NR Description: expressed protein [Arabidopsis thaliana]
MATYPLLLLFAAVAVAVAAASSAGDKPTAYEMLERYDFPRGILPEGVEGYELDPDGGFQVYFPRECEFLLAKQWLVKYDTRIAGAASAGKLAALQGIYVKVLFLWIPVAEVDRAGDRLSFYIGPVSTSFPLSDFASSPHCRGYHDRAAVAAAVS

SEQ ID NO: 63508 - DNA, 1607 bp, Triticum aestivum
  misc_feature (1)..(1607): Ceres Seq. ID no. 13597043
agcttaggaaatcctaaaccctagccccctctccccactcccatggcgccgccgtcgcaactggtgctcgcggcctcctccaccgacgccggcgtggccgcgtgggacctccgcacggggtccgaggccatccgccaccgcccctgcgcctcccggccacgtgccgtcgctgccgtcgccggccgcttcctcgccgccgcccaaatcgccgccggcaactccgcccccatccactactaccactgggacaagcctcaggtggctgtgaagagcttccccgccgagccaatccgcgcgctcattgctgacccggaggggaactatctcatcggcggcggtgtgtccggtgacatattcttttgggaggtggctagtggagagctgcttgtccgatggcatgctcactatcgtgatgttaggtgccttgccctctatgacatgttgcttgtctcagcgtccgaggatgggagcatcaaaatttgggatcttctcacgatgcttgatgagcaatcaaggtttgaggcaaagacgccatacctatacaacttcaatcagcacacacttcctgtaactgatattgcttgttttcatggagcaattgctgtgtcatcttcagaggaccgcacatgtaaaatatggagtctatcagagggcaggatgctgagaagtatttcatttcctgctatcattgattctgttgaaatagacccaagaagtcatattttctatgctggtggtagagatggaaagatatatgttactgctatgggtgttgatgcctcctctcagggccgtgatgattcgtctattctcggtattctggatgaccacagcaaggcggtaacgagcttaacatcaagtacagatggccttctactagtctctggttcggaggatggtaatgttcgggtttgggataccagaagtcagcaagtaacccgaaaattcaaaccctcccaaggtccagtaactaatgttctcatagtaacacccaaaagattaaacctgccacctttacaaccattgcggaaagtgtgcgcagcaagtggcgaagttgtaccacgagctgtaattctgcccaaccctgaaaatgatgttcatattgctggaaatctcagctctaaccttctagagcagctcttggatgcacagcagcacggcagctctaggttatttgattctggggtgagcactctcaatggcgtaccaaaccaacagggggcagaatggagaagtaaatacctagagttgcaggatctttttgtgcatgaggttcttggtgatatgtcatcttaatggacatatgataccacaagactggatattatgggctactgtcagttaggaggtttgtggtgaagaactgttcaacacatgatttggtgttcaactagcaaacctgggaaatccatggatgccaaagatgacttccttataacaaggaaactccttacctttcattgcgtccacatgtcaattgacatgtggcagagccatatcagaaatagtaggaaaaactataaacggagcaaagatgggacatcttaaactgtaattcgactgtgtaaacagaaatgaagaaattttcgcttattgtggggtactgc

SEQ ID NO: 63509 - protein, 417 aa, Triticum aestivum
  peptide (1)..(417): Ceres Seq. ID no. 15222022
  misc_feature (113)..(148): Pfam Name: WD domain, G-beta repeat Pfam Description: WD domain, G-beta repeat
  misc_feature (104)..(327): Homolog of NCBI NO: 21432060 NR Description: 2310012I10Rik protein [Mus musculus]
  misc_feature (7)..(410): Homolog of NCBI NO: 20128895 NR Description: CG14805-PA [Drosophila melanogaster]
  misc_feature (1)..(315): Homolog of NCBI NO: 3025445 NR Description: R32184_1 [Homo sapiens]
  misc_feature (1)..(315): Homolog of NCBI NO: 33859749 NR Description: WD repeat domain 18 [Homo sapiens]
  misc_feature (1)..(327): Homolog of NCBI NO: 34862331 NR Description: similar to WD-repeat protein 18 [Rattus
  misc_feature (1)..(109): Homolog of NCBI NO: 34897606 NR Description: G-protein beta family-like protein
  misc_feature (109)..(271): Homolog of NCBI NO: 34897604 NR Description: G-protein beta family-like protein
  misc_feature (8)..(315): Homolog of NCBI NO: 21592898 NR Description: unknown [Arabidopsis thaliana]
  misc_feature (8)..(315): Homolog of NCBI NO: 15229101 NR Description: transducin / WD-40 repeat protein family
  misc_feature (1)..(271): Homolog of NCBI NO: 33354207 NR Description: transducin / WD-40 repeat protein family -like
MAPPSQLVLAASSTDAGVAAWDLRTGSEAIRHRPCASRPRAVAAVAGRFLAAAQIAAGNSAPIHYYHWDKPQVAVKSFPAEPIRALIADPEGNYLIGGGVSGDIFFWEVASGELLVRWHAHYRDVRCLALYDMLLVSASEDGSIKIWDLLTMLDEQSRFEAKTPYLYNFNQHTLPVTDIACFHGAIAVSSSEDRTCKIWSLSEGRMLRSISFPAIIDSVEIDPRSHIFYAGGRDGKIYVTAMGVDASSQGRDDSSILGILDDHSKAVTSLTSSTDGLLLVSGSEDGNVRVWDTRSQQVTRKFKPSQGPVTNVLIVTPKRLNLPPLQPLRKVCAASGEVVPRAVILPNPENDVHIAGNLSSNLLEQLLDAQQHGSSRLFDSGVSTLNGVPNQQGAEWRSKYLELQDLFVHEVLGDMSS

SEQ ID NO: 63510 - protein, 285 aa, Triticum aestivum
  peptide (1)..(285): Ceres Seq. ID no. 15222023
  misc_feature (1)..(278): Homolog of NCBI NO: 20151747 NR Description: RE49866p [Drosophila melanogaster]
  misc_feature (1)..(195): Homolog of NCBI NO: 21432060 NR Description: 2310012I10Rik protein [Mus musculus]
  misc_feature (1)..(278): Homolog of NCBI NO: 20128895 NR Description: CG14805-PA [Drosophila melanogaster]
  misc_feature (1)..(183): Homolog of NCBI NO: 3025445 NR Description: R32184_1 [Homo sapiens]
  misc_feature (1)..(183): Homolog of NCBI NO: 33859749 NR Description: WD repeat domain 18 [Homo sapiens]
  misc_feature (1)..(195): Homolog of NCBI NO: 34862331 NR Description: similar to WD-repeat protein 18 [Rattus
  misc_feature (1)..(139): Homolog of NCBI NO: 34897604 NR Description: G-protein beta family-like protein
  misc_feature (1)..(183): Homolog of NCBI NO: 21592898 NR Description: unknown [Arabidopsis thaliana]
  misc_feature (1)..(183): Homolog of NCBI NO: 15229101 NR Description: transducin / WD-40 repeat protein family
  misc_feature (1)..(139): Homolog of NCBI NO: 33354207 NR Description: transducin / WD-40 repeat protein family -like
MLLVSASEDGSIKIWDLLTMLDEQSRFEAKTPYLYNFNQHTLPVTDIACFHGAIAVSSSEDRTCKIWSLSEGRMLRSISFPAIIDSVEIDPRSHIFYAGGRDGKIYVTAMGVDASSQGRDDSSILGILDDHSKAVTSLTSSTDGLLLVSGSEDGNVRVWDTRSQQVTRKFKPSQGPVTNVLIVTPKRLNLPPLQPLRKVCAASGEVVPRAVILPNPENDVHIAGNLSSNLLEQLLDAQQHGSSRLFDSGVSTLNGVPNQQGAEWRSKYLELQDLFVHEVLGDMSS

SEQ ID NO: 63511 - protein, 266 aa, Triticum aestivum
  peptide (1)..(266): Ceres Seq. ID no. 15222024
  misc_feature (1)..(259): Homolog of NCBI NO: 20151747 NR Description: RE49866p [Drosophila melanogaster]
  misc_feature (1)..(176): Homolog of NCBI NO: 21432060 NR Description: 2310012I10Rik protein [Mus musculus]
  misc_feature (1)..(259): Homolog of NCBI NO: 20128895 NR Description: CG14805-PA [Drosophila melanogaster]
  misc_feature (1)..(164): Homolog of NCBI NO: 3025445 NR Description: R32184_1 [Homo sapiens]
  misc_feature (1)..(164): Homolog of NCBI NO: 33859749 NR Description: WD repeat domain 18 [Homo sapiens]
  misc_feature (1)..(176): Homolog of NCBI NO: 34862331 NR Description: similar to WD-repeat protein 18 [Rattus
  misc_feature (1)..(120): Homolog of NCBI NO: 34897604 NR Description: G-protein beta family-like protein
  misc_feature (1)..(164): Homolog of NCBI NO: 21592898 NR Description: unknown [Arabidopsis thaliana]
  misc_feature (1)..(164): Homolog of NCBI NO: 15229101 NR Description: transducin / WD-40 repeat protein family
  misc_feature (1)..(120): Homolog of NCBI NO: 33354207 NR Description: transducin / WD-40 repeat protein family -like
MLDEQSRFEAKTPYLYNFNQHTLPVTDIACFHGAIAVSSSEDRTCKIWSLSEGRMLRSISFPAIIDSVEIDPRSHIFYAGGRDGKIYVTAMGVDASSQGRDDSSILGILDDHSKAVTSLTSSTDGLLLVSGSEDGNVRVWDTRSQQVTRKFKPSQGPVTNVLIVTPKRLNLPPLQPLRKVCAASGEVVPRAVILPNPENDVHIAGNLSSNLLEQLLDAQQHGSSRLFDSGVSTLNGVPNQQGAEWRSKYLELQDLFVHEVLGDMSS

SEQ ID NO: 63512 - DNA, 1469 bp, Triticum aestivum
  misc_feature (1)..(1469): Ceres Seq. ID no. 13655454
acattttttcttacgacggcgttgctcttttttcttacgatggctccatgaagggatgaggtgatatgggttccctcttccctccatggccgctgccttccaccgttcgtcctctcccggccgctcgtcgccgaccccgggagcaccaccacgcgcccctcgccgttccgtcctcctcgtctcatcacgtccgtctccctcctccctcttcttcgcgcagtgagctccgtctcacccaaactgacctagcccgggcgcacacgccggcgtcgaggcgtgccgtgctccgtccaagaactgccccggaagccgatgccgcggcggccctcatggtcgtccgcgcggaggccggcgacttcgcgcgggctcagtccatctgggcgcagctcctgctcagctccgccgcgccgtgcctggccgccgcagcgcccagcctcctcccggcgtacgcgcgtctcggtcgctacgacgaggtcctcctcgccgcgcgggagctctccgcgcgcgaccccgccgcggcgcgggacctctacccgctcgccgtctcctgcctcggcgccgccggcgagctcgccctcatggaggacgccgtgcaggagatggcccgcgccggcctccgcgtcgactccgccaccggcaacgccttcgtgcggcactacgcggcctccggcaccgtaccggagatggaggcggcggtcggccggctcaagaagtccggcctcctcatctccgtcgacgccatccgcgccgtcgcttcagcgtacatcgccaaccggaagtactacaagctcggcgagttcgtcaggggcgtcggcctcggccgccgggacgccggcaacctgctctggaacctctacctcctctccttcgcggccaacttcaagatgaagtcgctgcagcgcgccttcctggagatgaccgccgccgggtgccggccggacctcaccaccttcaacatccgcgccgccgccttctccaagatgtgcatgttctgggacctccacctcaccgccgagcacatgcgccgcgacggcgtcgcgccggacctcgtcacgcacggctgcttcgtggacgcctacatggagcgccggctcgcgcgcaacctctccttcgcgttccgccggctggacggctcaggcgagcccgtggtggccacggacggcgtcgtgttcgaggcgttcggcaaggggggcttccacaccacctccgaggggctgctagaggcggccggcgggaagcggcgatggacgtaccacgacttgctcggcgtctacctgaggaagcagcacaggagaaaccaaatcttttggaactactgatcttcaccagtacagcactgttacactagtgcaacaaggtagtagtaccagatgctacgatgtacagggatgatgttatgcttagaaacaaaatcatagatgtaatggaactatggaagagtctttgtaaagatgattgtgccaaatttg

SEQ ID NO: 63513 - protein, 417 aa, Triticum aestivum
  peptide (1)..(417): Ceres Seq. ID no. 13655455
  misc_feature (294)..(328): Pfam Name: PPR repeat Pfam Description: PPR repeat
  misc_feature (79)..(407): Homolog of NCBI NO: 7488181 NR Description: probable salt-inducible protein - Arabidopsis
  misc_feature (79)..(407): Homolog of NCBI NO: 22328618 NR Description: pentatricopeptide (PPR) repeat-containing protein
  misc_feature (89)..(417): Homolog of NCBI NO: 18407249 NR Description: pentatricopeptide (PPR) repeat-containing protein
  misc_feature (80)..(417): Homolog of NCBI NO: 11358001 NR Description: hypothetical protein T12K4.80 - Arabidopsis
MGSLFPPWPLPSTVRPLPAARRRPREHHHAPLAVPSSSSHHVRLPPPSSSRSELRLTQTDLARAHTPASRRAVLRPRTAPEADAAAALMVVRAEAGDFARAQSIWAQLLLSSAAPCLAAAAPSLLPAYARLGRYDEVLLAARELSARDPAAARDLYPLAVSCLGAAGELALMEDAVQEMARAGLRVDSATGNAFVRHYAASGTVPEMEAAVGRLKKSGLLISVDAIRAVASAYIANRKYYKLGEFVRGVGLGRRDAGNLLWNLYLLSFAANFKMKSLQRAFLEMTAAGCRPDLTTFNIRAAAFSKMCMFWDLHLTAEHMRRDGVAPDLVTHGCFVDAYMERRLARNLSFAFRRLDGSGEPVVATDGVVFEAFGKGGFHTTSEGLLEAAGGKRRWTYHDLLGVYLRKQHRRNQIFWNY

SEQ ID NO: 63514 - protein, 329 aa, Triticum aestivum
  peptide (1)..(329): Ceres Seq. ID no. 13655456
  misc_feature (206)..(240): Pfam Name: PPR repeat Pfam Description: PPR repeat
  misc_feature (1)..(319): Homolog of NCBI NO: 7488181 NR Description: probable salt-inducible protein - Arabidopsis
  misc_feature (1)..(319): Homolog of NCBI NO: 22328618 NR Description: pentatricopeptide (PPR) repeat-containing protein
  misc_feature (1)..(329): Homolog of NCBI NO: 18407249 NR Description: pentatricopeptide (PPR) repeat-containing protein
  misc_feature (1)..(329): Homolog of NCBI NO: 11358001 NR Description: hypothetical protein T12K4.80 - Arabidopsis
MVVRAEAGDFARAQSIWAQLLLSSAAPCLAAAAPSLLPAYARLGRYDEVLLAARELSARDPAAARDLYPLAVSCLGAAGELALMEDAVQEMARAGLRVDSATGNAFVRHYAASGTVPEMEAAVGRLKKSGLLISVDAIRAVASAYIANRKYYKLGEFVRGVGLGRRDAGNLLWNLYLLSFAANFKMKSLQRAFLEMTAAGCRPDLTTFNIRAAAFSKMCMFWDLHLTAEHMRRDGVAPDLVTHGCFVDAYMERRLARNLSFAFRRLDGSGEPVVATDGVVFEAFGKGGFHTTSEGLLEAAGGKRRWTYHDLLGVYLRKQHRRNQIFWNY

SEQ ID NO: 63515 - protein, 246 aa, Triticum aestivum
  peptide (1)..(246): Ceres Seq. ID no. 13655457
  misc_feature (123)..(157): Pfam Name: PPR repeat Pfam Description: PPR repeat
  misc_feature (1)..(236): Homolog of NCBI NO: 7488181 NR Description: probable salt-inducible protein - Arabidopsis
  misc_feature (1)..(236): Homolog of NCBI NO: 22328618 NR Description: pentatricopeptide (PPR) repeat-containing protein
  misc_feature (1)..(246): Homolog of NCBI NO: 18407249 NR Description: pentatricopeptide (PPR) repeat-containing protein
  misc_feature (1)..(246): Homolog of NCBI NO: 11358001 NR Description: hypothetical protein T12K4.80 - Arabidopsis
MEDAVQEMARAGLRVDSATGNAFVRHYAASGTVPEMEAAVGRLKKSGLLISVDAIRAVASAYIANRKYYKLGEFVRGVGLGRRDAGNLLWNLYLLSFAANFKMKSLQRAFLEMTAAGCRPDLTTFNIRAAAFSKMCMFWDLHLTAEHMRRDGVAPDLVTHGCFVDAYMERRLARNLSFAFRRLDGSGEPVVATDGVVFEAFGKGGFHTTSEGLLEAAGGKRRWTYHDLLGVYLRKQHRRNQIFWNY

SEQ ID NO: 63516 - DNA, 857 bp, Triticum aestivum
  misc_feature (1)..(857): Ceres Seq. ID no. 13584023
aatcgaaaaattcggcttttccgcctcgctgccgccgcccaaaatccacctgggaagaagaaaagaggggcctcttctcttcctctctcgcgtccgatggcctcgagcccgggcgtcggcggcggaggggcggacggcggcggaggggatggaccgacgacgctcgacgagctgtaccacatcaacgtcgtgccggccgagctgcacttcaagttccgcaaggagctccagggcctccgcgtgggcctcaacttcgagttctacaacctagaggtgaatgattttgaggcaaaggtagttctgaagcccctggactttgaccggaagtggaagttccagtacaagcccatcagtggtgacatacagctgctttccaagaagataccagtcacaaaatatctcaaccttcaggtcggcattggtcacaatttccaactgaaggcaactggatggaagtggaagctctctacttgcttggggggagatggtgtttctcagataagaaacaaatcaaaactcaacgtgtttccagggtttgatctgaggctcggttggaaagctgaatatgtgcttcctgagattcatggggctgttggcacaggagaacctgccttcagtatgaactatggacgattgcaagcatccatagaccgggttgaggctattgtgacccaatcagatcggcactgaacctcctaggatgagcagaccaggacgttgatgatgttatggtcggcgaagcaagggagttctttggctacaatttcctctgcaaaatccgatggtttactcatgtcttttgaggctttgcatctgatgtacagaaatgagcaaacattgttttaccaacataaagg

SEQ ID NO: 63517 - protein, 229 aa, Triticum aestivum
  peptide (1)..(229): Ceres Seq. ID no. 13584024
  misc_feature (84)..(196): Homolog of NCBI NO: 25411202 NR Description: hypothetical protein At2g06010 [imported] -
  misc_feature (52)..(227): Homolog of NCBI NO: 18396223 NR Description: expressed protein [Arabidopsis thaliana]
  misc_feature (34)..(229): Homolog of NCBI NO: 38344551 NR Description: OSJNBa0027P08.19 [Oryza sativa (japonica
NRKIRLFRLAAAAQNPPGKKKRGASSLPLSRPMASSPGVGGGGADGGGGDGPTTLDELYHINVVPAELHFKFRKELQGLRVGLNFEFYNLEVNDFEAKVVLKPLDFDRKWKFQYKPISGDIQLLSKKIPVTKYLNLQVGIGHNFQLKATGWKWKLSTCLGGDGVSQIRNKSKLNVFPGFDLRLGWKAEYVLPEIHGAVGTGEPAFSMNYGRLQASIDRVEAIVTQSDRH

SEQ ID NO: 63518 - protein, 197 aa, Triticum aestivum
  peptide (1)..(197): Ceres Seq. ID no. 13584025
  misc_feature (52)..(164): Homolog of NCBI NO: 25411202 NR Description: hypothetical protein At2g06010 [imported] -
  misc_feature (20)..(195): Homolog of NCBI NO: 18396223 NR Description: expressed protein [Arabidopsis thaliana]
  misc_feature (2)..(197): Homolog of NCBI NO: 38344551 NR Description: OSJNBa0027P08.19 [Oryza sativa (japonica
MASSPGVGGGGADGGGGDGPTTLDELYHINVVPAELHFKFRKELQGLRVGLNFEFYNLEVNDFEAKVVLKPLDFDRKWKFQYKPISGDIQLLSKKIPVTKYLNLQVGIGHNFQLKATGWKWKLSTCLGGDGVSQIRNKSKLNVFPGFDLRLGWKAEYVLPEIHGAVGTGEPAFSMNYGRLQASIDRVEAIVTQSDRH

SEQ ID NO: 63519 - DNA, 1301 bp, Triticum aestivum
  misc_feature (1)..(1301): Ceres Seq. ID no. 13655636
atcccgcagactggactcccacagtattaaccccaggcacgcctcccgctgcaaccaacccgagtccttccaccctgcacagaatctcagcccaacccacaggtctcgactcaagccatgggcgccggcgacaagacggccgcgggcatgccgcgcatcggcatgggcacggcggtgcaggggcccaagccggaccccatccgccgcgccgtcctccgcgccatcgaggtagggtaccgccacttcgacacggccgcgcactacgagaccgaggcccccatcggcgaggccgccgccgaggccgtgcgctccggcgccgtcgcctcccgggacgacctcttcatcacctccaagctctggtgcagcgatgcgcaccgcgacagggtcgtccccgccctcaggcagacgctccggaatctccagatggagtacgtggacctgtacctcgtccactggccggtgtccatgaagcccgggcggttcaaggcccccttcacggcggaggacttcgtgccgttcgacatgcgggccgtgtgggaggccatggaggagtgccacaggctgggcctcgccaaggccatcggcgtcgccaatttctcctgcaagaagcttgagaccctcctctccttcgccaccatccctcccaccgtcaatcaggtggaggtgaacccggtgtggcagcagaggaagctgagggagttctgcaggggcaagggcatccagctgtgcacctactcgccgctgggggccaagggcacgcactggggcagcgacgccgtgatggacgcgggcgtcctgcaggagatcgccgcgtccaggggcaagagtgtggcgcaggtgtgcctgaggtgggtgtacgagcagggggactgcctcatcgtcaagagcttcgacgaggcccggatgcgggagaacctggacgtggacggctgggagctcaccgaggaggagcaccgcaggatcgcggagatcccgcagcgcaagatcaacctcggcaagcgctacgtgtccgagcacgggccctacaagtccctcgaggagctctgggacggtgagatataagtgatcactggagaggctggctggccggtgcgacgggttctgttgggttgtcatccttggccatggatgggtggttgatcgggggacgatttccctttgaataaaatcatgttctgcattgtgtttcagtgaataaatggagatgtttactaccggatttaaggagagttactaagagattgggatcatctcatcatgttattatgcgtactttcctggcaatgcaagttgttacaatg

SEQ ID NO: 63520 - protein, 314 aa, Triticum aestivum
  peptide (1)..(314): Ceres Seq. ID no. 13655637
  misc_feature (1)..(314): Homolog of NCBI NO: 15218960 NR Description: aldo/keto reductase, putative [Arabidopsis
  misc_feature (11)..(314): Homolog of NCBI NO: 25283477 NR Description: probable Aldo/keto reductase F23H11.26
  misc_feature (11)..(314): Homolog of NCBI NO: 15218958 NR Description: aldo/keto reductase, putative [Arabidopsis
  misc_feature (11)..(313): Homolog of NCBI NO: 40781598 NR Description: reductase 2 [Hydrangea macrophylla]
  misc_feature (11)..(314): Homolog of NCBI NO: 40781599 NR Description: reductase 1 [Hydrangea macrophylla]
  misc_feature (10)..(314): Homolog of NCBI NO: 6478216 NR Description: putative NADPH-dependent oxidoreductase [Papaver
  misc_feature (11)..(314): Homolog of NCBI NO: 37530540 NR Description: putative NADPH-dependent oxidoreductase
  misc_feature (11)..(312): Homolog of NCBI NO: 37530524 NR Description: putative NADPH-dependent oxidoreductase
  misc_feature (11)..(314): Homolog of NCBI NO: 37530522 NR Description: putative NADPH-dependent oxidoreductase
  misc_feature (2)..(314): Homolog of NCBI NO: 27357979 NR Description: Putative NADPH-dependent oxidoreductase
MGAGDKTAAGMPRIGMGTAVQGPKPDPIRRAVLRAIEVGYRHFDTAAHYETEAPIGEAAAEAVRSGAVASRDDLFITSKLWCSDAHRDRVVPALRQTLRNLQMEYVDLYLVHWPVSMKPGRFKAPFTAEDFVPFDMRAVWEAMEECHRLGLAKAIGVANFSCKKLETLLSFATIPPTVNQVEVNPVWQQRKLREFCRGKGIQLCTYSPLGAKGTHWGSDAVMDAGVLQEIAASRGKSVAQVCLRWVYEQGDCLIVKSFDEARMRENLDVDGWELTEEEHRRIAEIPQRKINLGKRYVSEHGPYKSLEELWDGEI

SEQ ID NO: 63521 - protein, 304 aa, Triticum aestivum
  peptide (1)..(304): Ceres Seq. ID no. 13655638
  misc_feature (1)..(304): Homolog of NCBI NO: 15218960 NR Description: aldo/keto reductase, putative [Arabidopsis
  misc_feature (1)..(304): Homolog of NCBI NO: 25283477 NR Description: probable Aldo/keto reductase F23H11.26
  misc_feature (1)..(304): Homolog of NCBI NO: 15218958 NR Description: aldo/keto reductase, putative [Arabidopsis
  misc_feature (1)..(303): Homolog of NCBI NO: 40781598 NR Description: reductase 2 [Hydrangea macrophylla]
  misc_feature (1)..(304): Homolog of NCBI NO: 40781599 NR Description: reductase 1 [Hydrangea macrophylla]
  misc_feature (1)..(304): Homolog of NCBI NO: 6478216 NR Description: putative NADPH-dependent oxidoreductase [Papaver
  misc_feature (1)..(304): Homolog of NCBI NO: 37530540 NR Description: putative NADPH-dependent oxidoreductase
  misc_feature (1)..(302): Homolog of NCBI NO: 37530524 NR Description: putative NADPH-dependent oxidoreductase
  misc_feature (1)..(304): Homolog of NCBI NO: 37530522 NR Description: putative NADPH-dependent oxidoreductase
  misc_feature (1)..(304): Homolog of NCBI NO: 27357979 NR Description: Putative NADPH-dependent oxidoreductase
MPRIGMGTAVQGPKPDPIRRAVLRAIEVGYRHFDTAAHYETEAPIGEAAAEAVRSGAVASRDDLFITSKLWCSDAHRDRVVPALRQTLRNLQMEYVDLYLVHWPVSMKPGRFKAPFTAEDFVPFDMRAVWEAMEECHRLGLAKAIGVANFSCKKLETLLSFATIPPTVNQVEVNPVWQQRKLREFCRGKGIQLCTYSPLGAKGTHWGSDAVMDAGVLQEIAASRGKSVAQVCLRWVYEQGDCLIVKSFDEARMRENLDVDGWELTEEEHRRIAEIPQRKINLGKRYVSEHGPYKSLEELWDGEI

SEQ ID NO: 63522 - protein, 299 aa, Triticum aestivum
  peptide (1)..(299): Ceres Seq. ID no. 13655639
  misc_feature (1)..(299): Homolog of NCBI NO: 15218960 NR Description: aldo/keto reductase, putative [Arabidopsis
  misc_feature (1)..(299): Homolog of NCBI NO: 25283477 NR Description: probable Aldo/keto reductase F23H11.26
  misc_feature (1)..(299): Homolog of NCBI NO: 15218958 NR Description: aldo/keto reductase, putative [Arabidopsis
  misc_feature (1)..(298): Homolog of NCBI NO: 40781598 NR Description: reductase 2 [Hydrangea macrophylla]
  misc_feature (1)..(299): Homolog of NCBI NO: 40781599 NR Description: reductase 1 [Hydrangea macrophylla]
  misc_feature (1)..(299): Homolog of NCBI NO: 6478216 NR Description: putative NADPH-dependent oxidoreductase [Papaver
  misc_feature (1)..(299): Homolog of NCBI NO: 37530540 NR Description: putative NADPH-dependent oxidoreductase
  misc_feature (1)..(297): Homolog of NCBI NO: 37530524 NR Description: putative NADPH-dependent oxidoreductase
  misc_feature (1)..(299): Homolog of NCBI NO: 37530522 NR Description: putative NADPH-dependent oxidoreductase
  misc_feature (1)..(299): Homolog of NCBI NO: 27357979 NR Description: Putative NADPH-dependent oxidoreductase
MGTAVQGPKPDPIRRAVLRAIEVGYRHFDTAAHYETEAPIGEAAAEAVRSGAVASRDDLFITSKLWCSDAHRDRVVPALRQTLRNLQMEYVDLYLVHWPVSMKPGRFKAPFTAEDFVPFDMRAVWEAMEECHRLGLAKAIGVANFSCKKLETLLSFATIPPTVNQVEVNPVWQQRKLREFCRGKGIQLCTYSPLGAKGTHWGSDAVMDAGVLQEIAASRGKSVAQVCLRWVYEQGDCLIVKSFDEARMRENLDVDGWELTEEEHRRIAEIPQRKINLGKRYVSEHGPYKSLEELWDGEI

SEQ ID NO: 63523 - DNA, 1210 bp, Triticum aestivum
  misc_feature (1)..(1210): Ceres Seq. ID no. 12587870
cctcgcacacagtctgctacagggatcttccacacagacacactggaagtgataaccggtgaaatgcctcccccgaagcctgccggtggtgctatcatggatggaaatcaccacctactaggccatgaagatgttcacagagctgcaacgactaccttcgagaatggctttacaacccattcagttcacacatcaggagcgaaggtcgatggcccgaatgtgacgaatatcgcgaggggcgacatatcaactacgccgattcctgaagcaacaggtccacatcatgtagcggtatcagtccctgaagaagtgaatctggttgctcctagaccacaacagagggatgactgggatatactgaaagctatagtgtatggaggcttagtggagtcagtcaccagcctctctgttgtttcggcggcagcatcaagcggcgccaaaacattggacatattcatcttgggcatggccaaccttatcggagggctccctctcgtttaccacaatatcgccgatctgagagatgtccgagacgtgagcgacgacaacgagcgggtcggacactactggctgcagctcgggaggcggtcgaaagcccggctccacatggtcctggccctgctctcatacatggtgttcgggctacttcaaccggttgtctacgggctgtcgttccgcgagagcaacaacagggagaacaagatgatggccgtcgccggcgcttccctcgcgtgcatcgctctgctggcgctcggaaaggcgcatgtccagacagcacccagggcatacttcaagaccctcgtgtactacctgacgatcgccgtgagctcgtcggggctgtcgtacgtcgccggcgtgctcatcacgaggctcctggagcactttggtgtcatcgagcaaggcgggtcggctgctcctgctcctccagggctgtcgttcgctcattcagtgggtgcacaaacatctgcctgggcctcattctaaagtctgaactctgaagttcatgggaacactggtgcaaaaaaagaagacatgtaggaggtgcacactaggagatgtagcactagctagattaccttgtgccacatcttgggcttcagttattagtactaaaacatgaaggcacacattaagacggtagaaacatacaatataattagaacagatgtctggttgagcttcatatttgttttcaataaattaatattcc

SEQ ID NO: 63524 - protein, 327 aa, Triticum aestivum
  peptide (1)..(327): Ceres Seq. ID no. 12587871
  misc_feature (98)..(298): Homolog of NCBI NO: 30689367 NR Description: expressed protein [Arabidopsis thaliana]
  misc_feature (98)..(298): Homolog of NCBI NO: 21592516 NR Description: unknown [Arabidopsis thaliana]
  misc_feature (98)..(298): Homolog of NCBI NO: 30689371 NR Description: expressed protein [Arabidopsis thaliana]
  misc_feature (105)..(296): Homolog of NCBI NO: 7487470 NR Description: hypothetical protein T27E11.100 - Arabidopsis
  misc_feature (105)..(296): Homolog of NCBI NO: 18417079 NR Description: putative protein
  misc_feature (118)..(306): Homolog of NCBI NO: 7487471 NR Description: hypothetical protein T27E11.110 - Arabidopsis
  misc_feature (118)..(306): Homolog of NCBI NO: 30687764 NR Description: expressed protein [Arabidopsis thaliana]
  misc_feature (118)..(306): Homolog of NCBI NO: 15912253 NR Description: AT4g27870/T27E11_110 [Arabidopsis thaliana]
  misc_feature (4)..(298): Homolog of NCBI NO: 24413974 NR Description: contains ESTs
PRTQSATGIFHTDTLEVITGEMPPPKPAGGAIMDGNHHLLGHEDVHRAATTTFENGFTTHSVHTSGAKVDGPNVTNIARGDISTTPIPEATGPHHVAVSVPEEVNLVAPRPQQRDDWDILKAIVYGGLVESVTSLSVVSAAASSGAKTLDIFILGMANLIGGLPLVYHNIADLRDVRDVSDDNERVGHYWLQLGRRSKARLHMVLALLSYMVFGLLQPVVYGLSFRESNNRENKMMAVAGASLACIALLALGKAHVQTAPRAYFKTLVYYLTIAVSSSGLSYVAGVLITRLLEHFGVIEQGGSAAPAPPGLSFAHSVGAQTSAWASF

SEQ ID NO: 63525 - protein, 306 aa, Triticum aestivum
  peptide (1)..(306): Ceres Seq. ID no. 12587872
  misc_feature (77)..(277): Homolog of NCBI NO: 30689367 NR Description: expressed protein [Arabidopsis thaliana]
  misc_feature (77)..(277): Homolog of NCBI NO: 21592516 NR Description: unknown [Arabidopsis thaliana]
  misc_feature (77)..(277): Homolog of NCBI NO: 30689371 NR Description: expressed protein [Arabidopsis thaliana]
  misc_feature (84)..(275): Homolog of NCBI NO: 7487470 NR Description: hypothetical protein T27E11.100 - Arabidopsis
  misc_feature (84)..(275): Homolog of NCBI NO: 18417079 NR Description: putative protein
  misc_feature (97)..(285): Homolog of NCBI NO: 7487471 NR Description: hypothetical protein T27E11.110 - Arabidopsis
  misc_feature (97)..(285): Homolog of NCBI NO: 30687764 NR Description: expressed protein [Arabidopsis thaliana]
  misc_feature (97)..(285): Homolog of NCBI NO: 15912253 NR Description: AT4g27870/T27E11_110 [Arabidopsis thaliana]
  misc_feature (1)..(277): Homolog of NCBI NO: 24413974 NR Description: contains ESTs
MPPPKPAGGAIMDGNHHLLGHEDVHRAATTTFENGFTTHSVHTSGAKVDGPNVTNIARGDISTTPIPEATGPHHVAVSVPEEVNLVAPRPQQRDDWDILKAIVYGGLVESVTSLSVVSAAASSGAKTLDIFILGMANLIGGLPLVYHNIADLRDVRDVSDDNERVGHYWLQLGRRSKARLHMVLALLSYMVFGLLQPVVYGLSFRESNNRENKMMAVAGASLACIALLALGKAHVQTAPRAYFKTLVYYLTIAVSSSGLSYVAGVLITRLLEHFGVIEQGGSAAPAPPGLSFAHSVGAQTSAWASF

SEQ ID NO: 63526 - protein, 295 aa, Triticum aestivum
  peptide (1)..(295): Ceres Seq. ID no. 12587873
  misc_feature (66)..(266): Homolog of NCBI NO: 30689367 NR Description: expressed protein [Arabidopsis thaliana]
  misc_feature (66)..(266): Homolog of NCBI NO: 21592516 NR Description: unknown [Arabidopsis thaliana]
  misc_feature (66)..(266): Homolog of NCBI NO: 30689371 NR Description: expressed protein [Arabidopsis thaliana]
  misc_feature (73)..(264): Homolog of NCBI NO: 7487470 NR Description: hypothetical protein T27E11.100 - Arabidopsis
  misc_feature (73)..(264): Homolog of NCBI NO: 18417079 NR Description: putative protein
  misc_feature (86)..(274): Homolog of NCBI NO: 7487471 NR Description: hypothetical protein T27E11.110 - Arabidopsis
  misc_feature (86)..(274): Homolog of NCBI NO: 30687764 NR Description: expressed protein [Arabidopsis thaliana]
  misc_feature (86)..(274): Homolog of NCBI NO: 15912253 NR Description: AT4g27870/T27E11_110 [Arabidopsis thaliana]
  misc_feature (1)..(266): Homolog of NCBI NO: 24413974 NR Description: contains ESTs
MDGNHHLLGHEDVHRAATTTFENGFTTHSVHTSGAKVDGPNVTNIARGDISTTPIPEATGPHHVAVSVPEEVNLVAPRPQQRDDWDILKAIVYGGLVESVTSLSVVSAAASSGAKTLDIFILGMANLIGGLPLVYHNIADLRDVRDVSDDNERVGHYWLQLGRRSKARLHMVLALLSYMVFGLLQPVVYGLSFRESNNRENKMMAVAGASLACIALLALGKAHVQTAPRAYFKTLVYYLTIAVSSSGLSYVAGVLITRLLEHFGVIEQGGSAAPAPPGLSFAHSVGAQTSAWASF

SEQ ID NO: 63527 - DNA, 924 bp, Triticum aestivum
  misc_feature (1)..(924): Ceres Seq. ID no. 13584026
cctctctgtcaccgccagcttccacacacctcgtcggcacggaacaccgcccctcgagtcaagagtcaacccacacccaccgatctccgtccatcgaccatgggagccggccaggacctggaggccggcgccggcgacggcggcgagaagaagatggcccactcctcctcctcgggcccgctcccgccgtcggagccgccgcacctgcggggccaggaccccgcccagtaccagtatggtaccttccacccccctgccccccaccccgacgtccgcccccacccgcccgtcggcttcccccaacccgcgcctccccccggattcgccgccggcggctaccagcagcagcagcagaagcagccctacgcgcccgccgacccctactacgcgcaggggtaccaggccgccccaggttatggtcctgttgttcaaggtaggcctgttgaaggaagacccgtgagaatgcggcgccttccatgctgtgggctcggcatgggctggcttctgttcattgccgggttcttcttggctgccattccgtggtatattggtgctttcgtcctaatctgtgtccgggtacatgaccacagagagaaaccaggatatgttgcctgcactgttgctgctataattgcggccattgttataccccttggagtaacaaaaggaacagactcatggtgagccaccaccaggtcttggcaggcggttctgttgctgaatataaacatcgttatttcaggcccagttacatgataggttaaaaagtctgctggttgtatttcatgtatgagtgtgtcttgtatacatatatgtacagtaaaaagagtggggctgcatcttcgatgttctcttgtatcgatacttggtacttatagtgtgtaataaaagcttgaatgtacaacacatatcttcctcgaggct

SEQ ID NO: 63528 - protein, 227 aa, Triticum aestivum
  peptide (1)..(227): Ceres Seq. ID no. 13584027
  misc_feature (101)..(227): Homolog of NCBI NO: 21554784 NR Description: unknown [Arabidopsis thaliana]
  misc_feature (101)..(227): Homolog of NCBI NO: 18400450 NR Description: expressed protein [Arabidopsis thaliana]
  misc_feature (76)..(208): Homolog of NCBI NO: 25518134 NR Description: probable 60S ribosomal protein L18A - Arabidopsis
  misc_feature (76)..(227): Homolog of NCBI NO: 21593837 NR Description: 60S ribosomal protein L18A, putative [Arabidopsis
  misc_feature (76)..(227): Homolog of NCBI NO: 18397305 NR Description: expressed protein [Arabidopsis thaliana]
  misc_feature (70)..(227): Homolog of NCBI NO: 18404524 NR Description: expressed protein [Arabidopsis thaliana]
  misc_feature (70)..(227): Homolog of NCBI NO: 21554011 NR Description: unknown [Arabidopsis thaliana]
  misc_feature (91)..(227): Homolog of NCBI NO: 18394436 NR Description: expressed protein [Arabidopsis thaliana]
PLCHRQLPHTSSARNTAPRVKSQPTPTDLRPSTMGAGQDLEAGAGDGGEKKMAHSSSSGPLPPSEPPHLRGQDPAQYQYGTFHPPAPHPDVRPHPPVGFPQPAPPPGFAAGGYQQQQQKQPYAPADPYYAQGYQAAPGYGPVVQGRPVEGRPVRMRRLPCCGLGMGWLLFIAGFFLAAIPWYIGAFVLICVRVHDHREKPGYVACTVAAIIAAIVIPLGVTKGTDSW

SEQ ID NO: 63529 - protein, 194 aa, Triticum aestivum
  peptide (1)..(194): Ceres Seq. ID no. 13584028
  misc_feature (68)..(194): Homolog of NCBI NO: 21554784 NR Description: unknown [Arabidopsis thaliana]
  misc_feature (68)..(194): Homolog of NCBI NO: 18400450 NR Description: expressed protein [Arabidopsis thaliana]
  misc_feature (43)..(175): Homolog of NCBI NO: 25518134 NR Description: probable 60S ribosomal protein L18A - Arabidopsis
  misc_feature (43)..(194): Homolog of NCBI NO: 21593837 NR Description: 60S ribosomal protein L18A, putative [Arabidopsis
  misc_feature (43)..(194): Homolog of NCBI NO: 18397305 NR Description: expressed protein [Arabidopsis thaliana]
  misc_feature (37)..(194): Homolog of NCBI NO: 18404524 NR Description: expressed protein [Arabidopsis thaliana]
  misc_feature (37)..(194): Homolog of NCBI NO: 21554011 NR Description: unknown [Arabidopsis thaliana]
  misc_feature (58)..(194): Homolog of NCBI NO: 18394436 NR Description: expressed protein [Arabidopsis thaliana]
MGAGQDLEAGAGDGGEKKMAHSSSSGPLPPSEPPHLRGQDPAQYQYGTFHPPAPHPDVRPHPPVGFPQPAPPPGFAAGGYQQQQQKQPYAPADPYYAQGYQAAPGYGPVVQGRPVEGRPVRMRRLPCCGLGMGWLLFIAGFFLAAIPWYIGAFVLICVRVHDHREKPGYVACTVAAIIAAIVIPLGVTKGTDSW

SEQ ID NO: 63530 - protein, 176 aa, Triticum aestivum
  peptide (1)..(176): Ceres Seq. ID no. 13584029
  misc_feature (50)..(176): Homolog of NCBI NO: 21554784 NR Description: unknown [Arabidopsis thaliana]
  misc_feature (50)..(176): Homolog of NCBI NO: 18400450 NR Description: expressed protein [Arabidopsis thaliana]
  misc_feature (25)..(157): Homolog of NCBI NO: 25518134 NR Description: probable 60S ribosomal protein L18A - Arabidopsis
  misc_feature (25)..(176): Homolog of NCBI NO: 21593837 NR Description: 60S ribosomal protein L18A, putative [Arabidopsis
  misc_feature (25)..(176): Homolog of NCBI NO: 18397305 NR Description: expressed protein [Arabidopsis thaliana]
  misc_feature (19)..(176): Homolog of NCBI NO: 18404524 NR Description: expressed protein [Arabidopsis thaliana]
  misc_feature (19)..(176): Homolog of NCBI NO: 21554011 NR Description: unknown [Arabidopsis thaliana]
  misc_feature (40)..(176): Homolog of NCBI NO: 18394436 NR Description: expressed protein [Arabidopsis thaliana]
MAHSSSSGPLPPSEPPHLRGQDPAQYQYGTFHPPAPHPDVRPHPPVGFPQPAPPPGFAAGGYQQQQQKQPYAPADPYYAQGYQAAPGYGPVVQGRPVEGRPVRMRRLPCCGLGMGWLLFIAGFFLAAIPWYIGAFVLICVRVHDHREKPGYVACTVAAIIAAIVIPLGVTKGTDSW

SEQ ID NO: 63531 - DNA, 1694 bp, Triticum aestivum
  misc_feature (1)..(1694): Ceres Seq. ID no. 13597044
aaaacagaggcaccaaaatacaatctacgtacgtgcaaagttcagtgaaaccttgagttgacagacaccacaccaacaatggccggagcagcaaacgatctgaagctactgggcatgtgggcgagcccgtacgtcctgcgggtgcgccttgctctcagcatcaagagcatcagctacgagtacgcagaggaggacctccggcacaagagcgagctgctcctgcggtcaaaccccgtccacgatggtctgtttagttacaaggcaacctttgaagcatttgttggggtgcgggatgacgttgcaacttctcaagttaaactctttggtgatcaactcgaggatttggagaaaaatcttccattggacaatatttacaaatcagacaatgtatctgctgctccaattcgcgtgatgaatcttctttacaactctggggatgtgaaaggtcctcaaactatagctttcaatttgccaaatgatgagcggattgtgaatgagcgaggaacttcaatggttatgcttaagaacatttcagaagccaagttcaagaatatcttgaagcctatagccaatgcctgcatcagagaggagcagaaagaatatgttgattttgagccttattatacacatattgtttgccatgagtgctgccatggaattggacctcattccataacccttcctggtggtaaaaagtccacagttagaatggaacttcaagaatgtcattcagcattggaggaggcaaaagctgatatagttggtctgtgggcgctgaattttcttataaacaaggggttgcttcctaagagtctatcaaaatctatgtatgtttctttcctggctggatgctttcggtcaattcgcttcgggctggaagaagctcatgggaagggacaggcattgcagtttaattggttgtatgacaaaggagcttttatcttgcattctgacgggaaattctcaattgactttacaaaggttgaggaagctgttgaaagccttggcagagagatcatgacgatacaggcaaagggcgacaagcctgctgcgcagtctctccttcagtcgcgtgcaaccttgacgcagccattgcgtgtggcattggagaaaatcgaacacatgcaggtgcctgttgatatagccccgatatttggcacagccagtaagctgctcgcaaacaattaagcaccggaggacagcgattcagaaagttttgtgtctcccattgtacctgataaactacaaattgatttttttacgtgaaaaagtacaaattgttgaaacaagatgaagcaccatcctgagccgacacaaatggaaaataacacaaataaatgaatgatttcttaaaaggatggctgttaacatcactgcctaaatggatgaacttctaaaggatcactgttagcatcactgtctatttaccaaggtgtttttagaaagcgatgtctactgtaatctttgaacatattcactcaggaactaggagcggagactatcagaattctgctgaacttttgcggttttgccgcgctgaaggtcatcttgtgcttatatatatcagaatgttggtacacatggttcgttccttgtgagtgaatgctgcaaatatatgccccactctgatcggacccaattcaacgtttcaaacttgtaacgttacttcatacagaaacatgctctttcatctt

SEQ ID NO: 63532 - protein, 369 aa, Triticum aestivum
  peptide (1)..(369): Ceres Seq. ID no. 13597045
  misc_feature (61)..(338): Homolog of NCBI NO: 29347256 NR Description: putative dipeptidyl-peptidase III
  misc_feature (1)..(54): Homolog of NCBI NO: 37536312 NR Description: putative glutathione S-transferase
  misc_feature (1)..(54): Homolog of NCBI NO: 33304612 NR Description: tau class GST protein 3 [Oryza sativa (indica
  misc_feature (1)..(54): Homolog of NCBI NO: 11385535 NR Description: glutathione S-transferase GST 42 [Zea mays]
  misc_feature (1)..(54): Homolog of NCBI NO: 37536284 NR Description: putative glutathione S-transferase
  misc_feature (1)..(54): Homolog of NCBI NO: 37536308 NR Description: putative glutathione S-transferase
  misc_feature (76)..(125): Homolog of NCBI NO: 7715590 NR Description: F20B17.11 [Arabidopsis thaliana]
  misc_feature (120)..(366): Homolog of NCBI NO: 7715590 NR Description: F20B17.11 [Arabidopsis thaliana]
  misc_feature (39)..(366): Homolog of NCBI NO: 15912329 NR Description: At1g79690/F20B17_11 [Arabidopsis thaliana]
  misc_feature (1)..(366): Homolog of NCBI NO: 18412472 NR Description: MutT/nudix family protein [Arabidopsis thaliana]
MAGAANDLKLLGMWASPYVLRVRLALSIKSISYEYAEEDLRHKSELLLRSNPVHDGLFSYKATFEAFVGVRDDVATSQVKLFGDQLEDLEKNLPLDNIYKSDNVSAAPIRVMNLLYNSGDVKGPQTIAFNLPNDERIVNERGTSMVMLKNISEAKFKNILKPIANACIREEQKEYVDFEPYYTHIVCHECCHGIGPHSITLPGGKKSTVRMELQECHSALEEAKADIVGLWALNFLINKGLLPKSLSKSMYVSFLAGCFRSIRFGLEEAHGKGQALQFNWLYDKGAFILHSDGKFSIDFTKVEEAVESLGREIMTIQAKGDKPAAQSLLQSRATLTQPLRVALEKIEHMQVPVDIAPIFGTASKLLANN

SEQ ID NO: 63533 - protein, 357 aa, Triticum aestivum
  peptide (1)..(357): Ceres Seq. ID no. 13597046
  misc_feature (49)..(326): Homolog of NCBI NO: 29347256 NR Description: putative dipeptidyl-peptidase III
  misc_feature (1)..(42): Homolog of NCBI NO: 37536312 NR Description: putative glutathione S-transferase
  misc_feature (1)..(42): Homolog of NCBI NO: 33304612 NR Description: tau class GST protein 3 [Oryza sativa (indica
  misc_feature (1)..(42): Homolog of NCBI NO: 11385535 NR Description: glutathione S-transferase GST 42 [Zea mays]
  misc_feature (1)..(42): Homolog of NCBI NO: 37536284 NR Description: putative glutathione S-transferase
  misc_feature (1)..(42): Homolog of NCBI NO: 37536308 NR Description: putative glutathione S-transferase
  misc_feature (64)..(113): Homolog of NCBI NO: 7715590 NR Description: F20B17.11 [Arabidopsis thaliana]
  misc_feature (108)..(354): Homolog of NCBI NO: 7715590 NR Description: F20B17.11 [Arabidopsis thaliana]
  misc_feature (27)..(354): Homolog of NCBI NO: 15912329 NR Description: At1g79690/F20B17_11 [Arabidopsis thaliana]
  misc_feature (1)..(354): Homolog of NCBI NO: 18412472 NR Description: MutT/nudix family protein [Arabidopsis thaliana]
MWASPYVLRVRLALSIKSISYEYAEEDLRHKSELLLRSNPVHDGLFSYKATFEAFVGVRDDVATSQVKLFGDQLEDLEKNLPLDNIYKSDNVSAAPIRVMNLLYNSGDVKGPQTIAFNLPNDERIVNERGTSMVMLKNISEAKFKNILKPIANACIREEQKEYVDFEPYYTHIVCHECCHGIGPHSITLPGGKKSTVRMELQECHSALEEAKADIVGLWALNFLINKGLLPKSLSKSMYVSFLAGCFRSIRFGLEEAHGKGQALQFNWLYDKGAFILHSDGKFSIDFTKVEEAVESLGREIMTIQAKGDKPAAQSLLQSRATLTQPLRVALEKIEHMQVPVDIAPIFGTASKLLANN

SEQ ID NO: 63534 - protein, 258 aa, Triticum aestivum
  peptide (1)..(258): Ceres Seq. ID no. 13597047
  misc_feature (1)..(227): Homolog of NCBI NO: 29347256 NR Description: putative dipeptidyl-peptidase III
  misc_feature (1)..(14): Homolog of NCBI NO: 7715590 NR Description: F20B17.11 [Arabidopsis thaliana]
  misc_feature (9)..(255): Homolog of NCBI NO: 7715590 NR Description: F20B17.11 [Arabidopsis thaliana]
  misc_feature (1)..(255): Homolog of NCBI NO: 15912329 NR Description: At1g79690/F20B17_11 [Arabidopsis thaliana]
  misc_feature (1)..(255): Homolog of NCBI NO: 18412472 NR Description: MutT/nudix family protein [Arabidopsis thaliana]
MNLLYNSGDVKGPQTIAFNLPNDERIVNERGTSMVMLKNISEAKFKNILKPIANACIREEQKEYVDFEPYYTHIVCHECCHGIGPHSITLPGGKKSTVRMELQECHSALEEAKADIVGLWALNFLINKGLLPKSLSKSMYVSFLAGCFRSIRFGLEEAHGKGQALQFNWLYDKGAFILHSDGKFSIDFTKVEEAVESLGREIMTIQAKGDKPAAQSLLQSRATLTQPLRVALEKIEHMQVPVDIAPIFGTASKLLANN

SEQ ID NO: 63535 - DNA, 1267 bp, Triticum aestivum
  misc_feature (1)..(1267): Ceres Seq. ID no. 13585043
atttttccccgattctcagcaacgagagccgacctcgtgacggcgccggccagccaggatccatagcgacgcggtggcgccgttcgccggagtagcgcgcctcgacaagaggccgcgcgctgctccttcgaacggcgctgagcccagcgcagaggcggggtgtcgtcttcctccgtaagtacggcacatcggtgtcaacttcccgtgcgtcgtcccgagagaccacgacatcctggtcctcgtgcggcgtcgtcgcgcgggatcccggacgtgaggcaccaacgcggcgccatcagtttcatctttaaatcttgagttcatcaactgaaggagatgtctgtggttaggttacaaggcggcagtccagagcatttgggcagtggtttcgttgcttactgcaacggatgttcatgtctagtaatgacatcttaccatgttgttaaatcagccttcattaatggtcttatgattacggttatctttcctggtggacaaccgcgctttcaagccgatgtacaaaatttatccgagcctggggatcttgctatacttcagtttgattgtgagggctatatgtttgaacctctgctgttcgctgaaatatctaccaatcctgatttatttccatggacggtttatttgcatggatattacaatggtaaacgtggacaacttatcagaccttcgacattacctggccaaattgacggtatgtacgtaaatcaagaaactggtgttcatatgctttatgcaaattacaccagtaaccctggaatgtctggtggaccaattattatgggaggtagagtcttggagtcaacaaaggggctgaggcaggaacgagacttgctgtttcagtcctgggtgtacaccatgctagaggattggactggcggagcagaaacaattgctgagatgcttgaaatgcttgaagagcttgactattaaaataatcaatcttgcagcaccaagtattaaagccttcaatgaagtatcagttacttggagtgaatgtttgatacgctgctggagcctcagggtggagtgaaagatggtttattgcttccatacattaagccgtcgtttattttggaagttgtctgagtgcgatgtgtaatttgtatctctatacggttgttatttaagttattcttgtccgagtgactacatcagactatcaaggattgttatttgttatgtaccaatgtggagtcacataggttatttgtgcctgtagagtaagaattatattaatgtgatggactcc

SEQ ID NO: 63536 - protein, 204 aa, Triticum aestivum
  peptide (1)..(204): Ceres Seq. ID no. 13585044
  misc_feature (15)..(160): Pfam Name: Trypsin Pfam Description: Trypsin
  misc_feature (2)..(201): Homolog of NCBI NO: 34899250 NR Description: hypothetical protein~predicted by FGENESH etc.
MSVVRLQGGSPEHLGSGFVAYCNGCSCLVMTSYHVVKSAFINGLMITVIFPGGQPRFQADVQNLSEPGDLAILQFDCEGYMFEPLLFAEISTNPDLFPWTVYLHGYYNGKRGQLIRPSTLPGQIDGMYVNQETGVHMLYANYTSNPGMSGGPIIMGGRVLESTKGLRQERDLLFQSWVYTMLEDWTGGAETIAEMLEMLEELDY

SEQ ID NO: 63537 - protein, 175 aa, Triticum aestivum
  peptide (1)..(175): Ceres Seq. ID no. 13585045
  misc_feature (1)..(131): Pfam Name: Trypsin Pfam Description: Trypsin
  misc_feature (1)..(172): Homolog of NCBI NO: 34899250 NR Description: hypothetical protein~predicted by FGENESH etc.
MTSYHVVKSAFINGLMITVIFPGGQPRFQADVQNLSEPGDLAILQFDCEGYMFEPLLFAEISTNPDLFPWTVYLHGYYNGKRGQLIRPSTLPGQIDGMYVNQETGVHMLYANYTSNPGMSGGPIIMGGRVLESTKGLRQERDLLFQSWVYTMLEDWTGGAETIAEMLEMLEELDY

SEQ ID NO: 63538 - protein, 160 aa, Triticum aestivum
  peptide (1)..(160): Ceres Seq. ID no. 13585046
  misc_feature (1)..(116): Pfam Name: Trypsin Pfam Description: Trypsin
  misc_feature (1)..(157): Homolog of NCBI NO: 34899250 NR Description: hypothetical protein~predicted by FGENESH etc.
MITVIFPGGQPRFQADVQNLSEPGDLAILQFDCEGYMFEPLLFAEISTNPDLFPWTVYLHGYYNGKRGQLIRPSTLPGQIDGMYVNQETGVHMLYANYTSNPGMSGGPIIMGGRVLESTKGLRQERDLLFQSWVYTMLEDWTGGAETIAEMLEMLEELDY

SEQ ID NO: 63539 - DNA, 1412 bp, Triticum aestivum
  misc_feature (1)..(1412): Ceres Seq. ID no. 14303542
gacaccactccccctgagctcgctcgcacgccgcggccgggtaacaccaccaccgggcaccatggcctcctccttcctctccctacggctccctaccccctccccgcccaccgcgacgtcgtccccgttcttcccgaatcccctagtccggtccggaaggtgcagtccgctgtcctctaccctcgtggcgcgtgttgccgggccggcggcgggggctccgtcgccgttgttcaacccgaggggcgacccgttcctatccacgctagcagctgcttctccagagcagctcgcggcagctgcgggtggcgaacgccgcggcgaggaccacctgccgttcctcgagatcttccagaacgccaagctcatgtcctcgcccgcgcaggtggaacgttctagcagctcttacagtcagcacagtcctagaaggcctcccccggatttgccgtcgttgcttctacatggccggattgtttatattggcatgccgttggtgccagcagttaccgagcttattgttgcccagttgatgtaccttgattggatgaatagtagtgagcctgcatatatatacatcaactcaacaggaacggctcgtgatgatggtgaaccagttggaatggagacggaaggttttgctatctatgatgccatgatgcggatgaaaactgaggttcacacactttgtataggagctgcagcaggtcatgcctgccttgtccttgcagcagggaagaaaggcaaacgatatatgtttccccatgccaaagctttgattcagcaacctcgtattccttcatatgggatgatgcaagcttctgatgttgttattcgtgcgaaagaggtagtgcacaacaggaataccctggtcaaacttttagcaaggcacactggaaatccaccggagaaaatagataaggtgatgagaggaccattttatatggactctttgaaagccaaggagtttggggtaattgacaagatcctttggcgcggtcaggagaagtacatgtctgacatgctctcccctgaggattgggacaaggttgctggagtcagaggccccggtggaatgtgaagttgtgcactggaactcgaatacttagttaggtctttgagctcgcagtcgcaggggttgaacgaacaatcttgcctgttgacaggttgtcagagccgagggtacctgttgtacggactatggagaagctagattagaacttggacgatcatgttagtgcgtatgctcccgggattggagctagcgagtgttttgggtggagctattgttgttagtccgatcgtttgccagtccaggttttggtactctgctcactgtaggtgcatagtgtacaccggagttaaaagcaaaaaacaaccacatttgaggcttcgtttgcgaaaaaatacctagtccc

SEQ ID NO: 63540 - protein, 357 aa, Triticum aestivum
  peptide (1)..(357): Ceres Seq. ID no. 14303543
  misc_feature (140)..(331): Pfam Name: Clp protease Pfam Description: Clp protease
  misc_feature (37)..(339): Homolog of NCBI NO: 19698857 NR Description: unknown protein [Arabidopsis thaliana]
  misc_feature (37)..(339): Homolog of NCBI NO: 18414804 NR Description: ATP-dependent Clp protease proteolytic subunit
  misc_feature (135)..(328): Homolog of NCBI NO: 18203214 NR Description: Putative ATP-dependent Clp protease proteolytic
  misc_feature (143)..(328): Homolog of NCBI NO: 13812146 NR Description: ATP-dependent Clp protease proteolytic subunit
  misc_feature (135)..(327): Homolog of NCBI NO: 23126723 NR Description: hypothetical protein [Nostoc punctiforme]
  misc_feature (135)..(327): Homolog of NCBI NO: 17231850 NR Description: ATP-dependent Clp protease proteolytic subunit
  misc_feature (141)..(328): Homolog of NCBI NO: 22299302 NR Description: ATP-dependent Clp protease proteolytic subunit 3
  misc_feature (224)..(327): Homolog of NCBI NO: 25402516 NR Description: hypothetical protein [imported] - Arabidopsis
  misc_feature (40)..(218): Homolog of NCBI NO: 25402516 NR Description: hypothetical protein [imported] - Arabidopsis
  misc_feature (40)..(352): Homolog of NCBI NO: 18390982 NR Description: ATP-dependent Clp protease proteolytic subunit
TPLPLSSLARRGRVTPPPGTMASSFLSLRLPTPSPPTATSSPFFPNPLVRSGRCSPLSSTLVARVAGPAAGAPSPLFNPRGDPFLSTLAAASPEQLAAAAGGERRGEDHLPFLEIFQNAKLMSSPAQVERSSSSYSQHSPRRPPPDLPSLLLHGRIVYIGMPLVPAVTELIVAQLMYLDWMNSSEPAYIYINSTGTARDDGEPVGMETEGFAIYDAMMRMKTEVHTLCIGAAAGHACLVLAAGKKGKRYMFPHAKALIQQPRIPSYGMMQASDVVIRAKEVVHNRNTLVKLLARHTGNPPEKIDKVMRGPFYMDSLKAKEFGVIDKILWRGQEKYMSDMLSPEDWDKVAGVRGPGGM

SEQ ID NO: 63541 - protein, 337 aa, Triticum aestivum
  peptide (1)..(337): Ceres Seq. ID no. 14303544
  misc_feature (120)..(311): Pfam Name: Clp protease Pfam Description: Clp protease
  misc_feature (17)..(319): Homolog of NCBI NO: 19698857 NR Description: unknown protein [Arabidopsis thaliana]
  misc_feature (17)..(319): Homolog of NCBI NO: 18414804 NR Description: ATP-dependent Clp protease proteolytic subunit
  misc_feature (115)..(308): Homolog of NCBI NO: 18203214 NR Description: Putative ATP-dependent Clp protease proteolytic
  misc_feature (123)..(308): Homolog of NCBI NO: 13812146 NR Description: ATP-dependent Clp protease proteolytic subunit
  misc_feature (115)..(307): Homolog of NCBI NO: 23126723 NR Description: hypothetical protein [Nostoc punctiforme]
  misc_feature (115)..(307): Homolog of NCBI NO: 17231850 NR Description: ATP-dependent Clp protease proteolytic subunit
  misc_feature (121)..(308): Homolog of NCBI NO: 22299302 NR Description: ATP-dependent Clp protease proteolytic subunit 3
  misc_feature (204)..(307): Homolog of NCBI NO: 25402516 NR Description: hypothetical protein [imported] - Arabidopsis
  misc_feature (20)..(198): Homolog of NCBI NO: 25402516 NR Description: hypothetical protein [imported] - Arabidopsis
  misc_feature (20)..(332): Homolog of NCBI NO: 18390982 NR Description: ATP-dependent Clp protease proteolytic subunit
MASSFLSLRLPTPSPPTATSSPFFPNPLVRSGRCSPLSSTLVARVAGPAAGAPSPLFNPRGDPFLSTLAAASPEQLAAAAGGERRGEDHLPFLEIFQNAKLMSSPAQVERSSSSYSQHSPRRPPPDLPSLLLHGRIVYIGMPLVPAVTELIVAQLMYLDWMNSSEPAYIYINSTGTARDDGEPVGMETEGFAIYDAMMRMKTEVHTLCIGAAAGHACLVLAAGKKGKRYMFPHAKALIQQPRIPSYGMMQASDVVIRAKEVVHNRNTLVKLLARHTGNPPEKIDKVMRGPFYMDSLKAKEFGVIDKILWRGQEKYMSDMLSPEDWDKVAGVRGPGGM

SEQ ID NO: 63542 - protein, 236 aa, Triticum aestivum
  peptide (1)..(236): Ceres Seq. ID no. 14303545
  misc_feature (19)..(210): Pfam Name: Clp protease Pfam Description: Clp protease
  misc_feature (1)..(218): Homolog of NCBI NO: 19698857 NR Description: unknown protein [Arabidopsis thaliana]
  misc_feature (1)..(218): Homolog of NCBI NO: 18414804 NR Description: ATP-dependent Clp protease proteolytic subunit
  misc_feature (14)..(207): Homolog of NCBI NO: 18203214 NR Description: Putative ATP-dependent Clp protease proteolytic
  misc_feature (22)..(207): Homolog of NCBI NO: 13812146 NR Description: ATP-dependent Clp protease proteolytic subunit
  misc_feature (14)..(206): Homolog of NCBI NO: 23126723 NR Description: hypothetical protein [Nostoc punctiforme]
  misc_feature (14)..(206): Homolog of NCBI NO: 17231850 NR Description: ATP-dependent Clp protease proteolytic subunit
  misc_feature (20)..(207): Homolog of NCBI NO: 22299302 NR Description: ATP-dependent Clp protease proteolytic subunit 3
  misc_feature (103)..(206): Homolog of NCBI NO: 25402516 NR Description: hypothetical protein [imported] - Arabidopsis
  misc_feature (1)..(97): Homolog of NCBI NO: 25402516 NR Description: hypothetical protein [imported] - Arabidopsis
  misc_feature (1)..(231): Homolog of NCBI NO: 18390982 NR Description: ATP-dependent Clp protease proteolytic subunit
MSSPAQVERSSSSYSQHSPRRPPPDLPSLLLHGRIVYIGMPLVPAVTELIVAQLMYLDWMNSSEPAYIYINSTGTARDDGEPVGMETEGFAIYDAMMRMKTEVHTLCIGAAAGHACLVLAAGKKGKRYMFPHAKALIQQPRIPSYGMMQASDVVIRAKEVVHNRNTLVKLLARHTGNPPEKIDKVMRGPFYMDSLKAKEFGVIDKILWRGQEKYMSDMLSPEDWDKVAGVRGPGGM

SEQ ID NO: 63543 - DNA, 1264 bp, Triticum aestivum
  misc_feature (1)..(1264): Ceres Seq. ID no. 12616360
ggagcagtggcctgcagacgcggagctaccgagagccggaggacggaagcaagtgagctgagcgcaggcggaggcggacgcgacgatgagggcggtggcgatcgcgagccccggcgggccggaggcgctgcaggtgcgcgaggtggaggacctcccggcgccgggggagggcgaggtgctcgtcgcggtggccgccgccggcgtcaaccgcgccgacacggtccagcggcagggccggtacccgccgccgccgggcgcctccccctacccgggcctcgagtgctccggcaccatcctcgcgctcggggccaacgtgcccccgcgctgggccgtcggcgaccaggtgtgcgcgctgctctccggtggcgggtatgcggagaaggtggtggtgccggcggggcagctgctcccggtcccggagggggtgtcgctggccgacgccgccggcttgcccgaggtggcctgcaccgtctggtccaccgtcttcatgaccagccacctctcccccggcgaatccttccttatccatggcggatcgagtggaattggtacattcgctatacagattgcgaagcaccttggtgttaaggtttttgttactgcaggaagtgaagaaaaactagcagcctgcaaaggtttgggagcggatgtatgtataaactacaaaactgaagattttgtagcacgcgtaaaagaagaaacaaatggaaagggtgttgatgtcattctggacaatatcggcgggtcttatctccagcgcaatctgaacagcctagctgttgatggtagactcttcatcatcggtttcatgggaggcactacaactgaagtgaaccttcaggcgatgcttgcccgaagactgaccatacaagctgctggactgcggaacagaagcctcgctaacaaagcccagatcgtcagcgaggtggagaagaatgtgtggcctgccgtcgcgtcgggcaaggtgaagccggtgatttacaagacattccctctatccgaagcagctgaatctcacaagttgatggagacgagctcccacattggcaagatactgctgattccatgatggggtatggtgtatcatgtattcatgtgtacactagccgatgtgggcactgttttctgtagtgaactatgcatggacatgcccttttatattgtaataagctggatctctaagtgctggtgaaattggatatgtatcttgaggataaatagtcacaataaaatgttggaacttggaagtcttgttctttcatct

SEQ ID NO: 63544 - protein, 327 aa, Triticum aestivum
  peptide (1)..(327): Ceres Seq. ID no. 12616361
  misc_feature (1)..(325): Homolog of NCBI NO: 15610913 NR Description: hypothetical protein Rv3777 [Mycobacterium
  misc_feature (1)..(325): Homolog of NCBI NO: 15843400 NR Description: quinone oxidoreductase [Mycobacterium
  misc_feature (1)..(325): Homolog of NCBI NO: 22977083 NR Description: hypothetical protein [Ralstonia metallidurans]
  misc_feature (1)..(325): Homolog of NCBI NO: 22966771 NR Description: hypothetical protein [Rhodospirillum rubrum]
  misc_feature (1)..(325): Homolog of NCBI NO: 22960487 NR Description: hypothetical protein [Rhodobacter sphaeroides]
  misc_feature (1)..(326): Homolog of NCBI NO: 29830911 NR Description: putative quinone oxidoreductase
  misc_feature (1)..(326): Homolog of NCBI NO: 23017076 NR Description: hypothetical protein [Thermobifida fusca]
  misc_feature (1)..(326): Homolog of NCBI NO: 21222233 NR Description: putative quinone oxidoreductase [Streptomyces
  misc_feature (1)..(325): Homolog of NCBI NO: 15234529 NR Description: putative NADPH quinone oxidoreductase
  misc_feature (1)..(327): Homolog of NCBI NO: 15451578 NR Description: Putative quinone oxidoreductase [Oryza sativa]
MRAVAIASPGGPEALQVREVEDLPAPGEGEVLVAVAAAGVNRADTVQRQGRYPPPPGASPYPGLECSGTILALGANVPPRWAVGDQVCALLSGGGYAEKVVVPAGQLLPVPEGVSLADAAGLPEVACTVWSTVFMTSHLSPGESFLIHGGSSGIGTFAIQIAKHLGVKVFVTAGSEEKLAACKGLGADVCINYKTEDFVARVKEETNGKGVDVILDNIGGSYLQRNLNSLAVDGRLFIIGFMGGTTTEVNLQAMLARRLTIQAAGLRNRSLANKAQIVSEVEKNVWPAVASGKVKPVIYKTFPLSEAAESHKLMETSSHIGKILLIP

SEQ ID NO: 63545 - protein, 195 aa, Triticum aestivum
  peptide (1)..(195): Ceres Seq. ID no. 12616362
  misc_feature (73)..(165): Pfam Name: TT viral ORF2 Pfam Description: TT viral ORF2
GAVACRRGATESRRTEASELSAGGGGRDDEGGGDREPRRAGGAAGARGGGPPGAGGGRGARRGGRRRRQPRRHGPAAGPVPAAAGRLPLPGPRVLRHHPRARGQRAPALGRRRPGVRAALRWRVCGEGGGAGGAAAPGPGGGVAGRRRRLARGGLHRLVHRLHDQPPLPRRILPYPWRIEWNWYIRYTDCEAPWC

SEQ ID NO: 63546 - protein, 193 aa, Triticum aestivum
  peptide (1)..(193): Ceres Seq. ID no. 12616363
  misc_feature (1)..(191): Homolog of NCBI NO: 15610913 NR Description: hypothetical protein Rv3777 [Mycobacterium
  misc_feature (1)..(191): Homolog of NCBI NO: 15843400 NR Description: quinone oxidoreductase [Mycobacterium
  misc_feature (1)..(191): Homolog of NCBI NO: 22977083 NR Description: hypothetical protein [Ralstonia metallidurans]
  misc_feature (1)..(191): Homolog of NCBI NO: 22966771 NR Description: hypothetical protein [Rhodospirillum rubrum]
  misc_feature (1)..(191): Homolog of NCBI NO: 22960487 NR Description: hypothetical protein [Rhodobacter sphaeroides]
  misc_feature (1)..(192): Homolog of NCBI NO: 29830911 NR Description: putative quinone oxidoreductase
  misc_feature (1)..(192): Homolog of NCBI NO: 23017076 NR Description: hypothetical protein [Thermobifida fusca]
  misc_feature (1)..(192): Homolog of NCBI NO: 21222233 NR Description: putative quinone oxidoreductase [Streptomyces
  misc_feature (1)..(191): Homolog of NCBI NO: 15234529 NR Description: putative NADPH quinone oxidoreductase
  misc_feature (1)..(193): Homolog of NCBI NO: 15451578 NR Description: Putative quinone oxidoreductase [Oryza sativa]
MTSHLSPGESFLIHGGSSGIGTFAIQIAKHLGVKVFVTAGSEEKLAACKGLGADVCINYKTEDFVARVKEETNGKGVDVILDNIGGSYLQRNLNSLAVDGRLFIIGFMGGTTTEVNLQAMLARRLTIQAAGLRNRSLANKAQIVSEVEKNVWPAVASGKVKPVIYKTFPLSEAAESHKLMETSSHIGKILLIP

SEQ ID NO: 63547 - DNA, 1536 bp, Triticum aestivum
  misc_feature (1)..(1536): Ceres Seq. ID no. 14313522
aaaacggatgttcggtcgtgccgtcgtggagtttggctaggcaacgcagctcggatcccgcggaaaaggcaggcaacacaggcagcggcacacggtacagcctcaggagacacagaggcgagatcccgtggcggatcagcggctgcctgtctgaaccggcaacgcatctcctccctcccccctctccagtctccctactccgacgatctatccgtcgagcctcctcaccgcgcgactcgcagcagcgccggagggggaggatggggcggccgccaagcagcgggggccccgcgttccggttcacgcacgcggaggtggcggagatggaggagcacctccgccacctcaacaacgccatcccgcagcgcaacgtcatccagggcctcgccgagaagttcaccgcctccgccgcccgcgccggcaagatccccgtccagtacaagcaggtctggaactggttccagaaccggaggtactcgcagcgggccaggacccccaggggcgcgccgccgccgcaggggaagatgctgcccacgggggccgaggaacaccacccggcctccttcagggctcaggggtcttcctcgtcctaccccggatcccactcaggaaagagtccttcggatggtggccaggccgagtttgaagcaaagtcagctagagatggtgcatggtacgatgttgctgcctttctgtcccacaggctctttgaaacaggggacccggaagtaaaagttcgattttctggatttgggcctgaggaggatgaatggattaatgttcgtaaatgtgtgaggctgcgttctcttccatgtgaatctgcagaatgtgttgctgtgcttcctggggatctcattctttgttttcaggaaggcaaagagcaggccctctattttgacgctcgtgttcttgatgctcaaaggcgcaggcatgatgtaagagggtgccgctgcaggtttcttgttcgttatgatcatgatcactctgaggagattgttcctctgaggaaggtatgccgtcgaccagaaactgatttcaggctccagatcttgcacgcatctagagcggcggcctctgcggatgctcagaatgttagcccagttgagcagaaaccccaaaaggcgcacaagatgatggatgtgaacactgccgaggtgaccgtggttcgcaacccagatcaaggagggccatctgacaagccggctgctcccttaccagctgcgcctgctggcacccacggtgattcagtttcagatgtgcagatggggaatgtggaggttattccaaaagttgaagctgcaaatgaagcacatgatgacaacatgaacgtgggagcgtagttgtttcgcttccctgtgcgcttcggtgtgtacttactaagtccaaaaaaatgtttgcttaggaacttccggtcgaggaaggatggtcgcccggtaactgtaatgtgccgatgtcgacttgtttgctgatgtgtgtacaaagtcttggattgtcggtatctatatagctatatcgtgagacgaatgttgttttcag

SEQ ID NO: 63548 - protein, 445 aa, Triticum aestivum
  peptide (1)..(445): Ceres Seq. ID no. 14313523
  misc_feature (108)..(329): Homolog of NCBI NO: 30684237 NR Description: expressed protein [Arabidopsis thaliana]
  misc_feature (108)..(342): Homolog of NCBI NO: 30684244 NR Description: expressed protein [Arabidopsis thaliana]
  misc_feature (100)..(342): Homolog of NCBI NO: 25402795 NR Description: protein F9L1.16 [imported] - Arabidopsis thaliana
  misc_feature (104)..(411): Homolog of NCBI NO: 11994101 NR Description: gb|AAD39678.1~gene_id:MYF24.10~similar to unknown
  misc_feature (87)..(163): Homolog of NCBI NO: 22331151 NR Description: expressed protein [Arabidopsis thaliana]
  misc_feature (193)..(411): Homolog of NCBI NO: 22331151 NR Description: expressed protein [Arabidopsis thaliana]
NGCSVVPSWSLARQRSSDPAEKAGNTGSGTRYSLRRHRGEIPWRISGCLSEPATHLLPPPSPVSLLRRSIRRASSPRDSQQRRRGRMGRPPSSGGPAFRFTHAEVAEMEEHLRHLNNAIPQRNVIQGLAEKFTASAARAGKIPVQYKQVWNWFQNRRYSQRARTPRGAPPPQGKMLPTGAEEHHPASFRAQGSSSSYPGSHSGKSPSDGGQAEFEAKSARDGAWYDVAAFLSHRLFETGDPEVKVRFSGFGPEEDEWINVRKCVRLRSLPCESAECVAVLPGDLILCFQEGKEQALYFDARVLDAQRRRHDVRGCRCRFLVRYDHDHSEEIVPLRKVCRRPETDFRLQILHASRAAASADAQNVSPVEQKPQKAHKMMDVNTAEVTVVRNPDQGGPSDKPAAPLPAAPAGTHGDSVSDVQMGNVEVIPKVEAANEAHDDNMNVGA

SEQ ID NO: 63549 - protein, 359 aa, Triticum aestivum
  peptide (1)..(359): Ceres Seq. ID no. 14313524
  misc_feature (22)..(243): Homolog of NCBI NO: 30684237 NR Description: expressed protein [Arabidopsis thaliana]
  misc_feature (22)..(256): Homolog of NCBI NO: 30684244 NR Description: expressed protein [Arabidopsis thaliana]
  misc_feature (14)..(256): Homolog of NCBI NO: 25402795 NR Description: protein F9L1.16 [imported] - Arabidopsis thaliana
  misc_feature (18)..(325): Homolog of NCBI NO: 11994101 NR Description: gb|AAD39678.1~gene_id:MYF24.10~similar to unknown
  misc_feature (1)..(77): Homolog of NCBI NO: 22331151 NR Description: expressed protein [Arabidopsis thaliana]
  misc_feature (107)..(325): Homolog of NCBI NO: 22331151 NR Description: expressed protein [Arabidopsis thaliana]
MGRPPSSGGPAFRFTHAEVAEMEEHLRHLNNAIPQRNVIQGLAEKFTASAARAGKIPVQYKQVWNWFQNRRYSQRARTPRGAPPPQGKMLPTGAEEHHPASFRAQGSSSSYPGSHSGKSPSDGGQAEFEAKSARDGAWYDVAAFLSHRLFETGDPEVKVRFSGFGPEEDEWINVRKCVRLRSLPCESAECVAVLPGDLILCFQEGKEQALYFDARVLDAQRRRHDVRGCRCRFLVRYDHDHSEEIVPLRKVCRRPETDFRLQILHASRAAASADAQNVSPVEQKPQKAHKMMDVNTAEVTVVRNPDQGGPSDKPAAPLPAAPAGTHGDSVSDVQMGNVEVIPKVEAANEAHDDNMNVGA

SEQ ID NO: 63550 - protein, 338 aa, Triticum aestivum
  peptide (1)..(338): Ceres Seq. ID no. 14313525
  misc_feature (1)..(222): Homolog of NCBI NO: 30684237 NR Description: expressed protein [Arabidopsis thaliana]
  misc_feature (1)..(235): Homolog of NCBI NO: 30684244 NR Description: expressed protein [Arabidopsis thaliana]
  misc_feature (1)..(235): Homolog of NCBI NO: 25402795 NR Description: protein F9L1.16 [imported] - Arabidopsis thaliana
  misc_feature (1)..(304): Homolog of NCBI NO: 11994101 NR Description: gb|AAD39678.1~gene_id:MYF24.10~similar to unknown
  misc_feature (1)..(56): Homolog of NCBI NO: 22331151 NR Description: expressed protein [Arabidopsis thaliana]
  misc_feature (86)..(304): Homolog of NCBI NO: 22331151 NR Description: expressed protein [Arabidopsis thaliana]
MEEHLRHLNNAIPQRNVIQGLAEKFTASAARAGKIPVQYKQVWNWFQNRRYSQRARTPRGAPPPQGKMLPTGAEEHHPASFRAQGSSSSYPGSHSGKSPSDGGQAEFEAKSARDGAWYDVAAFLSHRLFETGDPEVKVRFSGFGPEEDEWINVRKCVRLRSLPCESAECVAVLPGDLILCFQEGKEQALYFDARVLDAQRRRHDVRGCRCRFLVRYDHDHSEEIVPLRKVCRRPETDFRLQILHASRAAASADAQNVSPVEQKPQKAHKMMDVNTAEVTVVRNPDQGGPSDKPAAPLPAAPAGTHGDSVSDVQMGNVEVIPKVEAANEAHDDNMNVGA

SEQ ID NO: 63551 - DNA, 1831 bp, Triticum aestivum
  misc_feature (1)..(1831): Ceres Seq. ID no. 13584031
agattaaatgttgaggtggaggaaagagaaaccgaaaaaaaggtcttgccttcgcttaattaagcgatgacatcttagccccgattttgatgcgatctgtgatccatgcgccgaacggccacagccggatccttctcgttgcctcgcgcgaaaattttcttcttggcgcgcctctcttccttctcgcccgtcctgcgcgccaaatttctcatcccgatcctggagcccgccagaagaaacctaggcccgctgcccccataaatccacagcagcagactccatcttccatccgtgcgacttgcaggttccttgagcaccaacatggctggccatgggaggaagaaagcggcgcccccatcccaggtgatggacggaccagacggacaagacccaaaatatggcgcccctcccctgccgatggggcgacctaaagctgccgcagcagccgtagcggcatcgaacgcttggttggctgggcatgctgccgctagatccgattcttcccttcaagttgattggggaaatgatgtttacccacctggtggttttgtaaattatttgaacaattcatcgagcttcagtcttccacaacaaattcctcctccaccagccatgacacatggtgctaatttcgcggcaccgctgacatttgcatctcaaaagaatccaattacagcagtgaagaaacgatccaaacgtgcccatgttgaaattgcggatgatgcgggagaaggtaaaactatgaagagattgccatggacatcagaggaggaggatagattgatgagtgcttggctcaagaactcaaatgatcctatcggtggtaatttcaagaagaatgacaaatattggggagatgtggtcgcggactacaatagcaacaccccctcagatcgcaaaagacaagtcaatcaagctatgaaccgatggcatcgagttaacaaaatgataaataatttccattccatccacggagagattagcggtgtatatgctagtgggcagtccaatcagcaattgatggagaaagtccacaaagcatatgagaacagacacggaggaccatttcttctggaaagtacctggcaggttgttcgtcactatccgaagtggtctacgtacaatgcagaactgaatggattgaagaaaatagatgtggccgacctggggaaggcagaggatcatgaggcagctgatagtgatgatatcccacggcctccaggtactaaaacagctaaaagagatgggaatggcaatgacaaaagaaagttgaagtcagaggatttagaagagcttgagaaattcttagaagcccaaaaagaagctactaaaagtcgcacggatgtccttgaggttcaaaagcgtattgcagccgataaacttgagtcgtcgaggctcattctccttgcagcgaaggagaacaaggaggcaaaaacaagagggaaaatgctagaacagtacggtaaattattgacacaagatatggcagggatgaccgagtttcagaaagctgagcatgcgattgcacttaaattgatgcgggaggagttattccccaacgctcgtcaataagtttggaaggaacctgttcctgtttgatgaatgaagagagaagaacagccaatgaagcaatgtggttcatgtcctagtactgatgcttcgggagtgcacaagcttgtttttgttttgttgacagaagtagttattatcaatagatttctgttggtctcgagctagttatttatgtatgtcaacttcttgcttaagtacttccaaaaattgttttctaatctgaagtcagtaataatcattaatccgtaatgattaaaat

SEQ ID NO: 63552 - protein, 416 aa, Triticum aestivum
  peptide (1)..(416): Ceres Seq. ID no. 13584032
  misc_feature (63)..(410): Homolog of NCBI NO: 38636855 NR Description: myb family protein-like [Oryza sativa (japonica
  misc_feature (124)..(384): Homolog of NCBI NO: 34913854 NR Description: B1156H12.9 [Oryza sativa (japonica
  misc_feature (90)..(333): Homolog of NCBI NO: 34914796 NR Description: B1039D07.22 [Oryza sativa (japonica
  misc_feature (71)..(408): Homolog of NCBI NO: 22830896 NR Description: A [Oryza sativa (japonica cultivar-group)]
  misc_feature (124)..(384): Homolog of NCBI NO: 38636815 NR Description: ribosomal protein-like [Oryza sativa (japonica
  misc_feature (1)..(409): Homolog of NCBI NO: 18855038 NR Description: putative ribosomal protein [Oryza sativa]
  misc_feature (118)..(410): Homolog of NCBI NO: 34907792 NR Description: P0703B11.16 [Oryza sativa (japonica
  misc_feature (74)..(410): Homolog of NCBI NO: 37534862 NR Description: hypothetical protein [Oryza sativa (japonica
  misc_feature (101)..(411): Homolog of NCBI NO: 34908712 NR Description: hypothetical protein~similar to Oryza sativa
  misc_feature (22)..(412): Homolog of NCBI NO: 34913404 NR Description: B1074C08.25 [Oryza sativa (japonica
MAGHGRKKAAPPSQVMDGPDGQDPKYGAPPLPMGRPKAAAAAVAASNAWLAGHAAARSDSSLQVDWGNDVYPPGGFVNYLNNSSSFSLPQQIPPPPAMTHGANFAAPLTFASQKNPITAVKKRSKRAHVEIADDAGEGKTMKRLPWTSEEEDRLMSAWLKNSNDPIGGNFKKNDKYWGDVVADYNSNTPSDRKRQVNQAMNRWHRVNKMINNFHSIHGEISGVYASGQSNQQLMEKVHKAYENRHGGPFLLESTWQVVRHYPKWSTYNAELNGLKKIDVADLGKAEDHEAADSDDIPRPPGTKTAKRDGNGNDKRKLKSEDLEELEKFLEAQKEATKSRTDVLEVQKRIAADKLESSRLILLAAKENKEAKTRGKMLEQYGKLLTQDMAGMTEFQKAEHAIALKLMREELFPNARQ

SEQ ID NO: 63553 - protein, 401 aa, Triticum aestivum
  peptide (1)..(401): Ceres Seq. ID no. 13584033
  misc_feature (48)..(395): Homolog of NCBI NO: 38636855 NR Description: myb family protein-like [Oryza sativa (japonica
  misc_feature (109)..(369): Homolog of NCBI NO: 34913854 NR Description: B1156H12.9 [Oryza sativa (japonica
  misc_feature (75)..(318): Homolog of NCBI NO: 34914796 NR Description: B1039D07.22 [Oryza sativa (japonica
  misc_feature (56)..(393): Homolog of NCBI NO: 22830896 NR Description: A [Oryza sativa (japonica cultivar-group)]
  misc_feature (109)..(369): Homolog of NCBI NO: 38636815 NR Description: ribosomal protein-like [Oryza sativa (japonica
  misc_feature (1)..(394): Homolog of NCBI NO: 18855038 NR Description: putative ribosomal protein [Oryza sativa]
  misc_feature (103)..(395): Homolog of NCBI NO: 34907792 NR Description: P0703B11.16 [Oryza sativa (japonica
  misc_feature (59)..(395): Homolog of NCBI NO: 37534862 NR Description: hypothetical protein [Oryza sativa (japonica
  misc_feature (86)..(396): Homolog of NCBI NO: 34908712 NR Description: hypothetical protein~similar to Oryza sativa
  misc_feature (7)..(397): Homolog of NCBI NO: 34913404 NR Description: B1074C08.25 [Oryza sativa (japonica
MDGPDGQDPKYGAPPLPMGRPKAAAAAVAASNAWLAGHAAARSDSSLQVDWGNDVYPPGGFVNYLNNSSSFSLPQQIPPPPAMTHGANFAAPLTFASQKNPITAVKKRSKRAHVEIADDAGEGKTMKRLPWTSEEEDRLMSAWLKNSNDPIGGNFKKNDKYWGDVVADYNSNTPSDRKRQVNQAMNRWHRVNKMINNFHSIHGEISGVYASGQSNQQLMEKVHKAYENRHGGPFLLESTWQVVRHYPKWSTYNAELNGLKKIDVADLGKAEDHEAADSDDIPRPPGTKTAKRDGNGNDKRKLKSEDLEELEKFLEAQKEATKSRTDVLEVQKRIAADKLESSRLILLAAKENKEAKTRGKMLEQYGKLLTQDMAGMTEFQKAEHAIALKLMREELFPNARQ

SEQ ID NO: 63554 - protein, 384 aa, Triticum aestivum
  peptide (1)..(384): Ceres Seq. ID no. 13584034
  misc_feature (31)..(378): Homolog of NCBI NO: 38636855 NR Description: myb family protein-like [Oryza sativa (japonica
  misc_feature (92)..(352): Homolog of NCBI NO: 34913854 NR Description: B1156H12.9 [Oryza sativa (japonica
  misc_feature (58)..(301): Homolog of NCBI NO: 34914796 NR Description: B1039D07.22 [Oryza sativa (japonica
  misc_feature (39)..(376): Homolog of NCBI NO: 22830896 NR Description: A [Oryza sativa (japonica cultivar-group)]
  misc_feature (92)..(352): Homolog of NCBI NO: 38636815 NR Description: ribosomal protein-like [Oryza sativa (japonica
  misc_feature (1)..(377): Homolog of NCBI NO: 18855038 NR Description: putative ribosomal protein [Oryza sativa]
  misc_feature (86)..(378): Homolog of NCBI NO: 34907792 NR Description: P0703B11.16 [Oryza sativa (japonica
  misc_feature (42)..(378): Homolog of NCBI NO: 37534862 NR Description: hypothetical protein [Oryza sativa (japonica
  misc_feature (69)..(379): Homolog of NCBI NO: 34908712 NR Description: hypothetical protein~similar to Oryza sativa
  misc_feature (1)..(380): Homolog of NCBI NO: 34913404 NR Description: B1074C08.25 [Oryza sativa (japonica
MGRPKAAAAAVAASNAWLAGHAAARSDSSLQVDWGNDVYPPGGFVNYLNNSSSFSLPQQIPPPPAMTHGANFAAPLTFASQKNPITAVKKRSKRAHVEIADDAGEGKTMKRLPWTSEEEDRLMSAWLKNSNDPIGGNFKKNDKYWGDVVADYNSNTPSDRKRQVNQAMNRWHRVNKMINNFHSIHGEISGVYASGQSNQQLMEKVHKAYENRHGGPFLLESTWQVVRHYPKWSTYNAELNGLKKIDVADLGKAEDHEAADSDDIPRPPGTKTAKRDGNGNDKRKLKSEDLEELEKFLEAQKEATKSRTDVLEVQKRIAADKLESSRLILLAAKENKEAKTRGKMLEQYGKLLTQDMAGMTEFQKAEHAIALKLMREELFPNARQ

SEQ ID NO: 63555 - DNA, 1325 bp, Triticum aestivum
  misc_feature (1)..(1325): Ceres Seq. ID no. 12617152
atgaccttcttccggtacctaccggaactcctctcctggccctccccttcttccagctcttcttgataaggccacactccgtagaagaacagcaccttgcgatgaaaatggcgagagccctgctcgtcgctcctcttctcgcctcgtgctttgtggcgctcggcctgtccggccgcgccgatgcggcggccgagacgaagaccgtcggtgtctacgagctcaagaagggggatttctccatcaaggtcaccaactggggtgccaccctcatgtccgtgatcctccccgactcgagaggaaacttgggggatgtgatcctgggctacgatacggttgctgagtatgtgaatggcaccgcctactttggagggttgatcggccgcgtcgccaacaggatcgccaacgcccggttcacgctggacgggaaggcctaccggctggttcccaacgatggcaacaacacgctacacggtggtcaccggggattcgataaggtcgtatggacggtgaaggagcacgtcgccggcggcagctccccattcatcactctgtactatcatagcttcgacggagagcaagggtttccaggcgatgtggacgtgcacgtgaagtaccagctctccggcccgcacgagctgagcgtgcgcatgaacgcgacggcgcggggcaaggccaccccggtgaacctcgcgcaccacgcctactggaacctcggcggccacggcagcggcagcgtcctcggcgaggaggtccgcctcttcgcctcccggtacacgcccgtggatgccgcgctcatcccgacgggccacctggcgcccgtggccggcacgccctacgacttccgcacgccggccgccgtgggctcgcgcatcggtggtctcctgagccggggcgttaatgggtacgacatcaactacgtcgtggacggcgggggcctgcgcccggtggcagttgtccgggatggcgcgtccggtagggcgatggagctgtgggcggatcagcccggggtgcagttctacaccgccaacgggctgagtggcgtgagggggaagggcggcaaggtctatggccgatacggcgcgctctgcttggagacgcaggggttccccgacgccgtgaaccgcccgagtttcccgtcgcagatcgtccggccggggaaggtgtacatgcatcacatggtgttcaagttctccttctagtatagctagtggtagtgtggtacccgagcttggtcgtttgtcaggcaacacagccgctcttgtgttttgtgtgctgtctgaatttgatcggttgagcttcaatggaggaataaaagcttgcatgct

SEQ ID NO: 63556 - protein, 398 aa, Triticum aestivum
  peptide (1)..(398): Ceres Seq. ID no. 12617153
  misc_feature (69)..(394): Pfam Name: Aldose 1-epimerase Pfam Description: Aldose 1-epimerase
  misc_feature (64)..(397): Homolog of NCBI NO: 15242223 NR Description: putative aldose 1-epimerase - like protein
  misc_feature (68)..(397): Homolog of NCBI NO: 15228261 NR Description: aldose 1-epimerase - like protein
  misc_feature (68)..(397): Homolog of NCBI NO: 21537069 NR Description: aldose 1-epimerase-like protein [Arabidopsis
  misc_feature (61)..(397): Homolog of NCBI NO: 7430313 NR Description: probable aldose 1-epimerase (EC 5.1.3.3) - common
  misc_feature (46)..(397): Homolog of NCBI NO: 40882679 NR Description: putative aldose 1-epimerase
  misc_feature (46)..(397): Homolog of NCBI NO: 15824565 NR Description: non-cell-autonomous protein pathway1;
  misc_feature (45)..(397): Homolog of NCBI NO: 15824567 NR Description: non-cell-autonomous protein pathway2;
  misc_feature (36)..(398): Homolog of NCBI NO: 38567884 NR Description: OSJNBa0036B21.19 [Oryza sativa (japonica
  misc_feature (36)..(165): Homolog of NCBI NO: 38567883 NR Description: OSJNBa0036B21.18 [Oryza sativa (japonica
  misc_feature (156)..(398): Homolog of NCBI NO: 38567883 NR Description: OSJNBa0036B21.18 [Oryza sativa (japonica
DLLPVPTGTPLLALPFFQLFLIRPHSVEEQHLAMKMARALLVAPLLASCFVALGLSGRADAAAETKTVGVYELKKGDFSIKVTNWGATLMSVILPDSRGNLGDVILGYDTVAEYVNGTAYFGGLIGRVANRIANARFTLDGKAYRLVPNDGNNTLHGGHRGFDKVVWTVKEHVAGGSSPFITLYYHSFDGEQGFPGDVDVHVKYQLSGPHELSVRMNATARGKATPVNLAHHAYWNLGGHGSGSVLGEEVRLFASRYTPVDAALIPTGHLAPVAGTPYDFRTPAAVGSRIGGLLSRGVNGYDINYVVDGGGLRPVAVVRDGASGRAMELWADQPGVQFYTANGLSGVRGKGGKVYGRYGALCLETQGFPDAVNRPSFPSQIVRPGKVYMHHMVFKFSF

SEQ ID NO: 63557 - protein, 365 aa, Triticum aestivum
  peptide (1)..(365): Ceres Seq. ID no. 12617154
  misc_feature (36)..(361): Pfam Name: Aldose 1-epimerase Pfam Description: Aldose 1-epimerase
  misc_feature (31)..(364): Homolog of NCBI NO: 15242223 NR Description: putative aldose 1-epimerase - like protein
  misc_feature (35)..(364): Homolog of NCBI NO: 15228261 NR Description: aldose 1-epimerase - like protein
  misc_feature (35)..(364): Homolog of NCBI NO: 21537069 NR Description: aldose 1-epimerase-like protein [Arabidopsis
  misc_feature (28)..(364): Homolog of NCBI NO: 7430313 NR Description: probable aldose 1-epimerase (EC 5.1.3.3) - common
  misc_feature (13)..(364): Homolog of NCBI NO: 40882679 NR Description: putative aldose 1-epimerase
  misc_feature (13)..(364): Homolog of NCBI NO: 15824565 NR Description: non-cell-autonomous protein pathway1;
  misc_feature (12)..(364): Homolog of NCBI NO: 15824567 NR Description: non-cell-autonomous protein pathway2;
  misc_feature (3)..(365): Homolog of NCBI NO: 38567884 NR Description: OSJNBa0036B21.19 [Oryza sativa (japonica
  misc_feature (3)..(132): Homolog of NCBI NO: 38567883 NR Description: OSJNBa0036B21.18 [Oryza sativa (japonica
  misc_feature (123)..(365): Homolog of NCBI NO: 38567883 NR Description: OSJNBa0036B21.18 [Oryza sativa (japonica
MKMARALLVAPLLASCFVALGLSGRADAAAETKTVGVYELKKGDFSIKVTNWGATLMSVILPDSRGNLGDVILGYDTVAEYVNGTAYFGGLIGRVANRIANARFTLDGKAYRLVPNDGNNTLHGGHRGFDKVVWTVKEHVAGGSSPFITLYYHSFDGEQGFPGDVDVHVKYQLSGPHELSVRMNATARGKATPVNLAHHAYWNLGGHGSGSVLGEEVRLFASRYTPVDAALIPTGHLAPVAGTPYDFRTPAAVGSRIGGLLSRGVNGYDINYVVDGGGLRPVAVVRDGASGRAMELWADQPGVQFYTANGLSGVRGKGGKVYGRYGALCLETQGFPDAVNRPSFPSQIVRPGKVYMHHMVFKFSF

SEQ ID NO: 63558 - protein, 363 aa, Triticum aestivum
  peptide (1)..(363): Ceres Seq. ID no. 12617155
  misc_feature (34)..(359): Pfam Name: Aldose 1-epimerase Pfam Description: Aldose 1-epimerase
  misc_feature (29)..(362): Homolog of NCBI NO: 15242223 NR Description: putative aldose 1-epimerase - like protein
  misc_feature (33)..(362): Homolog of NCBI NO: 15228261 NR Description: aldose 1-epimerase - like protein
  misc_feature (33)..(362): Homolog of NCBI NO: 21537069 NR Description: aldose 1-epimerase-like protein [Arabidopsis
  misc_feature (26)..(362): Homolog of NCBI NO: 7430313 NR Description: probable aldose 1-epimerase (EC 5.1.3.3) - common
  misc_feature (11)..(362): Homolog of NCBI NO: 40882679 NR Description: putative aldose 1-epimerase
  misc_feature (11)..(362): Homolog of NCBI NO: 15824565 NR Description: non-cell-autonomous protein pathway1;
  misc_feature (10)..(362): Homolog of NCBI NO: 15824567 NR Description: non-cell-autonomous protein pathway2;
  misc_feature (1)..(363): Homolog of NCBI NO: 38567884 NR Description: OSJNBa0036B21.19 [Oryza sativa (japonica
  misc_feature (1)..(130): Homolog of NCBI NO: 38567883 NR Description: OSJNBa0036B21.18 [Oryza sativa (japonica
  misc_feature (121)..(363): Homolog of NCBI NO: 38567883 NR Description: OSJNBa0036B21.18 [Oryza sativa (japonica
MARALLVAPLLASCFVALGLSGRADAAAETKTVGVYELKKGDFSIKVTNWGATLMSVILPDSRGNLGDVILGYDTVAEYVNGTAYFGGLIGRVANRIANARFTLDGKAYRLVPNDGNNTLHGGHRGFDKVVWTVKEHVAGGSSPFITLYYHSFDGEQGFPGDVDVHVKYQLSGPHELSVRMNATARGKATPVNLAHHAYWNLGGHGSGSVLGEEVRLFASRYTPVDAALIPTGHLAPVAGTPYDFRTPAAVGSRIGGLLSRGVNGYDINYVVDGGGLRPVAVVRDGASGRAMELWADQPGVQFYTANGLSGVRGKGGKVYGRYGALCLETQGFPDAVNRPSFPSQIVRPGKVYMHHMVFKFSF

SEQ ID NO: 63559 - DNA, 1576 bp, Triticum aestivum
  misc_feature (1)..(1576): Ceres Seq. ID no. 13580053
caaatactggtttcttccaccgtcggtgacctccaagcccaagcccaaaccccaacacccgcgcggctcccgccgccgccgcaccggagatggcggcgtacctgagcatgggcgaggcgcaccgccgcatcgctgactacctctcccgcttggacgacgctatctctcagtccgacggcgccgacctcgcctctctcctcgccatctcctcggcgcccgcctccaccccgctctccgacgcgctcgccgcttttccggattttccccgcctcgcctccgaccgcttcccccacctctccgacttcctccccccgctcctccgcgccatccactcccactccctccgccgcttcggggacgcctactcctccttcgagaaggctgctagcgcgttcctgcaggagttccggaactgggagactccttgggcgatggaggcgatgcacatggtggcgcttgagatcaggctgctagctgagaaggcagacagggagcttgtgatgagcgggaagaacccagacaagctgcaggctgctgggtccttcctgatgaaggtttttggggcacttgcggttaaaggacctaagcgcgttggggcactgtatgttacctgccagctgtttaaaatttatttcaggcttggtactgttaacctttgccgtagtgtcataaggagtatcgaaacagctaggaattttgattttgaagattttccagtgaaagataaggtcacttatatgtattatacaggtcgcttggaggtgtttaatgagaattttcttgttgctgatcagaaactaacttatgctttgatgcattgtaatcctcaaagcgaatcaaatttgaggaaaattttgaagttcctaatccctgtaaagctgtcaattggtgttttgccaaggaggaccctcctggagaagtacaatctgcttgagtatgcagatattgtgacctcacttaggagaggggatctcaggctccttaagcaagcccttgatagacatgaagaccagttactaaaatgtggtgtctaccttgtgttggagaaacttgaactccaggtctaccgaagattagtgaagaaaatccatatcatacagagggagaaggaaccatcgaaggcgcatcaaatcaagctagaggtcttggtaaagactctgcaatggcttggaatcaccatggatgtggatgaggtggaatgcatcatggcgtgcctaatatacaagaatctcataaaaggatactttgcccacaagagcaaagttcttgtccttagcaaacaagaccccttcccaaagttgaatgggaagcccgtttagttcgcagcgatacctcataagcttgtacacctaatggaagtttctcttatctttgatgtacggaacatgacaggtttatgtaaaattaccgcgactctgattgtaacaacatttgtattctagctgcaatgtttgtaaacatttatggttggtagcctccacttaaacggtggttttcatagcttcagtgaggtacaatattgtattctggataaactaaatttgcagactgcaattaaggccatagtaaaaaaccg

SEQ ID NO: 63560 - protein, 409 aa, Triticum aestivum
  peptide (1)..(409): Ceres Seq. ID no. 13580054
  misc_feature (282)..(397): Pfam Name: PCI domain Pfam Description: PCI domain
  misc_feature (100)..(405): Homolog of NCBI NO: 8922987 NR Description: hypothetical protein FLJ11305 [Homo sapiens]
  misc_feature (67)..(405): Homolog of NCBI NO: 9963791 NR Description: HT004 protein [Homo sapiens]
  misc_feature (67)..(405): Homolog of NCBI NO: 30520125 NR Description: RIKEN cDNA A730042J05 gene [Mus musculus]
  misc_feature (344)..(405): Homolog of NCBI NO: 34879449 NR Description: similar to hypothetical protein FLJ11305 [Rattus
  misc_feature (1)..(333): Homolog of NCBI NO: 34879449 NR Description: similar to hypothetical protein FLJ11305 [Rattus
  misc_feature (10)..(405): Homolog of NCBI NO: 7022473 NR Description: unnamed protein product [Homo sapiens]
  misc_feature (10)..(405): Homolog of NCBI NO: 26335427 NR Description: unnamed protein product [Mus musculus]
  misc_feature (10)..(405): Homolog of NCBI NO: 26337617 NR Description: unnamed protein product [Mus musculus]
  misc_feature (10)..(405): Homolog of NCBI NO: 7022282 NR Description: unnamed protein product [Homo sapiens]
  misc_feature (3)..(409): Homolog of NCBI NO: 30680717 NR Description: expressed protein [Arabidopsis thaliana]
MAAYLSMGEAHRRIADYLSRLDDAISQSDGADLASLLAISSAPASTPLSDALAAFPDFPRLASDRFPHLSDFLPPLLRAIHSHSLRRFGDAYSSFEKAASAFLQEFRNWETPWAMEAMHMVALEIRLLAEKADRELVMSGKNPDKLQAAGSFLMKVFGALAVKGPKRVGALYVTCQLFKIYFRLGTVNLCRSVIRSIETARNFDFEDFPVKDKVTYMYYTGRLEVFNENFLVADQKLTYALMHCNPQSESNLRKILKFLIPVKLSIGVLPRRTLLEKYNLLEYADIVTSLRRGDLRLLKQALDRHEDQLLKCGVYLVLEKLELQVYRRLVKKIHIIQREKEPSKAHQIKLEVLVKTLQWLGITMDVDEVECIMACLIYKNLIKGYFAHKSKVLVLSKQDPFPKLNGKPV

SEQ ID NO: 63561 - protein, 403 aa, Triticum aestivum
  peptide (1)..(403): Ceres Seq. ID no. 13580055
  misc_feature (276)..(391): Pfam Name: PCI domain Pfam Description: PCI domain
  misc_feature (94)..(399): Homolog of NCBI NO: 8922987 NR Description: hypothetical protein FLJ11305 [Homo sapiens]
  misc_feature (61)..(399): Homolog of NCBI NO: 9963791 NR Description: HT004 protein [Homo sapiens]
  misc_feature (61)..(399): Homolog of NCBI NO: 30520125 NR Description: RIKEN cDNA A730042J05 gene [Mus musculus]
  misc_feature (338)..(399): Homolog of NCBI NO: 34879449 NR Description: similar to hypothetical protein FLJ11305 [Rattus
  misc_feature (1)..(327): Homolog of NCBI NO: 34879449 NR Description: similar to hypothetical protein FLJ11305 [Rattus
  misc_feature (4)..(399): Homolog of NCBI NO: 7022473 NR Description: unnamed protein product [Homo sapiens]
  misc_feature (4)..(399): Homolog of NCBI NO: 26335427 NR Description: unnamed protein product [Mus musculus]
  misc_feature (4)..(399): Homolog of NCBI NO: 26337617 NR Description: unnamed protein product [Mus musculus]
  misc_feature (4)..(399): Homolog of NCBI NO: 7022282 NR Description: unnamed protein product [Homo sapiens]
  misc_feature (1)..(403): Homolog of NCBI NO: 30680717 NR Description: expressed protein [Arabidopsis thaliana]
MGEAHRRIADYLSRLDDAISQSDGADLASLLAISSAPASTPLSDALAAFPDFPRLASDRFPHLSDFLPPLLRAIHSHSLRRFGDAYSSFEKAASAFLQEFRNWETPWAMEAMHMVALEIRLLAEKADRELVMSGKNPDKLQAAGSFLMKVFGALAVKGPKRVGALYVTCQLFKIYFRLGTVNLCRSVIRSIETARNFDFEDFPVKDKVTYMYYTGRLEVFNENFLVADQKLTYALMHCNPQSESNLRKILKFLIPVKLSIGVLPRRTLLEKYNLLEYADIVTSLRRGDLRLLKQALDRHEDQLLKCGVYLVLEKLELQVYRRLVKKIHIIQREKEPSKAHQIKLEVLVKTLQWLGITMDVDEVECIMACLIYKNLIKGYFAHKSKVLVLSKQDPFPKLNGKPV

SEQ ID NO: 63562 - protein, 295 aa, Triticum aestivum
  peptide (1)..(295): Ceres Seq. ID no. 13580056
  misc_feature (168)..(283): Pfam Name: PCI domain Pfam Description: PCI domain
  misc_feature (1)..(291): Homolog of NCBI NO: 8922987 NR Description: hypothetical protein FLJ11305 [Homo sapiens]
  misc_feature (1)..(291): Homolog of NCBI NO: 9963791 NR Description: HT004 protein [Homo sapiens]
  misc_feature (1)..(291): Homolog of NCBI NO: 30520125 NR Description: RIKEN cDNA A730042J05 gene [Mus musculus]
  misc_feature (230)..(291): Homolog of NCBI NO: 34879449 NR Description: similar to hypothetical protein FLJ11305 [Rattus
  misc_feature (1)..(219): Homolog of NCBI NO: 34879449 NR Description: similar to hypothetical protein FLJ11305 [Rattus
  misc_feature (1)..(291): Homolog of NCBI NO: 7022473 NR Description: unnamed protein product [Homo sapiens]
  misc_feature (1)..(291): Homolog of NCBI NO: 26335427 NR Description: unnamed protein product [Mus musculus]
  misc_feature (1)..(291): Homolog of NCBI NO: 26337617 NR Description: unnamed protein product [Mus musculus]
  misc_feature (1)..(291): Homolog of NCBI NO: 7022282 NR Description: unnamed protein product [Homo sapiens]
  misc_feature (1)..(295): Homolog of NCBI NO: 30680717 NR Description: expressed protein [Arabidopsis thaliana]
MEAMHMVALEIRLLAEKADRELVMSGKNPDKLQAAGSFLMKVFGALAVKGPKRVGALYVTCQLFKIYFRLGTVNLCRSVIRSIETARNFDFEDFPVKDKVTYMYYTGRLEVFNENFLVADQKLTYALMHCNPQSESNLRKILKFLIPVKLSIGVLPRRTLLEKYNLLEYADIVTSLRRGDLRLLKQALDRHEDQLLKCGVYLVLEKLELQVYRRLVKKIHIIQREKEPSKAHQIKLEVLVKTLQWLGITMDVDEVECIMACLIYKNLIKGYFAHKSKVLVLSKQDPFPKLNGKPV

SEQ ID NO: 63563 - DNA, 1046 bp, Triticum aestivum
  misc_feature (1)..(1046): Ceres Seq. ID no. 12616414
cttttccagcagagcctttccccatccctccctccctccccacaaccgccgccgcccatcacgcgcagaaaccacgctccaagacaccaaaacccaccgatcccccatggagaacggcgacgaaaccctcgtctctccccccgccgccgccaccgctgaggtcgagaaggctgcgcccaacggaggcgttgagggcgaggaggtcaccgtcgccgacgctgtccaccccgccaagtcctacgccgccgtcgccgcgaacgccgagatcgaggacctccgcgccaccaagctcgacctcgaggagcagctcgccaatgccagccaggagaacaagaccctcgccgcggaggcccaccgcctcgaagggctcttctctcaggccagggacgacgtcgccaccgccgagcacgccgccgccaccaccgaagaagaggtggcctctctccgcgccgaggtcgagcgcctccaggccctcgtcgaccgcaagaaggctgaccgtgaggcggacgagcgccaacgtcaggagctcacggccgaggtggagaccgttcgtcaggcgaagctcaagctcgagaaggaggtcgacgccctgaaggcttccgccgctgctaccaccgtggaggacagggaggctgctccggacgctggggtcccgaaggaacagggggtcgcctggcaggggatggcagcgggggcggccgctggtgctgccatcaccgctgccgtcgttctgatctacctccgcctcaagaggtaatctggtgctctggtgcgcaggaagttttgctctgctgctacagcttatggaagatttgatgagtttgtcgtggtgatgctgttagtaccgaactgagagtaatatgtcttctatcagttagttgcttaatagaccacaaaaaattaggtaatctgcagaatggttatgtttcatcggtgtttttccttaatcatctacgggcttttggtggtgacgatgaatgtgtagacactttgtcaaccgggcaaggctgtatgcttggttatattatcgttatggttgctggctc

SEQ ID NO: 63564 - protein, 251 aa, Triticum aestivum
  peptide (1)..(251): Ceres Seq. ID no. 12616415
  misc_feature (162)..(218): Pfam Name: Atrophin-1 family Pfam Description: Atrophin-1 family
  misc_feature (17)..(251): Homolog of NCBI NO: 22535574 NR Description: OJ1116_H09.21 [Oryza sativa (japonica
  misc_feature (36)..(251): Homolog of NCBI NO: 6996142 NR Description: VIP1 protein [Avena fatua]
FSSRAFPHPSLPPHNRRRPSRAETTLQDTKTHRSPMENGDETLVSPPAAATAEVEKAAPNGGVEGEEVTVADAVHPAKSYAAVAANAEIEDLRATKLDLEEQLANASQENKTLAAEAHRLEGLFSQARDDVATAEHAAATTEEEVASLRAEVERLQALVDRKKADREADERQRQELTAEVETVRQAKLKLEKEVDALKASAAATTVEDREAAPDAGVPKEQGVAWQGMAAGAAAGAAITAAVVLIYLRLKR

SEQ ID NO: 63565 - protein, 216 aa, Triticum aestivum
  peptide (1)..(216): Ceres Seq. ID no. 12616416
  misc_feature (127)..(183): Pfam Name: Atrophin-1 family Pfam Description: Atrophin-1 family
  misc_feature (1)..(216): Homolog of NCBI NO: 22535574 NR Description: OJ1116_H09.21 [Oryza sativa (japonica
  misc_feature (1)..(216): Homolog of NCBI NO: 6996142 NR Description: VIP1 protein [Avena fatua]
MENGDETLVSPPAAATAEVEKAAPNGGVEGEEVTVADAVHPAKSYAAVAANAEIEDLRATKLDLEEQLANASQENKTLAAEAHRLEGLFSQARDDVATAEHAAATTEEEVASLRAEVERLQALVDRKKADREADERQRQELTAEVETVRQAKLKLEKEVDALKASAAATTVEDREAAPDAGVPKEQGVAWQGMAAGAAAGAAITAAVVLIYLRLKR

SEQ ID NO: 63566 - protein, 196 aa, Triticum aestivum
  peptide (1)..(196): Ceres Seq. ID no. 12616417
  misc_feature (2)..(157): Pfam Name: Formin Homology 2 Domain Pfam Description: Formin Homology 2 Domain
  misc_feature (2)..(196): Homolog of NCBI NO: 119712 NR Description: Extensin precursor (Proline-rich glycoprotein)
  misc_feature (2)..(157): Homolog of NCBI NO: 6523547 NR Description: hydroxyproline-rich glycoprotein DZ-HRGP
  misc_feature (2)..(150): Homolog of NCBI NO: 20138131 NR Description: Vegetative cell wall protein gp1 precursor
  misc_feature (2)..(164): Homolog of NCBI NO: 20138131 NR Description: Vegetative cell wall protein gp1 precursor
  misc_feature (2)..(161): Homolog of NCBI NO: 20138131 NR Description: Vegetative cell wall protein gp1 precursor
  misc_feature (2)..(196): Homolog of NCBI NO: 15230108 NR Description: protein kinase, putative; protein id: At3g24400.1
  misc_feature (2)..(196): Homolog of NCBI NO: 6523547 NR Description: hydroxyproline-rich glycoprotein DZ-HRGP
  misc_feature (2)..(157): Homolog of NCBI NO: 6523547 NR Description: hydroxyproline-rich glycoprotein DZ-HRGP
  misc_feature (2)..(150): Homolog of NCBI NO: 30387315 NR Description: unknown [Choristoneura fumiferana MNPV]
  misc_feature (2)..(196): Homolog of NCBI NO: 18138528 NR Description: hypothetical protein [Grapevine fleck virus]
FPAEPFPIPPSLPTTAAAHHAQKPRSKTPKPTDPPWRTATKPSSLPPPPPPLRSRRLRPTEALRARRSPSPTLSTPPSPTPPSPRTPRSRTSAPPSSTSRSSSPMPARRTRPSPRRPTASKGSSLRPGTTSPPPSTPPPPPKKRWPLSAPRSSASRPSSTARRLTVRRTSANVRSSRPRWRPFVRRSSSSRRRSTP

SEQ ID NO: 63567 - DNA, 1113 bp, Triticum aestivum
  misc_feature (1)..(1113): Ceres Seq. ID no. 13597090
aaaatccgccgcgccgcatccaaccccttccttccttccgttcctccgccgctccggtggcgcgatggccgcgcgggccctcctcctccgggcaaccgcccgctgctgctcccctctccactcccccaccgccgccccgcgcctccacccgcggctccgcagccacgccgccgccgccgctccccagctccgcttccccgcgctttccttctccgcctccgccgtgtccaccagctcgcacggccccagcggcggtgacgccggcgagggggaggatgacaagggagcgtacgagaactacctggggatgagcgacgacgagctcatggcgcagtgcgacatgggcaccttcaagtcctccgggcccggcggccagcaccgcaacaagcgcgagtccgccgtgcgcctccgccaccaccccaccggcatcgtcgcccaggctgtggaggataggtcacaacataagaatcgatcgtctgctttatctcggcttcggaccctgattgctcttaaagttaggaggccgataaaccttgataactacactcctccagttgaacttcttcagatattgccactgaagtctaccattcgatcaaaggatgttggcagccaaattgggccaaataacccaaaattttctccaggaatgcaagctttattagatcttctatttgctgttgaaggttctgtatcagaggcagcgaaaattctaggcctaagcactggtgccctgtcaaggttaattctatcagatgattctctccgagcggctgcaaatgaactgcgagcctccaagggactgaagccattaagatgatgcccctttacaatgttatcatcttctgctgcgccacaggtgccaaggtgtctcattgctcatgatttcatggcatgccattggagcttatgcccaattccttagcgcaagaaatgcaaaacgtacacagggtctgtcttatacagggccatcatcatgcctgcttgtttgtctcacaccattgtaaccttgttgttgtacagtgcaattgtactttcacatgtcgccatcgcttgatgatgccttcaacaaattggatctacttttaagccatatagtgtctttttattacc

SEQ ID NO: 63568 - protein, 272 aa, Triticum aestivum
  peptide (1)..(272): Ceres Seq. ID no. 13597091
  misc_feature (105)..(171): Homolog of NCBI NO: 28210088 NR Description: bacterial peptide chain release factor 2
  misc_feature (117)..(174): Homolog of NCBI NO: 15644800 NR Description: peptide chain release factor RF-2 (prfB)
  misc_feature (110)..(166): Homolog of NCBI NO: 22976027 NR Description: hypothetical protein [Ralstonia metallidurans]
  misc_feature (110)..(174): Homolog of NCBI NO: 23010857 NR Description: hypothetical protein [Magnetospirillum
  misc_feature (106)..(175): Homolog of NCBI NO: 37523609 NR Description: hypothetical protein glr4040 [Gloeobacter
  misc_feature (117)..(173): Homolog of NCBI NO: 39996074 NR Description: peptidyl-tRNA hydrolase domain protein
  misc_feature (117)..(174): Homolog of NCBI NO: 23053284 NR Description: hypothetical protein [Geobacter metallireducens]
  misc_feature (169)..(272): Homolog of NCBI NO: 34907468 NR Description: P0434C04.16 [Oryza sativa (japonica
  misc_feature (27)..(272): Homolog of NCBI NO: 25511682 NR Description: probable peptide chain release factor F10C21.2 -
  misc_feature (27)..(272): Homolog of NCBI NO: 30692851 NR Description: peptide chain release factor, putative
KSAAPHPTPSFLPFLRRSGGAMAARALLLRATARCCSPLHSPTAAPRLHPRLRSHAAAAAPQLRFPALSFSASAVSTSSHGPSGGDAGEGEDDKGAYENYLGMSDDELMAQCDMGTFKSSGPGGQHRNKRESAVRLRHHPTGIVAQAVEDRSQHKNRSSALSRLRTLIALKVRRPINLDNYTPPVELLQILPLKSTIRSKDVGSQIGPNNPKFSPGMQALLDLLFAVEGSVSEAAKILGLSTGALSRLILSDDSLRAAANELRASKGLKPLR

SEQ ID NO: 63569 - protein, 251 aa, Triticum aestivum
  peptide (1)..(251): Ceres Seq. ID no. 13597092
  misc_feature (84)..(150): Homolog of NCBI NO: 28210088 NR Description: bacterial peptide chain release factor 2
  misc_feature (96)..(153): Homolog of NCBI NO: 15644800 NR Description: peptide chain release factor RF-2 (prfB)
  misc_feature (89)..(145): Homolog of NCBI NO: 22976027 NR Description: hypothetical protein [Ralstonia metallidurans]
  misc_feature (89)..(153): Homolog of NCBI NO: 23010857 NR Description: hypothetical protein [Magnetospirillum
  misc_feature (85)..(154): Homolog of NCBI NO: 37523609 NR Description: hypothetical protein glr4040 [Gloeobacter
  misc_feature (96)..(152): Homolog of NCBI NO: 39996074 NR Description: peptidyl-tRNA hydrolase domain protein
  misc_feature (96)..(153): Homolog of NCBI NO: 23053284 NR Description: hypothetical protein [Geobacter metallireducens]
  misc_feature (148)..(251): Homolog of NCBI NO: 34907468 NR Description: P0434C04.16 [Oryza sativa (japonica
  misc_feature (6)..(251): Homolog of NCBI NO: 25511682 NR Description: probable peptide chain release factor F10C21.2 -
  misc_feature (6)..(251): Homolog of NCBI NO: 30692851 NR Description: peptide chain release factor, putative
MAARALLLRATARCCSPLHSPTAAPRLHPRLRSHAAAAAPQLRFPALSFSASAVSTSSHGPSGGDAGEGEDDKGAYENYLGMSDDELMAQCDMGTFKSSGPGGQHRNKRESAVRLRHHPTGIVAQAVEDRSQHKNRSSALSRLRTLIALKVRRPINLDNYTPPVELLQILPLKSTIRSKDVGSQIGPNNPKFSPGMQALLDLLFAVEGSVSEAAKILGLSTGALSRLILSDDSLRAAANELRASKGLKPLR

SEQ ID NO: 63570 - protein, 170 aa, Triticum aestivum
  peptide (1)..(170): Ceres Seq. ID no. 13597093
  misc_feature (3)..(69): Homolog of NCBI NO: 28210088 NR Description: bacterial peptide chain release factor 2
  misc_feature (15)..(72): Homolog of NCBI NO: 15644800 NR Description: peptide chain release factor RF-2 (prfB)
  misc_feature (8)..(64): Homolog of NCBI NO: 22976027 NR Description: hypothetical protein [Ralstonia metallidurans]
  misc_feature (8)..(72): Homolog of NCBI NO: 23010857 NR Description: hypothetical protein [Magnetospirillum
  misc_feature (4)..(73): Homolog of NCBI NO: 37523609 NR Description: hypothetical protein glr4040 [Gloeobacter
  misc_feature (15)..(71): Homolog of NCBI NO: 39996074 NR Description: peptidyl-tRNA hydrolase domain protein
  misc_feature (15)..(72): Homolog of NCBI NO: 23053284 NR Description: hypothetical protein [Geobacter metallireducens]
  misc_feature (67)..(170): Homolog of NCBI NO: 34907468 NR Description: P0434C04.16 [Oryza sativa (japonica
  misc_feature (1)..(170): Homolog of NCBI NO: 25511682 NR Description: probable peptide chain release factor F10C21.2 -
  misc_feature (1)..(170): Homolog of NCBI NO: 30692851 NR Description: peptide chain release factor, putative
MSDDELMAQCDMGTFKSSGPGGQHRNKRESAVRLRHHPTGIVAQAVEDRSQHKNRSSALSRLRTLIALKVRRPINLDNYTPPVELLQILPLKSTIRSKDVGSQIGPNNPKFSPGMQALLDLLFAVEGSVSEAAKILGLSTGALSRLILSDDSLRAAANELRASKGLKPLR

SEQ ID NO: 63571 - DNA, 1330 bp, Triticum aestivum
  misc_feature (1)..(1330): Ceres Seq. ID no. 13597076
attacctagaacatcctaatcgaaaagttttccctgcaaaactctcgccgctgcgagttcccaaaaagcgaagcgaccaccacacctctcgccggagatgccgccggggacccctctgccgtcgacgggggcgtggacctgggagaacgccgtcgccggagcgaccgccggcttcgccaccgtcgccaccttccacccgctcgacgtcgtccgcacccgcttccaagtgagcggcgggagagggttgtccgacttgccgccgtacaggaacacgggacacgctgtatacaccatcgcacgatctgagggcctgaggggactttatgccggcttttatcctgcagttctggggtcaaccgtttcttgggggctatatttctttttttataacagagctaaacaaagatacttgcaggagaaggatgttcagctccgtccattcgaccatcttgcctcagctgcagaagcaggtgctttggtttgcctgtttacaaatcccatatggctggtgaaaacacggatgcaactacaaacacctgggcatacttcatcttattctggattttctgatgctttgagaactattcggaaagaggagggatggcgagcactttatagagggatcgggcctggacttttgctggtcacccatggcgcgatacaattcactgcctatgaggaacttcgcaaggctatgatatctgcgaaaagtaaacaaacaaggggagatgacaaaggcagcgaggatttattgaactccgttgattatgcggcacttggcgctggttcaaaattatctgctattctgcttacttatccttatcaggttatccgagcccgcttacagcaacgacctggtagtgatggtatcccaaagtactcagatagttggcatgtagtgaaggaagctgcaaggtacgaaggtgtccgtgggttttacaggggcatcacttccaacctattgaagaaccttccagcagcttccgtgacgtttgtggtgtatgaaaacgttatcaaactattcagagcagccaaggagaagacgtaattccaacttgcaactggagccaggagaaacataggaggaactaggaaagacactaatgttccgcgcaaatacagaatctgttcattcaccacactatccgagctcaacgtgatgttccatcacatttcccagttcagctcttattgacttaacagaaacggaatttagtttggcgaacttgttttttgtagagaaaattcattttctaagaaacagctcattggttcatgttgtccagttgaatgcttgttgaagatagagctctggttctatgtgtggttc

SEQ ID NO: 63572 - protein, 316 aa, Triticum aestivum
  peptide (1)..(316): Ceres Seq. ID no. 13597077
  misc_feature (15)..(315): Homolog of NCBI NO: 21314739 NR Description: mitochondrial folate transporter/carrier [Homo
  misc_feature (15)..(315): Homolog of NCBI NO: 14042724 NR Description: unnamed protein product [Homo sapiens]
  misc_feature (15)..(315): Homolog of NCBI NO: 34866087 NR Description: similar to mitochondrial folate
  misc_feature (15)..(315): Homolog of NCBI NO: 34222668 NR Description: Mitochondrial folate transporter/carrier
  misc_feature (15)..(315): Homolog of NCBI NO: 27369517 NR Description: mitochondrial folate transporter/carrier [Mus
  misc_feature (264)..(315): Homolog of NCBI NO: 24652037 NR Description: CG8026-PA [Drosophila melanogaster]
  misc_feature (15)..(293): Homolog of NCBI NO: 24652037 NR Description: CG8026-PA [Drosophila melanogaster]
  misc_feature (12)..(310): Homolog of NCBI NO: 10177519 NR Description: contains similarity to peroxisomal membrane
  misc_feature (12)..(310): Homolog of NCBI NO: 18425065 NR Description: mitochondrial carrier protein family [Arabidopsis
  misc_feature (12)..(310): Homolog of NCBI NO: 21537040 NR Description: contains similarity to peroxisomal membrane
MPPGTPLPSTGAWTWENAVAGATAGFATVATFHPLDVVRTRFQVSGGRGLSDLPPYRNTGHAVYTIARSEGLRGLYAGFYPAVLGSTVSWGLYFFFYNRAKQRYLQEKDVQLRPFDHLASAAEAGALVCLFTNPIWLVKTRMQLQTPGHTSSYSGFSDALRTIRKEEGWRALYRGIGPGLLLVTHGAIQFTAYEELRKAMISAKSKQTRGDDKGSEDLLNSVDYAALGAGSKLSAILLTYPYQVIRARLQQRPGSDGIPKYSDSWHVVKEAARYEGVRGFYRGITSNLLKNLPAASVTFVVYENVIKLFRAAKEKT

SEQ ID NO: 63573 - protein, 175 aa, Triticum aestivum
  peptide (1)..(175): Ceres Seq. ID no. 13597078
  misc_feature (1)..(174): Homolog of NCBI NO: 21314739 NR Description: mitochondrial folate transporter/carrier [Homo
  misc_feature (1)..(174): Homolog of NCBI NO: 14042724 NR Description: unnamed protein product [Homo sapiens]
  misc_feature (1)..(174): Homolog of NCBI NO: 34866087 NR Description: similar to mitochondrial folate
  misc_feature (1)..(174): Homolog of NCBI NO: 34222668 NR Description: Mitochondrial folate transporter/carrier
  misc_feature (1)..(174): Homolog of NCBI NO: 27369517 NR Description: mitochondrial folate transporter/carrier [Mus
  misc_feature (123)..(174): Homolog of NCBI NO: 24652037 NR Description: CG8026-PA [Drosophila melanogaster]
  misc_feature (1)..(152): Homolog of NCBI NO: 24652037 NR Description: CG8026-PA [Drosophila melanogaster]
  misc_feature (1)..(169): Homolog of NCBI NO: 10177519 NR Description: contains similarity to peroxisomal membrane
  misc_feature (1)..(169): Homolog of NCBI NO: 18425065 NR Description: mitochondrial carrier protein family [Arabidopsis
  misc_feature (1)..(169): Homolog of NCBI NO: 21537040 NR Description: contains similarity to peroxisomal membrane
MQLQTPGHTSSYSGFSDALRTIRKEEGWRALYRGIGPGLLLVTHGAIQFTAYEELRKAMISAKSKQTRGDDKGSEDLLNSVDYAALGAGSKLSAILLTYPYQVIRARLQQRPGSDGIPKYSDSWHVVKEAARYEGVRGFYRGITSNLLKNLPAASVTFVVYENVIKLFRAAKEKT

SEQ ID NO: 63574 - DNA, 1339 bp, Triticum aestivum
  misc_feature (1)..(1339): Ceres Seq. ID no. 12624791
ccacagagtcccatctccattccattcctcagcagactccagcgaccgagatcggatcagagagagcgatggcggcggtgatggagtcgtcgtcggtgcccggcgtggacggcggcgagggtgcggaggggagggtgcggaagccctacaccatcaccaagtcgcgggagagctggaccgacccggagcacgacaagttcatcgaggcgctcctcctgttcgatcgcgattggagaaagatcgaagcatttgttggctccaagacagtgatacagttctgttggcagatcaggagccatgcacagaagtactttctgaaggttcagaagaatgggacaggtgagcatctgcccccacctaggccgaagaggaaggcggcacacccgtacccacataataaagcctcaaaaaaggcccctgaagtcgacttgccacagcagcctcctcatgtcgtggagcaagggcgtgttatacctatggatgcacctactgtcgctacaaactcaagtgcaaacgaggacacatttccttcctgggacgatgttcttacccaaccttatagcccaagacatacacaagacttaggcgctgcaaataatagctctagtagcatagagtgccaatctggaacttggccagcttctgatgcgattgggcaagaaatttggccaacttccgatgcgattgagcaagagattgtacttccagcattgcatgccatgccagactttgctcaagtatacaactttcttgggggcgtatttgatccagatacaacaggacatttgcagaagttgagagagatggatcctatagatgctgaaacggtactacaactgatgaaaaatctatcggtaaacctgtctagcccggactttgagacacacctgagcatacagcacccctgactgttgcagaggaggatgctctcgtcgcacggtggcggcatgggccaagccaggcacgagagcgtaggagatccggggtctctactcagacccttcgcgttccattcatgtaatctctagtcaccctcttcgtgatccacgctcacgacatcgctaatttcactaagcgcatggaccgctctgcagggtaaggagcagatgaggaaagcgtacggtacatcgttacattgttgtcaaagttgcgacatgttaatgcatcgccgcctatttttgtacatatttcttggagatgttctcgggctcttaggcctgggaacttttacctatccggcttgtggcatgtatagtcaggacatggttgcgcatgttgttttggagaggggagaggggaaagtgtttattacccatgaaggaagaccgttcttgtgtgc

SEQ ID NO: 63575 - protein, 301 aa, Triticum aestivum
  peptide (1)..(301): Ceres Seq. ID no. 12624792
  misc_feature (55)..(104): Pfam Name: Myb-like DNA-binding domain Pfam Description: Myb-like DNA-binding domain
  misc_feature (241)..(293): Homolog of NCBI NO: 15223419 NR Description: myb family transcription factor; protein id:
  misc_feature (44)..(136): Homolog of NCBI NO: 15223419 NR Description: myb family transcription factor; protein id:
  misc_feature (35)..(292): Homolog of NCBI NO: 15234118 NR Description: myb family transcription factor; protein id:
  misc_feature (30)..(293): Homolog of NCBI NO: 11357907 NR Description: hypothetical protein F9G14.150 - Arabidopsis
  misc_feature (30)..(293): Homolog of NCBI NO: 14596213 NR Description: putative protein [Arabidopsis thaliana]
  misc_feature (30)..(293): Homolog of NCBI NO: 18414039 NR Description: myb family transcription factor
  misc_feature (39)..(294): Homolog of NCBI NO: 30680926 NR Description: myb family transcription factor [Arabidopsis
  misc_feature (39)..(301): Homolog of NCBI NO: 30696221 NR Description: myb family transcription factor [Arabidopsis
  misc_feature (39)..(301): Homolog of NCBI NO: 30696225 NR Description: myb family transcription factor [Arabidopsis
  misc_feature (39)..(298): Homolog of NCBI NO: 8953721 NR Description: contains similarity to MYB-related DNA-binding
TESHLHSIPQQTPATEIGSERAMAAVMESSSVPGVDGGEGAEGRVRKPYTITKSRESWTDPEHDKFIEALLLFDRDWRKIEAFVGSKTVIQFCWQIRSHAQKYFLKVQKNGTGEHLPPPRPKRKAAHPYPHNKASKKAPEVDLPQQPPHVVEQGRVIPMDAPTVATNSSANEDTFPSWDDVLTQPYSPRHTQDLGAANNSSSSIECQSGTWPASDAIGQEIWPTSDAIEQEIVLPALHAMPDFAQVYNFLGGVFDPDTTGHLQKLREMDPIDAETVLQLMKNLSVNLSSPDFETHLSIQHP

SEQ ID NO: 63576 - protein, 279 aa, Triticum aestivum
  peptide (1)..(279): Ceres Seq. ID no. 12624793
  misc_feature (33)..(82): Pfam Name: Myb-like DNA-binding domain Pfam Description: Myb-like DNA-binding domain
  misc_feature (219)..(271): Homolog of NCBI NO: 15223419 NR Description: myb family transcription factor; protein id:
  misc_feature (22)..(114): Homolog of NCBI NO: 15223419 NR Description: myb family transcription factor; protein id:
  misc_feature (13)..(270): Homolog of NCBI NO: 15234118 NR Description: myb family transcription factor; protein id:
  misc_feature (8)..(271): Homolog of NCBI NO: 11357907 NR Description: hypothetical protein F9G14.150 - Arabidopsis
  misc_feature (8)..(271): Homolog of NCBI NO: 14596213 NR Description: putative protein [Arabidopsis thaliana]
  misc_feature (8)..(271): Homolog of NCBI NO: 18414039 NR Description: myb family transcription factor
  misc_feature (17)..(272): Homolog of NCBI NO: 30680926 NR Description: myb family transcription factor [Arabidopsis
  misc_feature (17)..(279): Homolog of NCBI NO: 30696221 NR Description: myb family transcription factor [Arabidopsis
  misc_feature (17)..(279): Homolog of NCBI NO: 30696225 NR Description: myb family transcription factor [Arabidopsis
  misc_feature (17)..(276): Homolog of NCBI NO: 8953721 NR Description: contains similarity to MYB-related DNA-binding
MAAVMESSSVPGVDGGEGAEGRVRKPYTITKSRESWTDPEHDKFIEALLLFDRDWRKIEAFVGSKTVIQFCWQIRSHAQKYFLKVQKNGTGEHLPPPRPKRKAAHPYPHNKASKKAPEVDLPQQPPHVVEQGRVIPMDAPTVATNSSANEDTFPSWDDVLTQPYSPRHTQDLGAANNSSSSIECQSGTWPASDAIGQEIWPTSDAIEQEIVLPALHAMPDFAQVYNFLGGVFDPDTTGHLQKLREMDPIDAETVLQLMKNLSVNLSSPDFETHLSIQHP

SEQ ID NO: 63577 - protein, 275 aa, Triticum aestivum
  peptide (1)..(275): Ceres Seq. ID no. 12624794
  misc_feature (29)..(78): Pfam Name: Myb-like DNA-binding domain Pfam Description: Myb-like DNA-binding domain
  misc_feature (215)..(267): Homolog of NCBI NO: 15223419 NR Description: myb family transcription factor; protein id:
  misc_feature (18)..(110): Homolog of NCBI NO: 15223419 NR Description: myb family transcription factor; protein id:
  misc_feature (9)..(266): Homolog of NCBI NO: 15234118 NR Description: myb family transcription factor; protein id:
  misc_feature (4)..(267): Homolog of NCBI NO: 11357907 NR Description: hypothetical protein F9G14.150 - Arabidopsis
  misc_feature (4)..(267): Homolog of NCBI NO: 14596213 NR Description: putative protein [Arabidopsis thaliana]
  misc_feature (4)..(267): Homolog of NCBI NO: 18414039 NR Description: myb family transcription factor
  misc_feature (13)..(268): Homolog of NCBI NO: 30680926 NR Description: myb family transcription factor [Arabidopsis
  misc_feature (13)..(275): Homolog of NCBI NO: 30696221 NR Description: myb family transcription factor [Arabidopsis
  misc_feature (13)..(275): Homolog of NCBI NO: 30696225 NR Description: myb family transcription factor [Arabidopsis
  misc_feature (13)..(272): Homolog of NCBI NO: 8953721 NR Description: contains similarity to MYB-related DNA-binding
MESSSVPGVDGGEGAEGRVRKPYTITKSRESWTDPEHDKFIEALLLFDRDWRKIEAFVGSKTVIQFCWQIRSHAQKYFLKVQKNGTGEHLPPPRPKRKAAHPYPHNKASKKAPEVDLPQQPPHVVEQGRVIPMDAPTVATNSSANEDTFPSWDDVLTQPYSPRHTQDLGAANNSSSSIECQSGTWPASDAIGQEIWPTSDAIEQEIVLPALHAMPDFAQVYNFLGGVFDPDTTGHLQKLREMDPIDAETVLQLMKNLSVNLSSPDFETHLSIQHP

SEQ ID NO: 63578 - DNA, 999 bp, Triticum aestivum
  misc_feature (1)..(999): Ceres Seq. ID no. 15173967
aggacatcaagcacctgagctccacatcgatcagtacccacagccactccactctcagctcagggactcggtgtcagggcgacccaagacagaagaatcatgggatccgtgacggcgtcgacgatggcacagcccaccctccgcgtggccgccttctgcggctccctccgcaaggactcatggcaccgcggcctcatccgcgccgccgaggagctgtgcgaggagtccatcccggggctgcgcatcgaccacgtggacatctccggcctgcccatggtcaacccggacctggagaccgacggcggcgagggcttcccgccggccgtcgaggcgctccgcgagagggtccgcgccgccgactgcttcctcttcgcctcgcccgagtacaactactcggtcaccgcctccctgaagaacgcgctggactgggcgtccaggggcaagcgcaactgctgggcggacagggcggcggcgatcgtgtgcgcggggggcgacttcggcggggccagggcgtcgctccacctccgccagatcggggtgttcctcgacctccacttcatcaacaagccggagctccacatcagggcgttcgcggacccgcccaagttcgacgaggagggcaacctcatcgacgccgtgaccagggagcggctcaagaaggttctcctctcgctccaggccttcgcgctcaggctcaaacacaaggacgagtgactgactcaagatcaacgatactacttggcagttggcaccgtataccgtacctgctggttaatttgcattgcattttccttcagctccgtgcactagtattcgtggttccgtgaaatcccctaggaagtgtgtgctactttgtctaataaatcgccgaagaattgttctgtactgtttaacgtgtggaagcttatgtgttttaccgttgctactagaacgcgagcgcgcaccacgcccgtctatgttgagaaaacaaaagaaaattattgaagaaattgatatgtc

SEQ ID NO: 63579 - protein, 274 aa, Triticum aestivum
  peptide (1)..(274): Ceres Seq. ID no. 15173968
DIKHLSSTSISTHSHSTLSSGTRCQGDPRQKNHGIRDGVDDGTAHPPRGRLLRLPPQGLMAPRPHPRRRGAVRGVHPGAAHRPRGHLRPAHGQPGPGDRRRRGLPAGRRGAPREGPRRRLLPLRLARVQLLGHRLPEERAGLGVQGQAQLLGGQGGGDRVRGGRLRRGQGVAPPPPDRGVPRPPLHQQAGAPHQGVRGPAQVRRGGQPHRRRDQGAAQEGSPLAPGLRAQAQTQGRVTDSRSTILLGSWHRIPYLLVNLHCIFLQLRALVFVVP

SEQ ID NO: 63580 - protein, 215 aa, Triticum aestivum
  peptide (1)..(215): Ceres Seq. ID no. 15173969
MAPRPHPRRRGAVRGVHPGAAHRPRGHLRPAHGQPGPGDRRRRGLPAGRRGAPREGPRRRLLPLRLARVQLLGHRLPEERAGLGVQGQAQLLGGQGGGDRVRGGRLRRGQGVAPPPPDRGVPRPPLHQQAGAPHQGVRGPAQVRRGGQPHRRRDQGAAQEGSPLAPGLRAQAQTQGRVTDSRSTILLGSWHRIPYLLVNLHCIFLQLRALVFVVP

SEQ ID NO: 63581 - protein, 204 aa, Triticum aestivum
  peptide (1)..(204): Ceres Seq. ID no. 15173970
  misc_feature (14)..(187): Pfam Name: NADPH-dependent FMN reductase Pfam Description: NADPH-dependent FMN reductase
  misc_feature (14)..(145): Homolog of NCBI NO: 24378693 NR Description: conserved hypothetical protein [Streptococcus
  misc_feature (1)..(195): Homolog of NCBI NO: 22959009 NR Description: hypothetical protein [Rhodobacter sphaeroides]
  misc_feature (13)..(201): Homolog of NCBI NO: 23135834 NR Description: hypothetical protein [Cytophaga hutchinsonii]
  misc_feature (14)..(200): Homolog of NCBI NO: 32041222 NR Description: hypothetical protein [Pseudomonas aeruginosa
  misc_feature (14)..(200): Homolog of NCBI NO: 15596401 NR Description: conserved hypothetical protein [Pseudomonas
  misc_feature (6)..(202): Homolog of NCBI NO: 5002232 NR Description: NADPH:quinone oxidoreductase [Arabidopsis
  misc_feature (6)..(202): Homolog of NCBI NO: 15232856 NR Description: NADPH:quinone oxidoreductase (NQR) [Arabidopsis
  misc_feature (10)..(204): Homolog of NCBI NO: 24745889 NR Description: NAD(P)H:quinone oxidoreductase [Solanum tuberosum]
  misc_feature (14)..(202): Homolog of NCBI NO: 34906652 NR Description: putative NADPH:quinone oxidoreductase
  misc_feature (10)..(203): Homolog of NCBI NO: 34906648 NR Description: putative NADPH:quinone oxidoreductase
MGSVTASTMAQPTLRVAAFCGSLRKDSWHRGLIRAAEELCEESIPGLRIDHVDISGLPMVNPDLETDGGEGFPPAVEALRERVRAADCFLFASPEYNYSVTASLKNALDWASRGKRNCWADRAAAIVCAGGDFGGARASLHLRQIGVFLDLHFINKPELHIRAFADPPKFDEEGNLIDAVTRERLKKVLLSLQAFALRLKHKDE

SEQ ID NO: 63582 - DNA, 616 bp, Triticum aestivum
  misc_feature (1)..(616): Ceres Seq. ID no. 12616383
acagcatctgcacactccgcctcccgcctcttgcagcctaaccccacctctcgagtctcgacaccctcgaatcagcgtccatggcacccaaggcggagaagaagccggtggccacggagaaggctccagcggggaagaagcccaaggcagagaagcggccgccggcgtccaaggagggcggcgagaagaagggcaagaagaagtccaagaagagcgtggagacgtacaagatctacatcttcaaggtgctcaagcaggtgcacccggacatcggcatctcctccaaggccatgtccatcatgaactccttcatcaacgacatcttcgagaagctcgccggcgagcttctcgaagatgtcgttgatgaagaagagagaggagatgtccagtgtcctcaggaagatgagatctgctggaactggaaccgagaagaagaaatagagcatcccaggctcatgaagttgatggaaaatcttctgttctggtgtccggtttttactgcatgtagaacctgctagacttgaaactgttatccgccagctaaacattatgctatgttgaacctcctgtcttgtgagatttttgagctaacttgcaatgcatcgtttgccacccc

SEQ ID NO: 63583 - protein, 145 aa, Triticum aestivum
  peptide (1)..(145): Ceres Seq. ID no. 12616384
  misc_feature (13)..(88): Pfam Name: Core histone H2A/H2B/H3/H4 Pfam Description: Core histone H2A/H2B/H3/H4
  misc_feature (1)..(88): Homolog of NCBI NO: 1362183 NR Description: histone H2B-6 - wheat
  misc_feature (1)..(88): Homolog of NCBI NO: 13898838 NR Description: histone H2B-5 [Lolium perenne]
  misc_feature (1)..(88): Homolog of NCBI NO: 1346251 NR Description: Histone H2B.4
  misc_feature (1)..(88): Homolog of NCBI NO: 3913804 NR Description: Histone H2B.3
  misc_feature (1)..(88): Homolog of NCBI NO: 34908130 NR Description: putative histone H2B [Oryza sativa (japonica
  misc_feature (1)..(88): Homolog of NCBI NO: 399854 NR Description: Histone H2B.2
  misc_feature (1)..(88): Homolog of NCBI NO: 399853 NR Description: Histone H2B.1
  misc_feature (1)..(88): Homolog of NCBI NO: 122022 NR Description: Histone H2B
  misc_feature (1)..(88): Homolog of NCBI NO: 1362186 NR Description: histone H2B153 - wheat
  misc_feature (1)..(88): Homolog of NCBI NO: 1362184 NR Description: histone H2B-8 - wheat
MAPKAEKKPVATEKAPAGKKPKAEKRPPASKEGGEKKGKKKSKKSVETYKIYIFKVLKQVHPDIGISSKAMSIMNSFINDIFEKLAGELLEDVVDEEERGDVQCPQEDEICWNWNREEEIEHPRLMKLMENLLFWCPVFTACRTC

SEQ ID NO: 63584 - protein, 120 aa, Triticum aestivum
  peptide (1)..(120): Ceres Seq. ID no. 12616385
  misc_feature (40)..(114): Homolog of NCBI NO: 17505204 NR Description: histone 1, H2bc; H2B histone family, member S
QHLHTPPPASCSLTPPLESRHPRISVHGTQGGEEAGGHGEGSSGEEAQGREAAAGVQGGRREEGQEEVQEERGDVQDLHLQGAQAGAPGHRHLLQGHVHHELLHQRHLREARRRASRRCR

SEQ ID NO: 63585 - protein, 100 aa, Triticum aestivum
  peptide (1)..(100): Ceres Seq. ID no. 12616386
  misc_feature (32)..(75): Pfam Name: Protamine P1 Pfam Description: Protamine P1
  misc_feature (3)..(100): Homolog of NCBI NO: 31203637 NR Description: ENSANGP00000015599 [Anopheles gambiae]
  misc_feature (28)..(100): Homolog of NCBI NO: 29250446 NR Description: GLP_39_87477_88058 [Giardia lamblia ATCC 50803]
TASAHSASRLLQPNPTSRVSTPSNQRPWHPRRRRSRWPRRRLQRGRSPRQRSGRRRPRRAARRRARRSPRRAWRRTRSTSSRCSSRCTRTSASPPRPCPS

SEQ ID NO: 63586 - DNA, 558 bp, Triticum aestivum
  misc_feature (1)..(558): Ceres Seq. ID no. 15173480
aaaaaaaaaagcacaagcagaagcaaccgagcgaacggcgacgacgacccgaagaagatggtgatgcccacggaccctatgctatggcacaaggtggccgccgtctccggggtcgttgcgcttggactgggcacctatggagcgcacatgttccgcccgcagaaccctagatacaaagagatttggcagaccgcgtccctgtaccatctcgtccacaccgcggcgctgctcggggctcccatgaccaagcgccccaacatcttcggaggccttctgacaactgggattgtgctcttctctggaacgtgctacactgtggcttaccttgaagacaggaagttctcttcaccagcaccgatcggtggctttgcattcattgctgcttgggccagcctgctcttctgattgtattgtgttttatcgggtgaaaactatgtctactttacacaaggctttgtatcagtcgctctattaggtcatgattgtactgctgtggcacacaactttctcatacctttacaaaataattagaataaaacagttcccttgatgtttcac

SEQ ID NO: 63587 - protein, 134 aa, Triticum aestivum
  peptide (1)..(134): Ceres Seq. ID no. 15173481
  misc_feature (29)..(125): Pfam Name: Protein of unknown function (DUF423) Pfam Description: Protein of unknown function (DUF423)
  misc_feature (38)..(134): Homolog of NCBI NO: 25411133 NR Description: hypothetical protein At2g04900 [imported] -
  misc_feature (33)..(112): Homolog of NCBI NO: 7963689 NR Description: unknown [Hordeum vulgare]
  misc_feature (27)..(115): Homolog of NCBI NO: 7963697 NR Description: unknown [Haynaldia villosa]
  misc_feature (25)..(134): Homolog of NCBI NO: 18395895 NR Description: expressed protein [Arabidopsis thaliana]
  misc_feature (25)..(134): Homolog of NCBI NO: 17065460 NR Description: Unknown protein [Arabidopsis thaliana]
  misc_feature (27)..(119): Homolog of NCBI NO: 7963694 NR Description: unknown [Psathyrostachys juncea]
  misc_feature (27)..(119): Homolog of NCBI NO: 7963699 NR Description: unknown [Leymus triticoides]
  misc_feature (25)..(134): Homolog of NCBI NO: 40538985 NR Description: expressed protein [Oryza sativa (japonica
  misc_feature (18)..(125): Homolog of NCBI NO: 7963659 NR Description: unknown [Leymus cinereus]
  misc_feature (18)..(125): Homolog of NCBI NO: 7963702 NR Description: unknown [Agropyron cristatum]
KKKSTSRSNRANGDDDPKKMVMPTDPMLWHKVAAVSGVVALGLGTYGAHMFRPQNPRYKEIWQTASLYHLVHTAALLGAPMTKRPNIFGGLLTTGIVLFSGTCYTVAYLEDRKFSSPAPIGGFAFIAAWASLLF

SEQ ID NO: 63588 - protein, 115 aa, Triticum aestivum
  peptide (1)..(115): Ceres Seq. ID no. 15173482
  misc_feature (10)..(106): Pfam Name: Protein of unknown function (DUF423) Pfam Description: Protein of unknown function (DUF423)
  misc_feature (19)..(115): Homolog of NCBI NO: 25411133 NR Description: hypothetical protein At2g04900 [imported] -
  misc_feature (14)..(93): Homolog of NCBI NO: 7963689 NR Description: unknown [Hordeum vulgare]
  misc_feature (8)..(96): Homolog of NCBI NO: 7963697 NR Description: unknown [Haynaldia villosa]
  misc_feature (6)..(115): Homolog of NCBI NO: 18395895 NR Description: expressed protein [Arabidopsis thaliana]
  misc_feature (6)..(115): Homolog of NCBI NO: 17065460 NR Description: Unknown protein [Arabidopsis thaliana]
  misc_feature (8)..(100): Homolog of NCBI NO: 7963694 NR Description: unknown [Psathyrostachys juncea]
  misc_feature (8)..(100): Homolog of NCBI NO: 7963699 NR Description: unknown [Leymus triticoides]
  misc_feature (6)..(115): Homolog of NCBI NO: 40538985 NR Description: expressed protein [Oryza sativa (japonica
  misc_feature (1)..(106): Homolog of NCBI NO: 7963659 NR Description: unknown [Leymus cinereus]
  misc_feature (1)..(106): Homolog of NCBI NO: 7963702 NR Description: unknown [Agropyron cristatum]
MVMPTDPMLWHKVAAVSGVVALGLGTYGAHMFRPQNPRYKEIWQTASLYHLVHTAALLGAPMTKRPNIFGGLLTTGIVLFSGTCYTVAYLEDRKFSSPAPIGGFAFIAAWASLLF

SEQ ID NO: 63589 - protein, 113 aa, Triticum aestivum
  peptide (1)..(113): Ceres Seq. ID no. 15173483
  misc_feature (8)..(104): Pfam Name: Protein of unknown function (DUF423) Pfam Description: Protein of unknown function (DUF423)
  misc_feature (17)..(113): Homolog of NCBI NO: 25411133 NR Description: hypothetical protein At2g04900 [imported] -
  misc_feature (12)..(91): Homolog of NCBI NO: 7963689 NR Description: unknown [Hordeum vulgare]
  misc_feature (6)..(94): Homolog of NCBI NO: 7963697 NR Description: unknown [Haynaldia villosa]
  misc_feature (4)..(113): Homolog of NCBI NO: 18395895 NR Description: expressed protein [Arabidopsis thaliana]
  misc_feature (4)..(113): Homolog of NCBI NO: 17065460 NR Description: Unknown protein [Arabidopsis thaliana]
  misc_feature (6)..(98): Homolog of NCBI NO: 7963694 NR Description: unknown [Psathyrostachys juncea]
  misc_feature (6)..(98): Homolog of NCBI NO: 7963699 NR Description: unknown [Leymus triticoides]
  misc_feature (4)..(113): Homolog of NCBI NO: 40538985 NR Description: expressed protein [Oryza sativa (japonica
  misc_feature (1)..(104): Homolog of NCBI NO: 7963659 NR Description: unknown [Leymus cinereus]
  misc_feature (1)..(104): Homolog of NCBI NO: 7963702 NR Description: unknown [Agropyron cristatum]
MPTDPMLWHKVAAVSGVVALGLGTYGAHMFRPQNPRYKEIWQTASLYHLVHTAALLGAPMTKRPNIFGGLLTTGIVLFSGTCYTVAYLEDRKFSSPAPIGGFAFIAAWASLLF

SEQ ID NO: 63590 - DNA, 766 bp, Triticum aestivum
  misc_feature (1)..(766): Ceres Seq. ID no. 15224278
agaccaaggaaaaaaaggagaatgaaatccgcgatgcttcccctgctcctcctgctcgccgtggccggccccgccgccgcgaagccgacggcctacgaggcgctcgcggccttcgacttccccccgggcatcatccccaagggggtcgtctcctacaccctcgacaacgccaccggcgacttcacggcgcacatcaactcctcctccacctgcgagttctccatccagggctcctactcgctccggtacaagcccgacatcagcggccgcatctccgtcgaccgcctcaccaacctccagggcgtcaccgtcaaggtcctcttcttctggctcaacatcgtcgaggtcacccgcagcggcgaccagctcggcttctccgtcggcatcgcctccgccgacttcggcctcgacaacttcctcgagagccccacctgcggctgcggcttcgactgcaacgacctcctgctgccgcagtccaccgccgagccgagcctgcgcctgcgaggtgcgttctaggatccccaccgagctctctcacaagtcacaacggccccttcaaaattcagctagttcgtggatggattattcatgctcttgttgctggaagataccaaggggctggtagtattttctagtgctgttcctgttttagatggaccaacaatttcaggactcgatttcgatgggtccgtgtatgagtggtgtactgtttcatcaggaagtttagagtaaaacacttgagatcaataaaagtttcatgttcctt

SEQ ID NO: 63591 - protein, 210 aa, Triticum aestivum
  peptide (1)..(210): Ceres Seq. ID no. 15224279
TKEKKENEIRDASPAPPARRGRPRRREADGLRGARGLRLPPGHHPQGGRLLHPRQRHRRLHGAHQLLLHLRVLHPGLLLAPVQARHQRPHLRRPPHQPPGRHRQGPLLLAQHRRGHPQRRPARLLRRHRLRRLRPRQLPREPHLRLRLRLQRPPAAAVHRRAEPAPARCVLGSPPSSLTSHNGPFKIQLVRGWIIHALVAGRYQGAGSIF

SEQ ID NO: 63592 - protein, 171 aa, Triticum aestivum
  peptide (1)..(171): Ceres Seq. ID no. 15224280
  misc_feature (29)..(151): Pfam Name: Protein of unknown function, DUF538 Pfam Description: Protein of unknown function, DUF538
  misc_feature (15)..(151): Homolog of NCBI NO: 21553750 NR Description: unknown [Arabidopsis thaliana]
  misc_feature (15)..(151): Homolog of NCBI NO: 18379012 NR Description: expressed protein [Arabidopsis thaliana]
  misc_feature (20)..(156): Homolog of NCBI NO: 15235335 NR Description: expressed protein [Arabidopsis thaliana]
  misc_feature (13)..(165): Homolog of NCBI NO: 18411923 NR Description: expressed protein [Arabidopsis thaliana]
  misc_feature (13)..(163): Homolog of NCBI NO: 21554037 NR Description: unknown [Arabidopsis thaliana]
  misc_feature (29)..(151): Homolog of NCBI NO: 18379014 NR Description: expressed protein [Arabidopsis thaliana]
RPRKKRRMKSAMLPLLLLLAVAGPAAAKPTAYEALAAFDFPPGIIPKGVVSYTLDNATGDFTAHINSSSTCEFSIQGSYSLRYKPDISGRISVDRLTNLQGVTVKVLFFWLNIVEVTRSGDQLGFSVGIASADFGLDNFLESPTCGCGFDCNDLLLPQSTAEPSLRLRGAF

SEQ ID NO: 63593 - protein, 164 aa, Triticum aestivum
  peptide (1)..(164): Ceres Seq. ID no. 15224281
  misc_feature (22)..(144): Pfam Name: Protein of unknown function, DUF538 Pfam Description: Protein of unknown function, DUF538
  misc_feature (8)..(144): Homolog of NCBI NO: 21553750 NR Description: unknown [Arabidopsis thaliana]
  misc_feature (8)..(144): Homolog of NCBI NO: 18379012 NR Description: expressed protein [Arabidopsis thaliana]
  misc_feature (13)..(149): Homolog of NCBI NO: 15235335 NR Description: expressed protein [Arabidopsis thaliana]
  misc_feature (6)..(158): Homolog of NCBI NO: 18411923 NR Description: expressed protein [Arabidopsis thaliana]
  misc_feature (6)..(156): Homolog of NCBI NO: 21554037 NR Description: unknown [Arabidopsis thaliana]
  misc_feature (22)..(144): Homolog of NCBI NO: 18379014 NR Description: expressed protein [Arabidopsis thaliana]
MKSAMLPLLLLLAVAGPAAAKPTAYEALAAFDFPPGIIPKGVVSYTLDNATGDFTAHINSSSTCEFSIQGSYSLRYKPDISGRISVDRLTNLQGVTVKVLFFWLNIVEVTRSGDQLGFSVGIASADFGLDNFLESPTCGCGFDCNDLLLPQSTAEPSLRLRGAF

SEQ ID NO: 63594 - DNA, 804 bp, Triticum aestivum
  misc_feature (1)..(804): Ceres Seq. ID no. 14302093
atatctatcacttcccggagttcttcgtttggccacgctgatcaattgagatcaagaccatggcaaactgtaagaagtggcttctgctcgttgtgggcctcacggccatgatttcctcgtcggaggcgtacgtcttctacgccggcggccgcgacggctgggtcgtcgaccccgccgagagctacaaccactgggccgagcgcaaccggtttcagatcaacgacaccatcgtgtttgcgcgcggcgagggcgagggcgcggactcggtgctgctggtgaccgagccggacttcgacgcgtgcaacacgcgtagccctgtccgccggctagaggacgccggtggtcgcccggagttccggttcgaccggtcgggtgccttcttcttcatcagcggcgacgaggaccggtgccagaagggcaagaagttgtacgtcgtcgtgatggcgcctcggtcccaggagtgggagctcgcaccggcgcccggatcgccgccgctctgggcctcggcaccagagcacgcggaggccccggacatgagccctggcaacgaaaccttgttcacatcgtttggggctgtgagcgaaactccggccggatctcctcatggatggaacccgaataggcgataaacctggactagagacttgagtgtttaggcaggccatggccgacacccccgttgggcttccgcttgaaggttgccgagtacatgtcgtgtaaacggcggtaagtggtgagagcgtgtgtgaagaagtacccccctgcagggttaacatcatttattcaaataaccgtgtccgcggg

SEQ ID NO: 63595 - protein, 189 aa, Triticum aestivum
  peptide (1)..(189): Ceres Seq. ID no. 14302094
  misc_feature (34)..(121): Pfam Name: Plastocyanin-like domain Pfam Description: Plastocyanin-like domain
  misc_feature (8)..(181): Homolog of NCBI NO: 30689408 NR Description: plastocyanin-like domain containing protein
  misc_feature (8)..(181): Homolog of NCBI NO: 7486634 NR Description: hypothetical protein F8B4.190 - Arabidopsis
  misc_feature (9)..(181): Homolog of NCBI NO: 7485901 NR Description: hypothetical protein F20O9.30 - Arabidopsis
  misc_feature (9)..(181): Homolog of NCBI NO: 18417181 NR Description: plastocyanin-like domain containing protein
  misc_feature (4)..(181): Homolog of NCBI NO: 28396618 NR Description: phytocyanin protein, PUP2 [Arabidopsis thaliana]
  misc_feature (1)..(182): Homolog of NCBI NO: 21592865 NR Description: unknown [Arabidopsis thaliana]
  misc_feature (1)..(182): Homolog of NCBI NO: 15234164 NR Description: expressed protein [Arabidopsis thaliana]
  misc_feature (4)..(181): Homolog of NCBI NO: 15238868 NR Description: hypothetical protein [Arabidopsis thaliana]
  misc_feature (12)..(186): Homolog of NCBI NO: 34903678 NR Description: B1015E06.24 [Oryza sativa (japonica
  misc_feature (7)..(185): Homolog of NCBI NO: 34909494 NR Description: P0481E12.17 [Oryza sativa (japonica
MANCKKWLLLVVGLTAMISSSEAYVFYAGGRDGWVVDPAESYNHWAERNRFQINDTIVFARGEGEGADSVLLVTEPDFDACNTRSPVRRLEDAGGRPEFRFDRSGAFFFISGDEDRCQKGKKLYVVVMAPRSQEWELAPAPGSPPLWASAPEHAEAPDMSPGNETLFTSFGAVSETPAGSPHGWNPNRR

SEQ ID NO: 63596 - protein, 173 aa, Triticum aestivum
  peptide (1)..(173): Ceres Seq. ID no. 14302095
  misc_feature (18)..(105): Pfam Name: Plastocyanin-like domain Pfam Description: Plastocyanin-like domain
  misc_feature (1)..(165): Homolog of NCBI NO: 30689408 NR Description: plastocyanin-like domain containing protein
  misc_feature (1)..(165): Homolog of NCBI NO: 7486634 NR Description: hypothetical protein F8B4.190 - Arabidopsis
  misc_feature (1)..(165): Homolog of NCBI NO: 7485901 NR Description: hypothetical protein F20O9.30 - Arabidopsis
  misc_feature (1)..(165): Homolog of NCBI NO: 18417181 NR Description: plastocyanin-like domain containing protein
  misc_feature (1)..(165): Homolog of NCBI NO: 28396618 NR Description: phytocyanin protein, PUP2 [Arabidopsis thaliana]
  misc_feature (1)..(166): Homolog of NCBI NO: 21592865 NR Description: unknown [Arabidopsis thaliana]
  misc_feature (1)..(166): Homolog of NCBI NO: 15234164 NR Description: expressed protein [Arabidopsis thaliana]
  misc_feature (1)..(165): Homolog of NCBI NO: 15238868 NR Description: hypothetical protein [Arabidopsis thaliana]
  misc_feature (1)..(170): Homolog of NCBI NO: 34903678 NR Description: B1015E06.24 [Oryza sativa (japonica
  misc_feature (1)..(169): Homolog of NCBI NO: 34909494 NR Description: P0481E12.17 [Oryza sativa (japonica
MISSSEAYVFYAGGRDGWVVDPAESYNHWAERNRFQINDTIVFARGEGEGADSVLLVTEPDFDACNTRSPVRRLEDAGGRPEFRFDRSGAFFFISGDEDRCQKGKKLYVVVMAPRSQEWELAPAPGSPPLWASAPEHAEAPDMSPGNETLFTSFGAVSETPAGSPHGWNPNRR

SEQ ID NO: 63597 - DNA, 810 bp, Triticum aestivum
  misc_feature (1)..(810): Ceres Seq. ID no. 15173457
ccctttccttcccatctatcctccgatctccatcaaccggagccgccgtgcttcctccttccgcctgcacacgcttcgaccccggcggccgctcgcggcgcgtcgccaccttcctcacccttcgttccgctgctcaggatcccgctccccagtccagcacagggaggggggcaatggaaggaccgtctgacggccaactgatcccctccaccgcaggagaccctcacctcaacagctcggccgcgcccatggacgccaccagcagcggctcgcagcacgtcgcgacgctgcggaagctgctgttccggaggatgctggtcggggtgaacgacggccgctacttcctggggctgttccactgcgtcgacaagcaggggaacataatcctgcaggacgcggtggagtaccgcagcgcgcgccgctcatccccgtcggcgccgaaggaggagcggtgcctcgggctcatcctgatcccggcgtcctgccgctcgtcctgccatgtcgactgcttcatcgaagagcagatggccctgctgtccctgtgcaagtgaaggatgcttctgatttctttcttcttctggtttctcaagctatgtggcgtcgatgaatctgtgcctggagaccttactgtcacttttatttgtaatcagttgtgccatattggagttaccctgcatattattatttttgttatttcagctagaagctggtattcatcaatcagtgtcactggctgtgagttcttcaatcaacaagattttgtacacaaattcagtaactgatgacatacaagctcataccataacttcc

SEQ ID NO: 63598 - protein, 182 aa, Triticum aestivum
  peptide (1)..(182): Ceres Seq. ID no. 15173458
  misc_feature (103)..(157): Pfam Name: LSM domain Pfam Description: LSM domain
  misc_feature (104)..(180): Homolog of NCBI NO: 38566550 NR Description: At4g18372 [Arabidopsis thaliana]
  misc_feature (79)..(180): Homolog of NCBI NO: 22328770 NR Description: expressed protein [Arabidopsis thaliana]
LSFPSILRSPSTGAAVLPPSACTRFDPGGRSRRVATFLTLRSAAQDPAPQSSTGRGAMEGPSDGQLIPSTAGDPHLNSSAAPMDATSSGSQHVATLRKLLFRRMLVGVNDGRYFLGLFHCVDKQGNIILQDAVEYRSARRSSPSAPKEERCLGLILIPASCRSSCHVDCFIEEQMALLSLCK

SEQ ID NO: 63599 - protein, 125 aa, Triticum aestivum
  peptide (1)..(125): Ceres Seq. ID no. 15173459
  misc_feature (46)..(100): Pfam Name: LSM domain Pfam Description: LSM domain
  misc_feature (47)..(123): Homolog of NCBI NO: 38566550 NR Description: At4g18372 [Arabidopsis thaliana]
  misc_feature (22)..(123): Homolog of NCBI NO: 22328770 NR Description: expressed protein [Arabidopsis thaliana]
MEGPSDGQLIPSTAGDPHLNSSAAPMDATSSGSQHVATLRKLLFRRMLVGVNDGRYFLGLFHCVDKQGNIILQDAVEYRSARRSSPSAPKEERCLGLILIPASCRSSCHVDCFIEEQMALLSLCK

SEQ ID NO: 63600 - protein, 100 aa, Triticum aestivum
  peptide (1)..(100): Ceres Seq. ID no. 15173460
  misc_feature (21)..(75): Pfam Name: LSM domain Pfam Description: LSM domain
  misc_feature (22)..(98): Homolog of NCBI NO: 38566550 NR Description: At4g18372 [Arabidopsis thaliana]
  misc_feature (1)..(98): Homolog of NCBI NO: 22328770 NR Description: expressed protein [Arabidopsis thaliana]
MDATSSGSQHVATLRKLLFRRMLVGVNDGRYFLGLFHCVDKQGNIILQDAVEYRSARRSSPSAPKEERCLGLILIPASCRSSCHVDCFIEEQMALLSLCK

SEQ ID NO: 63601 - DNA, 1394 bp, Triticum aestivum
  misc_feature (1)..(1394): Ceres Seq. ID no. 13585342
caacatcctaatcgaaaaagttgttaaaggcagcggggacagggccaccgcccaccgccgtcgtactcgtggaacttgcttgcttgccaccccgtcctttgctgctaccgccgcagccgatcgatggccgattcggccggaaagcggcctccaacgccggcgccggcctccggcggaggcggcatggcgtggaagctctctttagctctgttcgtgttgctcgcggcgttcctgtacaagcagattcagcctccggctccggaaatcgttggctcgccgggtggcccccctgttacagcatcaagaacaaagctcaaagacggcaggcatttggcatacctggaatctggcgtcccaaaggagaaggccaagtacaagatcatttttgtccatggattcgactcctgcagatacgacgtgcttcaagtttccccggagctggcacaagagctgggcatctacctgctgtccttcgaccggcctgggtatggtgagagcgaccctgacccggcaccgtctgagaagagcatcgccctcgacatcgaggagctcgccgacaacctgcagctgggccccaaattccacctcatcggcttctccatgggcggcgaaatcatgtggagctgcctcaagtacatcccgcacaggctctctggggtggccgttctcgggccggtcggcaactactggtggtcgggcttgccgtcgaacgtgtcatgggacgcctggtaccagcagctcccacaggaccaatgggcggtctgggtctcccatcatctgccatggctgacctactggtggaacacccagaagctcttcccggcctccagcgtcatcgcctacaaccctgccctcctgtccgaagaagacgcgaagctcatggagaagtttggaatgcgaacctacatgccgatgataaggcagcagggggagtactactgcctgcaccgcgacatgatggtcgggttcgggaagtggggttggagccccctggacctcaaggacccgttcgccggcggcgagggcaaggtgcacctgtggcacggcgcggaggaccgcatcgtgccggtcatcttgtccaggtacatcagcgagaggctcccgtgggtggtctaccacgagctccccaagtccggacacctcttccccgttgcccaggaaatggccgacgccatcgtcaagtccctgctgctcggagagcagtaaccttccactccgatcatctatctctatgtagtatgcttcttgtgcagtacctcagcgccgtgtggttagctcctcctcacgggcaccgaataacaggtgtttctttcggtctggaagacgacgatagacacttgtatatatctgtgagggctagggttcgtatattcaagccatggccatggaattcc

SEQ ID NO: 63602 - protein, 360 aa, Triticum aestivum
  peptide (1)..(360): Ceres Seq. ID no. 15220759
  misc_feature (112)..(360): Pfam Name: alpha/beta hydrolase fold Pfam Description: alpha/beta hydrolase fold
  misc_feature (175)..(360): Homolog of NCBI NO: 25407040 NR Description: protein T23G18.18 [imported] - Arabidopsis
  misc_feature (4)..(356): Homolog of NCBI NO: 15221193 NR Description: esterase/lipase/thioesterase family [Arabidopsis
  misc_feature (32)..(356): Homolog of NCBI NO: 21537089 NR Description: unknown [Arabidopsis thaliana]
  misc_feature (32)..(359): Homolog of NCBI NO: 18410575 NR Description: hydrolase, alpha/beta fold family [Arabidopsis
  misc_feature (32)..(356): Homolog of NCBI NO: 21592662 NR Description: unknown [Arabidopsis thaliana]
  misc_feature (26)..(356): Homolog of NCBI NO: 18410582 NR Description: esterase/lipase/thioesterase family [Arabidopsis
  misc_feature (11)..(359): Homolog of NCBI NO: 28416665 NR Description: At2g36290 [Arabidopsis thaliana]
  misc_feature (11)..(359): Homolog of NCBI NO: 18404095 NR Description: hydrolase, alpha/beta fold family [Arabidopsis
  misc_feature (1)..(360): Homolog of NCBI NO: 15228377 NR Description: hydrolase, alpha/beta fold family [Arabidopsis
  misc_feature (21)..(360): Homolog of NCBI NO: 38346334 NR Description: OSJNBa0073L04.5 [Oryza sativa (japonica
MADSAGKRPPTPAPASGGGGMAWKLSLALFVLLAAFLYKQIQPPAPEIVGSPGGPPVTASRTKLKDGRHLAYLESGVPKEKAKYKIIFVHGFDSCRYDVLQVSPELAQELGIYLLSFDRPGYGESDPDPAPSEKSIALDIEELADNLQLGPKFHLIGFSMGGEIMWSCLKYIPHRLSGVAVLGPVGNYWWSGLPSNVSWDAWYQQLPQDQWAVWVSHHLPWLTYWWNTQKLFPASSVIAYNPALLSEEDAKLMEKFGMRTYMPMIRQQGEYYCLHRDMMVGFGKWGWSPLDLKDPFAGGEGKVHLWHGAEDRIVPVILSRYISERLPWVVYHELPKSGHLFPVAQEMADAIVKSLLLGEQ

SEQ ID NO: 63603 - protein, 340 aa, Triticum aestivum
  peptide (1)..(340): Ceres Seq. ID no. 15220760
  misc_feature (92)..(340): Pfam Name: alpha/beta hydrolase fold Pfam Description: alpha/beta hydrolase fold
  misc_feature (155)..(340): Homolog of NCBI NO: 25407040 NR Description: protein T23G18.18 [imported] - Arabidopsis
  misc_feature (1)..(336): Homolog of NCBI NO: 15221193 NR Description: esterase/lipase/thioesterase family [Arabidopsis
  misc_feature (12)..(336): Homolog of NCBI NO: 21537089 NR Description: unknown [Arabidopsis thaliana]
  misc_feature (12)..(339): Homolog of NCBI NO: 18410575 NR Description: hydrolase, alpha/beta fold family [Arabidopsis
  misc_feature (12)..(336): Homolog of NCBI NO: 21592662 NR Description: unknown [Arabidopsis thaliana]
  misc_feature (6)..(336): Homolog of NCBI NO: 18410582 NR Description: esterase/lipase/thioesterase family [Arabidopsis
  misc_feature (1)..(339): Homolog of NCBI NO: 28416665 NR Description: At2g36290 [Arabidopsis thaliana]
  misc_feature (1)..(339): Homolog of NCBI NO: 18404095 NR Description: hydrolase, alpha/beta fold family [Arabidopsis
  misc_feature (1)..(340): Homolog of NCBI NO: 15228377 NR Description: hydrolase, alpha/beta fold family [Arabidopsis
  misc_feature (1)..(340): Homolog of NCBI NO: 38346334 NR Description: OSJNBa0073L04.5 [Oryza sativa (japonica
MAWKLSLALFVLLAAFLYKQIQPPAPEIVGSPGGPPVTASRTKLKDGRHLAYLESGVPKEKAKYKIIFVHGFDSCRYDVLQVSPELAQELGIYLLSFDRPGYGESDPDPAPSEKSIALDIEELADNLQLGPKFHLIGFSMGGEIMWSCLKYIPHRLSGVAVLGPVGNYWWSGLPSNVSWDAWYQQLPQDQWAVWVSHHLPWLTYWWNTQKLFPASSVIAYNPALLSEEDAKLMEKFGMRTYMPMIRQQGEYYCLHRDMMVGFGKWGWSPLDLKDPFAGGEGKVHLWHGAEDRIVPVILSRYISERLPWVVYHELPKSGHLFPVAQEMADAIVKSLLLGEQ

SEQ ID NO: 63604 - protein, 226 aa, Triticum aestivum
  peptide (1)..(226): Ceres Seq. ID no. 15220761
MGRLVPAAPTGPMGGLGLPSSAMADLLVEHPEALPGLQRHRLQPCPPVRRRREAHGEVWNANLHADDKAAGGVLLPAPRHDGRVREVGLEPPGPQGPVRRRRGQGAPVARRGGPHRAGHLVQVHQREAPVGGLPRAPQVRTPLPRCPGNGRRHRQVPAARRAVTFHSDHLSLCSMLLVQYLSAVWLAPPHGHRITGVSFGLEDDDRHLYISVRARVRIFKPWPWNS

SEQ ID NO: 63605 - DNA, 1518 bp, Triticum aestivum
  misc_feature (1)..(1518): Ceres Seq. ID no. 12587035
acgaaaaaaagagctcaccatcgaagcagcagcaagaagaggaggaggagctaggagttctcggtctcgccgcagagcaacttggcagagcgagtgagcaagacaagcgaggaaagcaagggaaggatacatggcgtgcgcggtggcaccgggctcgccggtcttctcgccgtcccgcctcggcctgctccagcagttggagcagcagctccaccaccaccaccaccacggctgctccagcagcggcgcctccttcctcccctcctcgccgctccgccccttcgcccacctccgcgcgcgcatccaccccgacccctccccgtgcgccgccccgccgctgcccgccgtcaagactgaggattcttcttctgttgctccggctaaggccccggtcaagcgcaggcgcccggcgcctctgctagttccggccgcggtcaccgtcgcgccggcggtgctggaggccgccgcggcgagcggggtggacgaggtggcggagcagggcgacggcttcgcggccttctgccggagggggaagggccggaagcgggtcgagatggaggaccgccacgtcgccgccgtcgcgctcggcggggaccgcgcgcaggccctcttcgccgtgttcgacggccacggagggaagagcgccgcggagttcgccgcggagaacatgccacggatcgtggcggaggagctggagaggtcggcgcgcggcggaggggcagggcgcgcggcggtggagggcgccgtgcggcgggcgtacctgcgcaccgacgaggagttctcctccacctcctccaagaaccgggagcaggcgggcgggggcgcctgctgcgtgacggcgctgctccgcgagggcgggcggcagctggtggtgtccggcgccggggactgccgcgcggtcctgagccgcggcggcagggcggaggcgctcaccgacgaccaccgcgcgtcgcggcaggacgagcgggaccggatcgaggcgctgaaaggcgggctggtgctcaactgccgcggcgtatggcgggtgcagggctcgctggcggtgacccggggcatcggcgacgcgcacctcaagccgtgggtggtggcggagccggagactagaaccgtcgacttgggcgccgactgcgagctgctcatcctcgcctccgacgggctgtgggacaaggtgggcaaccaggaggccgtcgacgccgccgccgcctcctccggcgacctgcccgccgcgtgccgccggctcgtcgacatggccgtgtccaggggctcctccgacgacatcagcgtgctcgtcatccagctgcagcgccctctccgataagactgtagtagtagtagcagagaagatatgcatcggcgccatggatgttcaccctacgtgtagatagagagcttttttgacgtcgtctctctcgtccccgctcgatccggctgctggtgcttgtaacaagatcattagatcaagcactgttagtgctaataatcatcacccggttgagatttcgatcaccgtgggacggg

SEQ ID NO: 63606 - protein, 395 aa, Triticum aestivum
  peptide (1)..(395): Ceres Seq. ID no. 12587036
  misc_feature (127)..(383): Pfam Name: Protein phosphatase 2C Pfam Description: Protein phosphatase 2C
  misc_feature (62)..(391): Homolog of NCBI NO: 7488754 NR Description: protein phosphatase 2C - alfalfa
  misc_feature (136)..(356): Homolog of NCBI NO: 23506607 NR Description: putative serine/threonine phosphatase [Leymus
  misc_feature (285)..(390): Homolog of NCBI NO: 25352225 NR Description: hypothetical protein [imported] - Arabidopsis
  misc_feature (63)..(284): Homolog of NCBI NO: 25352225 NR Description: hypothetical protein [imported] - Arabidopsis
  misc_feature (63)..(390): Homolog of NCBI NO: 15222312 NR Description: protein phosphatase 2C (PP2C)
  misc_feature (42)..(391): Homolog of NCBI NO: 15225656 NR Description: protein phosphatase 2C (PP2C); protein id:
  misc_feature (136)..(356): Homolog of NCBI NO: 23506609 NR Description: putative serine/threonine phosphatase [Leymus
  misc_feature (36)..(392): Homolog of NCBI NO: 30013681 NR Description: Avr9/Cf-9 rapidly elicited protein 284 [Nicotiana
  misc_feature (1)..(392): Homolog of NCBI NO: 15227687 NR Description: protein phosphatase 2C (PP2C)
  misc_feature (118)..(391): Homolog of NCBI NO: 6478146 NR Description: putative serine/threonine phosphatase type 2c
MACAVAPGSPVFSPSRLGLLQQLEQQLHHHHHHGCSSSGASFLPSSPLRPFAHLRARIHPDPSPCAAPPLPAVKTEDSSSVAPAKAPVKRRRPAPLLVPAAVTVAPAVLEAAAASGVDEVAEQGDGFAAFCRRGKGRKRVEMEDRHVAAVALGGDRAQALFAVFDGHGGKSAAEFAAENMPRIVAEELERSARGGGAGRAAVEGAVRRAYLRTDEEFSSTSSKNREQAGGGACCVTALLREGGRQLVVSGAGDCRAVLSRGGRAEALTDDHRASRQDERDRIEALKGGLVLNCRGVWRVQGSLAVTRGIGDAHLKPWVVAEPETRTVDLGADCELLILASDGLWDKVGNQEAVDAAAASSGDLPAACRRLVDMAVSRGSSDDISVLVIQLQRPLR

SEQ ID NO: 63607 - protein, 254 aa, Triticum aestivum
  peptide (1)..(254): Ceres Seq. ID no. 12587037
  misc_feature (1)..(242): Pfam Name: Protein phosphatase 2C Pfam Description: Protein phosphatase 2C
  misc_feature (1)..(250): Homolog of NCBI NO: 7488754 NR Description: protein phosphatase 2C - alfalfa
  misc_feature (1)..(215): Homolog of NCBI NO: 23506607 NR Description: putative serine/threonine phosphatase [Leymus
  misc_feature (144)..(249): Homolog of NCBI NO: 25352225 NR Description: hypothetical protein [imported] - Arabidopsis
  misc_feature (1)..(143): Homolog of NCBI NO: 25352225 NR Description: hypothetical protein [imported] - Arabidopsis
  misc_feature (1)..(249): Homolog of NCBI NO: 15222312 NR Description: protein phosphatase 2C (PP2C)
  misc_feature (1)..(250): Homolog of NCBI NO: 15225656 NR Description: protein phosphatase 2C (PP2C); protein id:
  misc_feature (1)..(215): Homolog of NCBI NO: 23506609 NR Description: putative serine/threonine phosphatase [Leymus
  misc_feature (1)..(251): Homolog of NCBI NO: 30013681 NR Description: Avr9/Cf-9 rapidly elicited protein 284 [Nicotiana
  misc_feature (1)..(251): Homolog of NCBI NO: 15227687 NR Description: protein phosphatase 2C (PP2C)
  misc_feature (1)..(250): Homolog of NCBI NO: 6478146 NR Description: putative serine/threonine phosphatase type 2c
MEDRHVAAVALGGDRAQALFAVFDGHGGKSAAEFAAENMPRIVAEELERSARGGGAGRAAVEGAVRRAYLRTDEEFSSTSSKNREQAGGGACCVTALLREGGRQLVVSGAGDCRAVLSRGGRAEALTDDHRASRQDERDRIEALKGGLVLNCRGVWRVQGSLAVTRGIGDAHLKPWVVAEPETRTVDLGADCELLILASDGLWDKVGNQEAVDAAAASSGDLPAACRRLVDMAVSRGSSDDISVLVIQLQRPLR

SEQ ID NO: 63608 - protein, 216 aa, Triticum aestivum
  peptide (1)..(216): Ceres Seq. ID no. 12587038
  misc_feature (1)..(204): Pfam Name: Protein phosphatase 2C Pfam Description: Protein phosphatase 2C
  misc_feature (1)..(212): Homolog of NCBI NO: 7488754 NR Description: protein phosphatase 2C - alfalfa
  misc_feature (1)..(177): Homolog of NCBI NO: 23506607 NR Description: putative serine/threonine phosphatase [Leymus
  misc_feature (106)..(211): Homolog of NCBI NO: 25352225 NR Description: hypothetical protein [imported] - Arabidopsis
  misc_feature (1)..(105): Homolog of NCBI NO: 25352225 NR Description: hypothetical protein [imported] - Arabidopsis
  misc_feature (1)..(211): Homolog of NCBI NO: 15222312 NR Description: protein phosphatase 2C (PP2C)
  misc_feature (1)..(212): Homolog of NCBI NO: 15225656 NR Description: protein phosphatase 2C (PP2C); protein id:
  misc_feature (1)..(177): Homolog of NCBI NO: 23506609 NR Description: putative serine/threonine phosphatase [Leymus
  misc_feature (1)..(213): Homolog of NCBI NO: 30013681 NR Description: Avr9/Cf-9 rapidly elicited protein 284 [Nicotiana
  misc_feature (1)..(213): Homolog of NCBI NO: 15227687 NR Description: protein phosphatase 2C (PP2C)
  misc_feature (1)..(212): Homolog of NCBI NO: 6478146 NR Description: putative serine/threonine phosphatase type 2c
MPRIVAEELERSARGGGAGRAAVEGAVRRAYLRTDEEFSSTSSKNREQAGGGACCVTALLREGGRQLVVSGAGDCRAVLSRGGRAEALTDDHRASRQDERDRIEALKGGLVLNCRGVWRVQGSLAVTRGIGDAHLKPWVVAEPETRTVDLGADCELLILASDGLWDKVGNQEAVDAAAASSGDLPAACRRLVDMAVSRGSSDDISVLVIQLQRPLR

SEQ ID NO: 63609 - DNA, 957 bp, Triticum aestivum
  misc_feature (1)..(957): Ceres Seq. ID no. 15173971
cccgtcctgccctgcccactcccccaaatacaaccaacccctctcgccgtctgctcgcttgcccgtccgtccgtccccccaaatccaaccccctccccgcacgaaccccggcggcgtcaccggcgatggagtgcgtcatcggcgtggtcggccgcgacttcgcggtggtggccgcggacacgtccgccgtgcagagcatcctcgtccacaagacggacgaggacaagatcatgctcctcgactcccacaagctcatgggcgcctccggggagcccggcgaccgcgtgcagttcaccgagttcatccagaagaacctccacctctaccagttccgcaacaacatgccgctcagcaccgccgccaccgccaacttcacccgcggcgagctcgccaccgccctccgcaagaatccctactctgtaaacatcatacttgcagggtttgataaagatgctggtgcatcgatgtactacattgactacatcgcaacgctccacaaaattgacaagggagcattcgggtacgggtcgtacttctgtttgtcgctgatggacaagttgtaccgccctgacatgactgtcgaggaagcggtagaccttgttgacaagtgcatcaaggagatcagactccggctggtcgtcgcgcctcagaatttcgccatcaagatcgtggacaaggatggcgccagggactatgctaggcgtgagataggaggtgacagtcctgcagtcgcaaccgcaaccgcaacaatagcaacaactgcctgaggtgattggcgctgtcggtggtcatttggctggctggaggctgaaccctttctgttaattgtttccaagtactgtcactatgtaatcgcaatacgtttcggttcgagaactgtgttgcaaattctcccagatgtggactagtctgtttatgacccctatttcatggttatatgtttcactgtttcttgcc

SEQ ID NO: 63610 - protein, 254 aa, Triticum aestivum
  peptide (1)..(254): Ceres Seq. ID no. 15173972
  misc_feature (42)..(223): Pfam Name: Proteasome A-type and B-type Pfam Description: Proteasome A-type and B-type
  misc_feature (42)..(227): Homolog of NCBI NO: 8394079 NR Description: proteasome (prosome, macropain) subunit, beta
  misc_feature (42)..(230): Homolog of NCBI NO: 30585195 NR Description: Homo sapiens proteasome (prosome, macropain)
  misc_feature (42)..(230): Homolog of NCBI NO: 4506195 NR Description: proteasome beta 2 subunit
  misc_feature (42)..(230): Homolog of NCBI NO: 19113828 NR Description: proteasome component; c7-I subfamily
  misc_feature (42)..(230): Homolog of NCBI NO: 29841035 NR Description: similar to NM_017284 proteasome (prosome,
  misc_feature (42)..(175): Homolog of NCBI NO: 14594929 NR Description: putative beta4 proteasome subunit [Nicotiana
  misc_feature (42)..(235): Homolog of NCBI NO: 15228805 NR Description: 20S proteasome beta subunit D (PBD1) [Arabidopsis
  misc_feature (42)..(234): Homolog of NCBI NO: 15233580 NR Description: 20S proteasome beta subunit D2 (PBD2)
  misc_feature (42)..(251): Homolog of NCBI NO: 17380213 NR Description: Proteasome subunit beta type 2 (20S proteasome
  misc_feature (42)..(251): Homolog of NCBI NO: 27552546 NR Description: 20S proteasome beta 4 subunit
RPALPTPPNTTNPSRRLLACPSVRPPKSNPLPARTPAASPAMECVIGVVGRDFAVVAADTSAVQSILVHKTDEDKIMLLDSHKLMGASGEPGDRVQFTEFIQKNLHLYQFRNNMPLSTAATANFTRGELATALRKNPYSVNIILAGFDKDAGASMYYIDYIATLHKIDKGAFGYGSYFCLSLMDKLYRPDMTVEEAVDLVDKCIKEIRLRLVVAPQNFAIKIVDKDGARDYARREIGGDSPAVATATATIATTA

SEQ ID NO: 63611 - protein, 213 aa, Triticum aestivum; identical to SEQ ID NO: 56585
  peptide (1)..(213): Ceres Seq. ID no. 15173973
  misc_feature (1)..(182): Pfam Name: Proteasome A-type and B-type Pfam Description: Proteasome A-type and B-type
  misc_feature (1)..(186): Homolog of NCBI NO: 8394079 NR Description: proteasome (prosome, macropain) subunit, beta
  misc_feature (1)..(189): Homolog of NCBI NO: 30585195 NR Description: Homo sapiens proteasome (prosome, macropain)
  misc_feature (1)..(189): Homolog of NCBI NO: 4506195 NR Description: proteasome beta 2 subunit
  misc_feature (1)..(189): Homolog of NCBI NO: 19113828 NR Description: proteasome component; c7-I subfamily
  misc_feature (1)..(189): Homolog of NCBI NO: 29841035 NR Description: similar to NM_017284 proteasome (prosome,
  misc_feature (1)..(134): Homolog of NCBI NO: 14594929 NR Description: putative beta4 proteasome subunit [Nicotiana
  misc_feature (1)..(194): Homolog of NCBI NO: 15228805 NR Description: 20S proteasome beta subunit D (PBD1) [Arabidopsis
  misc_feature (1)..(193): Homolog of NCBI NO: 15233580 NR Description: 20S proteasome beta subunit D2 (PBD2)
  misc_feature (1)..(210): Homolog of NCBI NO: 17380213 NR Description: Proteasome subunit beta type 2 (20S proteasome
  misc_feature (1)..(210): Homolog of NCBI NO: 27552546 NR Description: 20S proteasome beta 4 subunit

SEQ ID NO: 63612 - protein, 178 aa, Triticum aestivum; identical to SEQ ID NO: 56586
  peptide (1)..(178): Ceres Seq. ID no. 15173974
  misc_feature (1)..(147): Pfam Name: Proteasome A-type and B-type Pfam Description: Proteasome A-type and B-type
  misc_feature (1)..(151): Homolog of NCBI NO: 8394079 NR Description: proteasome (prosome, macropain) subunit, beta
  misc_feature (1)..(154): Homolog of NCBI NO: 30585195 NR Description: Homo sapiens proteasome (prosome, macropain)
  misc_feature (1)..(154): Homolog of NCBI NO: 4506195 NR Description: proteasome beta 2 subunit
  misc_feature (1)..(154): Homolog of NCBI NO: 19113828 NR Description: proteasome component; c7-I subfamily
  misc_feature (1)..(154): Homolog of NCBI NO: 29841035 NR Description: similar to NM_017284 proteasome (prosome,
  misc_feature (1)..(99): Homolog of NCBI NO: 14594929 NR Description: putative beta4 proteasome subunit [Nicotiana
  misc_feature (1)..(159): Homolog of NCBI NO: 15228805 NR Description: 20S proteasome beta subunit D (PBD1) [Arabidopsis
  misc_feature (1)..(158): Homolog of NCBI NO: 15233580 NR Description: 20S proteasome beta subunit D2 (PBD2)
  misc_feature (1)..(175): Homolog of NCBI NO: 17380213 NR Description: Proteasome subunit beta type 2 (20S proteasome
  misc_feature (1)..(175): Homolog of NCBI NO: 27552546 NR Description: 20S proteasome beta 4 subunit

SEQ ID NO: 63613 - DNA, 515 bp, Triticum aestivum
  misc_feature (1)..(515): Ceres Seq. ID no. 13584057
ataacgtttcctcgttgccggggggaagctctctcgtgtcctcctctgctcttcctcgacgagagtgaggccggccaccggcgacagggcggccatggcggcggcgcttctctccccggcctctcccctccctcgctcctcctccgcggcccatcccaggagcaagggcgcggctggtgcagcagcagggtgcgctccgccgtccaggaggagggccgtctcgtgctcgtgcgcgcccgattcgtggagcctcgggctggagaggaggcagctcgtgctctccggcctcgtctcctcctttgcaatcgccctcccgattacagtagtacaatcgtgcgctgctgccactgaggttgagcttgacgacggcgtgaagatggccatgctggtagatgagaccaacgcctactcttttctctacccggttcagctgccagggaagaaaacctccttcagatgggtggagtccaggaaatcggagcgatattcctctgcggcgccactatctcctgatg

SEQ ID NO: 63614 - protein, 140 aa, Triticum aestivum
  peptide (1)..(140): Ceres Seq. ID no. 13584058
  misc_feature (4)..(139): Homolog of NCBI NO: 22326731 NR Description: oxygen-evolving complex related protein
  misc_feature (1)..(139): Homolog of NCBI NO: 11283463 NR Description: hypothetical protein F15N18.40 - Arabidopsis
  misc_feature (53)..(139): Homolog of NCBI NO: 34912704 NR Description: P0686E09.22 [Oryza sativa (japonica
MAAALLSPASPLPRSSSAAHPRSKGAAGAAAGCAPPSRRRAVSCSCAPDSWSLGLERRQLVLSGLVSSFAIALPITVVQSCAAATEVELDDGVKMAMLVDETNAYSFLYPVQLPGKKTSFRWVESRKSERYSSAAPLSPD

SEQ ID NO: 63615 - protein, 116 aa, Triticum aestivum
  peptide (1)..(116): Ceres Seq. ID no. 13584059
ITFPRCRGEALSCPPLLFLDESEAGHRRQGGHGGGASLPGLSPPSLLLRGPSQEQGRGWCSSRVRSAVQEEGRLVLVRARFVEPRAGEEAARALRPRLLLCNRPPDYSSTIVRCCH

SEQ ID NO: 63616 - DNA, 1224 bp, Triticum aestivum
  misc_feature (1)..(1224): Ceres Seq. ID no. 15225685
acgagascattacctagarcatcctratcgaawatcatcagccccttgccaacaacatgtcttcttcttcttcttcttctacccgggtctcccagctgggcatcgccggcttggccgcgcttctggcggccgtctgcctcctccacgccggcggggcggcggcggcggagctgtgcacggactactacgactgcacgtgcccggacgcgtacaagatcgtgcagggggtgctggtggaggcgcaccagtcggaccctcgcatcttcgccagcctcatccgcctccacttccacgactgcttcgtgcagggctgcgacggctcgctgctgctggacaccttcgacgggatggagtcggagaaggacgcgcggcccaacaacgggtcggcgcgcggcttcgaggtcgtggacgccgccaaggccgccctcgaggacgcctgccccggcgtcgtctcctgcgccgacatcctcgccatcgccgccgagatctcggtcgagctgtccggagggcccgggtggaacgtgttgctggggaggctggacagcttcacgtccagcaaagccgacgccgagaacctaccaggccccttcgacggcctcgatgtgctgagagcaaagttccggaacgccacgctcgacgatactaccgacctcgtcgccctctcaggtggccacactttcggccgcgtgcaatgccagttcgtcacgggccggctgtacaacttcagcgggacgaaccagcctgacccgaccctcgacgcgacataccgagccttcctgtcacagagatgcccgaggaacggcgacggaacgtccctcaacgacctcgacccgaccacacccgacaacttcgacaagaactacttcacaaacctcgaggtgaaccgcggcttccttcagtcagaccaggagctcaagtcggaccccggcgcggcggggacgacggcgccaatcgtcgatcggttcgcgggcagtcaggaggccttcttcagtagcttcgtgacttctatgatcaagatggggaacattaggcccgtcacagatccctcccagggagaagtccggaaccgctgcgcgtttgtcaattcaaattagcgggcaggggggagaccacgtgtgggtatatgcaaatgtggcatggtcatggatgcaaggatgaattcatctcttgtcgtctctggtgtaataattggtttttgtgtcaaccaatgtaaacatttcatgc

SEQ ID NO: 63617 - protein, 345 aa, Triticum aestivum
  peptide (1)..(345): Ceres Seq. ID no. 15225686
  misc_feature (55)..(306): Pfam Name: Peroxidase Pfam Description: Peroxidase
  misc_feature (26)..(345): Homolog of NCBI NO: 1279650 NR Description: peroxidase [Populus balsamifera subsp.
  misc_feature (21)..(345): Homolog of NCBI NO: 1279652 NR Description: peroxidase [Populus balsamifera subsp.
  misc_feature (21)..(345): Homolog of NCBI NO: 1279648 NR Description: peroxidase [Populus balsamifera subsp.
  misc_feature (21)..(345): Homolog of NCBI NO: 7433057 NR Description: peroxidase (EC 1.11.1.7) - black poplar
  misc_feature (48)..(345): Homolog of NCBI NO: 485393 NR Description: peroxidase [Populus kitakamiensis]
  misc_feature (22)..(344): Homolog of NCBI NO: 19569160 NR Description: apoplastic anionic gaiacol peroxidase [Gossypium
  misc_feature (35)..(345): Homolog of NCBI NO: 1279654 NR Description: peroxidase [Populus balsamifera subsp.
  misc_feature (35)..(345): Homolog of NCBI NO: 2129513 NR Description: peroxidase (EC 1.11.1.7) A3a precursor - Japanese
  misc_feature (17)..(343): Homolog of NCBI NO: 20330758 NR Description: Putative peroxidase [Oryza sativa (japonica
  misc_feature (1)..(343): Homolog of NCBI NO: 37530466 NR Description: putative peroxidase [Oryza sativa (japonica
MSSSSSSSTRVSQLGIAGLAALLAAVCLLHAGGAAAAELCTDYYDCTCPDAYKIVQGVLVEAHQSDPRIFASLIRLHFHDCFVQGCDGSLLLDTFDGMESEKDARPNNGSARGFEVVDAAKAALEDACPGVVSCADILAIAAEISVELSGGPGWNVLLGRLDSFTSSKADAENLPGPFDGLDVLRAKFRNATLDDTTDLVALSGGHTFGRVQCQFVTGRLYNFSGTNQPDPTLDATYRAFLSQRCPRNGDGTSLNDLDPTTPDNFDKNYFTNLEVNRGFLQSDQELKSDPGAAGTTAPIVDRFAGSQEAFFSSFVTSMIKMGNIRPVTDPSQGEVRNRCAFVNSN

SEQ ID NO: 63618 - protein, 248 aa, Triticum aestivum
  peptide (1)..(248): Ceres Seq. ID no. 15225687
  misc_feature (1)..(209): Pfam Name: Peroxidase Pfam Description: Peroxidase
  misc_feature (1)..(248): Homolog of NCBI NO: 1279650 NR Description: peroxidase [Populus balsamifera subsp.
  misc_feature (1)..(248): Homolog of NCBI NO: 1279652 NR Description: peroxidase [Populus balsamifera subsp.
  misc_feature (1)..(248): Homolog of NCBI NO: 1279648 NR Description: peroxidase [Populus balsamifera subsp.
  misc_feature (1)..(248): Homolog of NCBI NO: 7433057 NR Description: peroxidase (EC 1.11.1.7) - black poplar
  misc_feature (1)..(248): Homolog of NCBI NO: 485393 NR Description: peroxidase [Populus kitakamiensis]
  misc_feature (1)..(247): Homolog of NCBI NO: 19569160 NR Description: apoplastic anionic gaiacol peroxidase [Gossypium
  misc_feature (1)..(248): Homolog of NCBI NO: 1279654 NR Description: peroxidase [Populus balsamifera subsp.
  misc_feature (1)..(248): Homolog of NCBI NO: 2129513 NR Description: peroxidase (EC 1.11.1.7) A3a precursor - Japanese
  misc_feature (1)..(246): Homolog of NCBI NO: 20330758 NR Description: Putative peroxidase [Oryza sativa (japonica
  misc_feature (1)..(246): Homolog of NCBI NO: 37530466 NR Description: putative peroxidase [Oryza sativa (japonica
MESEKDARPNNGSARGFEVVDAAKAALEDACPGVVSCADILAIAAEISVELSGGPGWNVLLGRLDSFTSSKADAENLPGPFDGLDVLRAKFRNATLDDTTDLVALSGGHTFGRVQCQFVTGRLYNFSGTNQPDPTLDATYRAFLSQRCPRNGDGTSLNDLDPTTPDNFDKNYFTNLEVNRGFLQSDQELKSDPGAAGTTAPIVDRFAGSQEAFFSSFVTSMIKMGNIRPVTDPSQGEVRNRCAFVNSN

SEQ ID NO: 63619 - protein, 247 aa, Triticum aestivum
  peptide (1)..(247): Ceres Seq. ID no. 15225688
  misc_feature (2)..(2): Xaa is any aa, unknown or other
  misc_feature (6)..(6): Xaa is any aa, unknown or other
  misc_feature (9)..(9): Xaa is any aa, unknown or other
  misc_feature (11)..(11): Xaa is any aa, unknown or other
RXHYLXHPXRXSSAPCQQHVFFFFFFYPGLPAGHRRLGRASGGRLPPPRRRGGGGGAVHGLLRLHVPGRVQDRAGGAGGGAPVGPSHLRQPHPPPLPRLLRAGLRRLAAAGHLRRDGVGEGRAAQQRVGARLRGRGRRQGRPRGRLPRRRLLRRHPRHRRRDLGRAVRRARVERVAGEAGQLHVQQSRRREPTRPLRRPRCAESKVPERHARRYYRPRRPLRWPHFRPRAMPVRHGPAVQLQRDEPA

SEQ ID NO: 63620 - DNA, 1235 bp, Triticum aestivum
  misc_feature (1)..(1235): Ceres Seq. ID no. 12624774
cactgagccagccgtcaccaccaccaacaacaaaaaaacacgcatcgacgatacgtacaacgcagccgcccctcgccggcgacgagtgctaggccatggattccgactacggcgtgccgcgcgagctctcggaggtgcagcagaaccggactctctaccagcccgagctgcccccctgcctccagggcactactgtgagggtggagtatggtgatgtggcgatcgctgctgatcccgccggcgctcatgtgatcagccacgcgtacccccacacatacgggcagccactggctcatttcctcaggaaggcggctaatgttcctgatgctaaagtcatatcagagcaccctgccgtcagggttggtattgtattctgtggaaggcagtccccgggaggccacaatgtcatatggggactccatgaggccatcaaagctcacaacgtgaacagcaaacttattggtttcctcggaggaaccgacggtcttcttgcacaaaaaactttggagatcacaaatgaagttctttcttcctacaaaaaccaaggtggttatgatatgcttggtcggactaaggatcaaatcagaacaacggagcaagtcaatggtgcaatggctacttgccaggctttgaagttggatgctcttgtaataatcggaggtggattgactgggggaacgcgcatccgctgccaacctggggggaagtgagggacctgaaagcgtcctactaccaaggaacgtgccaccagtcaacagtcgcctgcccaggcttcatggctgcccaggccgtctcgtcgctgcagatccgagaagactcgtcctctccaggccagggagtcgccgccgcgaccgtcgttaataggatgctcggcggcgccaacaggctcaacctttacagggagatatgaagaaggaagatatatacaacctcgtcgtcatagtgttcttgtacataatagtcaccgaaggtgtgctgactattttgcctgcgtgcagctgttccagccatcaggagaatctgatggcgcaacttgtttcgcccttttgttttcgtcggtcggtgtaataggatattttgcgtctgttgttattgtcggtattgtaatgaaacaagtatgatttcgattctcttgctgctagctgggttttctctcgaaagtctatatatagttcttgtttgcgtttcctcacaaaataaaaaggagcctgtggaatgaaaaaccttttaccctt

SEQ ID NO: 63621 - protein, 204 aa, Triticum aestivum
  peptide (1)..(204): Ceres Seq. ID no. 12624775
  misc_feature (88)..(195): Pfam Name: Phosphofructokinase Pfam Description: Phosphofructokinase
  misc_feature (11)..(189): Homolog of NCBI NO: 15639531 NR Description: pyrophosphate--fructose 6-phosphate
  misc_feature (11)..(189): Homolog of NCBI NO: 11528427 NR Description: pyrophosphate-dependent phosphofructokinase
  misc_feature (18)..(189): Homolog of NCBI NO: 34540025 NR Description: phosphofructokinase [Porphyromonas gingivalis
  misc_feature (88)..(189): Homolog of NCBI NO: 29367525 NR Description: fructose-6-phosphate 1-phosphotransferase
  misc_feature (1)..(189): Homolog of NCBI NO: 29647436 NR Description: putative pyrophosphate--fructose 6-phosphate
  misc_feature (1)..(189): Homolog of NCBI NO: 15218074 NR Description: putative pyrophosphate-dependent
  misc_feature (1)..(195): Homolog of NCBI NO: 15223082 NR Description: putative pyrophosphate-dependent
  misc_feature (1)..(195): Homolog of NCBI NO: 2499488 NR Description: Pyrophosphate--fructose 6-phosphate alpha subunit (PFP) (6-phosphofructokinase, pyrophosphate
  misc_feature (1)..(195): Homolog of NCBI NO: 3790102 NR Description: pyrophosphate-dependent phosphofructokinase alpha
  misc_feature (1)..(195): Homolog of NCBI NO: 129881 NR Description: Pyrophosphate--fructose 6-phosphate alpha subunit (PFP) (6-phosphofructokinase, (Pyrophosphate-dependent 6-phosphofructose-1-kinase) (PPI-PFK)
MDSDYGVPRELSEVQQNRTLYQPELPPCLQGTTVRVEYGDVAIAADPAGAHVISHAYPHTYGQPLAHFLRKAANVPDAKVISEHPAVRVGIVFCGRQSPGGHNVIWGLHEAIKAHNVNSKLIGFLGGTDGLLAQKTLEITNEVLSSYKNQGGYDMLGRTKDQIRTTEQVNGAMATCQALKLDALVIIGGGLTGGTRIRCQPGGK

SEQ ID NO: 63622 - DNA, 1542 bp, Triticum aestivum
  misc_feature (1)..(1542): Ceres Seq. ID no. 13662197
aattgccttcccgcaaaaataaggaaaattacaccttcccgccgccgccaacgaacgacgctttgcctcattgctcagttccctatgaccagcacgcccaccgttaccaagtcgccgccggcgctcatcccgccggcgggacctaccccctgcggcacccttccgttctcctccattgacaagaccgtcgccggctccggctttgtgaaccttatgcaggtctttcccccgccctcgatctccgccgcccgcaaggaccagggcgccgtcgcggccgtggccgcaatgcgcaacgggttcgcgagggcgcttgtgccgtactatccggtggccggccgcatcgcctcgagcggcctcgcggtggactgcaccggggagggcatctggtttgtggaagccgccgcgagctgcacgctcgccgacgtggacggcctcgacagctgcccactgctgatcccaggagagctcctcctccctcgccctccccccggcgagaagctcagcgacctcatcctcatagcccaggcgacgaggttcacctgcggtggtttcgccgtcgggatccgcttcagccacgcggtgttcgacgggcatggggctgcgcagttccttacggcggtgggggagctagcgcgggggctcaaggcgccgtcagtggctccggtgtgggaccgcgacgcgatcccagaagctccaagcccgctgccggggcagctcacggagttcaggctggtgacccaggtggtcgacatctcggcggagagcatcgcgcgcgtgaaggacgagttcaagcaggctgccgcgacatcgacgggggaagtgtgctccacctttgacgcggtgacggccgtggtgttcaagtgccgcgcgctggcgctggcatcggcgctcccggacgagaccgaggtccggatggccttcgccgccagcacgcggcaccttctccgcggtgtgctgccgacggtggagggctactacggcaactgcgtattcctggcgtgcgccactaggacaggcaaggccgtccgggaggccacgctggcggaggtggtcggcgcggtacgggaggcgaaggaggcggttcccgctcggttcgcgggctggatgcgcggcgtcgagcagtacgacgtgccgccgctggactacagcacagtgacgttgtcggactggagccgtctcggcttcgacgaggtggactacggcttcggtgcgcccgggtacgttttcccgctcaacgaccacgtcaacttcgtcgcggcgctcaactacgtcaggccgccggcgcccaggcgtgggggcatccgggtggtgctccgctgcgtcgaggagcctcatgcggctgcgttcgccgtcgagctcgccaagttcgcctagatgcaacgcacgcgtgcttcccatttcttggccatgtccgtccattaatgtgagaccgcgcagttcagggaacacattttcacattttttttctctcggcagccaacacgttgtatctccattgtatggtcgtataataagagtaatactttatcttttcctatcggg

SEQ ID NO: 63623 - protein, 457 aa, Triticum aestivum
  peptide (1)..(457): Ceres Seq. ID no. 13662198
  misc_feature (33)..(456): Pfam Name: Transferase family Pfam Description: Transferase family
  misc_feature (35)..(454): Homolog of NCBI NO: 37530688 NR Description: putative O-deacetylbaccatin
  misc_feature (35)..(451): Homolog of NCBI NO: 28558088 NR Description: 3'-N-debenzoyl-2'-deoxytaxol N-benzoyltransferase
  misc_feature (35)..(454): Homolog of NCBI NO: 37530684 NR Description: putative O-deacetylbaccatin
  misc_feature (35)..(454): Homolog of NCBI NO: 38347149 NR Description: OSJNBa0039G19.9 [Oryza sativa (japonica
  misc_feature (35)..(456): Homolog of NCBI NO: 38346537 NR Description: OSJNBa0040D17.12 [Oryza sativa (japonica
  misc_feature (34)..(449): Homolog of NCBI NO: 15228696 NR Description: acyltransferase family [Arabidopsis thaliana]
  misc_feature (30)..(449): Homolog of NCBI NO: 34906304 NR Description: unnamed protein product [Oryza sativa (japonica
  misc_feature (29)..(449): Homolog of NCBI NO: 34906150 NR Description: putative 0-deacetylbaccatin III-10-O-acetyl
  misc_feature (35)..(457): Homolog of NCBI NO: 34912654 NR Description: putative acetyl transferase
  misc_feature (24)..(457): Homolog of NCBI NO: 34912652 NR Description: putative acetyl transferase
NCLPAKIRKITPSRRRQRTTLCLIAQFPMTSTPTVTKSPPALIPPAGPTPCGTLPFSSIDKTVAGSGFVNLMQVFPPPSISAARKDQGAVAAVAAMRNGFARALVPYYPVAGRIASSGLAVDCTGEGIWFVEAAASCTLADVDGLDSCPLLIPGELLLPRPPPGEKLSDLILIAQATRFTCGGFAVGIRFSHAVFDGHGAAQFLTAVGELARGLKAPSVAPVWDRDAIPEAPSPLPGQLTEFRLVTQVVDISAESIARVKDEFKQAAATSTGEVCSTFDAVTAVVFKCRALALASALPDETEVRMAFAASTRHLLRGVLPTVEGYYGNCVFLACATRTGKAVREATLAEVVGAVREAKEAVPARFAGWMRGVEQYDVPPLDYSTVTLSDWSRLGFDEVDYGFGAPGYVFPLNDHVNFVAALNYVRPPAPRRGGIRVVLRCVEEPHAAAFAVELAKFA

SEQ ID NO: 63624 - protein, 429 aa, Triticum aestivum
  peptide (1)..(429): Ceres Seq. ID no. 13662199
  misc_feature (5)..(428): Pfam Name: Transferase family Pfam Description: Transferase family
  misc_feature (7)..(426): Homolog of NCBI NO: 37530688 NR Description: putative O-deacetylbaccatin
  misc_feature (7)..(423): Homolog of NCBI NO: 28558088 NR Description: 3'-N-debenzoyl-2'-deoxytaxol N-benzoyltransferase
  misc_feature (7)..(426): Homolog of NCBI NO: 37530684 NR Description: putative O-deacetylbaccatin
  misc_feature (7)..(426): Homolog of NCBI NO: 38347149 NR Description: OSJNBa0039G19.9 [Oryza sativa (japonica
  misc_feature (7)..(428): Homolog of NCBI NO: 38346537 NR Description: OSJNBa0040D17.12 [Oryza sativa (japonica
  misc_feature (6)..(421): Homolog of NCBI NO: 15228696 NR Description: acyltransferase family [Arabidopsis thaliana]
  misc_feature (2)..(421): Homolog of NCBI NO: 34906304 NR Description: unnamed protein product [Oryza sativa (japonica
  misc_feature (1)..(421): Homolog of NCBI NO: 34906150 NR Description: putative 0-deacetylbaccatin III-10-O-acetyl
  misc_feature (7)..(429): Homolog of NCBI NO: 34912654 NR Description: putative acetyl transferase
  misc_feature (1)..(429): Homolog of NCBI NO: 34912652 NR Description: putative acetyl transferase
MTSTPTVTKSPPALIPPAGPTPCGTLPFSSIDKTVAGSGFVNLMQVFPPPSISAARKDQGAVAAVAAMRNGFARALVPYYPVAGRIASSGLAVDCTGEGIWFVEAAASCTLADVDGLDSCPLLIPGELLLPRPPPGEKLSDLILIAQATRFTCGGFAVGIRFSHAVFDGHGAAQFLTAVGELARGLKAPSVAPVWDRDAIPEAPSPLPGQLTEFRLVTQVVDISAESIARVKDEFKQAAATSTGEVCSTFDAVTAVVFKCRALALASALPDETEVRMAFAASTRHLLRGVLPTVEGYYGNCVFLACATRTGKAVREATLAEVVGAVREAKEAVPARFAGWMRGVEQYDVPPLDYSTVTLSDWSRLGFDEVDYGFGAPGYVFPLNDHVNFVAALNYVRPPAPRRGGIRVVLRCVEEPHAAAFAVELAKFA

SEQ ID NO: 63625 - protein, 386 aa, Triticum aestivum
  peptide (1)..(386): Ceres Seq. ID no. 13662200
  misc_feature (1)..(385): Pfam Name: Transferase family Pfam Description: Transferase family
  misc_feature (1)..(383): Homolog of NCBI NO: 37530688 NR Description: putative O-deacetylbaccatin
  misc_feature (1)..(380): Homolog of NCBI NO: 28558088 NR Description: 3'-N-debenzoyl-2'-deoxytaxol N-benzoyltransferase
  misc_feature (1)..(383): Homolog of NCBI NO: 37530684 NR Description: putative O-deacetylbaccatin
  misc_feature (1)..(383): Homolog of NCBI NO: 38347149 NR Description: OSJNBa0039G19.9 [Oryza sativa (japonica
  misc_feature (1)..(385): Homolog of NCBI NO: 38346537 NR Description: OSJNBa0040D17.12 [Oryza sativa (japonica
  misc_feature (1)..(378): Homolog of NCBI NO: 15228696 NR Description: acyltransferase family [Arabidopsis thaliana]
  misc_feature (1)..(378): Homolog of NCBI NO: 34906304 NR Description: unnamed protein product [Oryza sativa (japonica
  misc_feature (1)..(378): Homolog of NCBI NO: 34906150 NR Description: putative 0-deacetylbaccatin III-10-O-acetyl
  misc_feature (1)..(386): Homolog of NCBI NO: 34912654 NR Description: putative acetyl transferase
  misc_feature (1)..(386): Homolog of NCBI NO: 34912652 NR Description: putative acetyl transferase
MQVFPPPSISAARKDQGAVAAVAAMRNGFARALVPYYPVAGRIASSGLAVDCTGEGIWFVEAAASCTLADVDGLDSCPLLIPGELLLPRPPPGEKLSDLILIAQATRFTCGGFAVGIRFSHAVFDGHGAAQFLTAVGELARGLKAPSVAPVWDRDAIPEAPSPLPGQLTEFRLVTQVVDISAESIARVKDEFKQAAATSTGEVCSTFDAVTAVVFKCRALALASALPDETEVRMAFAASTRHLLRGVLPTVEGYYGNCVFLACATRTGKAVREATLAEVVGAVREAKEAVPARFAGWMRGVEQYDVPPLDYSTVTLSDWSRLGFDEVDYGFGAPGYVFPLNDHVNFVAALNYVRPPAPRRGGIRVVLRCVEEPHAAAFAVELAKFA

SEQ ID NO: 63626 - DNA, 1245 bp, Triticum aestivum
  misc_feature (1)..(1245): Ceres Seq. ID no. 13597094
acgacatcctccacactcgactcaaccaagcagcaacgagacgcagagcaagcagcaacaagtagcttcgaccttcagcttctagcgcatggcggagatgggggtgcgtgacaacttgccctgctcgacttcatggagagagctcacacacaccagctggagggatgacgattacaggaggatggtgatggcgagcctgatcgaggcggtgtacctgctggagctggagaggcaggagcggagggacgcggcggaggtggcgcagcagtggtggaagcccttcagctaccgcctcgcgcacgagctggtggacgaacgcgacggctccgtcttcggcgccatcttcgagtgggaggaccgccacctgctcgaccgccgcggcgccagcgccgaggaaaggccgaccggcgcgcccagcgcggtgatcgcgttccggggcacgctgctgcgcgcgcccaccatccggcgggacgtggaggacgagctgcgcctgctggcgtgcaacagcctccgcggctccgccaggctccacggcgcgctgcaggcgctcagggccaccatcgacaggttcggctccgagaacgtgtgcctctgcggccactccctcggcgccggcttcgcgcgccaggtcggcaggatgctcatggcgtcgcgccagcagcagcagccgcagccgcagcagcagcagcagcaacagaaccccgccgcggcgctcgagttccacctcttcaacgcgccctacctgtcgctgcccacgggcgtgcggagggtggtgaggacggccgactgcctgctcaagacggtccgcaccggcgtcgccgccgtcggcaggtggcacggcaaggcgctcaagaacgtggcctacgccaactgcgtgctcggctacacgcgcctcgacagcgacggcaggaagttgttcgagtgagaagagaacatgctacgccaactgcaactgatctgccacacccatgactgacgccatgactcgcctgaagagagggagggatccagcgctgaaaacgtgcgactgtactgaaaatcccaaacacgcggcacgtatctcgatcatggaggccatgatcccgaacgaacgatctatctattatcagcttgtactactagtaggattcaatttgaaggagacaataagcatcctgcccggcccagggatgcacggcttaggtagctagcttagtctgcatgcttgctctctagtctgtacatgttaatcgcgtttccattgtc

SEQ ID NO: 63627 - protein, 278 aa, Triticum aestivum
  peptide (1)..(278): Ceres Seq. ID no. 13597095
  misc_feature (19)..(185): Homolog of NCBI NO: 18413406 NR Description: lipase (class 3) family [Arabidopsis thaliana]
  misc_feature (19)..(188): Homolog of NCBI NO: 30689345 NR Description: expressed protein [Arabidopsis thaliana]
  misc_feature (19)..(188): Homolog of NCBI NO: 10177082 NR Description: gene_id:MOP9.4~pir||T04290~similar to unknown
  misc_feature (19)..(185): Homolog of NCBI NO: 18396010 NR Description: lipase (class 3) family [Arabidopsis thaliana]
  misc_feature (15)..(69): Homolog of NCBI NO: 34904536 NR Description: B1066G12.13 [Oryza sativa (japonica
  misc_feature (112)..(185): Homolog of NCBI NO: 34904536 NR Description: B1066G12.13 [Oryza sativa (japonica
  misc_feature (9)..(185): Homolog of NCBI NO: 34909578 NR Description: P0046E05.21 [Oryza sativa (japonica
  misc_feature (1)..(185): Homolog of NCBI NO: 15241306 NR Description: hypothetical protein [Arabidopsis thaliana]
  misc_feature (1)..(185): Homolog of NCBI NO: 34910916 NR Description: OSJNBb0063G05.3 [Oryza sativa (japonica
  misc_feature (24)..(274): Homolog of NCBI NO: 34901136 NR Description: contains EST AU161031(C53313)~similar to Oryza
MAEMGVRDNLPCSTSWRELTHTSWRDDDYRRMVMASLIEAVYLLELERQERRDAAEVAQQWWKPFSYRLAHELVDERDGSVFGAIFEWEDRHLLDRRGASAEERPTGAPSAVIAFRGTLLRAPTIRRDVEDELRLLACNSLRGSARLHGALQALRATIDRFGSENVCLCGHSLGAGFARQVGRMLMASRQQQQPQPQQQQQQQNPAAALEFHLFNAPYLSLPTGVRRVVRTADCLLKTVRTGVAAVGRWHGKALKNVAYANCVLGYTRLDSDGRKLFE

SEQ ID NO: 63628 - protein, 275 aa, Triticum aestivum
  peptide (1)..(275): Ceres Seq. ID no. 13597096
  misc_feature (16)..(182): Homolog of NCBI NO: 18413406 NR Description: lipase (class 3) family [Arabidopsis thaliana]
  misc_feature (16)..(185): Homolog of NCBI NO: 30689345 NR Description: expressed protein [Arabidopsis thaliana]
  misc_feature (16)..(185): Homolog of NCBI NO: 10177082 NR Description: gene_id:MOP9.4~pir||T04290~similar to unknown
  misc_feature (16)..(182): Homolog of NCBI NO: 18396010 NR Description: lipase (class 3) family [Arabidopsis thaliana]
  misc_feature (12)..(66): Homolog of NCBI NO: 34904536 NR Description: B1066G12.13 [Oryza sativa (japonica
  misc_feature (109)..(182): Homolog of NCBI NO: 34904536 NR Description: B1066G12.13 [Oryza sativa (japonica
  misc_feature (6)..(182): Homolog of NCBI NO: 34909578 NR Description: P0046E05.21 [Oryza sativa (japonica
  misc_feature (1)..(182): Homolog of NCBI NO: 15241306 NR Description: hypothetical protein [Arabidopsis thaliana]
  misc_feature (1)..(182): Homolog of NCBI NO: 34910916 NR Description: OSJNBb0063G05.3 [Oryza sativa (japonica
  misc_feature (21)..(271): Homolog of NCBI NO: 34901136 NR Description: contains EST AU161031(C53313)~similar to Oryza
MGVRDNLPCSTSWRELTHTSWRDDDYRRMVMASLIEAVYLLELERQERRDAAEVAQQWWKPFSYRLAHELVDERDGSVFGAIFEWEDRHLLDRRGASAEERPTGAPSAVIAFRGTLLRAPTIRRDVEDELRLLACNSLRGSARLHGALQALRATIDRFGSENVCLCGHSLGAGFARQVGRMLMASRQQQQPQPQQQQQQQNPAAALEFHLFNAPYLSLPTGVRRVVRTADCLLKTVRTGVAAVGRWHGKALKNVAYANCVLGYTRLDSDGRKLFE

SEQ ID NO: 63629 - protein, 247 aa, Triticum aestivum
  peptide (1)..(247): Ceres Seq. ID no. 13597097
  misc_feature (1)..(154): Homolog of NCBI NO: 18413406 NR Description: lipase (class 3) family [Arabidopsis thaliana]
  misc_feature (1)..(157): Homolog of NCBI NO: 30689345 NR Description: expressed protein [Arabidopsis thaliana]
  misc_feature (1)..(157): Homolog of NCBI NO: 10177082 NR Description: gene_id:MOP9.4~pir||T04290~similar to unknown
  misc_feature (1)..(154): Homolog of NCBI NO: 18396010 NR Description: lipase (class 3) family [Arabidopsis thaliana]
  misc_feature (1)..(38): Homolog of NCBI NO: 34904536 NR Description: B1066G12.13 [Oryza sativa (japonica
  misc_feature (81)..(154): Homolog of NCBI NO: 34904536 NR Description: B1066G12.13 [Oryza sativa (japonica
  misc_feature (1)..(154): Homolog of NCBI NO: 34909578 NR Description: P0046E05.21 [Oryza sativa (japonica
  misc_feature (1)..(154): Homolog of NCBI NO: 15241306 NR Description: hypothetical protein [Arabidopsis thaliana]
  misc_feature (1)..(154): Homolog of NCBI NO: 34910916 NR Description: OSJNBb0063G05.3 [Oryza sativa (japonica
  misc_feature (1)..(243): Homolog of NCBI NO: 34901136 NR Description: contains EST AU161031(C53313)~similar to Oryza
MVMASLIEAVYLLELERQERRDAAEVAQQWWKPFSYRLAHELVDERDGSVFGAIFEWEDRHLLDRRGASAEERPTGAPSAVIAFRGTLLRAPTIRRDVEDELRLLACNSLRGSARLHGALQALRATIDRFGSENVCLCGHSLGAGFARQVGRMLMASRQQQQPQPQQQQQQQNPAAALEFHLFNAPYLSLPTGVRRVVRTADCLLKTVRTGVAAVGRWHGKALKNVAYANCVLGYTRLDSDGRKLFE

SEQ ID NO: 63630 - DNA, 1135 bp, Triticum aestivum
  misc_feature (1)..(1135): Ceres Seq. ID no. 13597171
atttacctcgtcaggtcctcccaacaccataacttagcaggtaggttcgcttagacttcagccgaggtttcttcatcagccaagcccaagcccaatcggattagggaagcgtacttcgactccggccggagtgagggataggaaggaggagggggcttcagccgagacccaagggagaaagatctcacatcagataggcaactgcagcagtagagttcaacaagccgaaggggaaatggcaattggacagactatgccgaaggggtctctcgccaccagcttgagcttcccaagcagcggcagcacaaggatcctggggaggaagagggtcgctgtttctccggctccaagcccctcaggcccgcactccccggtgcggactctgcgcaagcagcgcagcattaggttccacatggatgacaccatctgccttcttgaatcgctgcctcaagatgtcttggttaaagtcctgtgcaaggtgaaccacagcgacctgaggcagctcctcctggtgtcgaagccagtcagcgaagcaacagtggttgctaaggagctgcatttcgccttcgcgacgccgtcgaaggcctccacggacggcgaggaggaagatgatggccccggggcgcccaagcaacacagggttgcacggtcgcgctgccggggcatgaatttggcaagtgtcgccgtcaatctgtcggagtcgttcagcagcttgatgtcagaggtgtaggtgtacataccacggcacgaattttcccgcttgtacttgtccatcggagcgctcttttttcttcataggccacgtcgaacagaaacactttagttagtgatatatgtagtgatcatcatatgtgttagtagtaagttatatatggtcattcttcaatgctgcgattgaagaggacacgctgctttatttctgtgtatgtaatagtataagttatatgtaagcgtcatgagtgttggagctcattagaagagtatttagtgtaagttatatgtaagcgtcatagtgttggaactcagaagagacgtctcttctcactttgtgtatgctgtagtgtacgatctctgtatactcgtgtgcatgggaagtttctcttattaataaaagtaaaatcagtttgtcttgggc

SEQ ID NO: 63631 - protein, 164 aa, Triticum aestivum
  peptide (1)..(164): Ceres Seq. ID no. 13597172
  misc_feature (24)..(116): Homolog of NCBI NO: 18412772 NR Description: F-box protein family [Arabidopsis thaliana]
  misc_feature (10)..(153): Homolog of NCBI NO: 28372904 NR Description: At1g61340 [Arabidopsis thaliana]
  misc_feature (10)..(153): Homolog of NCBI NO: 15219910 NR Description: F-box protein family [Arabidopsis thaliana]
  misc_feature (1)..(153): Homolog of NCBI NO: 18415709 NR Description: F-box protein family [Arabidopsis thaliana]
  misc_feature (1)..(153): Homolog of NCBI NO: 7485710 NR Description: hypothetical protein F18E5.130 - Arabidopsis
  misc_feature (1)..(164): Homolog of NCBI NO: 34393368 NR Description: unknown protein [Oryza sativa (japonica
MAIGQTMPKGSLATSLSFPSSGSTRILGRKRVAVSPAPSPSGPHSPVRTLRKQRSIRFHMDDTICLLESLPQDVLVKVLCKVNHSDLRQLLLVSKPVSEATVVAKELHFAFATPSKASTDGEEEDDGPGAPKQHRVARSRCRGMNLASVAVNLSESFSSLMSEV

SEQ ID NO: 63632 - protein, 158 aa, Triticum aestivum
  peptide (1)..(158): Ceres Seq. ID no. 13597173
  misc_feature (18)..(110): Homolog of NCBI NO: 18412772 NR Description: F-box protein family [Arabidopsis thaliana]
  misc_feature (4)..(147): Homolog of NCBI NO: 28372904 NR Description: At1g61340 [Arabidopsis thaliana]
  misc_feature (4)..(147): Homolog of NCBI NO: 15219910 NR Description: F-box protein family [Arabidopsis thaliana]
  misc_feature (1)..(147): Homolog of NCBI NO: 18415709 NR Description: F-box protein family [Arabidopsis thaliana]
  misc_feature (1)..(147): Homolog of NCBI NO: 7485710 NR Description: hypothetical protein F18E5.130 - Arabidopsis
  misc_feature (1)..(158): Homolog of NCBI NO: 34393368 NR Description: unknown protein [Oryza sativa (japonica
MPKGSLATSLSFPSSGSTRILGRKRVAVSPAPSPSGPHSPVRTLRKQRSIRFHMDDTICLLESLPQDVLVKVLCKVNHSDLRQLLLVSKPVSEATVVAKELHFAFATPSKASTDGEEEDDGPGAPKQHRVARSRCRGMNLASVAVNLSESFSSLMSEV

SEQ ID NO: 63633 - protein, 105 aa, Triticum aestivum
  peptide (1)..(105): Ceres Seq. ID no. 13597174
  misc_feature (1)..(57): Homolog of NCBI NO: 18412772 NR Description: F-box protein family [Arabidopsis thaliana]
  misc_feature (1)..(94): Homolog of NCBI NO: 28372904 NR Description: At1g61340 [Arabidopsis thaliana]
  misc_feature (1)..(94): Homolog of NCBI NO: 15219910 NR Description: F-box protein family [Arabidopsis thaliana]
  misc_feature (1)..(94): Homolog of NCBI NO: 18415709 NR Description: F-box protein family [Arabidopsis thaliana]
  misc_feature (1)..(94): Homolog of NCBI NO: 7485710 NR Description: hypothetical protein F18E5.130 - Arabidopsis
  misc_feature (1)..(105): Homolog of NCBI NO: 34393368 NR Description: unknown protein [Oryza sativa (japonica
MDDTICLLESLPQDVLVKVLCKVNHSDLRQLLLVSKPVSEATVVAKELHFAFATPSKASTDGEEEDDGPGAPKQHRVARSRCRGMNLASVAVNLSESFSSLMSEV

SEQ ID NO: 63634 - DNA, 1357 bp, Triticum aestivum
  misc_feature (1)..(1357): Ceres Seq. ID no. 12616439
ccgttttagctgtagcaggagggagaaaattccggctccaccgtgtcccattcgcattcccccctcgccagcttccagaaaccccccgttcgttcgttcgtccgttccttccttcgattcgcaggcggttcgcgagcgatggcggacgccagcccgcaggcggagaggccgaggctgaggcgcctggagttcgtgcacgtggtggcggtgcaggcggccgtgtgcatcgcggcgctctacgcgctcgccagggaccactccggctcgctccgccccagagtcgacgccgtcgagtccgccgtcaggcgcgtcgccggccccgtcgcccgccgcttccacggcgtccccctccacgtcctcgccttcgtcgaccgcaaggtggacgacgcggtgcaggagctgggccggcacctcccgccggcggtgaagtccgcgtcggcgaaggcgtgccacgcggtccacgccgtgccggagctggccagggagattgccgacggggcgaggcggtccggcgtgaagggcgtggccaaggacgtgtacggcatggtccagccggtggccaagggcctctacgtgcgctgcgagccggtggccaaggacctctacgtgcgctacgagccggcggccgagcacctcgccgtctccgcctggcgctcgctcaacgggctgccggtgttcccgcaggtggcgcacatcgtcgtgcccaccgccgcctactggtgcgagaagtacaacagggtgatctcgttcgcggccgggcgtgggttccccggcgcacggttcctccccggcatccccatcgagcgcatcgccaaggcgttcgggccgagctcggcaggcgagcgctcgccggttgccaagccgacggaacctgatgcccagacttccaaggagcgctcggcggatgccaagccgacgggacttgatgcccagacttccgaggagcgctcaccggatgccaagcctatgggacttgatgcgcagaccgcggaggagagctcgtctgatgccaagcctgtgggacctgatgcgcagaccggggaggagagctcgccggatgccaagcctgtggaatctgacgcccatgccgccggggagagccagccggaggcggccaagactatggatcttggggcacaggcctaggtgtgcctctaatgataatgatgttgtactagctactatgcttttgtgtggtgcgcgtctctaatgttctccgtgcttttgtacaaaagttgcttgatgtcgccttcgtcgacttgatccaatgcaattgggttcgtccttctatggattcgcgagttcgtctctgtggactgtggccactagttaagcactgttttggttttggtgcgtc

SEQ ID NO: 63635 - protein, 335 aa, Triticum aestivum
  peptide (1)..(335): Ceres Seq. ID no. 12616440
  misc_feature (7)..(232): Pfam Name: Rubber elongation factor protein (REF) Pfam Description: Rubber elongation factor protein (REF)
  misc_feature (143)..(225): Homolog of NCBI NO: 15227131 NR Description: unknown protein; protein id: At2g47780.1
  misc_feature (95)..(245): Homolog of NCBI NO: 15214353 NR Description: Hypothetical protein from PAC P0001A07
  misc_feature (95)..(228): Homolog of NCBI NO: 15214302 NR Description: Stress-related protein (PvSRP)
  misc_feature (8)..(153): Homolog of NCBI NO: 15214353 NR Description: Hypothetical protein from PAC P0001A07
  misc_feature (65)..(233): Homolog of NCBI NO: 37622210 NR Description: small rubber particle protein [Hevea brasiliensis]
  misc_feature (1)..(234): Homolog of NCBI NO: 33332330 NR Description: rubber synthesis protein [Parthenium argentatum]
  misc_feature (9)..(239): Homolog of NCBI NO: 15230002 NR Description: stress related protein, putative
  misc_feature (9)..(233): Homolog of NCBI NO: 15214303 NR Description: Stress-related protein
  misc_feature (1)..(247): Homolog of NCBI NO: 29367349 NR Description: stress-related protein-like protein
  misc_feature (1)..(247): Homolog of NCBI NO: 22831130 NR Description: putative stress-related protein
MADASPQAERPRLRRLEFVHVVAVQAAVCIAALYALARDHSGSLRPRVDAVESAVRRVAGPVARRFHGVPLHVLAFVDRKVDDAVQELGRHLPPAVKSASAKACHAVHAVPELAREIADGARRSGVKGVAKDVYGMVQPVAKGLYVRCEPVAKDLYVRYEPAAEHLAVSAWRSLNGLPVFPQVAHIVVPTAAYWCEKYNRVISFAAGRGFPGARFLPGIPIERIAKAFGPSSAGERSPVAKPTEPDAQTSKERSADAKPTGLDAQTSEERSPDAKPMGLDAQTAEESSSDAKPVGPDAQTGEESSPDAKPVESDAHAAGESQPEAAKTMDLGAQA

SEQ ID NO: 63636 - protein, 290 aa, Triticum aestivum
  peptide (1)..(290): Ceres Seq. ID no. 12616441
  misc_feature (60)..(231): Pfam Name: Herpesvirus UL87 family Pfam Description: Herpesvirus UL87 family
  misc_feature (42)..(290): Homolog of NCBI NO: 22959520 NR Description: hypothetical protein [Rhodobacter sphaeroides]
  misc_feature (4)..(288): Homolog of NCBI NO: 23018055 NR Description: hypothetical protein [Thermobifida fusca]
  misc_feature (67)..(290): Homolog of NCBI NO: 14422327 NR Description: putative DNA-binding protein [Bifidobacterium
  misc_feature (22)..(282): Homolog of NCBI NO: 29247944 NR Description: GLP_26_54603_52153 [Giardia lamblia ATCC 50803]
VLAVAGGRKFRLHRVPFAFPPRQLPETPRSFVRPFLPSIRRRFASDGGRQPAGGEAEAEAPGVRARGGGAGGRVHRGALRARQGPLRLAPPQSRRRRVRRQARRRPRRPPLPRRPPPRPRLRRPQGGRRGAGAGPAPPAGGEVRVGEGVPRGPRRAGAGQGDCRRGEAVRREGRGQGRVRHGPAGGQGPLRALRAGGQGPLRALRAGGRAPRRLRLALAQRAAGVPAGGAHRRAHRRLLVREVQQGDLVRGRAWVPRRTVPPRHPHRAHRQGVRAELGRRALAGCQADGT

SEQ ID NO: 63637 - protein, 200 aa, Triticum aestivum
  peptide (1)..(200): Ceres Seq. ID no. 12616442
  misc_feature (1)..(97): Pfam Name: Rubber elongation factor protein (REF) Pfam Description: Rubber elongation factor protein (REF)
  misc_feature (8)..(90): Homolog of NCBI NO: 15227131 NR Description: unknown protein; protein id: At2g47780.1
  misc_feature (1)..(110): Homolog of NCBI NO: 15214353 NR Description: Hypothetical protein from PAC P0001A07
  misc_feature (1)..(93): Homolog of NCBI NO: 15214302 NR Description: Stress-related protein (PvSRP)
  misc_feature (1)..(18): Homolog of NCBI NO: 15214353 NR Description: Hypothetical protein from PAC P0001A07
  misc_feature (1)..(98): Homolog of NCBI NO: 37622210 NR Description: small rubber particle protein [Hevea brasiliensis]
  misc_feature (1)..(99): Homolog of NCBI NO: 33332330 NR Description: rubber synthesis protein [Parthenium argentatum]
  misc_feature (1)..(104): Homolog of NCBI NO: 15230002 NR Description: stress related protein, putative
  misc_feature (1)..(98): Homolog of NCBI NO: 15214303 NR Description: Stress-related protein
  misc_feature (1)..(112): Homolog of NCBI NO: 29367349 NR Description: stress-related protein-like protein
  misc_feature (1)..(112): Homolog of NCBI NO: 22831130 NR Description: putative stress-related protein
MVQPVAKGLYVRCEPVAKDLYVRYEPAAEHLAVSAWRSLNGLPVFPQVAHIVVPTAAYWCEKYNRVISFAAGRGFPGARFLPGIPIERIAKAFGPSSAGERSPVAKPTEPDAQTSKERSADAKPTGLDAQTSEERSPDAKPMGLDAQTAEESSSDAKPVGPDAQTGEESSPDAKPVESDAHAAGESQPEAAKTMDLGAQA

SEQ ID NO: 63638 - DNA, 1378 bp, Triticum aestivum
  misc_feature (1)..(1378): Ceres Seq. ID no. 13597361
aacacaataccatcatcgtccttcctctcatcccctctctctcccacagagacacatcactctctctctctcccatctccatctctgtcagaaggggaggccagagggggacggagaggggcaatggagctggacgagcaggccttcttggaggagctcttctcgctgaggagggacgccacggccgcgtgggagtgcaatgccatgggggacttcttctccccggcctgtgctggcgccgccgccatggactgcttccaggagcggcaccagcccaccgtcagcgtgctgcccaccttcaccgcctccttcgaccacccacagcagcaggcgggggtgaccgcggctggggggttcgactgcctcagcgaggtctacggcggcggccccttccccaatgccgtcggcggcgggtacggcgagatggggtttctcgccgcgatggaccccaaggcggcggcggcggcggctctggtggaggggggcggcctcggcgcctgcaaggtggagcccgggctggcggcggtggacggcggcgcgttcgggtcgggtcagatggcggccgtcccggcgccggcgtcgaggaagaagcgggtggagggcatgccgtccaagaacctgatggcggagcggcgccgccgcaagcgcctcaacgaccgcctctccatgctccgctccgtcgtgcccaagatcagcaagatggacaggacgtcgatcctgggggacaccatcgactacatgaaggagctgctggagaggatccggcggctgcaggaggagatggaggagccgcatgccggtccggcggcggcgccgctgctgagcgtgttccgggagctcaaccccaacgagatgctcgccaggaacacccccaagttcgaggtggagcgcaaggaggaggacacccgggtggagatctactgcgcggccaagccggggctgctgctgtcgacggtgagcacgctcgacacgctgggcctcgacatccagcagtgcgtcgtcagctgcttcaacgacttcgccatgcacgcctcctgctccgagatgcagagggagatgatcagcgcggacgccatcaagcaggagctgttcaagaacgccggctacggagggggctgcttgtgagcaagaagcaccaccaccagcaccaccatgagtccatgaccaccaccaccagcaggaggaggaaggataataaagtagaagtagctgtagcaggcagtagaattagcagttagcactagcaccagcagccagcagtagcgagaaggggccggaagatctgggcggaggccctttatcgcaaatcataaccatgtcgccgtgatcaaaattctctcctgttagcaacaaagatcggcgggcgcctttccgatgc

SEQ ID NO: 63639 - protein, 411 aa, Triticum aestivum
  peptide (1)..(411): Ceres Seq. ID no. 13597362
  misc_feature (148)..(319): Homolog of NCBI NO: 121632 NR Description: GLYCINE-RICH CELL WALL STRUCTURAL PROTEIN 1.8
  misc_feature (126)..(304): Homolog of NCBI NO: 2388805 NR Description: attachment region binding protein [Gallus gallus]
  misc_feature (152)..(305): Homolog of NCBI NO: 17221667 NR Description: circumsporozoite protein [Plasmodium vinckei
  misc_feature (142)..(319): Homolog of NCBI NO: 121632 NR Description: GLYCINE-RICH CELL WALL STRUCTURAL PROTEIN 1.8
  misc_feature (145)..(324): Homolog of NCBI NO: 17540706 NR Description: Cuticle collagen family member (33.8 kD)
  misc_feature (142)..(325): Homolog of NCBI NO: 121632 NR Description: GLYCINE-RICH CELL WALL STRUCTURAL PROTEIN 1.8
  misc_feature (136)..(329): Homolog of NCBI NO: 117580 NR Description: Circumsporozoite protein precursor (CS)
  misc_feature (136)..(329): Homolog of NCBI NO: 72390 NR Description: circumsporozoite protein precursor - Plasmodium
HNTIIVLPLIPSLSHRDTSLSLSPISISVRRGGQRGTERGNGAGRAGLLGGALLAEEGRHGRVGVQCHGGLLLPGLCWRRRHGLLPGAAPAHRQRAAHLHRLLRPPTAAGGGDRGWGVRLPQRGLRRRPLPQCRRRRVRRDGVSRRDGPQGGGGGGSGGGGRPRRLQGGARAGGGGRRRVRVGSDGGRPGAGVEEEAGGGHAVQEPDGGAAPPQAPQRPPLHAPLRRAQDQQDGQDVDPGGHHRLHEGAAGEDPAAAGGDGGAACRSGGGAAAERVPGAQPQRDARQEHPQVRGGAQGGGHPGGDLLRGQAGAAAVDGEHARHAGPRHPAVRRQLLQRLRHARLLLRDAEGDDQRGRHQAGAVQERRLRRGLLVSKKHHHQHHHESMTTTTSRRRKDNKVEVAVAGSRISS

SEQ ID NO: 63640 - protein, 374 aa, Triticum aestivum
  peptide (1)..(374): Ceres Seq. ID no. 13597363
  misc_feature (203)..(251): Pfam Name: Helix-loop-helix DNA-binding domain Pfam Description: Helix-loop-helix DNA-binding domain
  misc_feature (183)..(282): Homolog of NCBI NO: 22331357 NR Description: bHLH protein family [Arabidopsis thaliana]
  misc_feature (194)..(371): Homolog of NCBI NO: 15222101 NR Description: bHLH protein [Arabidopsis thaliana]
  misc_feature (194)..(371): Homolog of NCBI NO: 25513489 NR Description: F13K23.12 protein - Arabidopsis thaliana
  misc_feature (120)..(346): Homolog of NCBI NO: 37536566 NR Description: hypothetical protein [Oryza sativa (japonica
  misc_feature (197)..(374): Homolog of NCBI NO: 20127062 NR Description: putative bHLH transcription factor [Arabidopsis
  misc_feature (197)..(374): Homolog of NCBI NO: 15238199 NR Description: bHLH protein [Arabidopsis thaliana]
  misc_feature (195)..(374): Homolog of NCBI NO: 21537346 NR Description: unknown [Arabidopsis thaliana]
  misc_feature (195)..(374): Homolog of NCBI NO: 18424973 NR Description: bHLH protein [Arabidopsis thaliana]
  misc_feature (42)..(65): Homolog of NCBI NO: 22758263 NR Description: Putative bHLH transcription protein
  misc_feature (119)..(374): Homolog of NCBI NO: 22758263 NR Description: Putative bHLH transcription protein
NTIPSSSFLSSPLSPTETHHSLSLPSPSLSEGEARGGRRGAMELDEQAFLEELFSLRRDATAAWECNAMGDFFSPACAGAAAMDCFQERHQPTVSVLPTFTASFDHPQQQAGVTAAGGFDCLSEVYGGGPFPNAVGGGYGEMGFLAAMDPKAAAAAALVEGGGLGACKVEPGLAAVDGGAFGSGQMAAVPAPASRKKRVEGMPSKNLMAERRRRKRLNDRLSMLRSVVPKISKMDRTSILGDTIDYMKELLERIRRLQEEMEEPHAGPAAAPLLSVFRELNPNEMLARNTPKFEVERKEEDTRVEIYCAAKPGLLLSTVSTLDTLGLDIQQCVVSCFNDFAMHASCSEMQREMISADAIKQELFKNAGYGGGCL

SEQ ID NO: 63641 - protein, 333 aa, Triticum aestivum
  peptide (1)..(333): Ceres Seq. ID no. 13597364
  misc_feature (162)..(210): Pfam Name: Helix-loop-helix DNA-binding domain Pfam Description: Helix-loop-helix DNA-binding domain
  misc_feature (142)..(241): Homolog of NCBI NO: 22331357 NR Description: bHLH protein family [Arabidopsis thaliana]
  misc_feature (153)..(330): Homolog of NCBI NO: 15222101 NR Description: bHLH protein [Arabidopsis thaliana]
  misc_feature (153)..(330): Homolog of NCBI NO: 25513489 NR Description: F13K23.12 protein - Arabidopsis thaliana
  misc_feature (79)..(305): Homolog of NCBI NO: 37536566 NR Description: hypothetical protein [Oryza sativa (japonica
  misc_feature (156)..(333): Homolog of NCBI NO: 20127062 NR Description: putative bHLH transcription factor [Arabidopsis
  misc_feature (156)..(333): Homolog of NCBI NO: 15238199 NR Description: bHLH protein [Arabidopsis thaliana]
  misc_feature (154)..(333): Homolog of NCBI NO: 21537346 NR Description: unknown [Arabidopsis thaliana]
  misc_feature (154)..(333): Homolog of NCBI NO: 18424973 NR Description: bHLH protein [Arabidopsis thaliana]
  misc_feature (1)..(24): Homolog of NCBI NO: 22758263 NR Description: Putative bHLH transcription protein
  misc_feature (78)..(333): Homolog of NCBI NO: 22758263 NR Description: Putative bHLH transcription protein
MELDEQAFLEELFSLRRDATAAWECNAMGDFFSPACAGAAAMDCFQERHQPTVSVLPTFTASFDHPQQQAGVTAAGGFDCLSEVYGGGPFPNAVGGGYGEMGFLAAMDPKAAAAAALVEGGGLGACKVEPGLAAVDGGAFGSGQMAAVPAPASRKKRVEGMPSKNLMAERRRRKRLNDRLSMLRSVVPKISKMDRTSILGDTIDYMKELLERIRRLQEEMEEPHAGPAAAPLLSVFRELNPNEMLARNTPKFEVERKEEDTRVEIYCAAKPGLLLSTVSTLDTLGLDIQQCVVSCFNDFAMHASCSEMQREMISADAIKQELFKNAGYGGGCL

SEQ ID NO: 63642 - DNA, 1343 bp, Triticum aestivum
  misc_feature (1)..(1343): Ceres Seq. ID no. 12625452
aaaaaaagagagagagaaagccaaggcaagccgcggcgagcagaagcggtgggcgcgcgacggcggcggcggttggccctctcgagtcatggtgctacccgccaacctctcgcgcgacgtcggagctcactcgtgctctgcgcaggacggccagggggaagcggggccgccgcgcccgcgcagaccgcccgcgttctacagctccgtgttcgcacagatcgaagaggtcgggtgggggcagctagtgagcgccacaggcgatgacggcgtgtcgtgcctcaccttccgcgtcgtggatgagcagcgacggcaacattcactggagatcacactgcccatgaactacccggcatgccctccttcaattgccgcggatgttccttatctccccaaattacagtggtcaaaaagttcaagactgaaggatgttctctgccaattccaagagcacctgaaggtattgcaagattactggtctacaatggatggcattgacaaggccctttgggttgtcgatactacaaagccgacatatgctatgtctcatcgtcgcatagctttgggtgatgattgctatattttactacatgttgatacgcacaagcccaactccttaccagagtgccgcttcctaggcacagatgggaaactggaaaggctgataaagaattggagaaaaaatcgtaagagatggagcgcccacagaaagttccatgaaaacctggcaactgtgttagattttgctctgccgcaacccccttctgtgagcatcaaagatgaccagcaagctgattgtgggatatgttacgccacgcatctgcccgtcgatgacgaacttgggactcagagcgggtgcgcggcggactacaagtgcgaaaaccctagctgcagcagagccttccactccgtgtgcctgagagactggctgcgcaccattactacgacaaggcagtcgttcgatgttctgttcgggaactgcccttactgcagtgagcctgtcgccgtgaagggcaccgacagctgaacccgccttcttcgcatttacaaatcgagatgctgaagttgggttaatgcggaccagtaaaaaggaagagggacgaaataatctaggtcgcctgctgaaggccggtcgtcatgatctagatgtcatcaatggagctgcaaggggtcaaaattcccaattgtttctacgaaattggcgtccacttgtagagatgaaagaagtgtgccagcctaattactgaaaattgatgtctgtcacgcacccttctagattcgggacgaatgcgtagttgctgactggtatacataacagtggtttggatctctgaatgtcaatgcgc

SEQ ID NO: 63643 - protein, 340 aa, Triticum aestivum
  peptide (1)..(340): Ceres Seq. ID no. 12625453
  misc_feature (87)..(329): Homolog of NCBI NO: 24645585 NR Description: CG12812-PA [Drosophila melanogaster]
  misc_feature (175)..(207): Homolog of NCBI NO: 10177332 NR Description: gene_id:MPA24.9~unknown protein [Arabidopsis
  misc_feature (232)..(336): Homolog of NCBI NO: 10177332 NR Description: gene_id:MPA24.9~unknown protein [Arabidopsis
  misc_feature (61)..(336): Homolog of NCBI NO: 12848314 NR Description: unnamed protein product [Mus musculus]
  misc_feature (61)..(340): Homolog of NCBI NO: 34879602 NR Description: similar to PHD finger protein 9
  misc_feature (61)..(336): Homolog of NCBI NO: 13385416 NR Description: proliferation of germ cells protein [Mus
  misc_feature (62)..(336): Homolog of NCBI NO: 8922360 NR Description: hypothetical protein FLJ10335 [Homo sapiens]
  misc_feature (62)..(336): Homolog of NCBI NO: 33416848 NR Description: Unknown (protein for MGC:66144) [Danio rerio]
  misc_feature (132)..(336): Homolog of NCBI NO: 39104597 NR Description: unknown protein [Arabidopsis thaliana]
  misc_feature (132)..(336): Homolog of NCBI NO: 30698155 NR Description: expressed protein [Arabidopsis thaliana]
KKEREKAKASRGEQKRWARDGGGGWPSRVMVLPANLSRDVGAHSCSAQDGQGEAGPPRPRRPPAFYSSVFAQIEEVGWGQLVSATGDDGVSCLTFRVVDEQRRQHSLEITLPMNYPACPPSIAADVPYLPKLQWSKSSRLKDVLCQFQEHLKVLQDYWSTMDGIDKALWVVDTTKPTYAMSHRRIALGDDCYILLHVDTHKPNSLPECRFLGTDGKLERLIKNWRKNRKRWSAHRKFHENLATVLDFALPQPPSVSIKDDQQADCGICYATHLPVDDELGTQSGCAADYKCENPSCSRAFHSVCLRDWLRTITTTRQSFDVLFGNCPYCSEPVAVKGTDS

SEQ ID NO: 63644 - protein, 311 aa, Triticum aestivum
  peptide (1)..(311): Ceres Seq. ID no. 12625454
  misc_feature (58)..(300): Homolog of NCBI NO: 24645585 NR Description: CG12812-PA [Drosophila melanogaster]
  misc_feature (146)..(178): Homolog of NCBI NO: 10177332 NR Description: gene_id:MPA24.9~unknown protein [Arabidopsis
  misc_feature (203)..(307): Homolog of NCBI NO: 10177332 NR Description: gene_id:MPA24.9~unknown protein [Arabidopsis
  misc_feature (32)..(307): Homolog of NCBI NO: 12848314 NR Description: unnamed protein product [Mus musculus]
  misc_feature (32)..(311): Homolog of NCBI NO: 34879602 NR Description: similar to PHD finger protein 9
  misc_feature (32)..(307): Homolog of NCBI NO: 13385416 NR Description: proliferation of germ cells protein [Mus
  misc_feature (33)..(307): Homolog of NCBI NO: 8922360 NR Description: hypothetical protein FLJ10335 [Homo sapiens]
  misc_feature (33)..(307): Homolog of NCBI NO: 33416848 NR Description: Unknown (protein for MGC:66144) [Danio rerio]
  misc_feature (103)..(307): Homolog of NCBI NO: 39104597 NR Description: unknown protein [Arabidopsis thaliana]
  misc_feature (103)..(307): Homolog of NCBI NO: 30698155 NR Description: expressed protein [Arabidopsis thaliana]
MVLPANLSRDVGAHSCSAQDGQGEAGPPRPRRPPAFYSSVFAQIEEVGWGQLVSATGDDGVSCLTFRVVDEQRRQHSLEITLPMNYPACPPSIAADVPYLPKLQWSKSSRLKDVLCQFQEHLKVLQDYWSTMDGIDKALWVVDTTKPTYAMSHRRIALGDDCYILLHVDTHKPNSLPECRFLGTDGKLERLIKNWRKNRKRWSAHRKFHENLATVLDFALPQPPSVSIKDDQQADCGICYATHLPVDDELGTQSGCAADYKCENPSCSRAFHSVCLRDWLRTITTTRQSFDVLFGNCPYCSEPVAVKGTDS

SEQ ID NO: 63645 - protein, 228 aa, Triticum aestivum
  peptide (1)..(228): Ceres Seq. ID no. 12625455
  misc_feature (1)..(217): Homolog of NCBI NO: 24645585 NR Description: CG12812-PA [Drosophila melanogaster]
  misc_feature (63)..(95): Homolog of NCBI NO: 10177332 NR Description: gene_id:MPA24.9~unknown protein [Arabidopsis
  misc_feature (120)..(224): Homolog of NCBI NO: 10177332 NR Description: gene_id:MPA24.9~unknown protein [Arabidopsis
  misc_feature (1)..(224): Homolog of NCBI NO: 12848314 NR Description: unnamed protein product [Mus musculus]
  misc_feature (1)..(228): Homolog of NCBI NO: 34879602 NR Description: similar to PHD finger protein 9
  misc_feature (1)..(224): Homolog of NCBI NO: 13385416 NR Description: proliferation of germ cells protein [Mus
  misc_feature (1)..(224): Homolog of NCBI NO: 8922360 NR Description: hypothetical protein FLJ10335 [Homo sapiens]
  misc_feature (1)..(224): Homolog of NCBI NO: 33416848 NR Description: Unknown (protein for MGC:66144) [Danio rerio]
  misc_feature (20)..(224): Homolog of NCBI NO: 39104597 NR Description: unknown protein [Arabidopsis thaliana]
  misc_feature (20)..(224): Homolog of NCBI NO: 30698155 NR Description: expressed protein [Arabidopsis thaliana]
MNYPACPPSIAADVPYLPKLQWSKSSRLKDVLCQFQEHLKVLQDYWSTMDGIDKALWVVDTTKPTYAMSHRRIALGDDCYILLHVDTHKPNSLPECRFLGTDGKLERLIKNWRKNRKRWSAHRKFHENLATVLDFALPQPPSVSIKDDQQADCGICYATHLPVDDELGTQSGCAADYKCENPSCSRAFHSVCLRDWLRTITTTRQSFDVLFGNCPYCSEPVAVKGTDS

SEQ ID NO: 63646 - DNA, 681 bp, Triticum aestivum
  misc_feature (1)..(681): Ceres Seq. ID no. 13655489
atctctgtccatacggagtgtcgggctttgaatagtgcaaactttttgtgctcacacactattctagatagacaacctccatggctgctgctcctgctactcaacctcgtgtcatggtgttacccttccctgcacagggccatgtcatcccgctaatggagctgtctcgcaagctcgccgggcacggcgtcgaggtggacttcgtgaacaccgagttcaaccacgacctcgtcatggaagcaatggcagagaagggagcaattcctgatgggatccacatgctcaccgttccggacggcctgggccccggagacgaccacgcggacatcggcaagtttgtcaaggacctgcccgccgccatgtccggccgcctggaggagatgatccggtcgaggaagatcaagtgggtgatcgtggatgtgtccatgagctgggcactgcaggtggccaccacggcgggtgcccgtgttgcctcgttctcgacctactccgcggccgtgtttgctctcaggatgaacctccccaaattgatacaggacggtgttcttgatgaaagtggggatgtgaaggggcaggagcagatcaagatgatgccgcccatcgacgcgtcggagatcccctnngtcagcctggccagcaccagcgcccctgagaggcgcagaaacaatatcgagaacgtcc

SEQ ID NO: 63647 - protein, 200 aa, Triticum aestivum
  peptide (1)..(200): Ceres Seq. ID no. 13655490
  misc_feature (9)..(199): Pfam Name: UDP-glucoronosyl and UDP-glucosyl transferase Pfam Description: UDP-glucoronosyl and UDP-glucosyl transferase
  misc_feature (11)..(177): Homolog of NCBI NO: 13236659 NR Description: putative glucosyltransferase [Oryza sativa]
  misc_feature (11)..(177): Homolog of NCBI NO: 13236656 NR Description: putative glucosyltransferase [Oryza sativa]
  misc_feature (8)..(178): Homolog of NCBI NO: 13236658 NR Description: putative glucosyltransferase [Oryza sativa]
  misc_feature (9)..(178): Homolog of NCBI NO: 21326125 NR Description: putative glucosyl transferase [Sorghum bicolor]
  misc_feature (9)..(180): Homolog of NCBI NO: 21326124 NR Description: putative glucosyl transferase [Sorghum bicolor]
  misc_feature (1)..(199): Homolog of NCBI NO: 21326126 NR Description: putative glucosyl transferase [Sorghum bicolor]
  misc_feature (5)..(186): Homolog of NCBI NO: 21326127 NR Description: putative glucosyl transferase [Sorghum bicolor]
  misc_feature (1)..(199): Homolog of NCBI NO: 13236653 NR Description: putative glucosyltransferase [Oryza sativa]
  misc_feature (1)..(199): Homolog of NCBI NO: 21326128 NR Description: putative glucosyl transferase [Sorghum bicolor]
  misc_feature (4)..(199): Homolog of NCBI NO: 13236650 NR Description: putative glucosyltransferase [Oryza sativa]
  misc_feature (181)..(181): Xaa is any aa, unknown or other
MAAAPATQPRVMVLPFPAQGHVIPLMELSRKLAGHGVEVDFVNTEFNHDLVMEAMAEKGAIPDGIHMLTVPDGLGPGDDHADIGKFVKDLPAAMSGRLEEMIRSRKIKWVIVDVSMSWALQVATTAGARVASFSTYSAAVFALRMNLPKLIQDGVLDESGDVKGQEQIKMMPPIDASEIPXVSLASTSAPERRRNNIENV

SEQ ID NO: 63648 - protein, 189 aa, Triticum aestivum
  peptide (1)..(189): Ceres Seq. ID no. 13655491
  misc_feature (1)..(188): Pfam Name: UDP-glucoronosyl and UDP-glucosyl transferase Pfam Description: UDP-glucoronosyl and UDP-glucosyl transferase
  misc_feature (1)..(166): Homolog of NCBI NO: 13236659 NR Description: putative glucosyltransferase [Oryza sativa]
  misc_feature (1)..(166): Homolog of NCBI NO: 13236656 NR Description: putative glucosyltransferase [Oryza sativa]
  misc_feature (1)..(167): Homolog of NCBI NO: 13236658 NR Description: putative glucosyltransferase [Oryza sativa]
  misc_feature (1)..(167): Homolog of NCBI NO: 21326125 NR Description: putative glucosyl transferase [Sorghum bicolor]
  misc_feature (1)..(169): Homolog of NCBI NO: 21326124 NR Description: putative glucosyl transferase [Sorghum bicolor]
  misc_feature (1)..(188): Homolog of NCBI NO: 21326126 NR Description: putative glucosyl transferase [Sorghum bicolor]
  misc_feature (1)..(175): Homolog of NCBI NO: 21326127 NR Description: putative glucosyl transferase [Sorghum bicolor]
  misc_feature (1)..(188): Homolog of NCBI NO: 13236653 NR Description: putative glucosyltransferase [Oryza sativa]
  misc_feature (1)..(188): Homolog of NCBI NO: 21326128 NR Description: putative glucosyl transferase [Sorghum bicolor]
  misc_feature (1)..(188): Homolog of NCBI NO: 13236650 NR Description: putative glucosyltransferase [Oryza sativa]
  misc_feature (170)..(170): Xaa is any aa, unknown or other
MVLPFPAQGHVIPLMELSRKLAGHGVEVDFVNTEFNHDLVMEAMAEKGAIPDGIHMLTVPDGLGPGDDHADIGKFVKDLPAAMSGRLEEMIRSRKIKWVIVDVSMSWALQVATTAGARVASFSTYSAAVFALRMNLPKLIQDGVLDESGDVKGQEQIKMMPPIDASEIPXVSLASTSAPERRRNNIENV

SEQ ID NO: 63649 - protein, 175 aa, Triticum aestivum
  peptide (1)..(175): Ceres Seq. ID no. 13655492
  misc_feature (1)..(174): Pfam Name: UDP-glucoronosyl and UDP-glucosyl transferase Pfam Description: UDP-glucoronosyl and UDP-glucosyl transferase
  misc_feature (1)..(152): Homolog of NCBI NO: 13236659 NR Description: putative glucosyltransferase [Oryza sativa]
  misc_feature (1)..(152): Homolog of NCBI NO: 13236656 NR Description: putative glucosyltransferase [Oryza sativa]
  misc_feature (1)..(153): Homolog of NCBI NO: 13236658 NR Description: putative glucosyltransferase [Oryza sativa]
  misc_feature (1)..(153): Homolog of NCBI NO: 21326125 NR Description: putative glucosyl transferase [Sorghum bicolor]
  misc_feature (1)..(155): Homolog of NCBI NO: 21326124 NR Description: putative glucosyl transferase [Sorghum bicolor]
  misc_feature (1)..(174): Homolog of NCBI NO: 21326126 NR Description: putative glucosyl transferase [Sorghum bicolor]
  misc_feature (1)..(161): Homolog of NCBI NO: 21326127 NR Description: putative glucosyl transferase [Sorghum bicolor]
  misc_feature (1)..(174): Homolog of NCBI NO: 13236653 NR Description: putative glucosyltransferase [Oryza sativa]
  misc_feature (1)..(174): Homolog of NCBI NO: 21326128 NR Description: putative glucosyl transferase [Sorghum bicolor]
  misc_feature (1)..(174): Homolog of NCBI NO: 13236650 NR Description: putative glucosyltransferase [Oryza sativa]
  misc_feature (156)..(156): Xaa is any aa, unknown or other
MELSRKLAGHGVEVDFVNTEFNHDLVMEAMAEKGAIPDGIHMLTVPDGLGPGDDHADIGKFVKDLPAAMSGRLEEMIRSRKIKWVIVDVSMSWALQVATTAGARVASFSTYSAAVFALRMNLPKLIQDGVLDESGDVKGQEQIKMMPPIDASEIPXVSLASTSAPERRRNNIENV

SEQ ID NO: 63650 - DNA, 1277 bp, Triticum aestivum
  misc_feature (1)..(1277): Ceres Seq. ID no. 15224731
aaggacacgacgaccaaccaagggagaagagaagagaagagaagagaagggagagggcggcgacgagggcgcacgacggcacgccgaacgctctcgcaatgcatcacgccaagaccgactcggaggtgacgtcgagcatggcgccgtcgtcgccttcgcgggcgccctactacgtgcagtcgcccagccacgacgacggcgagaaccactccaagacggccgcctcctccttccactcctccccggccgcctccccgccgcgctcgctcgggaaccactccagggagtcctcctcctcgcgcttctccggcaaggtcccctccgccggctcgtcccgccgcggggtcgccggcggaggcgggaagcgcggcgggggtggcggcggcggcgaggcggcgcgccgcagcccctggatgaaggaggcggccatcgaggaggaggggctcctcatggaggacgacgacgacgccgacggccgcgccggcggcttctcggcgctccccaagaaggtgcgctacgggctggccttcgtcggcgccttcctcgtgctcttcaccttcttcgccctcatcctctggggcgccagccgcaaccagaagcccgttctctccgtcaacagcgtcacgttccacagcttcgtgatccaggcggggacggacgcgtcgctggtgcccacggagatgtccacgatcaacgccacggtgaggctcacgttccgcaacacggggagcttcttcggcgtgcacgtcacggcgcagcccgtcacgctctactactcgcagctcctcatggcatccggcgacatgaagtacttctaccagcctcggaagagccagcgcaaggtggcggtgacggtggtgggcaacaaggtgccgctgtacggcggcggcgcggggctgagcagcacgccggggcccaagggcgtgcccccgccgccggtgccgctgcagctgacgctgaggatcagggcgcgggcgctggtgctgggcaagctggtgaagcccaggttctacaacaacgtgcagtgcagcgtccgcctggacacgaccaagctgggcaaggccatctccctcaagaaatcatgcacccacgtctagccaccctgccagacctttcttcttgttgttgctgcatatgttatgtccgtaatgtaatactcctacgtggattactgccattttgaagggagaaagcatcatgtctgttgtgtatgtacggatgaattttgtcgcctgcgtcgggatggaatgaatgaatgatcacgcgtttcttgccac

SEQ ID NO: 63651 - protein, 393 aa, Triticum aestivum
  peptide (1)..(393): Ceres Seq. ID no. 15224732
  misc_feature (197)..(366): Pfam Name: Phosphate transporter family Pfam Description: Phosphate transporter family
RTRRPTKGEEKRREEKGEGGDEGARRHAERSRNASRQDRLGGDVEHGAVVAFAGALLRAVAQPRRRREPLQDGRLLLPLLPGRLPAALAREPLQGVLLLALLRQGPLRRLVPPRGRRRRREARRGWRRRRGGAPQPLDEGGGHRGGGAPHGGRRRRRRPRRRLLGAPQEGALRAGLRRRLPRALHLLRPHPLGRQPQPEARSLRQQRHVPQLRDPGGDGRVAGAHGDVHDQRHGEAHVPQHGELLRRARHGAARHALLLAAPHGIRRHEVLLPASEEPAQGGGDGGGQQGAAVRRRRGAEQHAGAQGRAPAAGAAAADAEDQGAGAGAGQAGEAQVLQQRAVQRPPGHDQAGQGHLPQEIMHPRLATLPDLSSCCCCICYVRNVILLRGLLPF

SEQ ID NO: 63652 - protein, 364 aa, Triticum aestivum
  peptide (1)..(364): Ceres Seq. ID no. 15224733
  misc_feature (44)..(363): Homolog of NCBI NO: 34904260 NR Description: P0452F10.18 [Oryza sativa (japonica
  misc_feature (309)..(362): Homolog of NCBI NO: 28416677 NR Description: At5g42860 [Arabidopsis thaliana]
  misc_feature (69)..(311): Homolog of NCBI NO: 28416677 NR Description: At5g42860 [Arabidopsis thaliana]
  misc_feature (309)..(362): Homolog of NCBI NO: 15239097 NR Description: expressed protein [Arabidopsis thaliana]
  misc_feature (69)..(311): Homolog of NCBI NO: 15239097 NR Description: expressed protein [Arabidopsis thaliana]
  misc_feature (35)..(364): Homolog of NCBI NO: 38345517 NR Description: OSJNBa0039K24.20 [Oryza sativa (japonica
  misc_feature (35)..(364): Homolog of NCBI NO: 5777621 NR Description: CAA30379.1 protein [Oryza sativa]
  misc_feature (303)..(362): Homolog of NCBI NO: 18401556 NR Description: expressed protein [Arabidopsis thaliana]
  misc_feature (35)..(315): Homolog of NCBI NO: 18401556 NR Description: expressed protein [Arabidopsis thaliana]
  misc_feature (33)..(364): Homolog of NCBI NO: 32488073 NR Description: OSJNBa0084A10.1 [Oryza sativa (japonica
GHDDQPREKRREEKRRERAATRAHDGTPNALAMHHAKTDSEVTSSMAPSSPSRAPYYVQSPSHDDGENHSKTAASSFHSSPAASPPRSLGNHSRESSSSRFSGKVPSAGSSRRGVAGGGGKRGGGGGGGEAARRSPWMKEAAIEEEGLLMEDDDDADGRAGGFSALPKKVRYGLAFVGAFLVLFTFFALILWGASRNQKPVLSVNSVTFHSFVIQAGTDASLVPTEMSTINATVRLTFRNTGSFFGVHVTAQPVTLYYSQLLMASGDMKYFYQPRKSQRKVAVTVVGNKVPLYGGGAGLSSTPGPKGVPPPPVPLQLTLRIRARALVLGKLVKPRFYNNVQCSVRLDTTKLGKAISLKKSCTHV

SEQ ID NO: 63653 - protein, 332 aa, Triticum aestivum
  peptide (1)..(332): Ceres Seq. ID no. 15224734
  misc_feature (12)..(331): Homolog of NCBI NO: 34904260 NR Description: P0452F10.18 [Oryza sativa (japonica
  misc_feature (277)..(330): Homolog of NCBI NO: 28416677 NR Description: At5g42860 [Arabidopsis thaliana]
  misc_feature (37)..(279): Homolog of NCBI NO: 28416677 NR Description: At5g42860 [Arabidopsis thaliana]
  misc_feature (277)..(330): Homolog of NCBI NO: 15239097 NR Description: expressed protein [Arabidopsis thaliana]
  misc_feature (37)..(279): Homolog of NCBI NO: 15239097 NR Description: expressed protein [Arabidopsis thaliana]
  misc_feature (3)..(332): Homolog of NCBI NO: 38345517 NR Description: OSJNBa0039K24.20 [Oryza sativa (japonica
  misc_feature (3)..(332): Homolog of NCBI NO: 5777621 NR Description: CAA30379.1 protein [Oryza sativa]
  misc_feature (271)..(330): Homolog of NCBI NO: 18401556 NR Description: expressed protein [Arabidopsis thaliana]
  misc_feature (3)..(283): Homolog of NCBI NO: 18401556 NR Description: expressed protein [Arabidopsis thaliana]
  misc_feature (1)..(332): Homolog of NCBI NO: 32488073 NR Description: OSJNBa0084A10.1 [Oryza sativa (japonica
MHHAKTDSEVTSSMAPSSPSRAPYYVQSPSHDDGENHSKTAASSFHSSPAASPPRSLGNHSRESSSSRFSGKVPSAGSSRRGVAGGGGKRGGGGGGGEAARRSPWMKEAAIEEEGLLMEDDDDADGRAGGFSALPKKVRYGLAFVGAFLVLFTFFALILWGASRNQKPVLSVNSVTFHSFVIQAGTDASLVPTEMSTINATVRLTFRNTGSFFGVHVTAQPVTLYYSQLLMASGDMKYFYQPRKSQRKVAVTVVGNKVPLYGGGAGLSSTPGPKGVPPPPVPLQLTLRIRARALVLGKLVKPRFYNNVQCSVRLDTTKLGKAISLKKSCTHV

SEQ ID NO: 63654 - DNA, 1227 bp, Triticum aestivum
  misc_feature (1)..(1227): Ceres Seq. ID no. 13597182
agaacatcctaatcgaaaagcctacaccaaaacttcccttgtcatcgcagatcacgagctagctatctgagcgcaggaaatagctaaacacaccagctcgctcgtaagcacactcccacgccgaccggcaagatggtgaagcctgtgcaggacgaggagaaccagaggctgctcctcgacgaccacaaggagaagcacttcacctccggcgaggtggtccgggacatcatcatcggcgtctctgacggcctcaccgtgcccttcgccctagccgccggcctgtcgggcgccaacgcgtcctcctcgctcgtgctcaccgccgggctcgccgaggtcgccgccggcgccatctccatggggctcggagggtacctcgccgctaagagcgacgccgaccactactaccgggagctgcagcgcgagcaggacgagatcgacaccgtcccggacacagaggccgcggagatcgcggacatactctctgagtacgggctgggccccgaggagtacgggccggtcgtcacctccctccgcaacaacccaaaggcctggctcgagttcatgatgaagttcgagctggggctggagaagccggacccgcggcgcgcgctgacgagcgcggcgacgatcgcgctggcctacgtcgtcggcggcatggtgccgctctccccctacatgttcctggcgtcggtcgacagcgccatgatgacctccgtcgtggtcaccctcgccgcgctgctcttcttcggctacgtcaagggccgcttcaccgggaaccgcccgttcctcagcgccatccagactgccatcatcggcgcgcttgcctcctccgccgcctacggcatggccaaggccgtgcaggccatctgatcgagctcgagccacgccgcgcccgggggacggctaagtaccaagaaaaataagtacagcaagctacctacctgtgtatgtatgatcaagtgttgccatagtggagtggtagctgtacgtgcagactctagcgtccgatctggtaagtgtactggtggcccaagtgtgctgatgtgcaccgttcgttttgttttctgtttcgttttcgagctcgatgatgatgtacactatgttagtagtgtatatgtttgggtgtatttggtttttcttctgtcgcgttaggtaagtatactatttgtaagggaagttgcgttatttaggtgatgtggtaatctgatgggctttgagtcagctgcc

SEQ ID NO: 63655 - protein, 245 aa, Triticum aestivum
  peptide (1)..(245): Ceres Seq. ID no. 13597183
  misc_feature (9)..(244): Homolog of NCBI NO: 29832730 NR Description: putative membrane protein [Streptomyces
  misc_feature (14)..(238): Homolog of NCBI NO: 19554141 NR Description: uncharacterized membrane protein
  misc_feature (15)..(236): Homolog of NCBI NO: 23508922 NR Description: hypothetical protein, conserved [Plasmodium
  misc_feature (14)..(238): Homolog of NCBI NO: 25029211 NR Description: putative nodulin 21-related protein
  misc_feature (29)..(242): Homolog of NCBI NO: 15599046 NR Description: hypothetical protein [Pseudomonas aeruginosa
  misc_feature (19)..(245): Homolog of NCBI NO: 40741878 NR Description: hypothetical protein AN4990.2 [Aspergillus
  misc_feature (28)..(240): Homolog of NCBI NO: 6323249 NR Description: Functions in the homeostasis of both calcium and
  misc_feature (28)..(242): Homolog of NCBI NO: 40740699 NR Description: hypothetical protein AN3681.2 [Aspergillus
  misc_feature (8)..(243): Homolog of NCBI NO: 15226346 NR Description: membrane protein -related [Arabidopsis thaliana]
  misc_feature (18)..(243): Homolog of NCBI NO: 38567721 NR Description: B1358B12.19 [Oryza sativa (japonica
MVKPVQDEENQRLLLDDHKEKHFTSGEVVRDIIIGVSDGLTVPFALAAGLSGANASSSLVLTAGLAEVAAGAISMGLGGYLAAKSDADHYYRELQREQDEIDTVPDTEAAEIADILSEYGLGPEEYGPVVTSLRNNPKAWLEFMMKFELGLEKPDPRRALTSAATIALAYVVGGMVPLSPYMFLASVDSAMMTSVVVTLAALLFFGYVKGRFTGNRPFLSAIQTAIIGALASSAAYGMAKAVQAI

SEQ ID NO: 63656 - protein, 171 aa, Triticum aestivum
  peptide (1)..(171): Ceres Seq. ID no. 13597184
  misc_feature (1)..(170): Homolog of NCBI NO: 29832730 NR Description: putative membrane protein [Streptomyces
  misc_feature (1)..(164): Homolog of NCBI NO: 19554141 NR Description: uncharacterized membrane protein
  misc_feature (1)..(162): Homolog of NCBI NO: 23508922 NR Description: hypothetical protein, conserved [Plasmodium
  misc_feature (1)..(164): Homolog of NCBI NO: 25029211 NR Description: putative nodulin 21-related protein
  misc_feature (1)..(168): Homolog of NCBI NO: 15599046 NR Description: hypothetical protein [Pseudomonas aeruginosa
  misc_feature (1)..(171): Homolog of NCBI NO: 40741878 NR Description: hypothetical protein AN4990.2 [Aspergillus
  misc_feature (1)..(166): Homolog of NCBI NO: 6323249 NR Description: Functions in the homeostasis of both calcium and
  misc_feature (1)..(168): Homolog of NCBI NO: 40740699 NR Description: hypothetical protein AN3681.2 [Aspergillus
  misc_feature (1)..(169): Homolog of NCBI NO: 15226346 NR Description: membrane protein -related [Arabidopsis thaliana]
  misc_feature (1)..(169): Homolog of NCBI NO: 38567721 NR Description: B1358B12.19 [Oryza sativa (japonica
MGLGGYLAAKSDADHYYRELQREQDEIDTVPDTEAAEIADILSEYGLGPEEYGPVVTSLRNNPKAWLEFMMKFELGLEKPDPRRALTSAATIALAYVVGGMVPLSPYMFLASVDSAMMTSVVVTLAALLFFGYVKGRFTGNRPFLSAIQTAIIGALASSAAYGMAKAVQAI

SEQ ID NO: 63657 - DNA, 501 bp, Triticum aestivum
  misc_feature (1)..(501): Ceres Seq. ID no. 13597185
ccatccccttccccccctctcttcttctccatcaatccccgacgaaaccaaccaaccaacaatggaagttgctgcgcccaagcaactcctccccatggcgccgcgggaccccaactccccgtcctcctccacctcctcctcctcgccgtcttccgccgcgtcgccctccagccaccggcccagcccgctgccgccgtccccgaggcccgtgccccgcaccatcgacaccacccccttccccaccaccttcgtccaggccgacaccgcctccttcaagcaggtcgtccagatgctcaccggcgccgacatgcctccgccgtcctcgcagccgcaggcccagagccagaggccccccgcggccgccaacagcaaggccggcgcgccgtgccggcccaagaagccggcgttcaagctctacgagcgccggagcagcatgaagaacctcaagatgatcgcgccgctcgccatggcggccgccgcgggggcgtcgccgaggaaggc

SEQ ID NO: 63658 - protein, 167 aa, Triticum aestivum
  peptide (1)..(167): Ceres Seq. ID no. 13597186
PSPSPPLFFSINPRRNQPTNNGSCCAQATPPHGAAGPQLPVLLHLLLLAVFRRVALQPPAQPAAAVPEARAPHHRHHPLPHHLRPGRHRLLQAGRPDAHRRRHASAVLAAAGPEPEAPRGRQQQGRRAVPAQEAGVQALRAPEQHEEPQDDRAARHGGRRGGVAEEG

SEQ ID NO: 63659 - protein, 166 aa, Triticum aestivum
  peptide (1)..(166): Ceres Seq. ID no. 13597187
  misc_feature (77)..(104): Pfam Name: VQ motif Pfam Description: VQ motif
  misc_feature (2)..(108): Homolog of NCBI NO: 12018149 NR Description: gamete-specific hydroxyproline-rich glycoprotein
  misc_feature (2)..(134): Homolog of NCBI NO: 2429362 NR Description: proline rich protein [Santalum album]
  misc_feature (2)..(135): Homolog of NCBI NO: 20138131 NR Description: Vegetative cell wall protein gp1 precursor
  misc_feature (2)..(135): Homolog of NCBI NO: 81286 NR Description: extensin - Volvox carteri (fragment)
  misc_feature (2)..(135): Homolog of NCBI NO: 20138131 NR Description: Vegetative cell wall protein gp1 precursor
  misc_feature (39)..(165): Homolog of NCBI NO: 13877535 NR Description: Unknown protein [Arabidopsis thaliana]
  misc_feature (39)..(165): Homolog of NCBI NO: 30690315 NR Description: expressed protein [Arabidopsis thaliana]
  misc_feature (39)..(165): Homolog of NCBI NO: 25518323 NR Description: hypothetical protein F3H9.7 [imported] -
  misc_feature (53)..(163): Homolog of NCBI NO: 34903674 NR Description: B1015E06.22 [Oryza sativa (japonica
  misc_feature (27)..(165): Homolog of NCBI NO: 34909488 NR Description: P0481E12.14 [Oryza sativa (japonica
HPLPPLSSSPSIPDETNQPTMEVAAPKQLLPMAPRDPNSPSSSTSSSSPSSAASPSSHRPSPLPPSPRPVPRTIDTTPFPTTFVQADTASFKQVVQMLTGADMPPPSSQPQAQSQRPPAAANSKAGAPCRPKKPAFKLYERRSSMKNLKMIAPLAMAAAAGASPRK

SEQ ID NO: 63660 - protein, 146 aa, Triticum aestivum
  peptide (1)..(146): Ceres Seq. ID no. 13597188
  misc_feature (57)..(84): Pfam Name: VQ motif Pfam Description: VQ motif
  misc_feature (1)..(88): Homolog of NCBI NO: 12018149 NR Description: gamete-specific hydroxyproline-rich glycoprotein
  misc_feature (1)..(114): Homolog of NCBI NO: 2429362 NR Description: proline rich protein [Santalum album]
  misc_feature (1)..(115): Homolog of NCBI NO: 20138131 NR Description: Vegetative cell wall protein gp1 precursor
  misc_feature (1)..(115): Homolog of NCBI NO: 81286 NR Description: extensin - Volvox carteri (fragment)
  misc_feature (1)..(115): Homolog of NCBI NO: 20138131 NR Description: Vegetative cell wall protein gp1 precursor
  misc_feature (19)..(145): Homolog of NCBI NO: 13877535 NR Description: Unknown protein [Arabidopsis thaliana]
  misc_feature (19)..(145): Homolog of NCBI NO: 30690315 NR Description: expressed protein [Arabidopsis thaliana]
  misc_feature (19)..(145): Homolog of NCBI NO: 25518323 NR Description: hypothetical protein F3H9.7 [imported] -
  misc_feature (33)..(143): Homolog of NCBI NO: 34903674 NR Description: B1015E06.22 [Oryza sativa (japonica
  misc_feature (7)..(145): Homolog of NCBI NO: 34909488 NR Description: P0481E12.14 [Oryza sativa (japonica
MEVAAPKQLLPMAPRDPNSPSSSTSSSSPSSAASPSSHRPSPLPPSPRPVPRTIDTTPFPTTFVQADTASFKQVVQMLTGADMPPPSSQPQAQSQRPPAAANSKAGAPCRPKKPAFKLYERRSSMKNLKMIAPLAMAAAAGASPRK

SEQ ID NO: 63661 - DNA, 1424 bp, Triticum aestivum
  misc_feature (1)..(1424): Ceres Seq. ID no. 13597194
ttttggatcccatccaccccttctccgctcctctttaaagccgccgcccgtccccctctgcgttccaccgcactaccgccagcgcagcgacaccagagctcgttcgatagcttagagcggaggcgaggaggaggagatgaggatgtcgctgctgagatccgcgtcgcagcacctgcgccgccgccgcggctactcgtcgacgcccgcgcagccggagcggaaggtggccatcctcggcgcggcgggcggcatcggccagccgctggcgctgctcatgaagctcaacccgctcgtctcctccctctccctctacgacatcgccgccacgcccggcgtcgccgccgacgtatcccacatcaacacccgcgccctggtgaaggggttcgtcggggacgaccagctcggggaggcgctggagggcgccgacctcgtcatcatccccgccggggtgccccgcaagcccggcatgaccagggacgacctcttcaagatcaacgcagggatcgtcaagggcctctgcaccgccatcgccacgcactgccccaacgctctcgtcaatatgatcagcaaccctgtcaactcgactgtcccaattgcagctgaggtgttcaagaaggctggtacctatgatgagaagaagctgtttggtgtgaccactcttgatgttgttcgtgctaaaacattctatgctggaaaggcgaacgtgccagttactggggtgaatgttcctgttgttggtggccatgctggaatcactatcctgccactgttctcacaggctactcctgcaagtaatgcattgtcccatgaggaccttgtcgccctcacgaagaggacacaagatggtggcacggaagttgttgaagcgaaggctggaaagggctcagcaacattgtcgatggcatatgctggtgcagtttttggagatgcatgcttgaaggggctcaacggtgttcctgacatcgtagagtgctcttttgtccaatcaactgtaacagagctgccattctttgcctccaaggtgaggctgggcaagagcggcgtggaggaagtgatggggctgggcgagctgtcggcgttggagaaggaggggctggagagcctcaagggcgagctgctgtcttccatcgagaagggcgtcaagttcgcgcaggaaagctaggctgcaacctgctcagcctataacaatcggttcacacttgaactcatgcaaatttttgttcgaccgctttcgttgcccccaaacccgggtgtgccgctgggcatcgaggcgtcgccgtgctccacaataaaatgtactactggctttgatgtcccgccagactgaactgaacctgtcgtaccagaaacagcagacaccggtgcctatgtgttcatggcattcgtacccgagatcacgaagcgcgaaaccgaagattctgcgg

SEQ ID NO: 63662 - protein, 341 aa, Triticum aestivum
  peptide (1)..(341): Ceres Seq. ID no. 13597195
  misc_feature (173)..(338): Pfam Name: lactate/malate dehydrogenase, alpha/beta Pfam Description: lactate/malate dehydrogenase, alpha/beta
  misc_feature (16)..(341): Homolog of NCBI NO: 21388546 NR Description: putative mitochondrial NAD-dependent malate
  misc_feature (1)..(341): Homolog of NCBI NO: 21388544 NR Description: putative mitochondrial NAD-dependent malate
  misc_feature (1)..(341): Homolog of NCBI NO: 7798706 NR Description: malate dehydrogenase [Vitis vinifera]
MRMSLLRSASQHLRRRRGYSSTPAQPERKVAILGAAGGIGQPLALLMKLNPLVSSLSLYDIAATPGVAADVSHINTRALVKGFVGDDQLGEALEGADLVIIPAGVPRKPGMTRDDLFKINAGIVKGLCTAIATHCPNALVNMISNPVNSTVPIAAEVFKKAGTYDEKKLFGVTTLDVVRAKTFYAGKANVPVTGVNVPVVGGHAGITILPLFSQATPASNALSHEDLVALTKRTQDGGTEVVEAKAGKGSATLSMAYAGAVFGDACLKGLNGVPDIVECSFVQSTVTELPFFASKVRLGKSGVEEVMGLGELSALEKEGLESLKGELLSSIEKGVKFAQES

SEQ ID NO: 63663 - protein, 339 aa, Triticum aestivum
  peptide (1)..(339): Ceres Seq. ID no. 13597196
  misc_feature (171)..(336): Pfam Name: lactate/malate dehydrogenase, alpha/beta Pfam Description: lactate/malate dehydrogenase, alpha/beta
  misc_feature (14)..(339): Homolog of NCBI NO: 21388546 NR Description: putative mitochondrial NAD-dependent malate
  misc_feature (1)..(339): Homolog of NCBI NO: 21388544 NR Description: putative mitochondrial NAD-dependent malate
  misc_feature (1)..(339): Homolog of NCBI NO: 7798706 NR Description: malate dehydrogenase [Vitis vinifera]
MSLLRSASQHLRRRRGYSSTPAQPERKVAILGAAGGIGQPLALLMKLNPLVSSLSLYDIAATPGVAADVSHINTRALVKGFVGDDQLGEALEGADLVIIPAGVPRKPGMTRDDLFKINAGIVKGLCTAIATHCPNALVNMISNPVNSTVPIAAEVFKKAGTYDEKKLFGVTTLDVVRAKTFYAGKANVPVTGVNVPVVGGHAGITILPLFSQATPASNALSHEDLVALTKRTQDGGTEVVEAKAGKGSATLSMAYAGAVFGDACLKGLNGVPDIVECSFVQSTVTELPFFASKVRLGKSGVEEVMGLGELSALEKEGLESLKGELLSSIEKGVKFAQES

SEQ ID NO: 63664 - protein, 295 aa, Triticum aestivum
  peptide (1)..(295): Ceres Seq. ID no. 13597197
  misc_feature (127)..(292): Pfam Name: lactate/malate dehydrogenase, alpha/beta Pfam Description: lactate/malate dehydrogenase, alpha/beta
  misc_feature (1)..(295): Homolog of NCBI NO: 21388546 NR Description: putative mitochondrial NAD-dependent malate
  misc_feature (1)..(295): Homolog of NCBI NO: 21388544 NR Description: putative mitochondrial NAD-dependent malate
  misc_feature (1)..(295): Homolog of NCBI NO: 7798706 NR Description: malate dehydrogenase [Vitis vinifera]
MKLNPLVSSLSLYDIAATPGVAADVSHINTRALVKGFVGDDQLGEALEGADLVIIPAGVPRKPGMTRDDLFKINAGIVKGLCTAIATHCPNALVNMISNPVNSTVPIAAEVFKKAGTYDEKKLFGVTTLDVVRAKTFYAGKANVPVTGVNVPVVGGHAGITILPLFSQATPASNALSHEDLVALTKRTQDGGTEVVEAKAGKGSATLSMAYAGAVFGDACLKGLNGVPDIVECSFVQSTVTELPFFASKVRLGKSGVEEVMGLGELSALEKEGLESLKGELLSSIEKGVKFAQES

SEQ ID NO: 63665 - DNA, 1646 bp, Triticum aestivum
  misc_feature (1)..(1646): Ceres Seq. ID no. 13597198
ccccatccccttccttccacttgacaggtctctccacacccgcggctgcagtccacacccaaaccctagccgtcgcgtcggcagcttccaccgccatggacgaccccgccgccgcagccaccgccgccgccacggaggttggtgtgcccgcatcaccgcccccgccggccgccgaggaggccgatgcctcggcggaggcggaggccgtcccggaggcgaagaggtggcccgggtggccgggggacaacgtgttccggatggttgtgcccgtgctgaaggtcgggagcatcatcgggcggaagggcgagctcatcaagcgtctcgtcgaggagaccaaggccagggtccgcgtcctcgagggtcctgtcggcgccaccgagcgcattgttttggtgtctgcaaaagaagatccgggcttggagctgcctccagctgtggacgctctgattagagtttttaaacgtgtcaatggaataacagatggagctgctgaaggtacccagacagctgctgcacctggtgtatgtgctgcccggttggtggttcctggagctcaagcaattaacctcattgggaagcaaggtgcttcaattaaggcaatccaggagggcacgggtgctacaataagggttatatcagtagatgagcgagatcggcctttctatgtaactgacgatgagaggatagttgagatacagggtgaaacagagaaagttctaaaagcactgcaagcagtttctaatcatctccggaagtttttggttgaccatagtgtacttccattgtttgagaagactaatgccccagtaagtcaagatcgcagtgctgaaacttggaatgatatgccacatcattcaattgtttctacacaagtaaatcaacaacctgaagtgcgtgatgaatatgttcttccaatgaaaagggaccatttgtatcttgaacgggaaccgctggtagaacataacattcatcgctcaggtgtgtcattatatgggcgagatcctgccttgtcagcattacgaccttctggaatgcatggtgctggccctctacttacacagataacacaaaccatgcaaatcccacttacctatgcagaagatatcataggagtcaaaggagcaaacattgcatacatacgggctaacagtggtgctgttgtcacaattcaagagagtttgggaagccctgatgatataactgttgaaataaaggggacgtcgtcccaggtacaatctgctcaacagcttatccaggactccctggctacgcacagagaacctgtgaggagcagttacgcaggagtattagatccgttatataggtccagctacccgtatggcagctcggcctacccgtcatcatcgctgccatcttattctaacatggacgggagtggatattcatcgtcaggtcttggtggttacggttccacttaccgctactaagatggtagctgtttgccatcaagcttgcggccaccctgtctccactcctgggtcatcgttgtgtatgtcagcaatagttgctctgctggcttcatgttcctcagggtggtactattatagtcgtatcgaatcggggtgcgtgatttagtgtctacttgatttgtagatgttcttatttcgaggaagtctgttctagcc

SEQ ID NO: 63666 - protein, 481 aa, Triticum aestivum
  peptide (1)..(481): Ceres Seq. ID no. 15222046
  misc_feature (178)..(233): Pfam Name: KH domain Pfam Description: KH domain
  misc_feature (81)..(352): Homolog of NCBI NO: 22328051 NR Description: KH domain protein [Arabidopsis thaliana]
  misc_feature (359)..(418): Homolog of NCBI NO: 37535668 NR Description: putative RNA-binding protein
  misc_feature (79)..(297): Homolog of NCBI NO: 37535668 NR Description: putative RNA-binding protein
  misc_feature (204)..(284): Homolog of NCBI NO: 37534332 NR Description: unknown protein [Oryza sativa (japonica
  misc_feature (321)..(422): Homolog of NCBI NO: 37534332 NR Description: unknown protein [Oryza sativa (japonica
  misc_feature (74)..(211): Homolog of NCBI NO: 37534332 NR Description: unknown protein [Oryza sativa (japonica
  misc_feature (52)..(476): Homolog of NCBI NO: 16924113 NR Description: putative RNA binding protein [Oryza sativa]
  misc_feature (45)..(476): Homolog of NCBI NO: 15229321 NR Description: KH domain protein [Arabidopsis thaliana]
  misc_feature (35)..(479): Homolog of NCBI NO: 15236094 NR Description: KH domain protein [Arabidopsis thaliana]
  misc_feature (32)..(481): Homolog of NCBI NO: 37536904 NR Description: putative nucleic acid binding protein
PSPSFHLTGLSTPAAAVHTQTLAVASAASTAMDDPAAAATAAATEVGVPASPPPPAAEEADASAEAEAVPEAKRWPGWPGDNVFRMVVPVLKVGSIIGRKGELIKRLVEETKARVRVLEGPVGATERIVLVSAKEDPGLELPPAVDALIRVFKRVNGITDGAAEGTQTAAAPGVCAARLVVPGAQAINLIGKQGASIKAIQEGTGATIRVISVDERDRPFYVTDDERIVEIQGETEKVLKALQAVSNHLRKFLVDHSVLPLFEKTNAPVSQDRSAETWNDMPHHSIVSTQVNQQPEVRDEYVLPMKRDHLYLEREPLVEHNIHRSGVSLYGRDPALSALRPSGMHGAGPLLTQITQTMQIPLTYAEDIIGVKGANIAYIRANSGAVVTIQESLGSPDDITVEIKGTSSQVQSAQQLIQDSLATHREPVRSSYAGVLDPLYRSSYPYGSSAYPSSSLPSYSNMDGSGYSSSGLGGYGSTYRY

SEQ ID NO: 63667 - protein, 450 aa, Triticum aestivum
  peptide (1)..(450): Ceres Seq. ID no. 15222047
  misc_feature (147)..(202): Pfam Name: KH domain Pfam Description: KH domain
  misc_feature (50)..(321): Homolog of NCBI NO: 22328051 NR Description: KH domain protein [Arabidopsis thaliana]
  misc_feature (328)..(387): Homolog of NCBI NO: 37535668 NR Description: putative RNA-binding protein
  misc_feature (48)..(266): Homolog of NCBI NO: 37535668 NR Description: putative RNA-binding protein
  misc_feature (173)..(253): Homolog of NCBI NO: 37534332 NR Description: unknown protein [Oryza sativa (japonica
  misc_feature (290)..(391): Homolog of NCBI NO: 37534332 NR Description: unknown protein [Oryza sativa (japonica
  misc_feature (43)..(180): Homolog of NCBI NO: 37534332 NR Description: unknown protein [Oryza sativa (japonica
  misc_feature (21)..(445): Homolog of NCBI NO: 16924113 NR Description: putative RNA binding protein [Oryza sativa]
  misc_feature (14)..(445): Homolog of NCBI NO: 15229321 NR Description: KH domain protein [Arabidopsis thaliana]
  misc_feature (4)..(448): Homolog of NCBI NO: 15236094 NR Description: KH domain protein [Arabidopsis thaliana]
  misc_feature (1)..(450): Homolog of NCBI NO: 37536904 NR Description: putative nucleic acid binding protein
MDDPAAAATAAATEVGVPASPPPPAAEEADASAEAEAVPEAKRWPGWPGDNVFRMVVPVLKVGSIIGRKGELIKRLVEETKARVRVLEGPVGATERIVLVSAKEDPGLELPPAVDALIRVFKRVNGITDGAAEGTQTAAAPGVCAARLVVPGAQAINLIGKQGASIKAIQEGTGATIRVISVDERDRPFYVTDDERIVEIQGETEKVLKALQAVSNHLRKFLVDHSVLPLFEKTNAPVSQDRSAETWNDMPHHSIVSTQVNQQPEVRDEYVLPMKRDHLYLEREPLVEHNIHRSGVSLYGRDPALSALRPSGMHGAGPLLTQITQTMQIPLTYAEDIIGVKGANIAYIRANSGAVVTIQESLGSPDDITVEIKGTSSQVQSAQQLIQDSLATHREPVRSSYAGVLDPLYRSSYPYGSSAYPSSSLPSYSNMDGSGYSSSGLGGYGSTYRY

SEQ ID NO: 63668 - protein, 396 aa, Triticum aestivum
  peptide (1)..(396): Ceres Seq. ID no. 15222048
  misc_feature (93)..(148): Pfam Name: KH domain Pfam Description: KH domain
  misc_feature (1)..(267): Homolog of NCBI NO: 22328051 NR Description: KH domain protein [Arabidopsis thaliana]
  misc_feature (274)..(333): Homolog of NCBI NO: 37535668 NR Description: putative RNA-binding protein
  misc_feature (1)..(212): Homolog of NCBI NO: 37535668 NR Description: putative RNA-binding protein
  misc_feature (119)..(199): Homolog of NCBI NO: 37534332 NR Description: unknown protein [Oryza sativa (japonica
  misc_feature (236)..(337): Homolog of NCBI NO: 37534332 NR Description: unknown protein [Oryza sativa (japonica
  misc_feature (1)..(126): Homolog of NCBI NO: 37534332 NR Description: unknown protein [Oryza sativa (japonica
  misc_feature (1)..(391): Homolog of NCBI NO: 16924113 NR Description: putative RNA binding protein [Oryza sativa]
  misc_feature (1)..(391): Homolog of NCBI NO: 15229321 NR Description: KH domain protein [Arabidopsis thaliana]
  misc_feature (1)..(394): Homolog of NCBI NO: 15236094 NR Description: KH domain protein [Arabidopsis thaliana]
  misc_feature (1)..(396): Homolog of NCBI NO: 37536904 NR Description: putative nucleic acid binding protein
MVVPVLKVGSIIGRKGELIKRLVEETKARVRVLEGPVGATERIVLVSAKEDPGLELPPAVDALIRVFKRVNGITDGAAEGTQTAAAPGVCAARLVVPGAQAINLIGKQGASIKAIQEGTGATIRVISVDERDRPFYVTDDERIVEIQGETEKVLKALQAVSNHLRKFLVDHSVLPLFEKTNAPVSQDRSAETWNDMPHHSIVSTQVNQQPEVRDEYVLPMKRDHLYLEREPLVEHNIHRSGVSLYGRDPALSALRPSGMHGAGPLLTQITQTMQIPLTYAEDIIGVKGANIAYIRANSGAVVTIQESLGSPDDITVEIKGTSSQVQSAQQLIQDSLATHREPVRSSYAGVLDPLYRSSYPYGSSAYPSSSLPSYSNMDGSGYSSSGLGGYGSTYRY

SEQ ID NO: 63669 - DNA, 1256 bp, Triticum aestivum
  misc_feature (1)..(1256): Ceres Seq. ID no. 12616669
cacaatcgctcgtcccaagcgttcgcacccgccgccgccgccgccgccgcctcaataatctccggggacctaaacctcgacagtaccctaccctccaagctccctccgcctcccgtttttcgttcctccgccgcgccgccaccgcaaggctctcccgcctcgcgccgtgcccgggacgatacgatggtggggctctcggagggggagaagcacttcatccgcggcggcatcgcgcaggacctccgggccgacggccgcaggcggctgcagttccgggccctcaccgtcgagacaggaatcatccctcaggccaacggctcggcgcgtgttaggatgggtgcgaccgaagtcatcgccagcgtcaaggctgagttggggaaaccaaccattcttcatcccgacaaaggaaaagtttccatttatgttgattgtagtccaactgctgcgcctatgtttgagggtagaggttcggaagaattgtctgctgagctctctgttgggctgcaaagatgtttactgggtggtaaaagtggtgcaggggctgcaatcgatttatcgtctctgattgttgttgagggaaaagcctgctgggatctgtacattgatggacttgtggtcagttctgatggtaatttgcttgatgcactggcggctgcgataaaggtagctttgagtgatacaggtataccaaaagttaatgtttctcttaataatgaaacggatggggagcctgaggttgatatcagtgatgaagaatttttgcaattcgacacttctggtgtgcctgtcataattacattgaccaaggttggtaagcactacattgttgatgccacctcggaggaggaatcgcagatgagttctgcggtttccgtttcagtcaacagccatggccagatatgtgggttaaccaagaggggaggcgcagggttggatccaagcgtcatttttgatatgatatccgtggccaagaatgtaagccaacggttctatactctactggaatcagcattcgcagctgctgaagcagtagcggatgagtagagaaaaagcatagaagataccgtgatcacgctgaccgcccgtagttgaccttgctaatgcctcagaagaatgtactatcttggtgccgcaattgccaatgttttgcacaagcttttggttttggtgttatgttgtgtcgagtgccatacgttggtgaaatgttttgatgtataattattttgttgtagctgttcggaggttggattagattt

SEQ ID NO: 63670 - protein, 347 aa, Triticum aestivum
  peptide (1)..(347): Ceres Seq. ID no. 12616670
  misc_feature (91)..(230): Pfam Name: 3' exoribonuclease family, domain 1 Pfam Description: 3' exoribonuclease family, domain 1
  misc_feature (63)..(334): Homolog of NCBI NO: 28573444 NR Description: CG8395-PA [Drosophila melanogaster]
  misc_feature (63)..(344): Homolog of NCBI NO: 21362905 NR Description: Exosome complex exonuclease RRP42 (Ribosomal RNA
  misc_feature (63)..(344): Homolog of NCBI NO: 34866707 NR Description: similar to Exosome complex exonuclease RRP42
  misc_feature (63)..(344): Homolog of NCBI NO: 28548933 NR Description: RIKEN cDNA 2610002K22 [Mus musculus]
  misc_feature (63)..(347): Homolog of NCBI NO: 24307981 NR Description: KIAA0116 protein [Homo sapiens]
  misc_feature (63)..(347): Homolog of NCBI NO: 473949 NR Description: KIAA0116 [Homo sapiens]
  misc_feature (63)..(344): Homolog of NCBI NO: 30962875 NR Description: Similar to Exosome complex exonuclease RRP42 [Mus
  misc_feature (63)..(347): Homolog of NCBI NO: 6466958 NR Description: hypothetical protein [Arabidopsis thaliana]
  misc_feature (63)..(347): Homolog of NCBI NO: 6648187 NR Description: putative 3' exoribonuclease [Arabidopsis thaliana]
  misc_feature (63)..(347): Homolog of NCBI NO: 18398046 NR Description: putative 3  exoribonuclease
HNRSSQAFAPAAAAAAASIISGDLNLDSTLPSKLPPPPVFRSSAAPPPQGSPASRRARDDTMVGLSEGEKHFIRGGIAQDLRADGRRRLQFRALTVETGIIPQANGSARVRMGATEVIASVKAELGKPTILHPDKGKVSIYVDCSPTAAPMFEGRGSEELSAELSVGLQRCLLGGKSGAGAAIDLSSLIVVEGKACWDLYIDGLVVSSDGNLLDALAAAIKVALSDTGIPKVNVSLNNETDGEPEVDISDEEFLQFDTSGVPVIITLTKVGKHYIVDATSEEESQMSSAVSVSVNSHGQICGLTKRGGAGLDPSVIFDMISVAKNVSQRFYTLLESAFAAAEAVADE

SEQ ID NO: 63671 - protein, 286 aa, Triticum aestivum
  peptide (1)..(286): Ceres Seq. ID no. 12616671
  misc_feature (30)..(169): Pfam Name: 3' exoribonuclease family, domain 1 Pfam Description: 3' exoribonuclease family, domain 1
  misc_feature (2)..(273): Homolog of NCBI NO: 28573444 NR Description: CG8395-PA [Drosophila melanogaster]
  misc_feature (2)..(283): Homolog of NCBI NO: 21362905 NR Description: Exosome complex exonuclease RRP42 (Ribosomal RNA
  misc_feature (2)..(283): Homolog of NCBI NO: 34866707 NR Description: similar to Exosome complex exonuclease RRP42
  misc_feature (2)..(283): Homolog of NCBI NO: 28548933 NR Description: RIKEN cDNA 2610002K22 [Mus musculus]
  misc_feature (2)..(286): Homolog of NCBI NO: 24307981 NR Description: KIAA0116 protein [Homo sapiens]
  misc_feature (2)..(286): Homolog of NCBI NO: 473949 NR Description: KIAA0116 [Homo sapiens]
  misc_feature (2)..(283): Homolog of NCBI NO: 30962875 NR Description: Similar to Exosome complex exonuclease RRP42 [Mus
  misc_feature (2)..(286): Homolog of NCBI NO: 6466958 NR Description: hypothetical protein [Arabidopsis thaliana]
  misc_feature (2)..(286): Homolog of NCBI NO: 6648187 NR Description: putative 3' exoribonuclease [Arabidopsis thaliana]
  misc_feature (2)..(286): Homolog of NCBI NO: 18398046 NR Description: putative 3  exoribonuclease
MVGLSEGEKHFIRGGIAQDLRADGRRRLQFRALTVETGIIPQANGSARVRMGATEVIASVKAELGKPTILHPDKGKVSIYVDCSPTAAPMFEGRGSEELSAELSVGLQRCLLGGKSGAGAAIDLSSLIVVEGKACWDLYIDGLVVSSDGNLLDALAAAIKVALSDTGIPKVNVSLNNETDGEPEVDISDEEFLQFDTSGVPVIITLTKVGKHYIVDATSEEESQMSSAVSVSVNSHGQICGLTKRGGAGLDPSVIFDMISVAKNVSQRFYTLLESAFAAAEAVADE

SEQ ID NO: 63672 - protein, 236 aa, Triticum aestivum
  peptide (1)..(236): Ceres Seq. ID no. 12616672
  misc_feature (1)..(119): Pfam Name: 3' exoribonuclease family, domain 1 Pfam Description: 3' exoribonuclease family, domain 1
  misc_feature (1)..(223): Homolog of NCBI NO: 28573444 NR Description: CG8395-PA [Drosophila melanogaster]
  misc_feature (1)..(233): Homolog of NCBI NO: 21362905 NR Description: Exosome complex exonuclease RRP42 (Ribosomal RNA
  misc_feature (1)..(233): Homolog of NCBI NO: 34866707 NR Description: similar to Exosome complex exonuclease RRP42
  misc_feature (1)..(233): Homolog of NCBI NO: 28548933 NR Description: RIKEN cDNA 2610002K22 [Mus musculus]
  misc_feature (1)..(236): Homolog of NCBI NO: 24307981 NR Description: KIAA0116 protein [Homo sapiens]
  misc_feature (1)..(236): Homolog of NCBI NO: 473949 NR Description: KIAA0116 [Homo sapiens]
  misc_feature (1)..(233): Homolog of NCBI NO: 30962875 NR Description: Similar to Exosome complex exonuclease RRP42 [Mus
  misc_feature (1)..(236): Homolog of NCBI NO: 6466958 NR Description: hypothetical protein [Arabidopsis thaliana]
  misc_feature (1)..(236): Homolog of NCBI NO: 6648187 NR Description: putative 3' exoribonuclease [Arabidopsis thaliana]
  misc_feature (1)..(236): Homolog of NCBI NO: 18398046 NR Description: putative 3  exoribonuclease
MGATEVIASVKAELGKPTILHPDKGKVSIYVDCSPTAAPMFEGRGSEELSAELSVGLQRCLLGGKSGAGAAIDLSSLIVVEGKACWDLYIDGLVVSSDGNLLDALAAAIKVALSDTGIPKVNVSLNNETDGEPEVDISDEEFLQFDTSGVPVIITLTKVGKHYIVDATSEEESQMSSAVSVSVNSHGQICGLTKRGGAGLDPSVIFDMISVAKNVSQRFYTLLESAFAAAEAVADE

SEQ ID NO: 63673 - DNA, 1391 bp, Triticum aestivum
  misc_feature (1)..(1391): Ceres Seq. ID no. 13598761
gcaatccgatgaaccagcaaaaccgtggacgagcaccgccggtattctgctcccgaattccacagatttccactccccgctcccaaagccccgatactttatagccggcgacagcaagcccagcaaaatcccatctcccaacccggaaatcctcccactcccgggaatgaatcagcttccccttccccttctctgagatctcagcccgagcctgcgcgccgcgacttccaccggaatccttccctcctagccgcaacatcgccggatcgattcaggcattcttggtggccggagaagcagtctttggtcctctgcttgagatcatcatcagacatgtcgctgctatcgaaattgcggctggttactgtggatgtgactggtactctgcttgcttacaaaggacggcttggtgattactactgcatggctgctaaggctgctggaaagccatgccctgattatgatcgaatgcacgaaggcttcaagcttgcatacactgagatggcaaggaaatacccatgctttggatttgcggcaaagatgccaacgattgaatggtggaggatttgtgtcaaggattcatttgttaaggctgggtatgattacgatgatgagacatttgataaagtgttcaagcgaatttattccgcctttggctcctctgcgccatactctgtttttcctgatgcacagcccttcatgagagggctgagggaaaaggggatcacagttggaatcgtcagcaatgcagagtaccggtacaaagaggtcatcttgcctgcgttagggctgaatcagggctcagagtgggacttcggggtgttctcaggcatcgtcggtgtcgagaaacctgacccaaaaatctacaagatcgcgctggagatggcggggaacgtcgcaccggaagaggcgctccacattggcgacagctaccgcaaggactacgtccctgcacggagcatcgggatgcacgcgctgctcctggaccggttcaagaccgccgacgccgagagctggaggcagtccggcgcgccggtgctccctgatctcgaagccgcacaggcatggctcaccaagaacccgaccgaggaacccgctgaggagccactaggggccgcactgctgcgcaggatggccgagaagctctgaatctcgcccctgggatggttcctgttgtgctcttgctggggagtgagggagccaaggagaagggatgtgttgtagcgatggttcactggccagtttagctagctggagctacttgaactctggtagtaggcttccagtgctgttgttgactgctgaatgtggccaagtgattcagccgtgcgacaaacatcttgcaatgacgaataattctaatcatgtttcgcataatggaggaatttaac

SEQ ID NO: 63674 - protein, 271 aa, Triticum aestivum
  peptide (1)..(271): Ceres Seq. ID no. 13598762
  misc_feature (7)..(220): Pfam Name: haloacid dehalogenase-like hydrolase Pfam Description: haloacid dehalogenase-like hydrolase
  misc_feature (8)..(219): Homolog of NCBI NO: 23130292 NR Description: hypothetical protein [Nostoc punctiforme]
  misc_feature (1)..(217): Homolog of NCBI NO: 19923000 NR Description: Rhythmically expressed gene 2 CG3200-PA
  misc_feature (1)..(217): Homolog of NCBI NO: 21483246 NR Description: GH02773p [Drosophila melanogaster]
  misc_feature (4)..(221): Homolog of NCBI NO: 17231587 NR Description: hypothetical protein [Nostoc sp. PCC 7120]
  misc_feature (7)..(219): Homolog of NCBI NO: 33468704 NR Description: SI:zC10E8.6 (novel protein) [Danio rerio]
  misc_feature (6)..(217): Homolog of NCBI NO: 13654294 NR Description: hypothetical protein MGC12904 [Homo sapiens]
  misc_feature (6)..(239): Homolog of NCBI NO: 21312204 NR Description: RIKEN cDNA 2810435D12 [Mus musculus]
  misc_feature (6)..(217): Homolog of NCBI NO: 27714603 NR Description: similar to RIKEN cDNA 2810435D12
  misc_feature (183)..(271): Homolog of NCBI NO: 1362147 NR Description: hypothetical protein (clone AFD1) - wild oat
  misc_feature (1)..(246): Homolog of NCBI NO: 15241564 NR Description: haloacid dehalogenase-like hydrolase family
MSLLSKLRLVTVDVTGTLLAYKGRLGDYYCMAAKAAGKPCPDYDRMHEGFKLAYTEMARKYPCFGFAAKMPTIEWWRICVKDSFVKAGYDYDDETFDKVFKRIYSAFGSSAPYSVFPDAQPFMRGLREKGITVGIVSNAEYRYKEVILPALGLNQGSEWDFGVFSGIVGVEKPDPKIYKIALEMAGNVAPEEALHIGDSYRKDYVPARSIGMHALLLDRFKTADAESWRQSGAPVLPDLEAAQAWLTKNPTEEPAEEPLGAALLRRMAEKL

SEQ ID NO: 63675 - protein, 241 aa, Triticum aestivum
  peptide (1)..(241): Ceres Seq. ID no. 13598763
  misc_feature (1)..(190): Pfam Name: haloacid dehalogenase-like hydrolase Pfam Description: haloacid dehalogenase-like hydrolase
  misc_feature (1)..(189): Homolog of NCBI NO: 23130292 NR Description: hypothetical protein [Nostoc punctiforme]
  misc_feature (1)..(187): Homolog of NCBI NO: 19923000 NR Description: Rhythmically expressed gene 2 CG3200-PA
  misc_feature (1)..(187): Homolog of NCBI NO: 21483246 NR Description: GH02773p [Drosophila melanogaster]
  misc_feature (1)..(191): Homolog of NCBI NO: 17231587 NR Description: hypothetical protein [Nostoc sp. PCC 7120]
  misc_feature (1)..(189): Homolog of NCBI NO: 33468704 NR Description: SI:zC10E8.6 (novel protein) [Danio rerio]
  misc_feature (1)..(187): Homolog of NCBI NO: 13654294 NR Description: hypothetical protein MGC12904 [Homo sapiens]
  misc_feature (1)..(209): Homolog of NCBI NO: 21312204 NR Description: RIKEN cDNA 2810435D12 [Mus musculus]
  misc_feature (1)..(187): Homolog of NCBI NO: 27714603 NR Description: similar to RIKEN cDNA 2810435D12
  misc_feature (153)..(241): Homolog of NCBI NO: 1362147 NR Description: hypothetical protein (clone AFD1) - wild oat
  misc_feature (1)..(216): Homolog of NCBI NO: 15241564 NR Description: haloacid dehalogenase-like hydrolase family
MAAKAAGKPCPDYDRMHEGFKLAYTEMARKYPCFGFAAKMPTIEWWRICVKDSFVKAGYDYDDETFDKVFKRIYSAFGSSAPYSVFPDAQPFMRGLREKGITVGIVSNAEYRYKEVILPALGLNQGSEWDFGVFSGIVGVEKPDPKIYKIALEMAGNVAPEEALHIGDSYRKDYVPARSIGMHALLLDRFKTADAESWRQSGAPVLPDLEAAQAWLTKNPTEEPAEEPLGAALLRRMAEKL

SEQ ID NO: 63676 - protein, 226 aa, Triticum aestivum
  peptide (1)..(226): Ceres Seq. ID no. 13598764
  misc_feature (1)..(175): Pfam Name: haloacid dehalogenase-like hydrolase Pfam Description: haloacid dehalogenase-like hydrolase
  misc_feature (1)..(174): Homolog of NCBI NO: 23130292 NR Description: hypothetical protein [Nostoc punctiforme]
  misc_feature (1)..(172): Homolog of NCBI NO: 19923000 NR Description: Rhythmically expressed gene 2 CG3200-PA
  misc_feature (1)..(172): Homolog of NCBI NO: 21483246 NR Description: GH02773p [Drosophila melanogaster]
  misc_feature (1)..(176): Homolog of NCBI NO: 17231587 NR Description: hypothetical protein [Nostoc sp. PCC 7120]
  misc_feature (1)..(174): Homolog of NCBI NO: 33468704 NR Description: SI:zC10E8.6 (novel protein) [Danio rerio]
  misc_feature (1)..(172): Homolog of NCBI NO: 13654294 NR Description: hypothetical protein MGC12904 [Homo sapiens]
  misc_feature (1)..(194): Homolog of NCBI NO: 21312204 NR Description: RIKEN cDNA 2810435D12 [Mus musculus]
  misc_feature (1)..(172): Homolog of NCBI NO: 27714603 NR Description: similar to RIKEN cDNA 2810435D12
  misc_feature (138)..(226): Homolog of NCBI NO: 1362147 NR Description: hypothetical protein (clone AFD1) - wild oat
  misc_feature (1)..(201): Homolog of NCBI NO: 15241564 NR Description: haloacid dehalogenase-like hydrolase family
MHEGFKLAYTEMARKYPCFGFAAKMPTIEWWRICVKDSFVKAGYDYDDETFDKVFKRIYSAFGSSAPYSVFPDAQPFMRGLREKGITVGIVSNAEYRYKEVILPALGLNQGSEWDFGVFSGIVGVEKPDPKIYKIALEMAGNVAPEEALHIGDSYRKDYVPARSIGMHALLLDRFKTADAESWRQSGAPVLPDLEAAQAWLTKNPTEEPAEEPLGAALLRRMAEKL

SEQ ID NO: 63677 - DNA, 1750 bp, Triticum aestivum
  misc_feature (1)..(1750): Ceres Seq. ID no. 13584160
aaagtaacaacctccaactcagacacagtcaccaccctgtcccctcccctcctcttcctcggccctcgcttcgttctccgcgggagccggcgagccgccgccccactctctctctccccccgtccaccgcacgcctccgccacgccattcccatatgctcttctccggcgagggcaacagagcatgattctgtggcaaggttgaatggcggtgagttaggagactgcggagcaggggttattaataaattgtgcaagaggcgagccttggccgagatggatgccgttgttgatgttgccgatgctatgggcgctgtgactatagagaacggggcgaagctggagttgcctgacggtgtagaggagcgcggcgaagagcatgatgcgcaggccaacagagaccattcaggggagagtgaggtgatcaacccgcacgaagaggcaggtggagaagccagctcacacccagaagggaggaagatcggccgttccaagggaactgcaagtcatggtcctaaggttgcaaagacaaggagcccaaagagtggagatgaaggtctagcaaggagaggcacccctagttcctctcttcgtaaggcacccattgtgcgagtatcgcatgcagactcaggcactggctcttgtaccaatggtgatccgagtgtcgataagaaaaaatctggaaagattgagtctcgtccgtctgccaaggagacatcattgctcgaggacgcaaaatccagggagggaagtaaagctcaaaagcaatcagaccagcattcttccatcagaagagatgaagaagatttaaatagtgaaagttcaaaagctcgaaggtctggcagcactcctgcctatggattcagtttcaagtgtgatgagagagctgaaaaaagaagagagttctactcaaagcttgaggagaagattcacgcaagagagatggaaataagcaatatgcaagcgaaatcgaaggagactgaagaagctgaactcaaaatgctgagaaaaagcttaaagttcaaggctacgccgatgccaagcttctccccaccaccaaaggttgaactgaaaaagattcctcccactagagctaaatcaccaaagcttggccgttccaagaacaaatctgggctggaggctgaagaaagtaccaccccaagccatcctatccgtatgagccttgatgagaaggctactcaaaatggtgcgaagaaagtaaccccatcaaactcggtgaagaagccccagaggaagtcactcccgaaattgccatcagaggcaagcggcccacttgaggccagacagccaaaaatgccatcagaggcaagcggcccacttgaggccacacagccaaaaagcacggaggacctaaacacagataatcatcaggagtcagggtcgccagcaaagcagcttcaggaaaccgagtcgatcgccagcaacgcccaggagccgatccgagctaaagttacccccgacgaccaagaactcgacgagcaggcatccgtgtagcaacgaccatggtgaccaaatccttcgattttgtgatggcaggtgtgcatgcctctggctttgtcgcgtattgtgccatatttcgatagtgtatctagtgtcctgtgttcagtaaaccaacgctcgtctcgtctttgttgagtctagcatctgtgttgcttctgttcataatcgtaagcgaggctccagtgtcgtgtgcaactgcaaatagttttgtcctattttctactgctgct

SEQ ID NO: 63678 - protein, 503 aa, Triticum aestivum
  peptide (1)..(503): Ceres Seq. ID no. 13584161
  misc_feature (118)..(501): Pfam Name: AF-4 proto-oncoprotein Pfam Description: AF-4 proto-oncoprotein
  misc_feature (99)..(376): Homolog of NCBI NO: 34393229 NR Description: putative seed specific protein
  misc_feature (62)..(455): Homolog of NCBI NO: 7486636 NR Description: hypothetical protein F8B4.30 - Arabidopsis
  misc_feature (62)..(455): Homolog of NCBI NO: 7485356 NR Description: hypothetical protein F10M6.40 - Arabidopsis
  misc_feature (91)..(394): Homolog of NCBI NO: 15228950 NR Description: expressed protein [Arabidopsis thaliana]
  misc_feature (91)..(394): Homolog of NCBI NO: 9294199 NR Description: gb|AAF04893.1~gene_id:MXC7.13~similar to unknown
  misc_feature (90)..(421): Homolog of NCBI NO: 34897180 NR Description: unknown protein [Oryza sativa (japonica
  misc_feature (193)..(453): Homolog of NCBI NO: 25408425 NR Description: hypothetical protein At2g35880 [imported] -
  misc_feature (158)..(453): Homolog of NCBI NO: 18403980 NR Description: expressed protein [Arabidopsis thaliana]
  misc_feature (193)..(496): Homolog of NCBI NO: 15224733 NR Description: expressed protein [Arabidopsis thaliana]
  misc_feature (101)..(503): Homolog of NCBI NO: 18417986 NR Description: expressed protein [Arabidopsis thaliana]
SNNLQLRHSHHPVPSPPLPRPSLRSPREPASRRPTLSLPPSTARLRHAIPICSSPARATEHDSVARLNGGELGDCGAGVINKLCKRRALAEMDAVVDVADAMGAVTIENGAKLELPDGVEERGEEHDAQANRDHSGESEVINPHEEAGGEASSHPEGRKIGRSKGTASHGPKVAKTRSPKSGDEGLARRGTPSSSLRKAPIVRVSHADSGTGSCTNGDPSVDKKKSGKIESRPSAKETSLLEDAKSREGSKAQKQSDQHSSIRRDEEDLNSESSKARRSGSTPAYGFSFKCDERAEKRREFYSKLEEKIHAREMEISNMQAKSKETEEAELKMLRKSLKFKATPMPSFSPPPKVELKKIPPTRAKSPKLGRSKNKSGLEAEESTTPSHPIRMSLDEKATQNGAKKVTPSNSVKKPQRKSLPKLPSEASGPLEARQPKMPSEASGPLEATQPKSTEDLNTDNHQESGSPAKQLQETESIASNAQEPIRAKVTPDDQELDEQASV

SEQ ID NO: 63679 - protein, 412 aa, Triticum aestivum
  peptide (1)..(412): Ceres Seq. ID no. 13584162
  misc_feature (27)..(410): Pfam Name: AF-4 proto-oncoprotein Pfam Description: AF-4 proto-oncoprotein
  misc_feature (8)..(285): Homolog of NCBI NO: 34393229 NR Description: putative seed specific protein
  misc_feature (1)..(364): Homolog of NCBI NO: 7486636 NR Description: hypothetical protein F8B4.30 - Arabidopsis
  misc_feature (1)..(364): Homolog of NCBI NO: 7485356 NR Description: hypothetical protein F10M6.40 - Arabidopsis
  misc_feature (1)..(303): Homolog of NCBI NO: 15228950 NR Description: expressed protein [Arabidopsis thaliana]
  misc_feature (1)..(303): Homolog of NCBI NO: 9294199 NR Description: gb|AAF04893.1~gene_id:MXC7.13~similar to unknown
  misc_feature (1)..(330): Homolog of NCBI NO: 34897180 NR Description: unknown protein [Oryza sativa (japonica
  misc_feature (102)..(362): Homolog of NCBI NO: 25408425 NR Description: hypothetical protein At2g35880 [imported] -
  misc_feature (67)..(362): Homolog of NCBI NO: 18403980 NR Description: expressed protein [Arabidopsis thaliana]
  misc_feature (102)..(405): Homolog of NCBI NO: 15224733 NR Description: expressed protein [Arabidopsis thaliana]
  misc_feature (10)..(412): Homolog of NCBI NO: 18417986 NR Description: expressed protein [Arabidopsis thaliana]
MDAVVDVADAMGAVTIENGAKLELPDGVEERGEEHDAQANRDHSGESEVINPHEEAGGEASSHPEGRKIGRSKGTASHGPKVAKTRSPKSGDEGLARRGTPSSSLRKAPIVRVSHADSGTGSCTNGDPSVDKKKSGKIESRPSAKETSLLEDAKSREGSKAQKQSDQHSSIRRDEEDLNSESSKARRSGSTPAYGFSFKCDERAEKRREFYSKLEEKIHAREMEISNMQAKSKETEEAELKMLRKSLKFKATPMPSFSPPPKVELKKIPPTRAKSPKLGRSKNKSGLEAEESTTPSHPIRMSLDEKATQNGAKKVTPSNSVKKPQRKSLPKLPSEASGPLEARQPKMPSEASGPLEATQPKSTEDLNTDNHQESGSPAKQLQETESIASNAQEPIRAKVTPDDQELDEQASV

SEQ ID NO: 63680 - protein, 402 aa, Triticum aestivum
  peptide (1)..(402): Ceres Seq. ID no. 13584163
  misc_feature (17)..(400): Pfam Name: AF-4 proto-oncoprotein Pfam Description: AF-4 proto-oncoprotein
  misc_feature (1)..(275): Homolog of NCBI NO: 34393229 NR Description: putative seed specific protein
  misc_feature (1)..(354): Homolog of NCBI NO: 7486636 NR Description: hypothetical protein F8B4.30 - Arabidopsis
  misc_feature (1)..(354): Homolog of NCBI NO: 7485356 NR Description: hypothetical protein F10M6.40 - Arabidopsis
  misc_feature (1)..(293): Homolog of NCBI NO: 15228950 NR Description: expressed protein [Arabidopsis thaliana]
  misc_feature (1)..(293): Homolog of NCBI NO: 9294199 NR Description: gb|AAF04893.1~gene_id:MXC7.13~similar to unknown
  misc_feature (1)..(320): Homolog of NCBI NO: 34897180 NR Description: unknown protein [Oryza sativa (japonica
  misc_feature (92)..(352): Homolog of NCBI NO: 25408425 NR Description: hypothetical protein At2g35880 [imported] -
  misc_feature (57)..(352): Homolog of NCBI NO: 18403980 NR Description: expressed protein [Arabidopsis thaliana]
  misc_feature (92)..(395): Homolog of NCBI NO: 15224733 NR Description: expressed protein [Arabidopsis thaliana]
  misc_feature (1)..(402): Homolog of NCBI NO: 18417986 NR Description: expressed protein [Arabidopsis thaliana]
MGAVTIENGAKLELPDGVEERGEEHDAQANRDHSGESEVINPHEEAGGEASSHPEGRKIGRSKGTASHGPKVAKTRSPKSGDEGLARRGTPSSSLRKAPIVRVSHADSGTGSCTNGDPSVDKKKSGKIESRPSAKETSLLEDAKSREGSKAQKQSDQHSSIRRDEEDLNSESSKARRSGSTPAYGFSFKCDERAEKRREFYSKLEEKIHAREMEISNMQAKSKETEEAELKMLRKSLKFKATPMPSFSPPPKVELKKIPPTRAKSPKLGRSKNKSGLEAEESTTPSHPIRMSLDEKATQNGAKKVTPSNSVKKPQRKSLPKLPSEASGPLEARQPKMPSEASGPLEATQPKSTEDLNTDNHQESGSPAKQLQETESIASNAQEPIRAKVTPDDQELDEQASV

SEQ ID NO: 63681 - DNA, 482 bp, Triticum aestivum
  misc_feature (1)..(482): Ceres Seq. ID no. 13584164
aacacacacataccaacagagcaacaaccaacaaagaacagagtaccatatcaactagccgtagccacacagagagatcgacggaagagccttagctttagccatcgcctagcacagcacaccaccgcaccaccaccagcacctacataagcacgcatggcgcgctgggccatcgccatccacggaggcgcgggcgtggaccccaacctgccggagcaccgccaggaggaggccaagcgcgtgctggcccggtgcctgcaggtcggcgtcgacctgctccgggctggtgcgacggcgctggacgtcgtggaggccgtggtgcgggagctggagacggacccctgcttcaactcgggccgcggctccgcgctcacacgcgccggcaccgtcgagatggaggccagcatcatggacggccgcggccgccgctgcggcgccgtctccggtgtgtccaccgttaaaaaccccgtgtccctggcccg

SEQ ID NO: 63682 - protein, 108 aa, Triticum aestivum
  peptide (1)..(108): Ceres Seq. ID no. 13584165
  misc_feature (2)..(107): Pfam Name: Asparaginase Pfam Description: Asparaginase
  misc_feature (1)..(107): Homolog of NCBI NO: 18401029 NR Description: L-asparaginase -related [Arabidopsis thaliana]
  misc_feature (1)..(107): Homolog of NCBI NO: 10241428 NR Description: putative l-asparaginase [Oryza sativa (indica
  misc_feature (1)..(107): Homolog of NCBI NO: 11066973 NR Description: asparaginase [Hordeum vulgare]
MARWAIAIHGGAGVDPNLPEHRQEEAKRVLARCLQVGVDLLRAGATALDVVEAVVRELETDPCFNSGRGSALTRAGTVEMEASIMDGRGRRCGAVSGVSTVKNPVSLA

SEQ ID NO: 63683 - DNA, 531 bp, Triticum aestivum
  misc_feature (1)..(531): Ceres Seq. ID no. 13584209
tataacatctctaatcgaaaaaaattaaaaagacagaacaccgaagcaccgaagcgcagctccaccaccatttcacactctcccctgcttcacttcactgagaagcacacggacgaaaagctgcttgctgggagccatggctcccccgctcctcctcctcgtcctcttcctcctcccggccctcgccgccggccaccagcacccctcctcctacggctcctccgccctctccgaatggcgcaacgccaagtcctcctacttcgccgccgaccccggagacgccatcggtggcgcgtgcgggttcggggatctggggaagcacgggtacgggatggcgacggtggggctgagcacggcgctgttcgagcgcggcgccgcctgcggcggctgctacgaggtcaagtgcgtggaggacctcaagtactgcctccccggcacctccatcgtcgtcacggccaccaacttctgcccgcccaactacggcttncccgccgacgccggcggcgtctgcaacccgcccaaccaccattt

SEQ ID NO: 63684 - protein, 177 aa, Triticum aestivum
  peptide (1)..(177): Ceres Seq. ID no. 13584210
  misc_feature (163)..(163): Xaa is any aa, unknown or other
YNISNRKKLKRQNTEAPKRSSTTISHSPLLHFTEKHTDEKLLAGSHGSPAPPPRPLPPPGPRRRPPAPLLLRLLRPLRMAQRQVLLLRRRPRRRHRWRVRVRGSGEARVRDGDGGAEHGAVRARRRLRRLLRGQVRGGPQVLPPRHLHRRHGHQLLPAQLRLXRRRRRRLQPAQPPF

SEQ ID NO: 63685 - protein, 131 aa, Triticum aestivum
  peptide (1)..(131): Ceres Seq. ID no. 13584211
  misc_feature (11)..(130): Homolog of NCBI NO: 29466641 NR Description: expansin [Prunus persica]
  misc_feature (11)..(130): Homolog of NCBI NO: 17484121 NR Description: alpha-expansin [Prunus cerasus]
  misc_feature (13)..(130): Homolog of NCBI NO: 29467507 NR Description: expansin [Pyrus communis]
  misc_feature (1)..(130): Homolog of NCBI NO: 7407661 NR Description: alpha-expansin OsEXP6 [Oryza sativa]
  misc_feature (3)..(130): Homolog of NCBI NO: 29467505 NR Description: expansin [Pyrus communis]
  misc_feature (6)..(130): Homolog of NCBI NO: 4138912 NR Description: expansin precursor [Lycopersicon esculentum]
  misc_feature (4)..(130): Homolog of NCBI NO: 21618283 NR Description: Alpha-expansin 13 precursor (At-EXP13) (AtEx13)
  misc_feature (4)..(130): Homolog of NCBI NO: 18396479 NR Description: expansin, putative (EXP13) [Arabidopsis thaliana]
  misc_feature (4)..(130): Homolog of NCBI NO: 6714416 NR Description: putative expansin precursor [Arabidopsis thaliana]
  misc_feature (4)..(130): Homolog of NCBI NO: 7407665 NR Description: alpha-expansin OsEXP10 [Oryza sativa]
  misc_feature (117)..(117): Xaa is any aa, unknown or other
MAPPLLLLVLFLLPALAAGHQHPSSYGSSALSEWRNAKSSYFAADPGDAIGGACGFGDLGKHGYGMATVGLSTALFERGAACGGCYEVKCVEDLKYCLPGTSIVVTATNFCPPNYGXPADAGGVCNPPNHH

SEQ ID NO: 63686 - protein, 99 aa, Triticum aestivum
  peptide (1)..(99): Ceres Seq. ID no. 13584212
  misc_feature (85)..(85): Xaa is any aa, unknown or other
MAQRQVLLLRRRPRRRHRWRVRVRGSGEARVRDGDGGAEHGAVRARRRLRRLLRGQVRGGPQVLPPRHLHRRHGHQLLPAQLRLXRRRRRRLQPAQPPF

SEQ ID NO: 63687 - DNA, 1303 bp, Triticum aestivum
  misc_feature (1)..(1303): Ceres Seq. ID no. 13584292
gtggctgcatcatcaccaccaccacctcggaagtccttggcgagcgtgcgtgcgtgcgtgcgagctgtaggagggctgtgatgaaaagttgcatctgttaacggacacgagttctgctaccaagttcgacatgggttcaggaaacctgatggtgaagaaggtggtgaggcccagctcttttgacctcgacatacatctcgacaaaagctggaaggaggacgttacctgcccaatctgtctggattacccccacaatgcagtcctactgaggtgcacatcttatgagaagggctgcaggccgtttgtgtgcgacaccgaccagacccgctccaactgtcttgagaggttcaaaggtgcttatgagctgcctgccaatgtcaaggtctcgtctatagctgtggcccctcttgatagcatccacatcgtgtcgtctcacgcaaacaatcgcccaagttgcccgttgtgcagaggtgatgttatcgggtggattgtaatcagcgaggctcgtctgcatcttaaccagaagaagagatgctgtgaagaggattgctgctcctttactggcaacttcaatgagcttcagaagcacacacaacaaaagcatccagattcacgcccttcagaaatcgaccctgccaggcaagtcgattgggacaacttccagcaatcttctgatatcgtggatgtcttgagcacaatacatgcacaagttcctaatggcatcgttctcggagactatgtcattgaatatggggatgatgatactggagatgactatgaagtgctccgcagggttaggaggaagtggtggtcttttatttgttgcaaggctttttgtagatatccaaggagccgaagaagagggagaggaagggacaatagaggaagtggaaggaggaacagcaatcaggctcatctggagaacttcaatctcgaggttccgacacaagctgttgacctgagggaactcagatttgatgaaatcgatgatgagtacattgttacaggggcagtacctagtatggcaacaccaggaagaatggccagtttccattacagggatacaagatatggtcggtgatcgggcgtactacttaatagaaccagctgataaagaaaaggatttgcagccgcgatgtgatgccgcagccttcaggaaactccacccccgcccatttttcgtttcttttcctgcccccgtcgttgctaggtgccgctccagcccggacttcctgtgcataaaaagtagcaacagaaaccctctgccgccgccgttcgtttgcaatagattttcatttaccct

SEQ ID NO: 63688 - protein, 316 aa, Triticum aestivum
  peptide (1)..(316): Ceres Seq. ID no. 13584293
  misc_feature (25)..(77): Homolog of NCBI NO: 30699285 NR Description: expressed protein [Arabidopsis thaliana]
  misc_feature (25)..(77): Homolog of NCBI NO: 25365932 NR Description: unknown protein T32E8.10 [imported] - Arabidopsis
  misc_feature (109)..(216): Homolog of NCBI NO: 30699285 NR Description: expressed protein [Arabidopsis thaliana]
  misc_feature (109)..(216): Homolog of NCBI NO: 25365932 NR Description: unknown protein T32E8.10 [imported] - Arabidopsis
  misc_feature (23)..(74): Homolog of NCBI NO: 38346521 NR Description: OSJNBa0027H09.16 [Oryza sativa (japonica
  misc_feature (105)..(209): Homolog of NCBI NO: 38346521 NR Description: OSJNBa0027H09.16 [Oryza sativa (japonica
  misc_feature (11)..(82): Homolog of NCBI NO: 15230170 NR Description: expressed protein [Arabidopsis thaliana]
  misc_feature (109)..(214): Homolog of NCBI NO: 15230170 NR Description: expressed protein [Arabidopsis thaliana]
  misc_feature (9)..(294): Homolog of NCBI NO: 18417801 NR Description: expressed protein [Arabidopsis thaliana]
  misc_feature (9)..(310): Homolog of NCBI NO: 7486671 NR Description: hypothetical protein F8F16.230 - Arabidopsis
MGSGNLMVKKVVRPSSFDLDIHLDKSWKEDVTCPICLDYPHNAVLLRCTSYEKGCRPFVCDTDQTRSNCLERFKGAYELPANVKVSSIAVAPLDSIHIVSSHANNRPSCPLCRGDVIGWIVISEARLHLNQKKRCCEEDCCSFTGNFNELQKHTQQKHPDSRPSEIDPARQVDWDNFQQSSDIVDVLSTIHAQVPNGIVLGDYVIEYGDDDTGDDYEVLRRVRRKWWSFICCKAFCRYPRSRRRGRGRDNRGSGRRNSNQAHLENFNLEVPTQAVDLRELRFDEIDDEYIVTGAVPSMATPGRMASFHYRDTRYGR

SEQ ID NO: 63689 - protein, 310 aa, Triticum aestivum
  peptide (1)..(310): Ceres Seq. ID no. 13584294
  misc_feature (19)..(71): Homolog of NCBI NO: 30699285 NR Description: expressed protein [Arabidopsis thaliana]
  misc_feature (19)..(71): Homolog of NCBI NO: 25365932 NR Description: unknown protein T32E8.10 [imported] - Arabidopsis
  misc_feature (103)..(210): Homolog of NCBI NO: 30699285 NR Description: expressed protein [Arabidopsis thaliana]
  misc_feature (103)..(210): Homolog of NCBI NO: 25365932 NR Description: unknown protein T32E8.10 [imported] - Arabidopsis
  misc_feature (17)..(68): Homolog of NCBI NO: 38346521 NR Description: OSJNBa0027H09.16 [Oryza sativa (japonica
  misc_feature (99)..(203): Homolog of NCBI NO: 38346521 NR Description: OSJNBa0027H09.16 [Oryza sativa (japonica
  misc_feature (5)..(76): Homolog of NCBI NO: 15230170 NR Description: expressed protein [Arabidopsis thaliana]
  misc_feature (103)..(208): Homolog of NCBI NO: 15230170 NR Description: expressed protein [Arabidopsis thaliana]
  misc_feature (3)..(288): Homolog of NCBI NO: 18417801 NR Description: expressed protein [Arabidopsis thaliana]
  misc_feature (3)..(304): Homolog of NCBI NO: 7486671 NR Description: hypothetical protein F8F16.230 - Arabidopsis
MVKKVVRPSSFDLDIHLDKSWKEDVTCPICLDYPHNAVLLRCTSYEKGCRPFVCDTDQTRSNCLERFKGAYELPANVKVSSIAVAPLDSIHIVSSHANNRPSCPLCRGDVIGWIVISEARLHLNQKKRCCEEDCCSFTGNFNELQKHTQQKHPDSRPSEIDPARQVDWDNFQQSSDIVDVLSTIHAQVPNGIVLGDYVIEYGDDDTGDDYEVLRRVRRKWWSFICCKAFCRYPRSRRRGRGRDNRGSGRRNSNQAHLENFNLEVPTQAVDLRELRFDEIDDEYIVTGAVPSMATPGRMASFHYRDTRYGR

SEQ ID NO: 63690 - DNA, 1205 bp, Triticum aestivum
  misc_feature (1)..(1205): Ceres Seq. ID no. 13584213
accattacctagaacattcctaatcgaaaaactagaacggtggtagtactagtgtgctccactaccaccaccaacaccacgagtgagggcggtggccaaaagacaggagataaggcgagactgtgagagggacagggcgggagacctcgacgacccctctcattgtttctttccggccgtccagcgccggcaggcagcgaagctagggcagatcgaatcaacagacgcgcgccggccgccggacaagatgatgggtcgcccggtgttcgtgctcttcggctcctccatcgtgcagtacagcttcagcaacggcggatggggagccaccctcaccgacgtctacgcccgcaaggctgatattgttctcagaggatatattgcatggaactcaaggcgagcacttcaagtcattaccaaaattttccccaaggattcagcagtgcagcctagcttggtggtagtttactttggtggcaatgattcgattgctccgcacccttctgggcttggacctcatgtgccacttgaggagtacatggacaacatgaggaagataggagagcacctcaagagcctgtccgacaagactcgtgtgatctttctgagctgcccgccgctcaacgaggagctgctcaagaaatcaacgagcactgcactgagcgagattgtgcggaccaatgaaacctgccgtctctactctgaagcatgtatatctgtatcgaaagagatgggcatcaaggtggtcgatctttggaacgccatgcagaaacgagaggactgggccacagcatgctttacggacgggctgcatttgtcagaagaggggagcaatatagttgtggaagagatcctgaggatcctcaaggaggcggagtgggatccatgcctacactggaaggcgatgccgaccgagttcggggaggactcgccctacgaccttgtcgcctctagcggcaaatccaccatcaacccatccgagtggacattccacaggaaaagatcatgggaatgaacggatcgccaggacatgtgtgagatcgagcagctgcacgtgatattttgcgccggcgctcttcggtcgctttgtgttattcatctgatggaagaacgtgataagatgtttctgaattgcaagtgtccatcgggtcgtagaattaataatgaacatgtttgagttgaacaacgttgagctgagttgggtgtgc

SEQ ID NO: 63691 - protein, 254 aa, Triticum aestivum
  peptide (1)..(254): Ceres Seq. ID no. 13584214
  misc_feature (8)..(201): Pfam Name: GDSL-like Lipase/Acylhydrolase Pfam Description: GDSL-like Lipase/Acylhydrolase
  misc_feature (4)..(206): Homolog of NCBI NO: 34903948 NR Description: OSJNBa0038J17.19 [Oryza sativa (japonica
  misc_feature (2)..(230): Homolog of NCBI NO: 37535366 NR Description: putative esterase [Oryza sativa (japonica
  misc_feature (2)..(207): Homolog of NCBI NO: 15242539 NR Description: GDSL-motif lipase/hydrolase protein [Arabidopsis
  misc_feature (4)..(230): Homolog of NCBI NO: 15242002 NR Description: GDSL-motif lipase/hydrolase protein [Arabidopsis
  misc_feature (1)..(207): Homolog of NCBI NO: 38454102 NR Description: At5g45920 [Arabidopsis thaliana]
  misc_feature (1)..(238): Homolog of NCBI NO: 16974631 NR Description: At2g38180/F16M14.11 [Arabidopsis thaliana]
  misc_feature (1)..(254): Homolog of NCBI NO: 18404664 NR Description: GDSL-motif lipase/hydrolase protein [Arabidopsis
  misc_feature (4)..(254): Homolog of NCBI NO: 13161403 NR Description: CPRD49 [Vigna unguiculata]
  misc_feature (1)..(254): Homolog of NCBI NO: 18399151 NR Description: GDSL-motif lipase/hydrolase protein [Arabidopsis
  misc_feature (1)..(254): Homolog of NCBI NO: 21554235 NR Description: CPRD49 [Arabidopsis thaliana]
MMGRPVFVLFGSSIVQYSFSNGGWGATLTDVYARKADIVLRGYIAWNSRRALQVITKIFPKDSAVQPSLVVVYFGGNDSIAPHPSGLGPHVPLEEYMDNMRKIGEHLKSLSDKTRVIFLSCPPLNEELLKKSTSTALSEIVRTNETCRLYSEACISVSKEMGIKVVDLWNAMQKREDWATACFTDGLHLSEEGSNIVVEEILRILKEAEWDPCLHWKAMPTEFGEDSPYDLVASSGKSTINPSEWTFHRKRSWE

SEQ ID NO: 63692 - protein, 253 aa, Triticum aestivum
  peptide (1)..(253): Ceres Seq. ID no. 13584215
  misc_feature (7)..(200): Pfam Name: GDSL-like Lipase/Acylhydrolase Pfam Description: GDSL-like Lipase/Acylhydrolase
  misc_feature (3)..(205): Homolog of NCBI NO: 34903948 NR Description: OSJNBa0038J17.19 [Oryza sativa (japonica
  misc_feature (1)..(229): Homolog of NCBI NO: 37535366 NR Description: putative esterase [Oryza sativa (japonica
  misc_feature (1)..(206): Homolog of NCBI NO: 15242539 NR Description: GDSL-motif lipase/hydrolase protein [Arabidopsis
  misc_feature (3)..(229): Homolog of NCBI NO: 15242002 NR Description: GDSL-motif lipase/hydrolase protein [Arabidopsis
  misc_feature (1)..(206): Homolog of NCBI NO: 38454102 NR Description: At5g45920 [Arabidopsis thaliana]
  misc_feature (1)..(237): Homolog of NCBI NO: 16974631 NR Description: At2g38180/F16M14.11 [Arabidopsis thaliana]
  misc_feature (1)..(253): Homolog of NCBI NO: 18404664 NR Description: GDSL-motif lipase/hydrolase protein [Arabidopsis
  misc_feature (3)..(253): Homolog of NCBI NO: 13161403 NR Description: CPRD49 [Vigna unguiculata]
  misc_feature (1)..(253): Homolog of NCBI NO: 18399151 NR Description: GDSL-motif lipase/hydrolase protein [Arabidopsis
  misc_feature (1)..(253): Homolog of NCBI NO: 21554235 NR Description: CPRD49 [Arabidopsis thaliana]
MGRPVFVLFGSSIVQYSFSNGGWGATLTDVYARKADIVLRGYIAWNSRRALQVITKIFPKDSAVQPSLVVVYFGGNDSIAPHPSGLGPHVPLEEYMDNMRKIGEHLKSLSDKTRVIFLSCPPLNEELLKKSTSTALSEIVRTNETCRLYSEACISVSKEMGIKVVDLWNAMQKREDWATACFTDGLHLSEEGSNIVVEEILRILKEAEWDPCLHWKAMPTEFGEDSPYDLVASSGKSTINPSEWTFHRKRSWE

SEQ ID NO: 63693 - protein, 158 aa, Triticum aestivum
  peptide (1)..(158): Ceres Seq. ID no. 13584216
  misc_feature (1)..(105): Pfam Name: GDSL-like Lipase/Acylhydrolase Pfam Description: GDSL-like Lipase/Acylhydrolase
  misc_feature (1)..(110): Homolog of NCBI NO: 34903948 NR Description: OSJNBa0038J17.19 [Oryza sativa (japonica
  misc_feature (1)..(134): Homolog of NCBI NO: 37535366 NR Description: putative esterase [Oryza sativa (japonica
  misc_feature (1)..(111): Homolog of NCBI NO: 15242539 NR Description: GDSL-motif lipase/hydrolase protein [Arabidopsis
  misc_feature (1)..(134): Homolog of NCBI NO: 15242002 NR Description: GDSL-motif lipase/hydrolase protein [Arabidopsis
  misc_feature (1)..(111): Homolog of NCBI NO: 38454102 NR Description: At5g45920 [Arabidopsis thaliana]
  misc_feature (1)..(142): Homolog of NCBI NO: 16974631 NR Description: At2g38180/F16M14.11 [Arabidopsis thaliana]
  misc_feature (1)..(158): Homolog of NCBI NO: 18404664 NR Description: GDSL-motif lipase/hydrolase protein [Arabidopsis
  misc_feature (1)..(158): Homolog of NCBI NO: 13161403 NR Description: CPRD49 [Vigna unguiculata]
  misc_feature (1)..(158): Homolog of NCBI NO: 18399151 NR Description: GDSL-motif lipase/hydrolase protein [Arabidopsis
  misc_feature (1)..(158): Homolog of NCBI NO: 21554235 NR Description: CPRD49 [Arabidopsis thaliana]
MDNMRKIGEHLKSLSDKTRVIFLSCPPLNEELLKKSTSTALSEIVRTNETCRLYSEACISVSKEMGIKVVDLWNAMQKREDWATACFTDGLHLSEEGSNIVVEEILRILKEAEWDPCLHWKAMPTEFGEDSPYDLVASSGKSTINPSEWTFHRKRSWE

SEQ ID NO: 63694 - DNA, 586 bp, Triticum aestivum
  misc_feature (1)..(586): Ceres Seq. ID no. 15173379
caccacaagagaagagagagagagagagagagagagagcctgagcagcgacgatgtcgagcttgatgacgaagaaggagatcgggcagacccacgacgtgctccgcttcggcgtcaacgacagcgtcagggccgacctcgcgccggcgcaccccgtccaggccaccatccataaggagaccaagttctgggacgagaagaagaggttcgggaccgaggccatctacgggtccgccttcaacatccgcaaggacctggacgcccaaatcctctccaggttccaaaggcccccaggtgcattgccatcatctatgctaggatatgaggcaatgacaggttccttggatgattttggatttgaagattaccttaacttgccccaggactctgacagcctgcgcataccggacatgcaccacgggatggaggttcggcttggcctgtcgaagggccctgtctgccccagcttcagttgattccttccacccatgtattttgcttcccgtccagcatctacactgtatcatggattggtgaaacatgagaagtaaataattgggtattgcatcagtctgaatttcatgaac

SEQ ID NO: 63695 - protein, 140 aa, Triticum aestivum
  peptide (1)..(140): Ceres Seq. ID no. 15173380
  misc_feature (9)..(131): Pfam Name: Proteasome maturation factor UMP1 Pfam Description: Proteasome maturation factor UMP1
  misc_feature (12)..(130): Homolog of NCBI NO: 27691986 NR Description: similar to hypothetical protein HSPC014
  misc_feature (95)..(139): Homolog of NCBI NO: 2996128 NR Description: hypothetical protein [Picea mariana]
  misc_feature (95)..(139): Homolog of NCBI NO: 2996132 NR Description: hypothetical protein [Picea mariana]
  misc_feature (95)..(139): Homolog of NCBI NO: 2996130 NR Description: hypothetical protein [Picea mariana]
  misc_feature (93)..(139): Homolog of NCBI NO: 6049098 NR Description: unknown [Picea abies]
  misc_feature (11)..(139): Homolog of NCBI NO: 15240969 NR Description: expressed protein [Arabidopsis thaliana]
  misc_feature (9)..(139): Homolog of NCBI NO: 18408726 NR Description: expressed protein [Arabidopsis thaliana]
  misc_feature (9)..(139): Homolog of NCBI NO: 9828633 NR Description: F1N21.7 [Arabidopsis thaliana]
  misc_feature (9)..(139): Homolog of NCBI NO: 25493097 NR Description: hypothetical protein [imported] - Picea mariana
MSSLMTKKEIGQTHDVLRFGVNDSVRADLAPAHPVQATIHKETKFWDEKKRFGTEAIYGSAFNIRKDLDAQILSRFQRPPGALPSSMLGYEAMTGSLDDFGFEDYLNLPQDSDSLRIPDMHHGMEVRLGLSKGPVCPSFS

SEQ ID NO: 63696 - protein, 136 aa, Triticum aestivum
  peptide (1)..(136): Ceres Seq. ID no. 15173381
  misc_feature (5)..(127): Pfam Name: Proteasome maturation factor UMP1 Pfam Description: Proteasome maturation factor UMP1
  misc_feature (8)..(126): Homolog of NCBI NO: 27691986 NR Description: similar to hypothetical protein HSPC014
  misc_feature (91)..(135): Homolog of NCBI NO: 2996128 NR Description: hypothetical protein [Picea mariana]
  misc_feature (91)..(135): Homolog of NCBI NO: 2996132 NR Description: hypothetical protein [Picea mariana]
  misc_feature (91)..(135): Homolog of NCBI NO: 2996130 NR Description: hypothetical protein [Picea mariana]
  misc_feature (89)..(135): Homolog of NCBI NO: 6049098 NR Description: unknown [Picea abies]
  misc_feature (7)..(135): Homolog of NCBI NO: 15240969 NR Description: expressed protein [Arabidopsis thaliana]
  misc_feature (5)..(135): Homolog of NCBI NO: 18408726 NR Description: expressed protein [Arabidopsis thaliana]
  misc_feature (5)..(135): Homolog of NCBI NO: 9828633 NR Description: F1N21.7 [Arabidopsis thaliana]
  misc_feature (5)..(135): Homolog of NCBI NO: 25493097 NR Description: hypothetical protein [imported] - Picea mariana
MTKKEIGQTHDVLRFGVNDSVRADLAPAHPVQATIHKETKFWDEKKRFGTEAIYGSAFNIRKDLDAQILSRFQRPPGALPSSMLGYEAMTGSLDDFGFEDYLNLPQDSDSLRIPDMHHGMEVRLGLSKGPVCPSFS

SEQ ID NO: 63697 - DNA, 623 bp, Triticum aestivum
  misc_feature (1)..(623): Ceres Seq. ID no. 15173386
acatccaattccaatcacaagctccaaacaagcacagcaaaccaatccagagtaccatcggctatcaatcagcaggaggaagaaatagctgctcgatcggggaagaatcaagaggctcggcgaagatgcaggcggcgaaggagaaggtgaaggacggggtgagcgcggtgaaggccaagaccaagatcacgcaggccaaggcgtcggagaaggcggaggcggccacggcgaggtcgcacgccgagcgggagctggcgcacgagcgcggcaaggccaaggtcgccgcggccaagatggagctgcaccaggacaaggcgctccaccgggaggaggccatggagcaccgcatccacaagcacggcggccacggccgccaccaccacaagcacggcgtcggcatcgtggccgcgcccccaccggcaactggggcgggagccggggcgtaccaccatcctcccgccgccggtggccactactactaatccctaggcagctcgatcgccagctagatgggcacatgcgtcgcttctgtgtgatgtgatcttgatagctaataagcctctactttgtactctgtgtgtaatgacttaccaacgcgtgctttttaattttgcacttggttg

SEQ ID NO: 63698 - protein, 159 aa, Triticum aestivum
  peptide (1)..(159): Ceres Seq. ID no. 15173387
  misc_feature (42)..(114): Pfam Name: Late embryogenesis abundant (LEA) group 1 Pfam Description: Late embryogenesis abundant (LEA) group 1
  misc_feature (42)..(151): Homolog of NCBI NO: 15223243 NR Description: late-embryogenesis abundant protein -related
  misc_feature (42)..(104): Homolog of NCBI NO: 18652403 NR Description: unknown [Hordeum vulgare]
  misc_feature (42)..(136): Homolog of NCBI NO: 18652404 NR Description: unknown [Hordeum vulgare]
  misc_feature (42)..(159): Homolog of NCBI NO: 34897842 NR Description: P0514G12.41 [Oryza sativa (japonica
IQFQSQAPNKHSKPIQSTIGYQSAGGRNSCSIGEESRGSAKMQAAKEKVKDGVSAVKAKTKITQAKASEKAEAATARSHAERELAHERGKAKVAAAKMELHQDKALHREEAMEHRIHKHGGHGRHHHKHGVGIVAAPPPATGAGAGAYHHPPAAGGHYY

SEQ ID NO: 63699 - protein, 118 aa, Triticum aestivum
  peptide (1)..(118): Ceres Seq. ID no. 15173388
  misc_feature (1)..(73): Pfam Name: Late embryogenesis abundant (LEA) group 1 Pfam Description: Late embryogenesis abundant (LEA) group 1
  misc_feature (1)..(110): Homolog of NCBI NO: 15223243 NR Description: late-embryogenesis abundant protein -related
  misc_feature (1)..(63): Homolog of NCBI NO: 18652403 NR Description: unknown [Hordeum vulgare]
  misc_feature (1)..(95): Homolog of NCBI NO: 18652404 NR Description: unknown [Hordeum vulgare]
  misc_feature (1)..(118): Homolog of NCBI NO: 34897842 NR Description: P0514G12.41 [Oryza sativa (japonica
MQAAKEKVKDGVSAVKAKTKITQAKASEKAEAATARSHAERELAHERGKAKVAAAKMELHQDKALHREEAMEHRIHKHGGHGRHHHKHGVGIVAAPPPATGAGAGAYHHPPAAGGHYY

SEQ ID NO: 63700 - DNA, 884 bp, Triticum aestivum
  misc_feature (1)..(884): Ceres Seq. ID no. 13584263
gaagcccccgtccgattcaacaggcaaaacccccctcacgctcacgcgatgggagtcgccgcctccgccgccccccctcccccggaggccgccgcgcccgccgatccaccatccaaagaagatgcccagcatgccgctgccgccgccgccgcagcagcagcagctgcgcccgccgattcaccggcaaaggaagaggtccagtccgccgccgccgccgctcccggcggcggggcggacgcggcgggggagacggtggtcctggacgccgccgcggagggcggcgaggaggaggaaggggagtgcgggttttgcgtgtacatgaagggcggcgggtgcaaggaggagttcgtggggtgggagaagtgcgtggagcaggcggaggcggagggcagcgacgtcgtcgagcgctgccacgacgccaccgccgcgctgcgcaggtgcatggacaagttcccggactactacgagcccatcctccgcgccgagcgcgccatggccgaggatctcgaggccttcaaggccagcgaagcctccgagccctcccccgcctcgccgccgcccccggcggcsgaggaggaacagggcgacgataagaagcaggcggaggcggtggtggcgaaggaggatctcgcggcctgatcccgccgcctaggcgtgggatcttgcgattttttggtgagatttgaggcatcctagatgtgaattattttgttttacctggacgtgatctgcaaggtgggagagggcggcctctccaagaaaagttcgattcttttggtgggaattatacacttgttcacgagttctagctcgtgaactaatatggagaagtgatcttgtgctgtaataataatccaatgcatcgatactgatttgrcrcggtc

SEQ ID NO: 63701 - protein, 212 aa, Triticum aestivum
  peptide (1)..(212): Ceres Seq. ID no. 15222788
  misc_feature (16)..(208): Pfam Name: MARCKS family Pfam Description: MARCKS family
  misc_feature (14)..(82): Homolog of NCBI NO: 2204081 NR Description: insoluble protein [Pinctada fucata]
  misc_feature (84)..(170): Homolog of NCBI NO: 15241716 NR Description: hypothetical protein [Arabidopsis thaliana]
  misc_feature (87)..(169): Homolog of NCBI NO: 15242783 NR Description: hypothetical protein [Arabidopsis thaliana]
  misc_feature (83)..(211): Homolog of NCBI NO: 15242817 NR Description: hypothetical protein [Arabidopsis thaliana]
  misc_feature (17)..(179): Homolog of NCBI NO: 21592562 NR Description: unknown [Arabidopsis thaliana]
  misc_feature (17)..(179): Homolog of NCBI NO: 30683589 NR Description: expressed protein [Arabidopsis thaliana]
  misc_feature (17)..(179): Homolog of NCBI NO: 8778401 NR Description: F16A14.27 [Arabidopsis thaliana]
  misc_feature (46)..(200): Homolog of NCBI NO: 34394883 NR Description: unknown protein [Oryza sativa (japonica
  misc_feature (190)..(190): Xaa is any aa, unknown or other
EAPVRFNRQNPPHAHAMGVAASAAPPPPEAAAPADPPSKEDAQHAAAAAAAAAAAAPADSPAKEEVQSAAAAAPGGGADAAGETVVLDAAAEGGEEEEGECGFCVYMKGGGCKEEFVGWEKCVEQAEAEGSDVVERCHDATAALRRCMDKFPDYYEPILRAERAMAEDLEAFKASEASEPSPASPPPPAXEEEQGDDKKQAEAVVAKEDLAA

SEQ ID NO: 63702 - protein, 196 aa, Triticum aestivum
  peptide (1)..(196): Ceres Seq. ID no. 15222789
  misc_feature (77)..(196): Homolog of NCBI NO: 2204081 NR Description: insoluble protein [Pinctada fucata]
  misc_feature (36)..(196): Homolog of NCBI NO: 2388805 NR Description: attachment region binding protein [Gallus gallus]
  misc_feature (13)..(196): Homolog of NCBI NO: 23018055 NR Description: hypothetical protein [Thermobifida fusca]
  misc_feature (48)..(196): Homolog of NCBI NO: 37535678 NR Description: hypothetical protein [Oryza sativa (japonica
  misc_feature (61)..(196): Homolog of NCBI NO: 15224564 NR Description: glycine-rich protein [Arabidopsis thaliana]
  misc_feature (28)..(196): Homolog of NCBI NO: 24663664 NR Description: CG11274-PA [Drosophila melanogaster]
  misc_feature (79)..(196): Homolog of NCBI NO: 37533408 NR Description: hypothetical protein [Oryza sativa (japonica
  misc_feature (61)..(196): Homolog of NCBI NO: 30793991 NR Description: unknown protein [Arabidopsis thaliana]
  misc_feature (16)..(196): Homolog of NCBI NO: 34910872 NR Description: P0003E08.2 [Oryza sativa (japonica
  misc_feature (28)..(196): Homolog of NCBI NO: 34894910 NR Description: OJ1008_F01.9 [Oryza sativa (japonica
  misc_feature (190)..(190): Xaa is any aa, unknown or other
SPRPIQQAKPPSRSRDGSRRLRRPPSPGGRRARRSTIQRRCPACRCRRRRSSSSCARRFTGKGRGPVRRRRRSRRRGGRGGGDGGPGRRRGGRRGGGRGVRVLRVHEGRRVQGGVRGVGEVRGAGGGGGQRRRRALPRRHRRAAQVHGQVPGLLRAHPPRRARHGRGSRGLQGQRSLRALPRLAAAPGGXGGTGRR

SEQ ID NO: 63703 - protein, 196 aa, Triticum aestivum
  peptide (1)..(196): Ceres Seq. ID no. 15222790
  misc_feature (1)..(192): Pfam Name: MARCKS family Pfam Description: MARCKS family
  misc_feature (1)..(66): Homolog of NCBI NO: 2204081 NR Description: insoluble protein [Pinctada fucata]
  misc_feature (68)..(154): Homolog of NCBI NO: 15241716 NR Description: hypothetical protein [Arabidopsis thaliana]
  misc_feature (71)..(153): Homolog of NCBI NO: 15242783 NR Description: hypothetical protein [Arabidopsis thaliana]
  misc_feature (67)..(195): Homolog of NCBI NO: 15242817 NR Description: hypothetical protein [Arabidopsis thaliana]
  misc_feature (1)..(163): Homolog of NCBI NO: 21592562 NR Description: unknown [Arabidopsis thaliana]
  misc_feature (1)..(163): Homolog of NCBI NO: 30683589 NR Description: expressed protein [Arabidopsis thaliana]
  misc_feature (1)..(163): Homolog of NCBI NO: 8778401 NR Description: F16A14.27 [Arabidopsis thaliana]
  misc_feature (30)..(184): Homolog of NCBI NO: 34394883 NR Description: unknown protein [Oryza sativa (japonica
  misc_feature (174)..(174): Xaa is any aa, unknown or other
MGVAASAAPPPPEAAAPADPPSKEDAQHAAAAAAAAAAAAPADSPAKEEVQSAAAAAPGGGADAAGETVVLDAAAEGGEEEEGECGFCVYMKGGGCKEEFVGWEKCVEQAEAEGSDVVERCHDATAALRRCMDKFPDYYEPILRAERAMAEDLEAFKASEASEPSPASPPPPAXEEEQGDDKKQAEAVVAKEDLAA

SEQ ID NO: 63704 - DNA, 851 bp, Triticum aestivum
  misc_feature (1)..(851): Ceres Seq. ID no. 15173393
gaatccatccacctctcgagctcttttctgaagccgcaagcgagcagagcacaccgcacacgtagcagtttccctttcagatattttcttcgactagccaccatgactgctttggccaagccctccgcctcagcgccgaagccgaagaagacctccgccgctggagccgcccacccgacctacttcgagatgatcaaggaggcgatcgcggctctcaaggacaggaccgggtcgagctcggtcgccatcgccaagttcatcgaggagaagcacggcaaggccctcccggccaacttcaagaagatgctctccgtccagctccgctcctccgccgccaagggcaagctcgtcaaggtcaaggcctcctacaagctctccgacgccgccaagaaggactcccccaagcccaaggccaagcccgccgcccccaaggctgcggcgaagcccgcaaaggacgccgccaagcccaagaagaaggcctccgcgaagcccaagaaggccgccgccgctggcacgaagcgcaaggcacccgagaagaagaagctggtcgccaaagccaagaagtcgcccgcggcgaaggccaaggcgaagccgaagaccgtccgctccccggccgccaagaaggcccgcaaggtcgcctccgcttgatctgatctgatctgatcttataggtggttttaagtgtgcgttggtgctctgggtctgtacaaaaggatgcctcatcctccctgatttaggcttcggttctgctaggcaggttctatgtactatcgctggtggtgtttagtgtctggaatgttcaggtgtcagatgtatccagctcaaactctgaaatgaatttgcagtttcgc

SEQ ID NO: 63705 - protein, 215 aa, Triticum aestivum
  peptide (1)..(215): Ceres Seq. ID no. 15173394
  misc_feature (57)..(127): Pfam Name: linker histone H1 and H5 family Pfam Description: linker histone H1 and H5 family
  misc_feature (36)..(215): Homolog of NCBI NO: 13540405 NR Description: histone H1 [Lens culinaris]
  misc_feature (36)..(215): Homolog of NCBI NO: 13540403 NR Description: histone H1 [Lens culinaris]
  misc_feature (36)..(215): Homolog of NCBI NO: 13540391 NR Description: histone H1 [Pisum sativum]
  misc_feature (36)..(215): Homolog of NCBI NO: 13540395 NR Description: histone H1 [Pisum sativum]
  misc_feature (36)..(215): Homolog of NCBI NO: 13540401 NR Description: histone H1 [Lens culinaris]
  misc_feature (36)..(215): Homolog of NCBI NO: 21465095 NR Description: histone H1 [Pisum sativum subsp. abyssinicum]
  misc_feature (36)..(215): Homolog of NCBI NO: 4996567 NR Description: ribosome-sedimenting protein [Pisum sativum]
  misc_feature (36)..(215): Homolog of NCBI NO: 4106696 NR Description: ribosome-sedimenting protein [Pisum sativum]
  misc_feature (39)..(215): Homolog of NCBI NO: 32489126 NR Description: OSJNBb0018J12.6 [Oryza sativa (japonica
  misc_feature (31)..(215): Homolog of NCBI NO: 22135471 NR Description: histone H1-like protein HON101 [Zea mays]
ESIHLSSSFLKPQASRAHRTRSSFPFRYFLRLATMTALAKPSASAPKPKKTSAAGAAHPTYFEMIKEAIAALKDRTGSSSVAIAKFIEEKHGKALPANFKKMLSVQLRSSAAKGKLVKVKASYKLSDAAKKDSPKPKAKPAAPKAAAKPAKDAAKPKKKASAKPKKAAAAGTKRKAPEKKKLVAKAKKSPAAKAKAKPKTVRSPAAKKARKVASA

SEQ ID NO: 63706 - protein, 181 aa, Triticum aestivum
  peptide (1)..(181): Ceres Seq. ID no. 15173395
  misc_feature (23)..(93): Pfam Name: linker histone H1 and H5 family Pfam Description: linker histone H1 and H5 family
  misc_feature (2)..(181): Homolog of NCBI NO: 13540405 NR Description: histone H1 [Lens culinaris]
  misc_feature (2)..(181): Homolog of NCBI NO: 13540403 NR Description: histone H1 [Lens culinaris]
  misc_feature (2)..(181): Homolog of NCBI NO: 13540391 NR Description: histone H1 [Pisum sativum]
  misc_feature (2)..(181): Homolog of NCBI NO: 13540395 NR Description: histone H1 [Pisum sativum]
  misc_feature (2)..(181): Homolog of NCBI NO: 13540401 NR Description: histone H1 [Lens culinaris]
  misc_feature (2)..(181): Homolog of NCBI NO: 21465095 NR Description: histone H1 [Pisum sativum subsp. abyssinicum]
  misc_feature (2)..(181): Homolog of NCBI NO: 4996567 NR Description: ribosome-sedimenting protein [Pisum sativum]
  misc_feature (2)..(181): Homolog of NCBI NO: 4106696 NR Description: ribosome-sedimenting protein [Pisum sativum]
  misc_feature (5)..(181): Homolog of NCBI NO: 32489126 NR Description: OSJNBb0018J12.6 [Oryza sativa (japonica
  misc_feature (1)..(181): Homolog of NCBI NO: 22135471 NR Description: histone H1-like protein HON101 [Zea mays]
MTALAKPSASAPKPKKTSAAGAAHPTYFEMIKEAIAALKDRTGSSSVAIAKFIEEKHGKALPANFKKMLSVQLRSSAAKGKLVKVKASYKLSDAAKKDSPKPKAKPAAPKAAAKPAKDAAKPKKKASAKPKKAAAAGTKRKAPEKKKLVAKAKKSPAAKAKAKPKTVRSPAAKKARKVASA

SEQ ID NO: 63707 - protein, 152 aa, Triticum aestivum
  peptide (1)..(152): Ceres Seq. ID no. 15173396
  misc_feature (1)..(64): Pfam Name: linker histone H1 and H5 family Pfam Description: linker histone H1 and H5 family
  misc_feature (1)..(152): Homolog of NCBI NO: 13540405 NR Description: histone H1 [Lens culinaris]
  misc_feature (1)..(152): Homolog of NCBI NO: 13540403 NR Description: histone H1 [Lens culinaris]
  misc_feature (1)..(152): Homolog of NCBI NO: 13540391 NR Description: histone H1 [Pisum sativum]
  misc_feature (1)..(152): Homolog of NCBI NO: 13540395 NR Description: histone H1 [Pisum sativum]
  misc_feature (1)..(152): Homolog of NCBI NO: 13540401 NR Description: histone H1 [Lens culinaris]
  misc_feature (1)..(152): Homolog of NCBI NO: 21465095 NR Description: histone H1 [Pisum sativum subsp. abyssinicum]
  misc_feature (1)..(152): Homolog of NCBI NO: 4996567 NR Description: ribosome-sedimenting protein [Pisum sativum]
  misc_feature (1)..(152): Homolog of NCBI NO: 4106696 NR Description: ribosome-sedimenting protein [Pisum sativum]
  misc_feature (1)..(152): Homolog of NCBI NO: 32489126 NR Description: OSJNBb0018J12.6 [Oryza sativa (japonica
  misc_feature (1)..(152): Homolog of NCBI NO: 22135471 NR Description: histone H1-like protein HON101 [Zea mays]
MIKEAIAALKDRTGSSSVAIAKFIEEKHGKALPANFKKMLSVQLRSSAAKGKLVKVKASYKLSDAAKKDSPKPKAKPAAPKAAAKPAKDAAKPKKKASAKPKKAAAAGTKRKAPEKKKLVAKAKKSPAAKAKAKPKTVRSPAAKKARKVASA

SEQ ID NO: 63708 - DNA, 801 bp, Triticum aestivum
  misc_feature (1)..(801): Ceres Seq. ID no. 12586124
ccgctgttctacccttgctgcttcctaccctctcttgccgcctctgctgtgagcgagcgagcgcgaggaatggaggcgaggcgggagatcgccaagcgggcgcgcacggccggcacgagcaacgacgacgacgccgggagccaggggagcgcgggaggggcggcggcggcgtcctccagggccgacgtgagcaccggcgcggcggagatggacggggaggagttggccgtcgtggcggcggcggaggctgaggtggcgggctcggcggagacggaggagcacgtccagcgcatcctcctcgccatcgacaacttcacccgcaaggtgtcggagatgctggactccgggcgcgccatgttcaaggacctcgccgccgacttcgaggaccgcctctgcacgatccacaaggagagggtggagaagtgggaggaggagatccgggagctgcgcgcccgtgacgccgccaacgagcagacccgcgccgtcctccacaacgcccaactccagctcttccacatccgcgaatagtcagtcgagttcagtctgcttcgatcagctagctgttccacacatcttcagcaaaggcaagacatccaacagcactgtctgcatgcaacagcagcagctcccctgtttcttctgcatgctttctgctgtatatctttctgaacttatcagcacagctatattaacaagtccagtttgatgtagtactactaatactgtatgctcgtatgaatctgccacctgcagtgagttgccacttctgaatctgaacatgaatgccttgcactttagttg

SEQ ID NO: 63709 - protein, 175 aa, Triticum aestivum
  peptide (1)..(175): Ceres Seq. ID no. 12586125
  misc_feature (42)..(167): Homolog of NCBI NO: 11283453 NR Description: hypothetical protein F15A17.80 - Arabidopsis
  misc_feature (39)..(167): Homolog of NCBI NO: 30679873 NR Description: expressed protein [Arabidopsis thaliana]
  misc_feature (47)..(138): Homolog of NCBI NO: 13324791 NR Description: unknown protein [Oryza sativa]
  misc_feature (32)..(170): Homolog of NCBI NO: 29367593 NR Description: unknown [Oryza sativa (japonica cultivar-group)]
  misc_feature (13)..(170): Homolog of NCBI NO: 34902406 NR Description: Unknown protein [Oryza sativa (japonica
PLFYPCCFLPSLAASAVSERARGMEARREIAKRARTAGTSNDDDAGSQGSAGGAAAASSRADVSTGAAEMDGEELAVVAAAEAEVAGSAETEEHVQRILLAIDNFTRKVSEMLDSGRAMFKDLAADFEDRLCTIHKERVEKWEEEIRELRARDAANEQTRAVLHNAQLQLFHIRE

SEQ ID NO: 63710 - protein, 152 aa, Triticum aestivum
  peptide (1)..(152): Ceres Seq. ID no. 12586126
  misc_feature (19)..(144): Homolog of NCBI NO: 11283453 NR Description: hypothetical protein F15A17.80 - Arabidopsis
  misc_feature (16)..(144): Homolog of NCBI NO: 30679873 NR Description: expressed protein [Arabidopsis thaliana]
  misc_feature (24)..(115): Homolog of NCBI NO: 13324791 NR Description: unknown protein [Oryza sativa]
  misc_feature (9)..(147): Homolog of NCBI NO: 29367593 NR Description: unknown [Oryza sativa (japonica cultivar-group)]
  misc_feature (1)..(147): Homolog of NCBI NO: 34902406 NR Description: Unknown protein [Oryza sativa (japonica
MEARREIAKRARTAGTSNDDDAGSQGSAGGAAAASSRADVSTGAAEMDGEELAVVAAAEAEVAGSAETEEHVQRILLAIDNFTRKVSEMLDSGRAMFKDLAADFEDRLCTIHKERVEKWEEEIRELRARDAANEQTRAVLHNAQLQLFHIRE

SEQ ID NO: 63711 - protein, 106 aa, Triticum aestivum
  peptide (1)..(106): Ceres Seq. ID no. 12586127
  misc_feature (1)..(98): Homolog of NCBI NO: 11283453 NR Description: hypothetical protein F15A17.80 - Arabidopsis
  misc_feature (1)..(98): Homolog of NCBI NO: 30679873 NR Description: expressed protein [Arabidopsis thaliana]
  misc_feature (1)..(69): Homolog of NCBI NO: 13324791 NR Description: unknown protein [Oryza sativa]
  misc_feature (1)..(101): Homolog of NCBI NO: 29367593 NR Description: unknown [Oryza sativa (japonica cultivar-group)]
  misc_feature (1)..(101): Homolog of NCBI NO: 34902406 NR Description: Unknown protein [Oryza sativa (japonica
MDGEELAVVAAAEAEVAGSAETEEHVQRILLAIDNFTRKVSEMLDSGRAMFKDLAADFEDRLCTIHKERVEKWEEEIRELRARDAANEQTRAVLHNAQLQLFHIRE

SEQ ID NO: 63712 - DNA, 939 bp, Triticum aestivum
  misc_feature (1)..(939): Ceres Seq. ID no. 15173400
gactccagtccccccaaattacaacctctctctctcgccgtctgctcgctcgctcgtcccccaaatcccaccccctccccgaccgaaccccagcggcgtcgccggcgatggagtgcgtcatcggcgtggtgggcagcgacttcgcggtggtggcggcggacacgtccgccgtgcagagcatcctcgtccacaagacggacgaggacaagatcatgctcctcgactcccacaagctcatgggcgcctccggggagcccggcgaccgcgtgcagttcaccgagttcatccagaagaacctccacctctaccagttccgcaacaacatgccgctcagcaccgccgccaccgccaacttcacccgcggcgagctcgccaccgccctgcgcaagaatccctactccgtaaacatcatacttgcagggtttgataaagacgctggtgcatcgatgtactacattgactacatcgcgacgctccacaagatcgacaagggagcattcgggtacgggtcgtacttctgtctgtcgctgatggacaagttgtaccgccctgacatgtctgtcgaggaagcggtagaccttgttgacaagtgcatcaaggagatcagactccggctggtcgtcgcgcctcagaatttcgccatcaagatcgtggacaaggatggcgccagggactatgctaggcgtgagatcggaggtgacagtcctgcagccgcaaccgcaaccgcagcagtagcaacaattgcctgaggtgattggccctgtcggtggtcatttggctgggtggaggctgaacccttcctgtcaattgtttccgagtactgtcactatgtaatcgcaatacgtttcggttcgagaactgtgttgcaaattctcccagatgtggactagtctgtttatgaccccctatttcatggttatatgtttcactgtttcttgt

SEQ ID NO: 63713 - protein, 248 aa, Triticum aestivum
  peptide (1)..(248): Ceres Seq. ID no. 15173401
  misc_feature (36)..(217): Pfam Name: Proteasome A-type and B-type Pfam Description: Proteasome A-type and B-type
  misc_feature (36)..(221): Homolog of NCBI NO: 8394079 NR Description: proteasome (prosome, macropain) subunit, beta
  misc_feature (36)..(224): Homolog of NCBI NO: 30585195 NR Description: Homo sapiens proteasome (prosome, macropain)
  misc_feature (36)..(224): Homolog of NCBI NO: 4506195 NR Description: proteasome beta 2 subunit
  misc_feature (36)..(224): Homolog of NCBI NO: 19113828 NR Description: proteasome component; c7-I subfamily
  misc_feature (36)..(224): Homolog of NCBI NO: 29841035 NR Description: similar to NM_017284 proteasome (prosome,
  misc_feature (36)..(169): Homolog of NCBI NO: 14594929 NR Description: putative beta4 proteasome subunit [Nicotiana
  misc_feature (36)..(229): Homolog of NCBI NO: 15228805 NR Description: 20S proteasome beta subunit D (PBD1) [Arabidopsis
  misc_feature (36)..(228): Homolog of NCBI NO: 15233580 NR Description: 20S proteasome beta subunit D2 (PBD2)
  misc_feature (36)..(248): Homolog of NCBI NO: 17380213 NR Description: Proteasome subunit beta type 2 (20S proteasome
  misc_feature (36)..(248): Homolog of NCBI NO: 27552546 NR Description: 20S proteasome beta 4 subunit
LQSPQITTSLSRRLLARSSPKSHPLPDRTPAASPAMECVIGVVGSDFAVVAADTSAVQSILVHKTDEDKIMLLDSHKLMGASGEPGDRVQFTEFIQKNLHLYQFRNNMPLSTAATANFTRGELATALRKNPYSVNIILAGFDKDAGASMYYIDYIATLHKIDKGAFGYGSYFCLSLMDKLYRPDMSVEEAVDLVDKCIKEIRLRLVVAPQNFAIKIVDKDGARDYARREIGGDSPAAATATAAVATIA

SEQ ID NO: 63714 - protein, 213 aa, Triticum aestivum; identical to SEQ ID NO: 56016
  peptide (1)..(213): Ceres Seq. ID no. 15173402
  misc_feature (1)..(182): Pfam Name: Proteasome A-type and B-type Pfam Description: Proteasome A-type and B-type
  misc_feature (1)..(186): Homolog of NCBI NO: 8394079 NR Description: proteasome (prosome, macropain) subunit, beta
  misc_feature (1)..(189): Homolog of NCBI NO: 30585195 NR Description: Homo sapiens proteasome (prosome, macropain)
  misc_feature (1)..(189): Homolog of NCBI NO: 4506195 NR Description: proteasome beta 2 subunit
  misc_feature (1)..(189): Homolog of NCBI NO: 19113828 NR Description: proteasome component; c7-I subfamily
  misc_feature (1)..(189): Homolog of NCBI NO: 29841035 NR Description: similar to NM_017284 proteasome (prosome,
  misc_feature (1)..(134): Homolog of NCBI NO: 14594929 NR Description: putative beta4 proteasome subunit [Nicotiana
  misc_feature (1)..(194): Homolog of NCBI NO: 15228805 NR Description: 20S proteasome beta subunit D (PBD1) [Arabidopsis
  misc_feature (1)..(193): Homolog of NCBI NO: 15233580 NR Description: 20S proteasome beta subunit D2 (PBD2)
  misc_feature (1)..(213): Homolog of NCBI NO: 17380213 NR Description: Proteasome subunit beta type 2 (20S proteasome
  misc_feature (1)..(213): Homolog of NCBI NO: 27552546 NR Description: 20S proteasome beta 4 subunit

SEQ ID NO: 63715 - protein, 178 aa, Triticum aestivum; identical to SEQ ID NO: 56017
  peptide (1)..(178): Ceres Seq. ID no. 15173403
  misc_feature (1)..(147): Pfam Name: Proteasome A-type and B-type Pfam Description: Proteasome A-type and B-type
  misc_feature (1)..(151): Homolog of NCBI NO: 8394079 NR Description: proteasome (prosome, macropain) subunit, beta
  misc_feature (1)..(154): Homolog of NCBI NO: 30585195 NR Description: Homo sapiens proteasome (prosome, macropain)
  misc_feature (1)..(154): Homolog of NCBI NO: 4506195 NR Description: proteasome beta 2 subunit
  misc_feature (1)..(154): Homolog of NCBI NO: 19113828 NR Description: proteasome component; c7-I subfamily
  misc_feature (1)..(154): Homolog of NCBI NO: 29841035 NR Description: similar to NM_017284 proteasome (prosome,
  misc_feature (1)..(99): Homolog of NCBI NO: 14594929 NR Description: putative beta4 proteasome subunit [Nicotiana
  misc_feature (1)..(159): Homolog of NCBI NO: 15228805 NR Description: 20S proteasome beta subunit D (PBD1) [Arabidopsis
  misc_feature (1)..(158): Homolog of NCBI NO: 15233580 NR Description: 20S proteasome beta subunit D2 (PBD2)
  misc_feature (1)..(178): Homolog of NCBI NO: 17380213 NR Description: Proteasome subunit beta type 2 (20S proteasome
  misc_feature (1)..(178): Homolog of NCBI NO: 27552546 NR Description: 20S proteasome beta 4 subunit

SEQ ID NO: 63716 - DNA, 850 bp, Triticum aestivum
  misc_feature (1)..(850): Ceres Seq. ID no. 12616797
actgactgggttggacttggggctgccctccccacggccacgctagaccgcccgctcctgccaagatccaacacaactttccgccccctcgtccggtcgtcgggccgtcgccgccgaacaccgcccccctccaccgaagcgcggcagctcgaaggttcgtgttctaataagcttattccccttgaggcagcatgcctaagataaagacgagccgtgtgaagtatcctgaaggatgggagcttattgaaccaactctccgtgatttggaagccaaaatgagagaagctgagaatgatacacatgatgggaagaggaagtgtgaggctctctggccaatcttccgtatttctcaccaaaagagccgttatatatatgatctctactatcgaaggaaggagataaaaaaggagctgtatgagttttgcttggaccaaggttatgcagacaaaaatctgattgctaagtggaaaaagccaggttatgagcgtctctgctgcctccgctgcatacagacacgagaccacaactttgcaaccacctgcgtctgcagggtccccaagcacctcagggaagagacggtgatagaatgtgtccactgcggatgcaaggggtgtgccagcggcgattgaagtcgccactcgttgttaagaataatctgaaaccgattgctcgagatgctctgttggatccctgatgaatgaatgaaaacaagtaacgtacaatcaggtgattcgtccatatattcactgtaaactctcgagccttggtatgtctttgcgtgagaagactcggttttctgccgtggaagttgacaactgtttcgctgagaatgttatgttaacccgatctt

SEQ ID NO: 63717 - protein, 145 aa, Triticum aestivum
  peptide (1)..(145): Ceres Seq. ID no. 12616798
  misc_feature (1)..(143): Pfam Name: G10 protein Pfam Description: G10 protein
  misc_feature (1)..(140): Homolog of NCBI NO: 16758328 NR Description: maternal G10 transcript [Rattus norvegicus]
  misc_feature (1)..(142): Homolog of NCBI NO: 31207407 NR Description: ENSANGP00000020650 [Anopheles gambiae]
  misc_feature (1)..(142): Homolog of NCBI NO: 32171175 NR Description: maternal G10 transcript [Homo sapiens]
  misc_feature (1)..(142): Homolog of NCBI NO: 120625 NR Description: G10 PROTEIN
  misc_feature (2)..(142): Homolog of NCBI NO: 15128111 NR Description: G10-like protein [Branchiostoma belcheri]
  misc_feature (1)..(142): Homolog of NCBI NO: 15029378 NR Description: G10 protein [Branchiostoma belcheri]
  misc_feature (1)..(144): Homolog of NCBI NO: 544359 NR Description: G10 PROTEIN HOMOLOG
  misc_feature (1)..(130): Homolog of NCBI NO: 5852181 NR Description: zhb0011.1 [Oryza sativa (indica cultivar-group)]
  misc_feature (1)..(145): Homolog of NCBI NO: 15233517 NR Description: G10 - like protein
  misc_feature (1)..(145): Homolog of NCBI NO: 34908438 NR Description: putative G10 protein [Oryza sativa (japonica
MPKIKTSRVKYPEGWELIEPTLRDLEAKMREAENDTHDGKRKCEALWPIFRISHQKSRYIYDLYYRRKEIKKELYEFCLDQGYADKNLIAKWKKPGYERLCCLRCIQTRDHNFATTCVCRVPKHLREETVIECVHCGCKGCASGD

SEQ ID NO: 63718 - protein, 117 aa, Triticum aestivum
  peptide (1)..(117): Ceres Seq. ID no. 12616799
  misc_feature (1)..(115): Pfam Name: G10 protein Pfam Description: G10 protein
  misc_feature (1)..(112): Homolog of NCBI NO: 16758328 NR Description: maternal G10 transcript [Rattus norvegicus]
  misc_feature (1)..(114): Homolog of NCBI NO: 31207407 NR Description: ENSANGP00000020650 [Anopheles gambiae]
  misc_feature (1)..(114): Homolog of NCBI NO: 32171175 NR Description: maternal G10 transcript [Homo sapiens]
  misc_feature (1)..(114): Homolog of NCBI NO: 120625 NR Description: G10 PROTEIN
  misc_feature (1)..(114): Homolog of NCBI NO: 15128111 NR Description: G10-like protein [Branchiostoma belcheri]
  misc_feature (1)..(114): Homolog of NCBI NO: 15029378 NR Description: G10 protein [Branchiostoma belcheri]
  misc_feature (1)..(116): Homolog of NCBI NO: 544359 NR Description: G10 PROTEIN HOMOLOG
  misc_feature (1)..(102): Homolog of NCBI NO: 5852181 NR Description: zhb0011.1 [Oryza sativa (indica cultivar-group)]
  misc_feature (1)..(117): Homolog of NCBI NO: 15233517 NR Description: G10 - like protein
  misc_feature (1)..(117): Homolog of NCBI NO: 34908438 NR Description: putative G10 protein [Oryza sativa (japonica
MREAENDTHDGKRKCEALWPIFRISHQKSRYIYDLYYRRKEIKKELYEFCLDQGYADKNLIAKWKKPGYERLCCLRCIQTRDHNFATTCVCRVPKHLREETVIECVHCGCKGCASGD

SEQ ID NO: 63719 - DNA, 882 bp, Triticum aestivum
  misc_feature (1)..(882): Ceres Seq. ID no. 13585616
ctagctcgattcgattccgccgccgccgcccaagcccgaggaggacgattcgattccgccgccgccgcccaagccgcccaagcccgaggaggacgattcgattccgccgccgccgcccaagccgcccaagcccgaggaggacgattcgattccaccgccgccgccgccgcccaagcccgaggaggagaggagaggagaggagaggatggcgtccgtggggccgacgctcgagtccctcgtcgaccgtgagcctcccttccccttccttccttcctccctccctaaacctagcagcttgtttcagtttcaatctcaccgtctttctttcttgttttctgtatgtatgtatgtatgtatgtatgtagaagtgatctccgtcatcaccaacgacggccgcaacatcgtggggactctgcggggcttcgaccaggccaccaacataatcctcgacgagtcccacgagagggtctactccactaaggagggagtacagcagcttgtccttggtctgtacatcatcaggggtgataacataggcgtggtgggtgaggtggacgaggagctggacgcggcgctggacatgtcgaagctgagagcgcagcccctcaagccagtcatccactgaagatgatgaaatgttctatcgatctgatcctgatcgcgcaagccgaagctgatgttgctcagtcaatctgtaccgtaggttaatcgattgatcgctcactcatatctcatatctcatatcatggacccttgtatgatgaaaaaaaacagggtttgctgcgtcgatggaccggtcatgttcttgtatgagagagtgatacatgcatctctgtgcacgtaagtaatgaatgaatgaatgaagtaggcaattgatgttgg

SEQ ID NO: 63720 - protein, 139 aa, Triticum aestivum
  peptide (1)..(139): Ceres Seq. ID no. 13585617
  misc_feature (54)..(115): Pfam Name: LSM domain Pfam Description: LSM domain
  misc_feature (1)..(27): Homolog of NCBI NO: 26000243 NR Description: adhesin FhaB [Bordetella avium]
  misc_feature (52)..(110): Homolog of NCBI NO: 28279736 NR Description: Similar to U6 snRNA-associated Sm-like protein
  misc_feature (56)..(139): Homolog of NCBI NO: 19076009 NR Description: splicing factor [Schizosaccharomyces pombe]
  misc_feature (52)..(137): Homolog of NCBI NO: 23612724 NR Description: u6 snRNA-associated sm-like protein, putative
  misc_feature (55)..(137): Homolog of NCBI NO: 39584186 NR Description: Hypothetical protein CBG05470 [Caenorhabditis
  misc_feature (55)..(137): Homolog of NCBI NO: 17544148 NR Description: SM protein (10.8 kD) [Caenorhabditis elegans]
  misc_feature (52)..(139): Homolog of NCBI NO: 24655606 NR Description: CG2021-PA [Drosophila melanogaster]
  misc_feature (52)..(139): Homolog of NCBI NO: 7706425 NR Description: U6 snRNA-associated Sm-like protein LSm8 [Homo
  misc_feature (54)..(139): Homolog of NCBI NO: 15218779 NR Description: small nuclear ribonucleo protein -related
  misc_feature (11)..(139): Homolog of NCBI NO: 25404943 NR Description: protein F1E22.8 [imported] - Arabidopsis thaliana
MASVGPTLESLVDREPPFPFLPSSLPKPSSLFQFQSHRLSFLFSVCMYVCMYVEVISVITNDGRNIVGTLRGFDQATNIILDESHERVYSTKEGVQQLVLGLYIIRGDNIGVVGEVDEELDAALDMSKLRAQPLKPVIH

SEQ ID NO: 63721 - protein, 120 aa, Triticum aestivum
  peptide (1)..(120): Ceres Seq. ID no. 13585618
  misc_feature (19)..(75): Pfam Name: Protamine P1 Pfam Description: Protamine P1
SSIRFRRRRPSPRRTIRFRRRRPSRPSPRRTIRFRRRRPSRPSPRRTIRFHRRRRRPSPRRRGEERRGWRPWGRRSSPSSTVSLPSPSFLPPSLNLAACFSFNLTVFLSCFLYVCMYVCM

SEQ ID NO: 63722 - protein, 93 aa, Triticum aestivum
  peptide (1)..(93): Ceres Seq. ID no. 13585619
  misc_feature (8)..(69): Pfam Name: LSM domain Pfam Description: LSM domain
  misc_feature (6)..(64): Homolog of NCBI NO: 28279736 NR Description: Similar to U6 snRNA-associated Sm-like protein
  misc_feature (10)..(93): Homolog of NCBI NO: 19076009 NR Description: splicing factor [Schizosaccharomyces pombe]
  misc_feature (6)..(91): Homolog of NCBI NO: 23612724 NR Description: u6 snRNA-associated sm-like protein, putative
  misc_feature (9)..(91): Homolog of NCBI NO: 39584186 NR Description: Hypothetical protein CBG05470 [Caenorhabditis
  misc_feature (9)..(91): Homolog of NCBI NO: 17544148 NR Description: SM protein (10.8 kD) [Caenorhabditis elegans]
  misc_feature (6)..(93): Homolog of NCBI NO: 24655606 NR Description: CG2021-PA [Drosophila melanogaster]
  misc_feature (6)..(93): Homolog of NCBI NO: 7706425 NR Description: U6 snRNA-associated Sm-like protein LSm8 [Homo
  misc_feature (8)..(93): Homolog of NCBI NO: 15218779 NR Description: small nuclear ribonucleo protein -related
  misc_feature (1)..(93): Homolog of NCBI NO: 25404943 NR Description: protein F1E22.8 [imported] - Arabidopsis thaliana
MYVCMYVEVISVITNDGRNIVGTLRGFDQATNIILDESHERVYSTKEGVQQLVLGLYIIRGDNIGVVGEVDEELDAALDMSKLRAQPLKPVIH

SEQ ID NO: 63723 - DNA, 1162 bp, Triticum aestivum
  misc_feature (1)..(1162): Ceres Seq. ID no. 13598468
aacacaaaaacgaaatgccactgctgcagctgccgaccgcgtgtggcgccgctgcggcgtcggcgtcggcgccgggccccttcttgctctcacggccgccgccctcgcggctgcgcgcgtcgcacgtcctcttcgccttccctcgcctgaggaaatacggccgccggagccgcgagccggtacccaccaccctcgacgacgacgacgaggaggaggcggatgaggacgacgacgacgacatggaggaggcggttgacgaggacatcttcctcaagaaccggcccaagccggccggtttcggcgtggggaagacctacaccaccgacgtcgaagagcagcttctccgggagatgggcatcggcggcgccgggcgcaagagcaaatcggctccgcccaagagcagcaaaaccaacggctcggccacagaaaccgccgcagattgcagtaatgatggcgttcatgttcgtatttggaacctcccgaaaaagaagaacatacataaggacctgaacctagctttcaaagggtttcctggcctggtaactataaacccagcaaactctggaactaagaagacccgtgatcctatttgtaagggttttgcatttgtcaaactggagtcagtggacgctgcgacgaggtttgttgaactgtactctcgtaaagctgtgtcgttcggcaaggttgagaagccaatcaagtgctgtattgttgaagggcacatctctacggatccttcaggtccagcatccagcagtcagccaccagggtcgaacccacaacggttggtagccgtaagatgagcagcacagttgatctgtcatcaatccagttgccactcggtacttcaacagacggagaattccgggaagaaggttcgctacatagatatcggcatgcttcgctcaagattgcgaagacacggaccgtttggtcggaattcccgattttgtagatgatatcaagcattgacattagcaggaaaccctttctccaatgggtttatttagaagataggcagggattagactcaggtatgcagtggttttttttagttaaattcacgtgaatgtattgtgtctaaattaggtccactgtttcggagaaggatttgaatctaaatccgcggcgtcgttataaatccccagattaaagttgctgc

SEQ ID NO: 63724 - protein, 266 aa, Triticum aestivum
  peptide (1)..(266): Ceres Seq. ID no. 13598469
  misc_feature (65)..(238): Homolog of NCBI NO: 30698005 NR Description: RNA recognition motif (RRM)-containing protein
  misc_feature (65)..(238): Homolog of NCBI NO: 25406039 NR Description: F20P5.8 [imported] - Arabidopsis thaliana
HKNEMPLLQLPTACGAAAASASAPGPFLLSRPPPSRLRASHVLFAFPRLRKYGRRSREPVPTTLDDDDEEEADEDDDDDMEEAVDEDIFLKNRPKPAGFGVGKTYTTDVEEQLLREMGIGGAGRKSKSAPPKSSKTNGSATETAADCSNDGVHVRIWNLPKKKNIHKDLNLAFKGFPGLVTINPANSGTKKTRDPICKGFAFVKLESVDAATRFVELYSRKAVSFGKVEKPIKCCIVEGHISTDPSGPASSSQPPGSNPQRLVAVR

SEQ ID NO: 63725 - protein, 262 aa, Triticum aestivum
  peptide (1)..(262): Ceres Seq. ID no. 13598470
  misc_feature (61)..(234): Homolog of NCBI NO: 30698005 NR Description: RNA recognition motif (RRM)-containing protein
  misc_feature (61)..(234): Homolog of NCBI NO: 25406039 NR Description: F20P5.8 [imported] - Arabidopsis thaliana
MPLLQLPTACGAAAASASAPGPFLLSRPPPSRLRASHVLFAFPRLRKYGRRSREPVPTTLDDDDEEEADEDDDDDMEEAVDEDIFLKNRPKPAGFGVGKTYTTDVEEQLLREMGIGGAGRKSKSAPPKSSKTNGSATETAADCSNDGVHVRIWNLPKKKNIHKDLNLAFKGFPGLVTINPANSGTKKTRDPICKGFAFVKLESVDAATRFVELYSRKAVSFGKVEKPIKCCIVEGHISTDPSGPASSSQPPGSNPQRLVAVR

SEQ ID NO: 63726 - protein, 187 aa, Triticum aestivum
  peptide (1)..(187): Ceres Seq. ID no. 13598471
  misc_feature (1)..(159): Homolog of NCBI NO: 30698005 NR Description: RNA recognition motif (RRM)-containing protein
  misc_feature (1)..(159): Homolog of NCBI NO: 25406039 NR Description: F20P5.8 [imported] - Arabidopsis thaliana
MEEAVDEDIFLKNRPKPAGFGVGKTYTTDVEEQLLREMGIGGAGRKSKSAPPKSSKTNGSATETAADCSNDGVHVRIWNLPKKKNIHKDLNLAFKGFPGLVTINPANSGTKKTRDPICKGFAFVKLESVDAATRFVELYSRKAVSFGKVEKPIKCCIVEGHISTDPSGPASSSQPPGSNPQRLVAVR

SEQ ID NO: 63727 - DNA, 1623 bp, Triticum aestivum
  misc_feature (1)..(1623): Ceres Seq. ID no. 13655660
aaaaaccctccttcgcccattcattccccactcctttcgccccaaaccccctccacccgccgcattcccatggctaccaccgccgcggctgccgccgccgccgccgccaccgcctccacccgggcaaacagcctctcccgcatcttctcctcctcctcgccaatcgtacaaccacccaagcgcaatcccaagaccaagagcgcgccgaagccgaagccgacgccgaaaccgcccgccgccgatgccgtctccatcgcggacgagaagcccccgaagcccctcggcgcacagcccgccgccaaaggtgattccgacgggaagcacaagctcccgaagccccttgggcttctcgtcaaggccctcagccggcagcgcgaccctgacaagctgatctccggcttcatccaagcgtcaaccgtgtcgtcgcgcttccgcgaccggcaccgcgtgttcgagatagcggtgagccgcctcacttccctcggccgccaagacggcatcgaggccatcatcgaagcgcagatgcccttcctcgagacctcagccgagggattcgcctcgcgcctcatccgcctctacggccgtgcctccatgccatcccacgcggccgcaaccttccataaacttcccgcgcagcataaatccaacatgacattcaactcccttctttcctgttacgccgatgccggagattttgacgggctcactgctgcattccaggagatcccagccacttacccctcgattgttcccaccgtatactcttacaacgtactcatccacgcattgtgccggaagcccgacgtctcagctgctcttgacgctgtccatctcatggagaagatcggtgtttcacctgacattattactttcaacacgctgttgaatgggttttgcaacaatggccgcttggatgaagcagagacagtatgggagatgatcaaggagaggaatttggagcctgacgccaagtgctacaatgccaagctgcggggtttggttgcagaagggaggattgatgatgcagctgctgtgctggagggattggagaaggatgggccaaaacccgatacagtatcctacaatgagttgattcgaggatattgcaaagccgggaagttacaggaggccaagaagctgtatgatgatttggtaaaaaatgagtgtgccccaaataagggaacatatgagactcttctgccacaccttctgcaggctggggagctggattgtgcactgacgtactgttataaaatctttagtcataaaaggaaccttagagtggagtgtggtgtgctgcaggatgtagtgaatgcattggtagatgtattgagggtggaggaggctgccaagattattgtgctggggcggaagaagtactacccccgaaagggtttgaggatgcctgatagtacaaaaaggcagtgaattaagagctgaaactgatgaggaagaagcaatatcagaagaagagtgtgaagtggagcacgagactgaaaaataaattcataggtcagacttttactgatgcatgccaaatttcaccatggcctggtttactctgttcctctgttggcatgatacaacaaaaagtgcaagttaaagtagtggttaaactagtcc

SEQ ID NO: 63728 - protein, 475 aa, Triticum aestivum
  peptide (1)..(475): Ceres Seq. ID no. 13655661
  misc_feature (324)..(358): Pfam Name: PPR repeat Pfam Description: PPR repeat
  misc_feature (98)..(460): Homolog of NCBI NO: 21553755 NR Description: putative membrane-associated salt-inducible
  misc_feature (121)..(463): Homolog of NCBI NO: 18398767 NR Description: pentatricopeptide (PPR) repeat-containing protein
  misc_feature (100)..(462): Homolog of NCBI NO: 25455786 NR Description: membrane-associated salt-inducible protein like
  misc_feature (100)..(462): Homolog of NCBI NO: 15234493 NR Description: pentatricopeptide (PPR) repeat-containing protein
  misc_feature (138)..(463): Homolog of NCBI NO: 15231160 NR Description: pentatricopeptide (PPR) repeat-containing protein
  misc_feature (113)..(469): Homolog of NCBI NO: 15222796 NR Description: pentatricopeptide (PPR) repeat-containing protein
  misc_feature (111)..(468): Homolog of NCBI NO: 21617993 NR Description: unknown [Arabidopsis thaliana]
  misc_feature (111)..(468): Homolog of NCBI NO: 18399887 NR Description: pentatricopeptide (PPR) repeat-containing protein
  misc_feature (34)..(82): Homolog of NCBI NO: 34910148 NR Description: B1070A12.17 [Oryza sativa (japonica
  misc_feature (73)..(474): Homolog of NCBI NO: 34910148 NR Description: B1070A12.17 [Oryza sativa (japonica
KNPPSPIHSPLLSPQTPSTRRIPMATTAAAAAAAAATASTRANSLSRIFSSSSPIVQPPKRNPKTKSAPKPKPTPKPPAADAVSIADEKPPKPLGAQPAAKGDSDGKHKLPKPLGLLVKALSRQRDPDKLISGFIQASTVSSRFRDRHRVFEIAVSRLTSLGRQDGIEAIIEAQMPFLETSAEGFASRLIRLYGRASMPSHAAATFHKLPAQHKSNMTFNSLLSCYADAGDFDGLTAAFQEIPATYPSIVPTVYSYNVLIHALCRKPDVSAALDAVHLMEKIGVSPDIITFNTLLNGFCNNGRLDEAETVWEMIKERNLEPDAKCYNAKLRGLVAEGRIDDAAAVLEGLEKDGPKPDTVSYNELIRGYCKAGKLQEAKKLYDDLVKNECAPNKGTYETLLPHLLQAGELDCALTYCYKIFSHKRNLRVECGVLQDVVNALVDVLRVEEAAKIIVLGRKKYYPRKGLRMPDSTKRQ

SEQ ID NO: 63729 - protein, 452 aa, Triticum aestivum
  peptide (1)..(452): Ceres Seq. ID no. 13655662
  misc_feature (301)..(335): Pfam Name: PPR repeat Pfam Description: PPR repeat
  misc_feature (75)..(437): Homolog of NCBI NO: 21553755 NR Description: putative membrane-associated salt-inducible
  misc_feature (98)..(440): Homolog of NCBI NO: 18398767 NR Description: pentatricopeptide (PPR) repeat-containing protein
  misc_feature (77)..(439): Homolog of NCBI NO: 25455786 NR Description: membrane-associated salt-inducible protein like
  misc_feature (77)..(439): Homolog of NCBI NO: 15234493 NR Description: pentatricopeptide (PPR) repeat-containing protein
  misc_feature (115)..(440): Homolog of NCBI NO: 15231160 NR Description: pentatricopeptide (PPR) repeat-containing protein
  misc_feature (90)..(446): Homolog of NCBI NO: 15222796 NR Description: pentatricopeptide (PPR) repeat-containing protein
  misc_feature (88)..(445): Homolog of NCBI NO: 21617993 NR Description: unknown [Arabidopsis thaliana]
  misc_feature (88)..(445): Homolog of NCBI NO: 18399887 NR Description: pentatricopeptide (PPR) repeat-containing protein
  misc_feature (11)..(59): Homolog of NCBI NO: 34910148 NR Description: B1070A12.17 [Oryza sativa (japonica
  misc_feature (50)..(451): Homolog of NCBI NO: 34910148 NR Description: B1070A12.17 [Oryza sativa (japonica
MATTAAAAAAAAATASTRANSLSRIFSSSSPIVQPPKRNPKTKSAPKPKPTPKPPAADAVSIADEKPPKPLGAQPAAKGDSDGKHKLPKPLGLLVKALSRQRDPDKLISGFIQASTVSSRFRDRHRVFEIAVSRLTSLGRQDGIEAIIEAQMPFLETSAEGFASRLIRLYGRASMPSHAAATFHKLPAQHKSNMTFNSLLSCYADAGDFDGLTAAFQEIPATYPSIVPTVYSYNVLIHALCRKPDVSAALDAVHLMEKIGVSPDIITFNTLLNGFCNNGRLDEAETVWEMIKERNLEPDAKCYNAKLRGLVAEGRIDDAAAVLEGLEKDGPKPDTVSYNELIRGYCKAGKLQEAKKLYDDLVKNECAPNKGTYETLLPHLLQAGELDCALTYCYKIFSHKRNLRVECGVLQDVVNALVDVLRVEEAAKIIVLGRKKYYPRKGLRMPDSTKRQ

SEQ ID NO: 63730 - protein, 301 aa, Triticum aestivum
  peptide (1)..(301): Ceres Seq. ID no. 13655663
  misc_feature (150)..(184): Pfam Name: PPR repeat Pfam Description: PPR repeat
  misc_feature (1)..(290): Homolog of NCBI NO: 34908820 NR Description: P0557A01.33 [Oryza sativa (japonica
  misc_feature (1)..(286): Homolog of NCBI NO: 21553755 NR Description: putative membrane-associated salt-inducible
  misc_feature (1)..(289): Homolog of NCBI NO: 18398767 NR Description: pentatricopeptide (PPR) repeat-containing protein
  misc_feature (1)..(288): Homolog of NCBI NO: 25455786 NR Description: membrane-associated salt-inducible protein like
  misc_feature (1)..(288): Homolog of NCBI NO: 15234493 NR Description: pentatricopeptide (PPR) repeat-containing protein
  misc_feature (1)..(289): Homolog of NCBI NO: 15231160 NR Description: pentatricopeptide (PPR) repeat-containing protein
  misc_feature (1)..(295): Homolog of NCBI NO: 15222796 NR Description: pentatricopeptide (PPR) repeat-containing protein
  misc_feature (1)..(294): Homolog of NCBI NO: 21617993 NR Description: unknown [Arabidopsis thaliana]
  misc_feature (1)..(294): Homolog of NCBI NO: 18399887 NR Description: pentatricopeptide (PPR) repeat-containing protein
  misc_feature (1)..(300): Homolog of NCBI NO: 34910148 NR Description: B1070A12.17 [Oryza sativa (japonica
MPFLETSAEGFASRLIRLYGRASMPSHAAATFHKLPAQHKSNMTFNSLLSCYADAGDFDGLTAAFQEIPATYPSIVPTVYSYNVLIHALCRKPDVSAALDAVHLMEKIGVSPDIITFNTLLNGFCNNGRLDEAETVWEMIKERNLEPDAKCYNAKLRGLVAEGRIDDAAAVLEGLEKDGPKPDTVSYNELIRGYCKAGKLQEAKKLYDDLVKNECAPNKGTYETLLPHLLQAGELDCALTYCYKIFSHKRNLRVECGVLQDVVNALVDVLRVEEAAKIIVLGRKKYYPRKGLRMPDSTKRQ

SEQ ID NO: 63731 - DNA, 1071 bp, Triticum aestivum
  misc_feature (1)..(1071): Ceres Seq. ID no. 13655656
caaaaaaaaaaggtttcatctcttcaagcagggcaggccgagccacaggttcctccgcaccctcggccttccctcccatcaccagtttccagccgcgagcgaacccgacgcgagtgcggttcgagggagagagaagaggggactagcaccatggccgccaggctgctgctcctctccttcgattgcccggccgtcgctggcgggcggcggtctcgtctgtctgcaatgccacggatgtcttccggtgctcccctcgtgcggcccccagcctcatccgtcggcgcgttcgcggtcaccgccgccagaggcaacctgccgcaccacacctccgtggttgtggagggtggtggagtttacactgttcgtgactttatgactaaaagggaacaactccatgttgtgaaaccatccacttcagtagatgaagctcttgacaggctggtggagcatcgaataactggctttcctgttaccgatgatcactggaatttggttggtgtggtctcagattatgatctgttagcactggacttgatatcaggaaatggacaggctgaagcggacatatttcctgaggtggacagcacttggaagactttccatcagatacaaaagctcttaagcaaaaccaatgggaaagtagttagtgatgttatgacttctgcacctcttgtggtgcgtgaaactactaaccttgaagatgctgcaaggttacttcttgttactaaataccgcaggctgccagtagtcgacagttcgggcaaattggttggaatcatcacaagagggaacgtcgtcagagctgctcttgagtttaagaaaaatgttgaagggagtctttgaagtggaactgtagatgatcctttccgaaggtggaacttgaacatattgctagtaggcaagcatactgaaaaaattgtttacacaacatgctagtttaattgcagttgggatacatgtattgtgagcatcatgcatcatccttaaatttcaaaattttgaattgaaggaattttcaaagcctctgctaaataaagggcaaagaacccaaaaaaatgcattcaatgtttc

SEQ ID NO: 63732 - protein, 280 aa, Triticum aestivum
  peptide (1)..(280): Ceres Seq. ID no. 13655657
  misc_feature (217)..(270): Pfam Name: CBS domain Pfam Description: CBS domain
  misc_feature (120)..(268): Homolog of NCBI NO: 23127710 NR Description: hypothetical protein [Nostoc punctiforme]
  misc_feature (120)..(268): Homolog of NCBI NO: 24251259 NR Description: unknown protein [Synechococcus sp. PCC 7942]
  misc_feature (120)..(268): Homolog of NCBI NO: 17231305 NR Description: hypothetical protein [Nostoc sp. PCC 7120]
  misc_feature (120)..(268): Homolog of NCBI NO: 16331252 NR Description: IMP dehydrogenase [Synechocystis sp. PCC 6803]
  misc_feature (134)..(268): Homolog of NCBI NO: 23040753 NR Description: hypothetical protein [Trichodesmium erythraeum
  misc_feature (198)..(259): Homolog of NCBI NO: 7486280 NR Description: hypothetical protein F28A23.120 - Arabidopsis
  misc_feature (71)..(180): Homolog of NCBI NO: 7486280 NR Description: hypothetical protein F28A23.120 - Arabidopsis
  misc_feature (89)..(275): Homolog of NCBI NO: 15234564 NR Description: CBS domain containing protein [Arabidopsis
  misc_feature (71)..(279): Homolog of NCBI NO: 18418376 NR Description: CBS domain containing protein [Arabidopsis
  misc_feature (114)..(280): Homolog of NCBI NO: 34015153 NR Description: putative CBS domain containing protein
QKKKVSSLQAGQAEPQVPPHPRPSLPSPVSSRERTRRECGSREREEGTSTMAARLLLLSFDCPAVAGGRRSRLSAMPRMSSGAPLVRPPASSVGAFAVTAARGNLPHHTSVVVEGGGVYTVRDFMTKREQLHVVKPSTSVDEALDRLVEHRITGFPVTDDHWNLVGVVSDYDLLALDLISGNGQAEADIFPEVDSTWKTFHQIQKLLSKTNGKVVSDVMTSAPLVVRETTNLEDAARLLLVTKYRRLPVVDSSGKLVGIITRGNVVRAALEFKKNVEGSL

SEQ ID NO: 63733 - protein, 230 aa, Triticum aestivum
  peptide (1)..(230): Ceres Seq. ID no. 13655658
  misc_feature (167)..(220): Pfam Name: CBS domain Pfam Description: CBS domain
  misc_feature (70)..(218): Homolog of NCBI NO: 23127710 NR Description: hypothetical protein [Nostoc punctiforme]
  misc_feature (70)..(218): Homolog of NCBI NO: 24251259 NR Description: unknown protein [Synechococcus sp. PCC 7942]
  misc_feature (70)..(218): Homolog of NCBI NO: 17231305 NR Description: hypothetical protein [Nostoc sp. PCC 7120]
  misc_feature (70)..(218): Homolog of NCBI NO: 16331252 NR Description: IMP dehydrogenase [Synechocystis sp. PCC 6803]
  misc_feature (84)..(218): Homolog of NCBI NO: 23040753 NR Description: hypothetical protein [Trichodesmium erythraeum
  misc_feature (148)..(209): Homolog of NCBI NO: 7486280 NR Description: hypothetical protein F28A23.120 - Arabidopsis
  misc_feature (21)..(130): Homolog of NCBI NO: 7486280 NR Description: hypothetical protein F28A23.120 - Arabidopsis
  misc_feature (39)..(225): Homolog of NCBI NO: 15234564 NR Description: CBS domain containing protein [Arabidopsis
  misc_feature (21)..(229): Homolog of NCBI NO: 18418376 NR Description: CBS domain containing protein [Arabidopsis
  misc_feature (64)..(230): Homolog of NCBI NO: 34015153 NR Description: putative CBS domain containing protein
MAARLLLLSFDCPAVAGGRRSRLSAMPRMSSGAPLVRPPASSVGAFAVTAARGNLPHHTSVVVEGGGVYTVRDFMTKREQLHVVKPSTSVDEALDRLVEHRITGFPVTDDHWNLVGVVSDYDLLALDLISGNGQAEADIFPEVDSTWKTFHQIQKLLSKTNGKVVSDVMTSAPLVVRETTNLEDAARLLLVTKYRRLPVVDSSGKLVGIITRGNVVRAALEFKKNVEGSL

SEQ ID NO: 63734 - protein, 205 aa, Triticum aestivum
  peptide (1)..(205): Ceres Seq. ID no. 13655659
  misc_feature (142)..(195): Pfam Name: CBS domain Pfam Description: CBS domain
  misc_feature (45)..(193): Homolog of NCBI NO: 23127710 NR Description: hypothetical protein [Nostoc punctiforme]
  misc_feature (45)..(193): Homolog of NCBI NO: 24251259 NR Description: unknown protein [Synechococcus sp. PCC 7942]
  misc_feature (45)..(193): Homolog of NCBI NO: 17231305 NR Description: hypothetical protein [Nostoc sp. PCC 7120]
  misc_feature (45)..(193): Homolog of NCBI NO: 16331252 NR Description: IMP dehydrogenase [Synechocystis sp. PCC 6803]
  misc_feature (59)..(193): Homolog of NCBI NO: 23040753 NR Description: hypothetical protein [Trichodesmium erythraeum
  misc_feature (123)..(184): Homolog of NCBI NO: 7486280 NR Description: hypothetical protein F28A23.120 - Arabidopsis
  misc_feature (1)..(105): Homolog of NCBI NO: 7486280 NR Description: hypothetical protein F28A23.120 - Arabidopsis
  misc_feature (14)..(200): Homolog of NCBI NO: 15234564 NR Description: CBS domain containing protein [Arabidopsis
  misc_feature (1)..(204): Homolog of NCBI NO: 18418376 NR Description: CBS domain containing protein [Arabidopsis
  misc_feature (39)..(205): Homolog of NCBI NO: 34015153 NR Description: putative CBS domain containing protein
MPRMSSGAPLVRPPASSVGAFAVTAARGNLPHHTSVVVEGGGVYTVRDFMTKREQLHVVKPSTSVDEALDRLVEHRITGFPVTDDHWNLVGVVSDYDLLALDLISGNGQAEADIFPEVDSTWKTFHQIQKLLSKTNGKVVSDVMTSAPLVVRETTNLEDAARLLLVTKYRRLPVVDSSGKLVGIITRGNVVRAALEFKKNVEGSL

SEQ ID NO: 63735 - DNA, 667 bp, Triticum aestivum
  misc_feature (1)..(667): Ceres Seq. ID no. 13655537
acagtctcacacccgccgctcagccgtaacttcacaaagatgctgaggtccaccggccgccttctgctgctcgcgctagcggcgagccacctgctgctcaccgccgccggcgctggctgcgagccgagcggcacgctccggccgacccagagccacgcgtgccaggactgctgcaaggccgggcaggcgtacccgacgtacaggtgctcgccgccggtctcctcgtccacccgggcggtcatgactctgaacgacttcgacgcgggcggcgacggcggggacccgtccgagtgcgacggcgcgttccaccgcagctcggagcgcgtggcggcgctgtccacggggtggtacagcgggggctcccgctgcggcaagagcatacggatccgggccaacggcaggtccgtgctcgccaaggtcgtcgacgagtgcgacaccgtgaacgggtgcgaccgcgagcacgccttccagccgccgtgccgcaacaacgtcgtcgacgcctcccaggcggtctgggacgcgctgggcatcaccggggaggaggtcggcgagtacaacgtcacttggtcagatgcatgacctatatatgtgcatggacgaatagagtgtacacgcggacccaaaatgaataaacggaatttataagggccgcctatttaacagggct

SEQ ID NO: 63736 - protein, 192 aa, Triticum aestivum
  peptide (1)..(192): Ceres Seq. ID no. 13655538
  misc_feature (56)..(178): Homolog of NCBI NO: 34897980 NR Description: hypothetical protein~predicted by FGENESH etc.
  misc_feature (79)..(191): Homolog of NCBI NO: 37535578 NR Description: hypothetical protein [Oryza sativa (japonica
  misc_feature (51)..(190): Homolog of NCBI NO: 37535604 NR Description: hypothetical protein [Oryza sativa (japonica
  misc_feature (68)..(192): Homolog of NCBI NO: 37535576 NR Description: hypothetical protein [Oryza sativa (japonica
  misc_feature (22)..(189): Homolog of NCBI NO: 37535588 NR Description: hypothetical protein [Oryza sativa (japonica
  misc_feature (39)..(185): Homolog of NCBI NO: 37535604 NR Description: hypothetical protein [Oryza sativa (japonica
  misc_feature (38)..(192): Homolog of NCBI NO: 37535592 NR Description: hypothetical protein [Oryza sativa (japonica
  misc_feature (40)..(192): Homolog of NCBI NO: 7406671 NR Description: putative ripening-related protein [Vitis vinifera]
  misc_feature (18)..(192): Homolog of NCBI NO: 38346744 NR Description: OSJNBa0081G05.7 [Oryza sativa (japonica
TVSHPPLSRNFTKMLRSTGRLLLLALAASHLLLTAAGAGCEPSGTLRPTQSHACQDCCKAGQAYPTYRCSPPVSSSTRAVMTLNDFDAGGDGGDPSECDGAFHRSSERVAALSTGWYSGGSRCGKSIRIRANGRSVLAKVVDECDTVNGCDREHAFQPPCRNNVVDASQAVWDALGITGEEVGEYNVTWSDA

SEQ ID NO: 63737 - protein, 179 aa, Triticum aestivum
  peptide (1)..(179): Ceres Seq. ID no. 13655539
  misc_feature (43)..(165): Homolog of NCBI NO: 34897980 NR Description: hypothetical protein~predicted by FGENESH etc.
  misc_feature (66)..(178): Homolog of NCBI NO: 37535578 NR Description: hypothetical protein [Oryza sativa (japonica
  misc_feature (38)..(177): Homolog of NCBI NO: 37535604 NR Description: hypothetical protein [Oryza sativa (japonica
  misc_feature (55)..(179): Homolog of NCBI NO: 37535576 NR Description: hypothetical protein [Oryza sativa (japonica
  misc_feature (9)..(176): Homolog of NCBI NO: 37535588 NR Description: hypothetical protein [Oryza sativa (japonica
  misc_feature (26)..(172): Homolog of NCBI NO: 37535604 NR Description: hypothetical protein [Oryza sativa (japonica
  misc_feature (25)..(179): Homolog of NCBI NO: 37535592 NR Description: hypothetical protein [Oryza sativa (japonica
  misc_feature (27)..(179): Homolog of NCBI NO: 7406671 NR Description: putative ripening-related protein [Vitis vinifera]
  misc_feature (5)..(179): Homolog of NCBI NO: 38346744 NR Description: OSJNBa0081G05.7 [Oryza sativa (japonica
MLRSTGRLLLLALAASHLLLTAAGAGCEPSGTLRPTQSHACQDCCKAGQAYPTYRCSPPVSSSTRAVMTLNDFDAGGDGGDPSECDGAFHRSSERVAALSTGWYSGGSRCGKSIRIRANGRSVLAKVVDECDTVNGCDREHAFQPPCRNNVVDASQAVWDALGITGEEVGEYNVTWSDA

SEQ ID NO: 63738 - protein, 112 aa, Triticum aestivum
  peptide (1)..(112): Ceres Seq. ID no. 13655540
  misc_feature (1)..(98): Homolog of NCBI NO: 34897980 NR Description: hypothetical protein~predicted by FGENESH etc.
  misc_feature (1)..(111): Homolog of NCBI NO: 37535578 NR Description: hypothetical protein [Oryza sativa (japonica
  misc_feature (1)..(110): Homolog of NCBI NO: 37535604 NR Description: hypothetical protein [Oryza sativa (japonica
  misc_feature (1)..(112): Homolog of NCBI NO: 37535576 NR Description: hypothetical protein [Oryza sativa (japonica
  misc_feature (1)..(109): Homolog of NCBI NO: 37535588 NR Description: hypothetical protein [Oryza sativa (japonica
  misc_feature (1)..(105): Homolog of NCBI NO: 37535604 NR Description: hypothetical protein [Oryza sativa (japonica
  misc_feature (1)..(112): Homolog of NCBI NO: 37535592 NR Description: hypothetical protein [Oryza sativa (japonica
  misc_feature (1)..(112): Homolog of NCBI NO: 7406671 NR Description: putative ripening-related protein [Vitis vinifera]
  misc_feature (1)..(112): Homolog of NCBI NO: 38346744 NR Description: OSJNBa0081G05.7 [Oryza sativa (japonica
MTLNDFDAGGDGGDPSECDGAFHRSSERVAALSTGWYSGGSRCGKSIRIRANGRSVLAKVVDECDTVNGCDREHAFQPPCRNNVVDASQAVWDALGITGEEVGEYNVTWSDA

SEQ ID NO: 63739 - DNA, 1347 bp, Triticum aestivum
  misc_feature (1)..(1347): Ceres Seq. ID no. 13655547
tcctctctagacactgctgttgactccgccgttctctcaacccacatggctctcgaagcgcgcctccgcctcccgctcgccgggccaactccggccaccgctttcctctcaggatctaaccccaaacccagtcacatatccttctccctcaaacccacctccacttctctctccgccgccaatgcgccgcccatcgtcgtcgtgggctccgccaacgcggacatctacgtcgaggtcgaccgtctcccgctcgtcggcgagacggttgccgcgagtgccggtcacagcctcgccggcgggaagggcgccaatcaagctgcctgtggggggcggctggcgctggggcccacctacctcgtggcgcgcgtgggggacgacgccaacgggcgcctcctcgagggggcactcgcggacgccggcggcgtccgcctcgaccgcgtcgctcgcgcccccggcgcgccctcggggcacgctgttgtcatgctcatgcccgacgggcagaactccatcatcatcgttggcggcgccaacatggagagctgggcaccggaggtcgacccggaggacctggacctgatccggcaggccggcgtgctactgctgcaacgggagatacccgattgggtcaacattcaggtcgctcaggctgcaaaaggcgcaggtgtgcctgttatcttggatgcaggtggaatggatgctcctgtccccagagaactactcgaactggtggatatttttagtccaaatgagacagagctagcacgtttgactgggatgcctacagagacttttgaacaaatcagccaggctgcaggagcatgccataaaatgggtgtgaaagaagttttggttaaacttggatcacaaggatctgctctgtttgtcgagggagaggaaccaattaggcaggcgataatacctgccgcagaagtggtagacaccaccggcgctggtgacaccttcacctcagcttttgctgtagctctggtggaggggaagccaaagaaagagtgcatgaaatttgctgctgccgccgcctcactgtgtgttcgagtgaagggagccattcccagcatgcctgacaggaaaactgtgatgagccttctagaatctgtgcaagatgaataaccgtagaaacggtgactttagccctattcatcagcaataatgtgagctgttaagcttcaatctcctcgttcggttcatttatctcgggtatctatatatatttgtagccccttgtcaagttatggtagaggaaataagagaaaatggcattcctagcgccgtcctccgcagaaacagaatcgctggttcaggagttctaggtctgttgtttttatagcc

SEQ ID NO: 63740 - protein, 375 aa, Triticum aestivum
  peptide (1)..(375): Ceres Seq. ID no. 13655548
  misc_feature (62)..(284): Pfam Name: pfkB family carbohydrate kinase Pfam Description: pfkB family carbohydrate kinase
  misc_feature (65)..(365): Homolog of NCBI NO: 32042037 NR Description: hypothetical protein [Pseudomonas aeruginosa
  misc_feature (65)..(365): Homolog of NCBI NO: 32042035 NR Description: hypothetical protein [Pseudomonas aeruginosa
  misc_feature (65)..(371): Homolog of NCBI NO: 15602017 NR Description: RbsK [Pasteurella multocida]
  misc_feature (62)..(365): Homolog of NCBI NO: 23019471 NR Description: hypothetical protein [Thermobifida fusca]
  misc_feature (65)..(369): Homolog of NCBI NO: 23039770 NR Description: hypothetical protein [Trichodesmium erythraeum
  misc_feature (65)..(370): Homolog of NCBI NO: 23002722 NR Description: hypothetical protein [Lactobacillus gasseri]
  misc_feature (21)..(370): Homolog of NCBI NO: 25518633 NR Description: hypothetical protein F20D23.14 - Arabidopsis
  misc_feature (21)..(370): Homolog of NCBI NO: 15220039 NR Description: putative ribokinase; protein id: At1g17160.1
  misc_feature (278)..(373): Homolog of NCBI NO: 34910896 NR Description: P0003E08.15 [Oryza sativa (japonica
  misc_feature (18)..(284): Homolog of NCBI NO: 34910896 NR Description: P0003E08.15 [Oryza sativa (japonica
SSLDTAVDSAVLSTHMALEARLRLPLAGPTPATAFLSGSNPKPSHISFSLKPTSTSLSAANAPPIVVVGSANADIYVEVDRLPLVGETVAASAGHSLAGGKGANQAACGGRLALGPTYLVARVGDDANGRLLEGALADAGGVRLDRVARAPGAPSGHAVVMLMPDGQNSIIIVGGANMESWAPEVDPEDLDLIRQAGVLLLQREIPDWVNIQVAQAAKGAGVPVILDAGGMDAPVPRELLELVDIFSPNETELARLTGMPTETFEQISQAAGACHKMGVKEVLVKLGSQGSALFVEGEEPIRQAIIPAAEVVDTTGAGDTFTSAFAVALVEGKPKKECMKFAAAAASLCVRVKGAIPSMPDRKTVMSLLESVQDE

SEQ ID NO: 63741 - protein, 360 aa, Triticum aestivum
  peptide (1)..(360): Ceres Seq. ID no. 13655549
  misc_feature (47)..(269): Pfam Name: pfkB family carbohydrate kinase Pfam Description: pfkB family carbohydrate kinase
  misc_feature (50)..(350): Homolog of NCBI NO: 32042037 NR Description: hypothetical protein [Pseudomonas aeruginosa
  misc_feature (50)..(350): Homolog of NCBI NO: 32042035 NR Description: hypothetical protein [Pseudomonas aeruginosa
  misc_feature (50)..(356): Homolog of NCBI NO: 15602017 NR Description: RbsK [Pasteurella multocida]
  misc_feature (47)..(350): Homolog of NCBI NO: 23019471 NR Description: hypothetical protein [Thermobifida fusca]
  misc_feature (50)..(354): Homolog of NCBI NO: 23039770 NR Description: hypothetical protein [Trichodesmium erythraeum
  misc_feature (50)..(355): Homolog of NCBI NO: 23002722 NR Description: hypothetical protein [Lactobacillus gasseri]
  misc_feature (6)..(355): Homolog of NCBI NO: 25518633 NR Description: hypothetical protein F20D23.14 - Arabidopsis
  misc_feature (6)..(355): Homolog of NCBI NO: 15220039 NR Description: putative ribokinase; protein id: At1g17160.1
  misc_feature (263)..(358): Homolog of NCBI NO: 34910896 NR Description: P0003E08.15 [Oryza sativa (japonica
  misc_feature (3)..(269): Homolog of NCBI NO: 34910896 NR Description: P0003E08.15 [Oryza sativa (japonica
MALEARLRLPLAGPTPATAFLSGSNPKPSHISFSLKPTSTSLSAANAPPIVVVGSANADIYVEVDRLPLVGETVAASAGHSLAGGKGANQAACGGRLALGPTYLVARVGDDANGRLLEGALADAGGVRLDRVARAPGAPSGHAVVMLMPDGQNSIIIVGGANMESWAPEVDPEDLDLIRQAGVLLLQREIPDWVNIQVAQAAKGAGVPVILDAGGMDAPVPRELLELVDIFSPNETELARLTGMPTETFEQISQAAGACHKMGVKEVLVKLGSQGSALFVEGEEPIRQAIIPAAEVVDTTGAGDTFTSAFAVALVEGKPKKECMKFAAAAASLCVRVKGAIPSMPDRKTVMSLLESVQDE

SEQ ID NO: 63742 - protein, 215 aa, Triticum aestivum
  peptide (1)..(215): Ceres Seq. ID no. 13655550
  misc_feature (1)..(124): Pfam Name: pfkB family carbohydrate kinase Pfam Description: pfkB family carbohydrate kinase
  misc_feature (1)..(205): Homolog of NCBI NO: 32042037 NR Description: hypothetical protein [Pseudomonas aeruginosa
  misc_feature (1)..(205): Homolog of NCBI NO: 32042035 NR Description: hypothetical protein [Pseudomonas aeruginosa
  misc_feature (1)..(211): Homolog of NCBI NO: 15602017 NR Description: RbsK [Pasteurella multocida]
  misc_feature (1)..(205): Homolog of NCBI NO: 23019471 NR Description: hypothetical protein [Thermobifida fusca]
  misc_feature (1)..(209): Homolog of NCBI NO: 23039770 NR Description: hypothetical protein [Trichodesmium erythraeum
  misc_feature (1)..(210): Homolog of NCBI NO: 23002722 NR Description: hypothetical protein [Lactobacillus gasseri]
  misc_feature (1)..(210): Homolog of NCBI NO: 25518633 NR Description: hypothetical protein F20D23.14 - Arabidopsis
  misc_feature (1)..(210): Homolog of NCBI NO: 15220039 NR Description: putative ribokinase; protein id: At1g17160.1
  misc_feature (118)..(213): Homolog of NCBI NO: 34910896 NR Description: P0003E08.15 [Oryza sativa (japonica
  misc_feature (1)..(124): Homolog of NCBI NO: 34910896 NR Description: P0003E08.15 [Oryza sativa (japonica
MLMPDGQNSIIIVGGANMESWAPEVDPEDLDLIRQAGVLLLQREIPDWVNIQVAQAAKGAGVPVILDAGGMDAPVPRELLELVDIFSPNETELARLTGMPTETFEQISQAAGACHKMGVKEVLVKLGSQGSALFVEGEEPIRQAIIPAAEVVDTTGAGDTFTSAFAVALVEGKPKKECMKFAAAAASLCVRVKGAIPSMPDRKTVMSLLESVQDE

SEQ ID NO: 63743 - DNA, 1220 bp, Triticum aestivum
  misc_feature (1)..(1220): Ceres Seq. ID no. 13597295
atacataccggcccctccatcttcaacttcaagatggctgcgtctcacccaagcacagaaatggctgcgtcgccgatggtgcggccgacggtgcaggagctggcggcggccggcgccgaggagccgccgcggcagtacgtgctgccggagcaagaccgtcacggcgacctgctggccgccgacgagtttccggagcccatccccctcgtcgaccttagccggctcacggacgccgacgaggccgagaggctccgggcggctctgcagacctggggcttcttcctggccaccaaccatgggatcgaggactctctcatggacgccatgacgagcgtgtcgagggagttcttccggcagccggcggaggagaggcagaaatgcagcaacctggtggacggcaacggcaaggactaccaggtggaagggtatggcagtgacaaggtggtgtccgacgatcaggtcctcaactggagcgaccggttgcatctgagagtggagccggaggatgagaggaatttcgccaagtggcccagtcaccccgaatctttcagggatgtgctacaagagtatgcatcaagaatcaagaaaataagagacctcgtcttacggtcgatagccaagctcctggagattgacgaggactacttcgtcaaccagatatcaaacaaggcccccgggtttgctagattcaactactaccctccatgtccgaggcctgacctagttttgggcctcagggctcactccgacggtggtctccttaccatccttttcaacgatgacaccgtcggtggcttgcaagttcagagagatgggagatggtacaatgttccagcaaagcctcacacattgctgattaacctagcagactgcctagaaataatgaacaatggaatctttacgagcccggttcacagagtggtgacgaacgtcgagaaggataggctttccttggctgtgttttacgccgtggatgcagaaacgatgttggagccagcgcccggtttgctggatgacaagcgaccgccaagatataagaaaatggtggccaaggattttgtggctgggctctttgaacatttccgtcaagggaagagattcattgacaccctgaaaatataggttcgctgtttattatggagccgtagaagtgattgctataaagaataaagagatggttttatctattgtgccagtgggggtctaccttcgcctttctt

SEQ ID NO: 63744 - protein, 373 aa, Triticum aestivum
  peptide (1)..(373): Ceres Seq. ID no. 13597296
  misc_feature (224)..(324): Pfam Name: 2OG-Fe(II) oxygenase superfamily Pfam Description: 2OG-Fe(II) oxygenase superfamily
  misc_feature (27)..(373): Homolog of NCBI NO: 34898472 NR Description: Similar to Prunus armeniaca
  misc_feature (27)..(142): Homolog of NCBI NO: 24413983 NR Description: ethylene-forming-enzyme-like dioxygenase-like
  misc_feature (185)..(373): Homolog of NCBI NO: 24413983 NR Description: ethylene-forming-enzyme-like dioxygenase-like
  misc_feature (294)..(373): Homolog of NCBI NO: 24413981 NR Description: contains EST
  misc_feature (27)..(272): Homolog of NCBI NO: 24413981 NR Description: contains EST
  misc_feature (27)..(373): Homolog of NCBI NO: 34898468 NR Description: Similar to Prunus armeniaca
  misc_feature (21)..(373): Homolog of NCBI NO: 24413984 NR Description: ethylene-forming-enzyme-like dioxygenase-like
  misc_feature (31)..(349): Homolog of NCBI NO: 34898470 NR Description: ESTs D47168(S12332),D46350(S10967) correspond to region of the predicted gene.~Similar to Prunus armeniaca
  misc_feature (31)..(373): Homolog of NCBI NO: 24413982 NR Description: ethylene-forming-enzyme-like dioxygenase-like
  misc_feature (21)..(373): Homolog of NCBI NO: 33115140 NR Description: iron/ascorbate-dependent oxidoreductase [Hordeum
IHTGPSIFNFKMAASHPSTEMAASPMVRPTVQELAAAGAEEPPRQYVLPEQDRHGDLLAADEFPEPIPLVDLSRLTDADEAERLRAALQTWGFFLATNHGIEDSLMDAMTSVSREFFRQPAEERQKCSNLVDGNGKDYQVEGYGSDKVVSDDQVLNWSDRLHLRVEPEDERNFAKWPSHPESFRDVLQEYASRIKKIRDLVLRSIAKLLEIDEDYFVNQISNKAPGFARFNYYPPCPRPDLVLGLRAHSDGGLLTILFNDDTVGGLQVQRDGRWYNVPAKPHTLLINLADCLEIMNNGIFTSPVHRVVTNVEKDRLSLAVFYAVDAETMLEPAPGLLDDKRPPRYKKMVAKDFVAGLFEHFRQGKRFIDTLKI

SEQ ID NO: 63745 - protein, 362 aa, Triticum aestivum
  peptide (1)..(362): Ceres Seq. ID no. 13597297
  misc_feature (213)..(313): Pfam Name: 2OG-Fe(II) oxygenase superfamily Pfam Description: 2OG-Fe(II) oxygenase superfamily
  misc_feature (16)..(362): Homolog of NCBI NO: 34898472 NR Description: Similar to Prunus armeniaca
  misc_feature (16)..(131): Homolog of NCBI NO: 24413983 NR Description: ethylene-forming-enzyme-like dioxygenase-like
  misc_feature (174)..(362): Homolog of NCBI NO: 24413983 NR Description: ethylene-forming-enzyme-like dioxygenase-like
  misc_feature (283)..(362): Homolog of NCBI NO: 24413981 NR Description: contains EST
  misc_feature (16)..(261): Homolog of NCBI NO: 24413981 NR Description: contains EST
  misc_feature (16)..(362): Homolog of NCBI NO: 34898468 NR Description: Similar to Prunus armeniaca
  misc_feature (10)..(362): Homolog of NCBI NO: 24413984 NR Description: ethylene-forming-enzyme-like dioxygenase-like
  misc_feature (20)..(338): Homolog of NCBI NO: 34898470 NR Description: ESTs D47168(S12332),D46350(S10967) correspond to region of the predicted gene.~Similar to Prunus armeniaca
  misc_feature (20)..(362): Homolog of NCBI NO: 24413982 NR Description: ethylene-forming-enzyme-like dioxygenase-like
  misc_feature (10)..(362): Homolog of NCBI NO: 33115140 NR Description: iron/ascorbate-dependent oxidoreductase [Hordeum
MAASHPSTEMAASPMVRPTVQELAAAGAEEPPRQYVLPEQDRHGDLLAADEFPEPIPLVDLSRLTDADEAERLRAALQTWGFFLATNHGIEDSLMDAMTSVSREFFRQPAEERQKCSNLVDGNGKDYQVEGYGSDKVVSDDQVLNWSDRLHLRVEPEDERNFAKWPSHPESFRDVLQEYASRIKKIRDLVLRSIAKLLEIDEDYFVNQISNKAPGFARFNYYPPCPRPDLVLGLRAHSDGGLLTILFNDDTVGGLQVQRDGRWYNVPAKPHTLLINLADCLEIMNNGIFTSPVHRVVTNVEKDRLSLAVFYAVDAETMLEPAPGLLDDKRPPRYKKMVAKDFVAGLFEHFRQGKRFIDTLKI

SEQ ID NO: 63746 - protein, 353 aa, Triticum aestivum
  peptide (1)..(353): Ceres Seq. ID no. 13597298
  misc_feature (204)..(304): Pfam Name: 2OG-Fe(II) oxygenase superfamily Pfam Description: 2OG-Fe(II) oxygenase superfamily
  misc_feature (7)..(353): Homolog of NCBI NO: 34898472 NR Description: Similar to Prunus armeniaca
  misc_feature (7)..(122): Homolog of NCBI NO: 24413983 NR Description: ethylene-forming-enzyme-like dioxygenase-like
  misc_feature (165)..(353): Homolog of NCBI NO: 24413983 NR Description: ethylene-forming-enzyme-like dioxygenase-like
  misc_feature (274)..(353): Homolog of NCBI NO: 24413981 NR Description: contains EST
  misc_feature (7)..(252): Homolog of NCBI NO: 24413981 NR Description: contains EST
  misc_feature (7)..(353): Homolog of NCBI NO: 34898468 NR Description: Similar to Prunus armeniaca
  misc_feature (1)..(353): Homolog of NCBI NO: 24413984 NR Description: ethylene-forming-enzyme-like dioxygenase-like
  misc_feature (11)..(329): Homolog of NCBI NO: 34898470 NR Description: ESTs D47168(S12332),D46350(S10967) correspond to region of the predicted gene.~Similar to Prunus armeniaca
  misc_feature (11)..(353): Homolog of NCBI NO: 24413982 NR Description: ethylene-forming-enzyme-like dioxygenase-like
  misc_feature (1)..(353): Homolog of NCBI NO: 33115140 NR Description: iron/ascorbate-dependent oxidoreductase [Hordeum
MAASPMVRPTVQELAAAGAEEPPRQYVLPEQDRHGDLLAADEFPEPIPLVDLSRLTDADEAERLRAALQTWGFFLATNHGIEDSLMDAMTSVSREFFRQPAEERQKCSNLVDGNGKDYQVEGYGSDKVVSDDQVLNWSDRLHLRVEPEDERNFAKWPSHPESFRDVLQEYASRIKKIRDLVLRSIAKLLEIDEDYFVNQISNKAPGFARFNYYPPCPRPDLVLGLRAHSDGGLLTILFNDDTVGGLQVQRDGRWYNVPAKPHTLLINLADCLEIMNNGIFTSPVHRVVTNVEKDRLSLAVFYAVDAETMLEPAPGLLDDKRPPRYKKMVAKDFVAGLFEHFRQGKRFIDTLKI

SEQ ID NO: 63747 - DNA, 1054 bp, Triticum aestivum
  misc_feature (1)..(1054): Ceres Seq. ID no. 12617286
attacctagaacatcctaatcgaaaaaaacccagtggctgcagcggcagcagtggccatgggcgagaggctcccccagccgtcgccgccgccgccgccgcaattccagctcgggaaccccatgtccgccccggcgtcgccctactccgcgctccaccctctcctcctcccgtccacgaacccgcacctcctcctcaagcccaagacgctgaccctctcgctctcctcctcctccctcgcctccatgccctcctcctcctccccgcccgcccccgcctccgacgcatgggaactcgtccacccaaccgtccccgttgccgccgcctcccccatcgacggcggcctcgacgactgcgccatcttcccaccgcgcctccacgagggcctgggcctcgaggcggaggccgaggaggccgcgaccaaggaagagaaggaggaggagactgacgacgaggaggagtggctgtgggggtgggggaggtgccgcgcggcggcgaggcgcgcgtgggcggccggttcagaggccgtgctcgtgcatggagagtgcggatgtcccggggttaggccggccatatggtcggccgcggcggcggccgttgtggtcggcgcgctgttgtacgtgcgccggcgagacaggagggagagagacctcctcgtcatgctctcgcaggagaaggataagaggatagcgcaacttctgcatcaaattgctttactgagtgacatcagaggcggcagcgaagcaattaaaatcatgaggaactcttaaccgttgcttcactgtagaagaggtttggatgtaatactgtgtagcactttggttaggtagttgcagaatgttttcatccagaagtgctccaagaccgtgtagcttgatcaagtaattagctcagttgcatgatcttgcatatataagatgtttctgtaattgaagaactgcaaacatcagctctggaaacccccctttgttgttaagatttgtaaatagatgagtgataacattgtcacttataaatttgtggaaatatgttcaaattgtgctggactcaggtact

SEQ ID NO: 63748 - protein, 236 aa, Triticum aestivum
  peptide (1)..(236): Ceres Seq. ID no. 12617287
  misc_feature (7)..(210): Homolog of NCBI NO: 29027780 NR Description: OJ1710_H11.31 [Oryza sativa (japonica
MGERLPQPSPPPPPQFQLGNPMSAPASPYSALHPLLLPSTNPHLLLKPKTLTLSLSSSSLASMPSSSSPPAPASDAWELVHPTVPVAAASPIDGGLDDCAIFPPRLHEGLGLEAEAEEAATKEEKEEETDDEEEWLWGWGRCRAAARRAWAAGSEAVLVHGECGCPGVRPAIWSAAAAAVVVGALLYVRRRDRRERDLLVMLSQEKDKRIAQLLHQIALLSDIRGGSEAIKIMRNS

SEQ ID NO: 63749 - protein, 215 aa, Triticum aestivum
  peptide (1)..(215): Ceres Seq. ID no. 12617288
  misc_feature (1)..(189): Homolog of NCBI NO: 29027780 NR Description: OJ1710_H11.31 [Oryza sativa (japonica
MSAPASPYSALHPLLLPSTNPHLLLKPKTLTLSLSSSSLASMPSSSSPPAPASDAWELVHPTVPVAAASPIDGGLDDCAIFPPRLHEGLGLEAEAEEAATKEEKEEETDDEEEWLWGWGRCRAAARRAWAAGSEAVLVHGECGCPGVRPAIWSAAAAAVVVGALLYVRRRDRRERDLLVMLSQEKDKRIAQLLHQIALLSDIRGGSEAIKIMRNS

SEQ ID NO: 63750 - protein, 174 aa, Triticum aestivum
  peptide (1)..(174): Ceres Seq. ID no. 12617289
  misc_feature (1)..(148): Homolog of NCBI NO: 29027780 NR Description: OJ1710_H11.31 [Oryza sativa (japonica
MPSSSSPPAPASDAWELVHPTVPVAAASPIDGGLDDCAIFPPRLHEGLGLEAEAEEAATKEEKEEETDDEEEWLWGWGRCRAAARRAWAAGSEAVLVHGECGCPGVRPAIWSAAAAAVVVGALLYVRRRDRRERDLLVMLSQEKDKRIAQLLHQIALLSDIRGGSEAIKIMRNS

SEQ ID NO: 63751 - DNA, 500 bp, Triticum aestivum
  misc_feature (1)..(500): Ceres Seq. ID no. 13584430
ataaagtactaataaacagagggagtacaagtacaacgcgtttgcatacgaaaatactacaaagttaacatacattttagtctcgcagctaggcacgaaaaattcttagccactgcaacactcttgacacaactaccggtgcaccagtgcatatacggcggactcgtcgtcatcgtcatgcgccggtcagcacctagcgtgctccagctgatcacagccgcacggcggtcctcccgcggccagcgcggccgaaggagagcacccggaccaggcggcgccacagcgccccgagcgacggcatccgccggctcgtccggaccgccggggtcgttgtcgccgccctcttcctccgccacagcgacggcatcgcgcgctagctagtcaagtcgagccttcttgcggagttccggttgtacggtgaaaggcttcaagatggcgagtgcacgagtggacaaatgggagatcgatggtggtgtctggtgttttttgattaggatgtt

SEQ ID NO: 63752 - protein, 67 aa, Triticum aestivum
  peptide (1)..(67): Ceres Seq. ID no. 13584431
  misc_feature (14)..(58): Pfam Name: Collagen triple helix repeat (20 copies) Pfam Description: Collagen triple helix repeat (20 copies)
MRRSAPSVLQLITAARRSSRGQRGRRRAPGPGGATAPRATASAGSSGPPGSLSPPSSSATATASRAS

SEQ ID NO: 63753 - DNA, 697 bp, Triticum aestivum
  misc_feature (1)..(697): Ceres Seq. ID no. 14302208
agacacccgcaagtccgactcatcgctcaacgtcagtgccaacctgccgttcagcaagagcacgcacgcttgcacctttatgtaaagcaaaacccgacgccgtcaccagctttggtctcttctcttcccattgctcaaaatacctcggcagagagtattctcaactcccggctcagccttcccttcccttccctctcctgcctccgcccactccactcagtgctccagaagctcggatggcggcccagaaggtggtgctcagggtcccgaccatgaccgacgacaaggccaagcagaaggccatcgaagcggtcgcggatatctacggcattgattccatagttgcggatctgaaggacaataagatgatcatcataggcgagatggacactgtggcaatcgcaaagaaattaaagaaggttgggaagattgacattgtgtccgttggacctgcaaaggaagaaaagaaagaagagaagaaagaagaaaagaaagaggagaaaaaagaggaaaagaaagaagagaagaaagaggagaagaaagaggagaaaaaatgataaagcataccacaccatcccatggcctttctcctctgtgcacttctaatagctttgtctacggatctatgtttctaagagatatgactttgtaccattatatctaaagtacatattagtgatatttctttacagaagat

SEQ ID NO: 63754 - protein, 184 aa, Triticum aestivum
  peptide (1)..(184): Ceres Seq. ID no. 14302209
  misc_feature (92)..(180): Pfam Name: Ubiquitin carboxyl-terminal hydrolase Pfam Description: Ubiquitin carboxyl-terminal hydrolase
  misc_feature (82)..(184): Homolog of NCBI NO: 15223416 NR Description: heavy-metal-associated domain-containing protein
  misc_feature (79)..(171): Homolog of NCBI NO: 32488374 NR Description: OSJNBa0043A12.4 [Oryza sativa (japonica
  misc_feature (82)..(184): Homolog of NCBI NO: 13543783 NR Description: Unknown (protein for MGC:7642) [Mus musculus]
  misc_feature (117)..(184): Homolog of NCBI NO: 10176843 NR Description: gene_id:MRO11.20~unknown protein [Arabidopsis
  misc_feature (82)..(164): Homolog of NCBI NO: 32489836 NR Description: OSJNBb0039L24.19 [Oryza sativa (japonica
  misc_feature (81)..(184): Homolog of NCBI NO: 26452654 NR Description: unknown protein [Arabidopsis thaliana]
  misc_feature (81)..(184): Homolog of NCBI NO: 21554550 NR Description: unknown [Arabidopsis thaliana]
  misc_feature (81)..(184): Homolog of NCBI NO: 18420713 NR Description: heavy-metal-associated domain-containing protein
  misc_feature (82)..(184): Homolog of NCBI NO: 37535864 NR Description: hypothetical protein [Oryza sativa (japonica
TPASPTHRSTSVPTCRSARARTLAPLCKAKPDAVTSFGLFSSHCSKYLGREYSQLPAQPSLPFPLLPPPTPLSAPEARMAAQKVVLRVPTMTDDKAKQKAIEAVADIYGIDSIVADLKDNKMIIIGEMDTVAIAKKLKKVGKIDIVSVGPAKEEKKEEKKEEKKEEKKEEKKEEKKEEKKEEKK

SEQ ID NO: 63755 - protein, 106 aa, Triticum aestivum
  peptide (1)..(106): Ceres Seq. ID no. 14302210
  misc_feature (14)..(102): Pfam Name: Ubiquitin carboxyl-terminal hydrolase Pfam Description: Ubiquitin carboxyl-terminal hydrolase
  misc_feature (4)..(106): Homolog of NCBI NO: 15223416 NR Description: heavy-metal-associated domain-containing protein
  misc_feature (1)..(93): Homolog of NCBI NO: 32488374 NR Description: OSJNBa0043A12.4 [Oryza sativa (japonica
  misc_feature (4)..(106): Homolog of NCBI NO: 13543783 NR Description: Unknown (protein for MGC:7642) [Mus musculus]
  misc_feature (39)..(106): Homolog of NCBI NO: 10176843 NR Description: gene_id:MRO11.20~unknown protein [Arabidopsis
  misc_feature (4)..(86): Homolog of NCBI NO: 32489836 NR Description: OSJNBb0039L24.19 [Oryza sativa (japonica
  misc_feature (3)..(106): Homolog of NCBI NO: 26452654 NR Description: unknown protein [Arabidopsis thaliana]
  misc_feature (3)..(106): Homolog of NCBI NO: 21554550 NR Description: unknown [Arabidopsis thaliana]
  misc_feature (3)..(106): Homolog of NCBI NO: 18420713 NR Description: heavy-metal-associated domain-containing protein
  misc_feature (4)..(106): Homolog of NCBI NO: 37535864 NR Description: hypothetical protein [Oryza sativa (japonica
MAAQKVVLRVPTMTDDKAKQKAIEAVADIYGIDSIVADLKDNKMIIIGEMDTVAIAKKLKKVGKIDIVSVGPAKEEKKEEKKEEKKEEKKEEKKEEKKEEKKEEKK

SEQ ID NO: 63756 - protein, 94 aa, Triticum aestivum
  peptide (1)..(94): Ceres Seq. ID no. 14302211
  misc_feature (2)..(90): Pfam Name: Ubiquitin carboxyl-terminal hydrolase Pfam Description: Ubiquitin carboxyl-terminal hydrolase
  misc_feature (1)..(94): Homolog of NCBI NO: 15223416 NR Description: heavy-metal-associated domain-containing protein
  misc_feature (1)..(81): Homolog of NCBI NO: 32488374 NR Description: OSJNBa0043A12.4 [Oryza sativa (japonica
  misc_feature (1)..(94): Homolog of NCBI NO: 13543783 NR Description: Unknown (protein for MGC:7642) [Mus musculus]
  misc_feature (27)..(94): Homolog of NCBI NO: 10176843 NR Description: gene_id:MRO11.20~unknown protein [Arabidopsis
  misc_feature (1)..(74): Homolog of NCBI NO: 32489836 NR Description: OSJNBb0039L24.19 [Oryza sativa (japonica
  misc_feature (1)..(94): Homolog of NCBI NO: 26452654 NR Description: unknown protein [Arabidopsis thaliana]
  misc_feature (1)..(94): Homolog of NCBI NO: 21554550 NR Description: unknown [Arabidopsis thaliana]
  misc_feature (1)..(94): Homolog of NCBI NO: 18420713 NR Description: heavy-metal-associated domain-containing protein
  misc_feature (1)..(94): Homolog of NCBI NO: 37535864 NR Description: hypothetical protein [Oryza sativa (japonica
MTDDKAKQKAIEAVADIYGIDSIVADLKDNKMIIIGEMDTVAIAKKLKKVGKIDIVSVGPAKEEKKEEKKEEKKEEKKEEKKEEKKEEKKEEKK

SEQ ID NO: 63757 - DNA, 1112 bp, Triticum aestivum
  misc_feature (1)..(1112): Ceres Seq. ID no. 13591076
tttctcttccttcgttcgttctggtcgtttcggtgaatcgatctcgcccaccaaacccgaccacccgatcccccggacagccggagagcgaggcgaagcggcgaggcgtaccgcaaccatgctcagggtcgcaggtcgacgcatatcctcccacctcgcatggcgccccgccgcggccgcctccgccggcagcagccccctcgccggcggcctccctggcgacgacttcccccgggaccagaatccgcgcttcgccatcgaatcacccttctacgtcgctgccagaggcttttcggctgaatctcttgttccgaggaaccaggatgtagagttggctgagctcacaccaactacggcagctctgaagaatccctgtgccaaaattgtgtacgatgagtataaccacgagaggtacccacctggtgaccccagcaagcgtgcctttgcctactttgtgttgagtggtgggagatttgtgtacgcatccttgttgcgtttgctcgtcttaaagtttgtcctgagtatgtcagcaagtaaggatgtgcttgccctcgcttcccttgaggttgacctgtcaagtattgagcccggtaccactgtgactgtaaagtggcggggcaagccagttttcatcaggcgcaggaccgaagatgatgtgaagctggccaacagcgttgatgttacatctctccgtgacccacaggaggatgcggtgcgtgtcaagaaccctgagtggcttgttgtcattggtgtctgcactcacttgggctgcattcccctccccaactctggggacttcggtggctggttctgcccatgtcatggctcacactacgacatctcaggtagaatcaggaagggcccagcaccatacaacctggaggtcccgacctacagtttcttggaagataacaaaatgcttattggctaagagcactggccgtaagattaatccctatggtgctgtgctgccattttgtgttggtttgaccattcgtcttcttgttgctcggatagtcctatgatggactgttatcttagtgcagtactcttactagcactggatagtaaagaataatctgctgctactttggtacttttaattaatttcc

SEQ ID NO: 63758 - protein, 309 aa, Triticum aestivum
  peptide (1)..(309): Ceres Seq. ID no. 13591077
  misc_feature (209)..(305): Pfam Name: Rieske [2Fe-2S] domain Pfam Description: Rieske [2Fe-2S] domain
  misc_feature (40)..(309): Homolog of NCBI NO: 21553507 NR Description: ubiquinol--cytochrome-c reductase-like protein
  misc_feature (40)..(309): Homolog of NCBI NO: 18417067 NR Description: ubiquinol--cytochrome C reductase (cytochrome bc1 III (mitochondrial electron transport)/ Rieske iron-sulfur
  misc_feature (54)..(309): Homolog of NCBI NO: 1717949 NR Description: Ubiquinol-cytochrome C reductase iron-sulfur
  misc_feature (40)..(309): Homolog of NCBI NO: 586145 NR Description: Ubiquinol-cytochrome C reductase iron-sulfur
  misc_feature (40)..(309): Homolog of NCBI NO: 1717953 NR Description: Ubiquinol-cytochrome C reductase iron-sulfur
  misc_feature (40)..(309): Homolog of NCBI NO: 1717951 NR Description: Ubiquinol-cytochrome C reductase iron-sulfur
  misc_feature (40)..(309): Homolog of NCBI NO: 1076675 NR Description: ubiquinol-cytochrome-c reductase (EC 1.10.2.2)
  misc_feature (40)..(309): Homolog of NCBI NO: 1717950 NR Description: Ubiquinol-cytochrome C reductase iron-sulfur
  misc_feature (40)..(309): Homolog of NCBI NO: 38347166 NR Description: OSJNBa0039C07.12 [Oryza sativa (japonica
  misc_feature (40)..(309): Homolog of NCBI NO: 1717957 NR Description: Ubiquinol-cytochrome C reductase iron-sulfur
FSSFVRSGRFGESISPTKPDHPIPRTAGERGEAARRTATMLRVAGRRISSHLAWRPAAAASAGSSPLAGGLPGDDFPRDQNPRFAIESPFYVAARGFSAESLVPRNQDVELAELTPTTAALKNPCAKIVYDEYNHERYPPGDPSKRAFAYFVLSGGRFVYASLLRLLVLKFVLSMSASKDVLALASLEVDLSSIEPGTTVTVKWRGKPVFIRRRTEDDVKLANSVDVTSLRDPQEDAVRVKNPEWLVVIGVCTHLGCIPLPNSGDFGGWFCPCHGSHYDISGRIRKGPAPYNLEVPTYSFLEDNKMLIG

SEQ ID NO: 63759 - protein, 270 aa, Triticum aestivum
  peptide (1)..(270): Ceres Seq. ID no. 13591078
  misc_feature (170)..(266): Pfam Name: Rieske [2Fe-2S] domain Pfam Description: Rieske [2Fe-2S] domain
  misc_feature (1)..(270): Homolog of NCBI NO: 21553507 NR Description: ubiquinol--cytochrome-c reductase-like protein
  misc_feature (1)..(270): Homolog of NCBI NO: 18417067 NR Description: ubiquinol--cytochrome C reductase (cytochrome bc1 III (mitochondrial electron transport)/ Rieske iron-sulfur
  misc_feature (15)..(270): Homolog of NCBI NO: 1717949 NR Description: Ubiquinol-cytochrome C reductase iron-sulfur
  misc_feature (1)..(270): Homolog of NCBI NO: 586145 NR Description: Ubiquinol-cytochrome C reductase iron-sulfur
  misc_feature (1)..(270): Homolog of NCBI NO: 1717953 NR Description: Ubiquinol-cytochrome C reductase iron-sulfur
  misc_feature (1)..(270): Homolog of NCBI NO: 1717951 NR Description: Ubiquinol-cytochrome C reductase iron-sulfur
  misc_feature (1)..(270): Homolog of NCBI NO: 1076675 NR Description: ubiquinol-cytochrome-c reductase (EC 1.10.2.2)
  misc_feature (1)..(270): Homolog of NCBI NO: 1717950 NR Description: Ubiquinol-cytochrome C reductase iron-sulfur
  misc_feature (1)..(270): Homolog of NCBI NO: 38347166 NR Description: OSJNBa0039C07.12 [Oryza sativa (japonica
  misc_feature (1)..(270): Homolog of NCBI NO: 1717957 NR Description: Ubiquinol-cytochrome C reductase iron-sulfur
MLRVAGRRISSHLAWRPAAAASAGSSPLAGGLPGDDFPRDQNPRFAIESPFYVAARGFSAESLVPRNQDVELAELTPTTAALKNPCAKIVYDEYNHERYPPGDPSKRAFAYFVLSGGRFVYASLLRLLVLKFVLSMSASKDVLALASLEVDLSSIEPGTTVTVKWRGKPVFIRRRTEDDVKLANSVDVTSLRDPQEDAVRVKNPEWLVVIGVCTHLGCIPLPNSGDFGGWFCPCHGSHYDISGRIRKGPAPYNLEVPTYSFLEDNKMLIG

SEQ ID NO: 63760 - DNA, 860 bp, Triticum aestivum
  misc_feature (1)..(860): Ceres Seq. ID no. 13597399
atcgcattgccgcgccttcccttcattcccacccgcctacttcacgcgcaccaaccaccccctccgctgcttcagttcgtccgctccatccatcccgtttctattccgagtggacgccaggcgcataggtatatttggctgtagagagcctgatttagaagataggaggagcacatctttgagagggaggagcatgccgacgggaaccatgaggaggatgttcgtcgagtcgtcctcgtcctcctccgggagcggcagggaggcggagccggcggtggtgctgtgcgcgccccggccccgcagggtccacgcccagccctgcagcgccgacctcatcctcggccccccgcccttcctgctcaacgcctcctccggcagcataaagcagagacaagggaagagcaaaacgcgggaggaggagggggaggggggctgggcgctgttcggcggctcgccgccggcgcgcgcggacaacccgctcgtccacgacccccacttcctgctcaaccagcgccaccacgccgccgcggaattcaacctcgcggcggtttttgaccaccacctccaccaccacagccgcaaccaccaccacgccccaaccacatatagcaatagcggcaatagccacagttttgccccgtcgtacacgcacgccgcgccggcggtgaggatccaggggttcgacgtcgccgcctgccggggctcccacgccagcaacggcggaggccgcgtgctctccgcccgcgcatgagcctgagccctgcggaattgcatcatgttggttatgcagctgtaccatgtaatggaattgcatcaagttgattcaataatttctcctgagtttcgaaaaaaaaaaaaaa

SEQ ID NO: 63761 - protein, 249 aa, Triticum aestivum
  peptide (1)..(249): Ceres Seq. ID no. 13597400
  misc_feature (70)..(249): Homolog of NCBI NO: 34907108 NR Description: OSJNBa0052O12.19 [Oryza sativa (japonica
SHCRAFPSFPPAYFTRTNHPLRCFSSSAPSIPFLFRVDARRIGIFGCREPDLEDRRSTSLRGRSMPTGTMRRMFVESSSSSSGSGREAEPAVVLCAPRPRRVHAQPCSADLILGPPPFLLNASSGSIKQRQGKSKTREEEGEGGWALFGGSPPARADNPLVHDPHFLLNQRHHAAAEFNLAAVFDHHLHHHSRNHHHAPTTYSNSGNSHSFAPSYTHAAPAVRIQGFDVAACRGSHASNGGGRVLSARA

SEQ ID NO: 63762 - protein, 185 aa, Triticum aestivum
  peptide (1)..(185): Ceres Seq. ID no. 13597401
  misc_feature (6)..(185): Homolog of NCBI NO: 34907108 NR Description: OSJNBa0052O12.19 [Oryza sativa (japonica
MPTGTMRRMFVESSSSSSGSGREAEPAVVLCAPRPRRVHAQPCSADLILGPPPFLLNASSGSIKQRQGKSKTREEEGEGGWALFGGSPPARADNPLVHDPHFLLNQRHHAAAEFNLAAVFDHHLHHHSRNHHHAPTTYSNSGNSHSFAPSYTHAAPAVRIQGFDVAACRGSHASNGGGRVLSARA

SEQ ID NO: 63763 - protein, 180 aa, Triticum aestivum
  peptide (1)..(180): Ceres Seq. ID no. 13597402
  misc_feature (1)..(180): Homolog of NCBI NO: 34907108 NR Description: OSJNBa0052O12.19 [Oryza sativa (japonica
MRRMFVESSSSSSGSGREAEPAVVLCAPRPRRVHAQPCSADLILGPPPFLLNASSGSIKQRQGKSKTREEEGEGGWALFGGSPPARADNPLVHDPHFLLNQRHHAAAEFNLAAVFDHHLHHHSRNHHHAPTTYSNSGNSHSFAPSYTHAAPAVRIQGFDVAACRGSHASNGGGRVLSARA

SEQ ID NO: 63764 - DNA, 1056 bp, Triticum aestivum
  misc_feature (1)..(1056): Ceres Seq. ID no. 13597418
actttattgtgtttaaacacgccaaaggccaaaagcggggaagaaagaggacgaaagaaagcgtcgccgccgcggagcaaatcgagcaagcagccggcgacgcgacgcggccgaatcggagcaggcagtctcgccggccggccgtcccatcgaccgaccccccgctcggccccccgaggaaccgatagggtccatctccctgccggcgatggcgtcgtccgcggatccgtgggtgcgggagtacggcgaggcggcgcgcctggcggacgacgtcgccgccatggtcgccgaccgggcggcgctcccgcagtccggcccggaggtcatgcgccacacctccgccattcgccggaagatcaccatcctcgggaccaggctggacagcctcgaggggatgctcgccaggcttccccccaaatccatcacggacaaggagctgaataagcaccgagacacgctttcaaatttgaaatctagagcaaaacagatggcagaaagtttcaacatgtcgacctttgccaacagggaggatttgcttggtcagagcaagaaagctgctgatgacatgaacagagtagccgggttggataaccaagggattgttggccttcagaggcaaatcatgaaagaacaagatgagggtcttgagaagctggaacagaccgtgctgagcacaaaacatattgcgttagcagtcaatgaggaacttgacctgcacgcaagactgattgatgacctagatgatcatgtggatggtacaaactcgcgccttcaacgtgtgcaaaagaggcttgcggttctgaacaagcgcgccaagggcggctgctcctgcatgtccctgctgctgtccaccgtcggtatagtgatgcttgtggttattgtctggctcctcatcaagtatctgtaacctctgcccaactcaaatcagtttcaagtgtgcagttctttcaaagacagtatggttacttccgcttcgccatcattttggcgagaaatggaaaatatgtatgccacatgtccccttatcgggttgaaatgtgaagttcagacttttgc

SEQ ID NO: 63765 - protein, 232 aa, Triticum aestivum
  peptide (1)..(232): Ceres Seq. ID no. 13597419
  misc_feature (141)..(203): Pfam Name: SNARE domain Pfam Description: SNARE domain
  misc_feature (6)..(226): Homolog of NCBI NO: 9055356 NR Description: syntaxin 8; syntaxin-like protein 3I35 [Mus
  misc_feature (6)..(226): Homolog of NCBI NO: 13928908 NR Description: syntaxin 8; syntaxin-like protein 3I35 [Rattus
  misc_feature (1)..(195): Homolog of NCBI NO: 22329605 NR Description: hypothetical protein [Arabidopsis thaliana]
  misc_feature (1)..(174): Homolog of NCBI NO: 15219172 NR Description: hypothetical protein [Arabidopsis thaliana]
  misc_feature (1)..(231): Homolog of NCBI NO: 34902234 NR Description: Hypothetical protein [Oryza sativa (japonica
  misc_feature (159)..(232): Homolog of NCBI NO: 25372945 NR Description: protein F20B17.2 [imported] - Arabidopsis
  misc_feature (1)..(174): Homolog of NCBI NO: 25372945 NR Description: protein F20B17.2 [imported] - Arabidopsis
  misc_feature (1)..(232): Homolog of NCBI NO: 21592406 NR Description: unknown [Arabidopsis thaliana]
  misc_feature (1)..(232): Homolog of NCBI NO: 18394339 NR Description: syntaxin of plants 51 (SYP51) [Arabidopsis
  misc_feature (1)..(232): Homolog of NCBI NO: 18412435 NR Description: syntaxin of plants 52 (SYP52) [Arabidopsis
MASSADPWVREYGEAARLADDVAAMVADRAALPQSGPEVMRHTSAIRRKITILGTRLDSLEGMLARLPPKSITDKELNKHRDTLSNLKSRAKQMAESFNMSTFANREDLLGQSKKAADDMNRVAGLDNQGIVGLQRQIMKEQDEGLEKLEQTVLSTKHIALAVNEELDLHARLIDDLDDHVDGTNSRLQRVQKRLAVLNKRAKGGCSCMSLLLSTVGIVMLVVIVWLLIKYL

SEQ ID NO: 63766 - protein, 208 aa, Triticum aestivum
  peptide (1)..(208): Ceres Seq. ID no. 13597420
  misc_feature (117)..(179): Pfam Name: SNARE domain Pfam Description: SNARE domain
  misc_feature (1)..(202): Homolog of NCBI NO: 9055356 NR Description: syntaxin 8; syntaxin-like protein 3I35 [Mus
  misc_feature (1)..(202): Homolog of NCBI NO: 13928908 NR Description: syntaxin 8; syntaxin-like protein 3I35 [Rattus
  misc_feature (1)..(171): Homolog of NCBI NO: 22329605 NR Description: hypothetical protein [Arabidopsis thaliana]
  misc_feature (1)..(150): Homolog of NCBI NO: 15219172 NR Description: hypothetical protein [Arabidopsis thaliana]
  misc_feature (1)..(207): Homolog of NCBI NO: 34902234 NR Description: Hypothetical protein [Oryza sativa (japonica
  misc_feature (135)..(208): Homolog of NCBI NO: 25372945 NR Description: protein F20B17.2 [imported] - Arabidopsis
  misc_feature (1)..(150): Homolog of NCBI NO: 25372945 NR Description: protein F20B17.2 [imported] - Arabidopsis
  misc_feature (1)..(208): Homolog of NCBI NO: 21592406 NR Description: unknown [Arabidopsis thaliana]
  misc_feature (1)..(208): Homolog of NCBI NO: 18394339 NR Description: syntaxin of plants 51 (SYP51) [Arabidopsis
  misc_feature (1)..(208): Homolog of NCBI NO: 18412435 NR Description: syntaxin of plants 52 (SYP52) [Arabidopsis
MVADRAALPQSGPEVMRHTSAIRRKITILGTRLDSLEGMLARLPPKSITDKELNKHRDTLSNLKSRAKQMAESFNMSTFANREDLLGQSKKAADDMNRVAGLDNQGIVGLQRQIMKEQDEGLEKLEQTVLSTKHIALAVNEELDLHARLIDDLDDHVDGTNSRLQRVQKRLAVLNKRAKGGCSCMSLLLSTVGIVMLVVIVWLLIKYL

SEQ ID NO: 63767 - protein, 193 aa, Triticum aestivum
  peptide (1)..(193): Ceres Seq. ID no. 13597421
  misc_feature (102)..(164): Pfam Name: SNARE domain Pfam Description: SNARE domain
  misc_feature (1)..(187): Homolog of NCBI NO: 9055356 NR Description: syntaxin 8; syntaxin-like protein 3I35 [Mus
  misc_feature (1)..(187): Homolog of NCBI NO: 13928908 NR Description: syntaxin 8; syntaxin-like protein 3I35 [Rattus
  misc_feature (1)..(156): Homolog of NCBI NO: 22329605 NR Description: hypothetical protein [Arabidopsis thaliana]
  misc_feature (1)..(135): Homolog of NCBI NO: 15219172 NR Description: hypothetical protein [Arabidopsis thaliana]
  misc_feature (1)..(192): Homolog of NCBI NO: 34902234 NR Description: Hypothetical protein [Oryza sativa (japonica
  misc_feature (120)..(193): Homolog of NCBI NO: 25372945 NR Description: protein F20B17.2 [imported] - Arabidopsis
  misc_feature (1)..(135): Homolog of NCBI NO: 25372945 NR Description: protein F20B17.2 [imported] - Arabidopsis
  misc_feature (1)..(193): Homolog of NCBI NO: 21592406 NR Description: unknown [Arabidopsis thaliana]
  misc_feature (1)..(193): Homolog of NCBI NO: 18394339 NR Description: syntaxin of plants 51 (SYP51) [Arabidopsis
  misc_feature (1)..(193): Homolog of NCBI NO: 18412435 NR Description: syntaxin of plants 52 (SYP52) [Arabidopsis
MRHTSAIRRKITILGTRLDSLEGMLARLPPKSITDKELNKHRDTLSNLKSRAKQMAESFNMSTFANREDLLGQSKKAADDMNRVAGLDNQGIVGLQRQIMKEQDEGLEKLEQTVLSTKHIALAVNEELDLHARLIDDLDDHVDGTNSRLQRVQKRLAVLNKRAKGGCSCMSLLLSTVGIVMLVVIVWLLIKYL

SEQ ID NO: 63768 - DNA, 876 bp, Triticum aestivum
  misc_feature (1)..(876): Ceres Seq. ID no. 12586195
aaagccatttcatcagatcccagccaagtacatcacgcacccacgagcacgaccaggcacgcacggcagaagcgatgggcgtcgtctcggcggtggcggacgcggtggtcgtcctcttctccctcaccatcgcggtgggggtcccgctcatcgacgcgcaggccgtcctctcgcacgacgcctacccggcgcagctgcgggacctcaagcgctggtacgccgccgagttcgacgactacctcatggcccacccgccgcccttcttccgcggcctcttgtgcctcgagctcgccttcctctggccgctctccgtcgccaccgtctacggcgtcctcgcccgccgccgatgggccgccaccacctccctcatggtcggcgtcaccaccctcacctccctgtcggcaatatttggcgagatgctgggctcagggaaggcaacgacgaagctgcttcagatgtatgttccatacgccgtgtttgctgtcattgccatcctgcgcggtctctgctcatgctcggcgccggcgtcgccggcatcttctgctcggaagaagagggtctagatttgatttgcatttctgacatttttcatcgataaaacattcaagtttcactaggtgtaagatgctttcttctgaggctgtaccgtccaacctactccctccgttcgggattacttgtctcgaaaatagatgtaactagaactaaaatacgtctagatacatccatctctacgacaagtaatttcgaacggagggagtatcattcaacacccagtggaaatggaatgtccatactgccattgttaaattttgttcacaatttgaaaaagattgtactgcatctgttctacttctatgatagatcatgttcaag

SEQ ID NO: 63769 - protein, 198 aa, Triticum aestivum
  peptide (1)..(198): Ceres Seq. ID no. 12586196
KPFHQIPAKYITHPRARPGTHGRSDGRRLGGGGRGGRPLLPHHRGGGPAHRRAGRPLARRLPGAAAGPQALVRRRVRRLPHGPPAALLPRPLVPRARLPLAALRRHRLRRPRPPPMGRHHLPHGRRHHPHLPVGNIWRDAGLREGNDEAASDVCSIRRVCCHCHPARSLLMLGAGVAGIFCSEEEGLDLICISDIFHR

SEQ ID NO: 63770 - protein, 193 aa, Triticum aestivum
  peptide (1)..(193): Ceres Seq. ID no. 12586197
  misc_feature (40)..(132): Pfam Name: Extensin-like region Pfam Description: Extensin-like region
  misc_feature (4)..(130): Homolog of NCBI NO: 11359723 NR Description: proteophosphoglycan, membrane-associated
  misc_feature (4)..(130): Homolog of NCBI NO: 13592175 NR Description: ppg3 [Leishmania major]
  misc_feature (4)..(130): Homolog of NCBI NO: 11359723 NR Description: proteophosphoglycan, membrane-associated
  misc_feature (4)..(128): Homolog of NCBI NO: 11359723 NR Description: proteophosphoglycan, membrane-associated
  misc_feature (4)..(130): Homolog of NCBI NO: 11359723 NR Description: proteophosphoglycan, membrane-associated
  misc_feature (4)..(130): Homolog of NCBI NO: 32699068 NR Description: hypothetical protein FLJ35107 [Homo sapiens]
  misc_feature (4)..(149): Homolog of NCBI NO: 32699068 NR Description: hypothetical protein FLJ35107 [Homo sapiens]
  misc_feature (4)..(131): Homolog of NCBI NO: 32699068 NR Description: hypothetical protein FLJ35107 [Homo sapiens]
KAISSDPSQVHHAPTSTTRHARQKRWASSRRWRTRWSSSSPSPSRWGSRSSTRRPSSRTTPTRRSCGTSSAGTPPSSTTTSWPTRRPSSAASCASSSPSSGRSPSPPSTASSPAADGPPPPPSWSASPPSPPCRQYLARCWAQGRQRRSCFRCMFHTPCLLSLPSCAVSAHARRRRRRHLLLGRRGSRFDLHF

SEQ ID NO: 63771 - protein, 186 aa, Triticum aestivum
  peptide (1)..(186): Ceres Seq. ID no. 12586198
  misc_feature (25)..(140): Homolog of NCBI NO: 19526880 NR Description: RIKEN cDNA 1810014L12 [Mus musculus]
  misc_feature (25)..(140): Homolog of NCBI NO: 27688749 NR Description: similar to RIKEN cDNA 1810014L12
  misc_feature (13)..(140): Homolog of NCBI NO: 2135212 NR Description: gene MAC30 protein - human (fragment)
  misc_feature (25)..(183): Homolog of NCBI NO: 15220447 NR Description: hypothetical protein; protein id: At1g05220.1
  misc_feature (25)..(182): Homolog of NCBI NO: 18390494 NR Description: expressed protein
  misc_feature (25)..(185): Homolog of NCBI NO: 18402955 NR Description: expressed protein
  misc_feature (25)..(185): Homolog of NCBI NO: 28411943 NR Description: OSJNBa0027N13.35 [Oryza sativa (japonica
  misc_feature (25)..(185): Homolog of NCBI NO: 28411944 NR Description: OSJNBa0027N13.37 [Oryza sativa (japonica
SHFIRSQPSTSRTHEHDQARTAEAMGVVSAVADAVVVLFSLTIAVGVPLIDAQAVLSHDAYPAQLRDLKRWYAAEFDDYLMAHPPPFFRGLLCLELAFLWPLSVATVYGVLARRRWAATTSLMVGVTTLTSLSAIFGEMLGSGKATTKLLQMYVPYAVFAVIAILRGLCSCSAPASPASSARKKRV

SEQ ID NO: 63772 - protein, 162 aa, Triticum aestivum
  peptide (1)..(162): Ceres Seq. ID no. 12586199
  misc_feature (1)..(116): Homolog of NCBI NO: 19526880 NR Description: RIKEN cDNA 1810014L12 [Mus musculus]
  misc_feature (1)..(116): Homolog of NCBI NO: 27688749 NR Description: similar to RIKEN cDNA 1810014L12
  misc_feature (1)..(116): Homolog of NCBI NO: 2135212 NR Description: gene MAC30 protein - human (fragment)
  misc_feature (1)..(159): Homolog of NCBI NO: 15220447 NR Description: hypothetical protein; protein id: At1g05220.1
  misc_feature (1)..(158): Homolog of NCBI NO: 18390494 NR Description: expressed protein
  misc_feature (1)..(161): Homolog of NCBI NO: 18402955 NR Description: expressed protein
  misc_feature (1)..(161): Homolog of NCBI NO: 28411943 NR Description: OSJNBa0027N13.35 [Oryza sativa (japonica
  misc_feature (1)..(161): Homolog of NCBI NO: 28411944 NR Description: OSJNBa0027N13.37 [Oryza sativa (japonica
MGVVSAVADAVVVLFSLTIAVGVPLIDAQAVLSHDAYPAQLRDLKRWYAAEFDDYLMAHPPPFFRGLLCLELAFLWPLSVATVYGVLARRRWAATTSLMVGVTTLTSLSAIFGEMLGSGKATTKLLQMYVPYAVFAVIAILRGLCSCSAPASPASSARKKRV

SEQ ID NO: 63773 - DNA, 733 bp, Triticum aestivum
  misc_feature (1)..(733): Ceres Seq. ID no. 12586420
aaatccaattccaaccacaagctccaatcaaacacagcaaaccaatccagattaccatcggctatcaatcagcaggaggaggaaatcgctgctcgattggggaagaatcaagaggctcggcgaagatgcaggcggcgaaggagaaggtgaaggacggcgtgagcgcggtgaaggccaagaccaagatcacgcaggccaaggcgtcggagaaggcggaggcggccacggcgaggtcgcacgcggagcgggagctggcgcacgagcgcggcaaggccaaggtcgccgctgccaagatggagctgcaccaggacaaggcgctccaccgcgaggaggccatggagcaccgcatccacaagcacggcggccacggccggcaccaccacaagcacggcgtcggcatcgtggccgcgcccccgccggcgaccggggccggggcgggggcgtaccaccctcctcctgccgccggtggccactactactaattacagctaagcagctccatcgctagctagatgggcacatgcgtcgcgtgtgtgttatgcgatctcgcaagctaagtttgtattttgtactgttttgtgcttgacttacccacgcgtgctttttaagtttgcacttggtttgcacttaaagatgagagctgtatgtatgtatggatgcatgcaaccttgttgcttgctttcttttataatactctaaagagcggtaaatcaattacgtttgtttggcagcg

SEQ ID NO: 63774 - protein, 168 aa, Triticum aestivum
  peptide (1)..(168): Ceres Seq. ID no. 12586421
  misc_feature (44)..(147): Homolog of NCBI NO: 10954052 NR Description: ovarian fibroin-like substance-3 [Cyprinus carpio]
NPIPTTSSNQTQQTNPDYHRLSISRRRKSLLDWGRIKRLGEDAGGEGEGEGRRERGEGQDQDHAGQGVGEGGGGHGEVARGAGAGARARQGQGRRCQDGAAPGQGAPPRGGHGAPHPQARRPRPAPPQARRRHRGRAPAGDRGRGGGVPPSSCRRWPLLLITAKQLHR

SEQ ID NO: 63775 - protein, 159 aa, Triticum aestivum
  peptide (1)..(159): Ceres Seq. ID no. 12586422
  misc_feature (42)..(114): Pfam Name: Late embryogenesis abundant (LEA) group 1 Pfam Description: Late embryogenesis abundant (LEA) group 1
  misc_feature (42)..(151): Homolog of NCBI NO: 15223243 NR Description: late-embryogenesis abundant protein, putative
  misc_feature (42)..(104): Homolog of NCBI NO: 18652403 NR Description: unknown [Hordeum vulgare]
  misc_feature (42)..(136): Homolog of NCBI NO: 18652404 NR Description: unknown [Hordeum vulgare]
  misc_feature (42)..(159): Homolog of NCBI NO: 34897842 NR Description: P0514G12.41 [Oryza sativa (japonica
IQFQPQAPIKHSKPIQITIGYQSAGGGNRCSIGEESRGSAKMQAAKEKVKDGVSAVKAKTKITQAKASEKAEAATARSHAERELAHERGKAKVAAAKMELHQDKALHREEAMEHRIHKHGGHGRHHHKHGVGIVAAPPPATGAGAGAYHPPPAAGGHYY

SEQ ID NO: 63776 - protein, 118 aa, Triticum aestivum
  peptide (1)..(118): Ceres Seq. ID no. 12586423
  misc_feature (1)..(73): Pfam Name: Late embryogenesis abundant (LEA) group 1 Pfam Description: Late embryogenesis abundant (LEA) group 1
  misc_feature (1)..(110): Homolog of NCBI NO: 15223243 NR Description: late-embryogenesis abundant protein, putative
  misc_feature (1)..(63): Homolog of NCBI NO: 18652403 NR Description: unknown [Hordeum vulgare]
  misc_feature (1)..(95): Homolog of NCBI NO: 18652404 NR Description: unknown [Hordeum vulgare]
  misc_feature (1)..(118): Homolog of NCBI NO: 34897842 NR Description: P0514G12.41 [Oryza sativa (japonica
MQAAKEKVKDGVSAVKAKTKITQAKASEKAEAATARSHAERELAHERGKAKVAAAKMELHQDKALHREEAMEHRIHKHGGHGRHHHKHGVGIVAAPPPATGAGAGAYHPPPAAGGHYY

SEQ ID NO: 63777 - DNA, 1148 bp, Triticum aestivum
  misc_feature (1)..(1148): Ceres Seq. ID no. 12617350
atcccatcaccacagcaccagtcacaagcaaaagtaggagctcgatcaccgagtgttagctctcacagttcgcaagtgttttatttccaggggtgcagtttcagcaggtcggcaatggctacgattgctctgatagtggccatggtgctcagcctggcgcagctctccgctgggagcaggaggctgatggagctgtacgtgcctccggagagcgaccggctcacgtaccaccagggcggcgtgctcagcggcgacatctccgtgtccatcctctggtacggcaagttcacgcccgcgcagaggtccattgtctccgacttcgtcgtctcgctaaactccgcgccgaacggggccgccacgccctcggtcgggcagtggtggggcaccatcgagcagctctacctgtccaaggcggctgccgccaacggccaggccggcgccacgcacgtgctcctcgccgagcaggtgaccgacgagcagtgctccctcggcacgtcgctcactctggcccagatcgaccagctcgccgcgagcgtcggcgccaagaagggcggcatcgcgctggtgttcaccgacgaggacgtcgccgtggagggcttctgcagcagccggtgcggcaggcacgggtcgtccaccggcggcgactccacgcacatctgggtcggcaactccgtgaagcagtgccccgggcagtgcgcgtggccgttcgcgcagccgcagtacgggccgcagggcgcgcccctggtggcgcccaacggcaacgtcgggatggacggcatggtgatggtcctcgccaccatggtggccggcaccgtgagcaacccgtacggggacggctactaccagggccccaagggcgcgtccctggaggcgtgcacggcgtgccccggcgtctacggcagcggggcgtacccgggctacgccggcaacctgctcgtcgaccccagcaccggcgccagctacaatgccaacggcgccaacgggaggaagtacctgctcccggcgttgtacgaccccgccacggcctcctgcaacacgcttgtctagtccggtgcgtccatccgggcacgtacaggctttccctgtacgcttgagaagttgtacatagtgtaacgtgttggaagaaatggaaattgcttcgttcgttt

SEQ ID NO: 63778 - protein, 348 aa, Triticum aestivum
  peptide (1)..(348): Ceres Seq. ID no. 12617351
  misc_feature (74)..(348): Pfam Name: Phosphate-induced protein 1 conserved region Pfam Description: Phosphate-induced protein 1 conserved region
  misc_feature (76)..(279): Homolog of NCBI NO: 11762144 NR Description: At1g35140 [Arabidopsis thaliana]
  misc_feature (174)..(347): Homolog of NCBI NO: 13194680 NR Description: phosphate-induced protein 1-like protein
  misc_feature (82)..(348): Homolog of NCBI NO: 15242420 NR Description: putative protein
  misc_feature (114)..(344): Homolog of NCBI NO: 37533672 NR Description: putative phosphate-induced protein
  misc_feature (74)..(348): Homolog of NCBI NO: 15237656 NR Description: phi-1-like protein
  misc_feature (40)..(348): Homolog of NCBI NO: 31074969 NR Description: erg-1 [Solanum tuberosum]
  misc_feature (76)..(347): Homolog of NCBI NO: 15219504 NR Description: phosphate-induced (phi-1) protein, putative
  misc_feature (48)..(348): Homolog of NCBI NO: 15236667 NR Description: putative phi-1-like phosphate-induced protein
  misc_feature (39)..(348): Homolog of NCBI NO: 21593043 NR Description: putative phi-1-like phosphate-induced protein
  misc_feature (39)..(348): Homolog of NCBI NO: 3759184 NR Description: phi-1 [Nicotiana tabacum]
IPSPQHQSQAKVGARSPSVSSHSSQVFYFQGCSFSRSAMATIALIVAMVLSLAQLSAGSRRLMELYVPPESDRLTYHQGGVLSGDISVSILWYGKFTPAQRSIVSDFVVSLNSAPNGAATPSVGQWWGTIEQLYLSKAAAANGQAGATHVLLAEQVTDEQCSLGTSLTLAQIDQLAASVGAKKGGIALVFTDEDVAVEGFCSSRCGRHGSSTGGDSTHIWVGNSVKQCPGQCAWPFAQPQYGPQGAPLVAPNGNVGMDGMVMVLATMVAGTVSNPYGDGYYQGPKGASLEACTACPGVYGSGAYPGYAGNLLVDPSTGASYNANGANGRKYLLPALYDPATASCNTLV

SEQ ID NO: 63779 - protein, 310 aa, Triticum aestivum
  peptide (1)..(310): Ceres Seq. ID no. 12617352
  misc_feature (36)..(310): Pfam Name: Phosphate-induced protein 1 conserved region Pfam Description: Phosphate-induced protein 1 conserved region
  misc_feature (38)..(241): Homolog of NCBI NO: 11762144 NR Description: At1g35140 [Arabidopsis thaliana]
  misc_feature (136)..(309): Homolog of NCBI NO: 13194680 NR Description: phosphate-induced protein 1-like protein
  misc_feature (44)..(310): Homolog of NCBI NO: 15242420 NR Description: putative protein
  misc_feature (76)..(306): Homolog of NCBI NO: 37533672 NR Description: putative phosphate-induced protein
  misc_feature (36)..(310): Homolog of NCBI NO: 15237656 NR Description: phi-1-like protein
  misc_feature (2)..(310): Homolog of NCBI NO: 31074969 NR Description: erg-1 [Solanum tuberosum]
  misc_feature (38)..(309): Homolog of NCBI NO: 15219504 NR Description: phosphate-induced (phi-1) protein, putative
  misc_feature (10)..(310): Homolog of NCBI NO: 15236667 NR Description: putative phi-1-like phosphate-induced protein
  misc_feature (1)..(310): Homolog of NCBI NO: 21593043 NR Description: putative phi-1-like phosphate-induced protein
  misc_feature (1)..(310): Homolog of NCBI NO: 3759184 NR Description: phi-1 [Nicotiana tabacum]
MATIALIVAMVLSLAQLSAGSRRLMELYVPPESDRLTYHQGGVLSGDISVSILWYGKFTPAQRSIVSDFVVSLNSAPNGAATPSVGQWWGTIEQLYLSKAAAANGQAGATHVLLAEQVTDEQCSLGTSLTLAQIDQLAASVGAKKGGIALVFTDEDVAVEGFCSSRCGRHGSSTGGDSTHIWVGNSVKQCPGQCAWPFAQPQYGPQGAPLVAPNGNVGMDGMVMVLATMVAGTVSNPYGDGYYQGPKGASLEACTACPGVYGSGAYPGYAGNLLVDPSTGASYNANGANGRKYLLPALYDPATASCNTLV

SEQ ID NO: 63780 - protein, 301 aa, Triticum aestivum
  peptide (1)..(301): Ceres Seq. ID no. 12617353
  misc_feature (27)..(301): Pfam Name: Phosphate-induced protein 1 conserved region Pfam Description: Phosphate-induced protein 1 conserved region
  misc_feature (29)..(232): Homolog of NCBI NO: 11762144 NR Description: At1g35140 [Arabidopsis thaliana]
  misc_feature (127)..(300): Homolog of NCBI NO: 13194680 NR Description: phosphate-induced protein 1-like protein
  misc_feature (35)..(301): Homolog of NCBI NO: 15242420 NR Description: putative protein
  misc_feature (67)..(297): Homolog of NCBI NO: 37533672 NR Description: putative phosphate-induced protein
  misc_feature (27)..(301): Homolog of NCBI NO: 15237656 NR Description: phi-1-like protein
  misc_feature (1)..(301): Homolog of NCBI NO: 31074969 NR Description: erg-1 [Solanum tuberosum]
  misc_feature (29)..(300): Homolog of NCBI NO: 15219504 NR Description: phosphate-induced (phi-1) protein, putative
  misc_feature (1)..(301): Homolog of NCBI NO: 15236667 NR Description: putative phi-1-like phosphate-induced protein
  misc_feature (1)..(301): Homolog of NCBI NO: 21593043 NR Description: putative phi-1-like phosphate-induced protein
  misc_feature (1)..(301): Homolog of NCBI NO: 3759184 NR Description: phi-1 [Nicotiana tabacum]
MVLSLAQLSAGSRRLMELYVPPESDRLTYHQGGVLSGDISVSILWYGKFTPAQRSIVSDFVVSLNSAPNGAATPSVGQWWGTIEQLYLSKAAAANGQAGATHVLLAEQVTDEQCSLGTSLTLAQIDQLAASVGAKKGGIALVFTDEDVAVEGFCSSRCGRHGSSTGGDSTHIWVGNSVKQCPGQCAWPFAQPQYGPQGAPLVAPNGNVGMDGMVMVLATMVAGTVSNPYGDGYYQGPKGASLEACTACPGVYGSGAYPGYAGNLLVDPSTGASYNANGANGRKYLLPALYDPATASCNTLV

SEQ ID NO: 63781 - DNA, 599 bp, Triticum aestivum
  misc_feature (1)..(599): Ceres Seq. ID no. 15173361
actcggaaaaagatctccgctttgccctgcctgcctgcgccggacggagccaccccacccaccaaagcgatccgccggaccggcgagcggcgagcggcggagcaagggagagatggcggcgacgggggaggagacggtgcgtgcgtcgcacatcctgatcaagcacgaggggtcccggcgcaaggcgtcctggaaggaccccgagggccgggtcatctccgccaccacgcgcgccgacgccgccgcgcgcctcggcgacctccgcgcccagatcctcgccggccgcggctccttcgccgacctcgccgcgcagcactccgactgctcctccgcccgccgcggcggcgacctagggcctgcggctcttctcattctggcagccccaagcttgaatgaagaaaaatgtcttgtatcgtctcaccattttgctacggccatttgagctggttgataccatcatcacaggtcaatgtttgagcttatgatgtcttgatcgggaaatgtggaaatgtttttttttcttcatttcatctgtgataaatcatttcaaatgaatgttgtatgcaccatgaaatatctcctacttatagtaaggtttc

SEQ ID NO: 63782 - protein, 146 aa, Triticum aestivum
  peptide (1)..(146): Ceres Seq. ID no. 15173362
  misc_feature (39)..(118): Homolog of NCBI NO: 2739197 NR Description: peptidyl-prolyl cis/trans isomerase [Emericella
  misc_feature (16)..(118): Homolog of NCBI NO: 12655856 NR Description: peptidyl prolyl cis/trans isomerase [Candida
  misc_feature (24)..(119): Homolog of NCBI NO: 39584693 NR Description: Hypothetical protein CBG19616 [Caenorhabditis
  misc_feature (40)..(118): Homolog of NCBI NO: 19075413 NR Description: peptidyl-prolyl cis-trans isomerase.
  misc_feature (27)..(118): Homolog of NCBI NO: 17647355 NR Description: dodo CG17051-PA [Drosophila melanogaster]
  misc_feature (27)..(118): Homolog of NCBI NO: 7448078 NR Description: Pin1 protein homolog dodo - fruit fly (Drosophila
  misc_feature (24)..(119): Homolog of NCBI NO: 1688322 NR Description: PinA [Dictyostelium discoideum]
  misc_feature (44)..(118): Homolog of NCBI NO: 15227956 NR Description: peptidyl-prolyl cis-trans isomerase -related
  misc_feature (35)..(118): Homolog of NCBI NO: 22218833 NR Description: Chain A, Solution Structure Of Pin1at From
  misc_feature (39)..(118): Homolog of NCBI NO: 38344861 NR Description: OSJNBa0020P07.4 [Oryza sativa (japonica
LGKRSPLCPACLRRTEPPHPPKRSAGPASGERRSKGEMAATGEETVRASHILIKHEGSRRKASWKDPEGRVISATTRADAAARLGDLRAQILAGRGSFADLAAQHSDCSSARRGGDLGPAALLILAAPSLNEEKCLVSSHHFATAI

SEQ ID NO: 63783 - protein, 131 aa, Triticum aestivum
  peptide (1)..(131): Ceres Seq. ID no. 15173363
TRKKISALPCLPAPDGATPPTKAIRRTGERRAAEQGRDGGDGGGDGACVAHPDQARGVPAQGVLEGPRGPGHLRHHARRRRRAPRRPPRPDPRRPRLLRRPRRAALRLLLRPPRRRPRACGSSHSGSPKLE

SEQ ID NO: 63784 - protein, 109 aa, Triticum aestivum
  peptide (1)..(109): Ceres Seq. ID no. 15173364
  misc_feature (2)..(81): Homolog of NCBI NO: 2739197 NR Description: peptidyl-prolyl cis/trans isomerase [Emericella
  misc_feature (1)..(81): Homolog of NCBI NO: 12655856 NR Description: peptidyl prolyl cis/trans isomerase [Candida
  misc_feature (1)..(82): Homolog of NCBI NO: 39584693 NR Description: Hypothetical protein CBG19616 [Caenorhabditis
  misc_feature (3)..(81): Homolog of NCBI NO: 19075413 NR Description: peptidyl-prolyl cis-trans isomerase.
  misc_feature (1)..(81): Homolog of NCBI NO: 17647355 NR Description: dodo CG17051-PA [Drosophila melanogaster]
  misc_feature (1)..(81): Homolog of NCBI NO: 7448078 NR Description: Pin1 protein homolog dodo - fruit fly (Drosophila
  misc_feature (1)..(82): Homolog of NCBI NO: 1688322 NR Description: PinA [Dictyostelium discoideum]
  misc_feature (7)..(81): Homolog of NCBI NO: 15227956 NR Description: peptidyl-prolyl cis-trans isomerase -related
  misc_feature (1)..(81): Homolog of NCBI NO: 22218833 NR Description: Chain A, Solution Structure Of Pin1at From
  misc_feature (2)..(81): Homolog of NCBI NO: 38344861 NR Description: OSJNBa0020P07.4 [Oryza sativa (japonica
MAATGEETVRASHILIKHEGSRRKASWKDPEGRVISATTRADAAARLGDLRAQILAGRGSFADLAAQHSDCSSARRGGDLGPAALLILAAPSLNEEKCLVSSHHFATAI

SEQ ID NO: 63785 - DNA, 1006 bp, Triticum aestivum
  misc_feature (1)..(1006): Ceres Seq. ID no. 13597299
atactttcccctaccatcagcagagccacatcagggggcccgggtggaggtttgggtcgctcctactcagaaaccccagattcccaaattcctcctcgacctccatcccgtggaatccaaccaacgcggggaggcacccagcacgccggcggcgatgatccagctcctgttcgtggtgctcgtcgccgaggcggccgtggcgacggtgctgctattcaagacgccgctgcggaagctcgccatgctgggcctcgaccgcctcaagcgcggccgccgggcgcccgtcgccgtcaagaccgttgccggcgtcgtcatcacgctcctcgcctccacgctctacagcatggccgagatcagcggccgcgccggggaccccgaggccggaggcggcgccgccctctctcccaccgaccaggtcctcttctcgcgccacctcctcgaggcgtccctcatgggttacactttgtttcttgctctagttattgaccgactccaccaatatatcagagaactacgtgggctaaagaagaatgtcgaggctgtatcgaagcagaacaaaacgttagaggaaggaaaacatggaagatctcaggagatagcgaaataccaggaagaggttgccactctgaacgaggagatgaagaaactgaagctgcaagtacaagagaagaccgaggaggtccatgttgctgaggacaaggcacttgctattcaaaagcaatctgaaagcttgctgcttgaatatgaccggctcctggaggataaccaacatcttcgggagcagctgcagtcaattgatctcaggctctccaatccttcctgagagaagaatgtattgaagtagaacattatcctatcgtcaacctacttcgtgcttgaaattgtctgtttcacttttggtgcgaagtcgagtttactctttccgtaggatgttattacccagatgacatgctaatttagtaatgcctctcttatcggttttattgtcttacctaacaatatgttg

SEQ ID NO: 63786 - protein, 273 aa, Triticum aestivum
  peptide (1)..(273): Ceres Seq. ID no. 13597300
  misc_feature (55)..(249): Pfam Name: B-cell receptor-associated protein 31-like Pfam Description: B-cell receptor-associated protein 31-like
  misc_feature (52)..(187): Homolog of NCBI NO: 18402620 NR Description: expressed protein [Arabidopsis thaliana]
  misc_feature (52)..(222): Homolog of NCBI NO: 30682503 NR Description: expressed protein [Arabidopsis thaliana]
  misc_feature (52)..(262): Homolog of NCBI NO: 15231412 NR Description: expressed protein [Arabidopsis thaliana]
  misc_feature (52)..(262): Homolog of NCBI NO: 15239667 NR Description: hypothetical protein [Arabidopsis thaliana]
  misc_feature (52)..(262): Homolog of NCBI NO: 34897474 NR Description: unknown protein [Oryza sativa (japonica
  misc_feature (52)..(273): Homolog of NCBI NO: 22655198 NR Description: unknown protein [Arabidopsis thaliana]
  misc_feature (52)..(265): Homolog of NCBI NO: 21553655 NR Description: unknown [Arabidopsis thaliana]
  misc_feature (52)..(265): Homolog of NCBI NO: 18422225 NR Description: expressed protein [Arabidopsis thaliana]
  misc_feature (52)..(265): Homolog of NCBI NO: 9759015 NR Description: gene_id:K16E1.4~unknown protein [Arabidopsis
YFPLPSAEPHQGARVEVWVAPTQKPQIPKFLLDLHPVESNQRGEAPSTPAAMIQLLFVVLVAEAAVATVLLFKTPLRKLAMLGLDRLKRGRRAPVAVKTVAGVVITLLASTLYSMAEISGRAGDPEAGGGAALSPTDQVLFSRHLLEASLMGYTLFLALVIDRLHQYIRELRGLKKNVEAVSKQNKTLEEGKHGRSQEIAKYQEEVATLNEEMKKLKLQVQEKTEEVHVAEDKALAIQKQSESLLLEYDRLLEDNQHLREQLQSIDLRLSNPS

SEQ ID NO: 63787 - protein, 222 aa, Triticum aestivum
  peptide (1)..(222): Ceres Seq. ID no. 13597301
  misc_feature (4)..(198): Pfam Name: B-cell receptor-associated protein 31-like Pfam Description: B-cell receptor-associated protein 31-like
  misc_feature (1)..(136): Homolog of NCBI NO: 18402620 NR Description: expressed protein [Arabidopsis thaliana]
  misc_feature (1)..(171): Homolog of NCBI NO: 30682503 NR Description: expressed protein [Arabidopsis thaliana]
  misc_feature (1)..(211): Homolog of NCBI NO: 15231412 NR Description: expressed protein [Arabidopsis thaliana]
  misc_feature (1)..(211): Homolog of NCBI NO: 15239667 NR Description: hypothetical protein [Arabidopsis thaliana]
  misc_feature (1)..(211): Homolog of NCBI NO: 34897474 NR Description: unknown protein [Oryza sativa (japonica
  misc_feature (1)..(222): Homolog of NCBI NO: 22655198 NR Description: unknown protein [Arabidopsis thaliana]
  misc_feature (1)..(214): Homolog of NCBI NO: 21553655 NR Description: unknown [Arabidopsis thaliana]
  misc_feature (1)..(214): Homolog of NCBI NO: 18422225 NR Description: expressed protein [Arabidopsis thaliana]
  misc_feature (1)..(214): Homolog of NCBI NO: 9759015 NR Description: gene_id:K16E1.4~unknown protein [Arabidopsis
MIQLLFVVLVAEAAVATVLLFKTPLRKLAMLGLDRLKRGRRAPVAVKTVAGVVITLLASTLYSMAEISGRAGDPEAGGGAALSPTDQVLFSRHLLEASLMGYTLFLALVIDRLHQYIRELRGLKKNVEAVSKQNKTLEEGKHGRSQEIAKYQEEVATLNEEMKKLKLQVQEKTEEVHVAEDKALAIQKQSESLLLEYDRLLEDNQHLREQLQSIDLRLSNPS

SEQ ID NO: 63788 - protein, 193 aa, Triticum aestivum
  peptide (1)..(193): Ceres Seq. ID no. 13597302
  misc_feature (1)..(169): Pfam Name: B-cell receptor-associated protein 31-like Pfam Description: B-cell receptor-associated protein 31-like
  misc_feature (1)..(107): Homolog of NCBI NO: 18402620 NR Description: expressed protein [Arabidopsis thaliana]
  misc_feature (1)..(142): Homolog of NCBI NO: 30682503 NR Description: expressed protein [Arabidopsis thaliana]
  misc_feature (1)..(182): Homolog of NCBI NO: 15231412 NR Description: expressed protein [Arabidopsis thaliana]
  misc_feature (1)..(182): Homolog of NCBI NO: 15239667 NR Description: hypothetical protein [Arabidopsis thaliana]
  misc_feature (1)..(182): Homolog of NCBI NO: 34897474 NR Description: unknown protein [Oryza sativa (japonica
  misc_feature (1)..(193): Homolog of NCBI NO: 22655198 NR Description: unknown protein [Arabidopsis thaliana]
  misc_feature (1)..(185): Homolog of NCBI NO: 21553655 NR Description: unknown [Arabidopsis thaliana]
  misc_feature (1)..(185): Homolog of NCBI NO: 18422225 NR Description: expressed protein [Arabidopsis thaliana]
  misc_feature (1)..(185): Homolog of NCBI NO: 9759015 NR Description: gene_id:K16E1.4~unknown protein [Arabidopsis
MLGLDRLKRGRRAPVAVKTVAGVVITLLASTLYSMAEISGRAGDPEAGGGAALSPTDQVLFSRHLLEASLMGYTLFLALVIDRLHQYIRELRGLKKNVEAVSKQNKTLEEGKHGRSQEIAKYQEEVATLNEEMKKLKLQVQEKTEEVHVAEDKALAIQKQSESLLLEYDRLLEDNQHLREQLQSIDLRLSNPS

SEQ ID NO: 63789 - DNA, 760 bp, Triticum aestivum
  misc_feature (1)..(760): Ceres Seq. ID no. 13585373
gtggaccttttgtactagtacttcagacagacagaagcagaagcaaccagccgaagctcgttcctcgtagacagttggacagtcgtctcgatccatcgtccatcccgtctcgccagcagccgaccatggccgcgcaggcgccgccgccgccgccgccggagcagaagatgatggtggccatcgacgagagcgagtgcagccactacgcgctcgagtgggccctgcgcaacctcgcgccccgccgcctcatcctcttcaccgtccagcccttctcccctctcagctacctccccgtcggctccccgcttggcccgtcggtggcgtcgccggagctcatcaggtcggtgaccgagcaccagcggcagctcgcccaggcgctcgtcgacaaggccaaggccatctgcgccgagcacggggttgatgcagagaccgtcatcgaggtgggtgatcccaaggaaaccatatgcgaagctgcggagaagttgaatgttgatctgctcatcctgggaagccacagccgtgggcctgtacaaaggtttttccttggcagtgtgagcaactactgtagccaccacgcgaagtgcccggttcttgttgtgaagaagaaagaatgaaactccgctatctactgtattcatggacatcgtgtgaagaacccttgagatgtgtatctacatgttgtttgtcacagcatctagttgcatacttgcatatgaataaacatactttgccaatttgaaaacaactatatattcagtct

SEQ ID NO: 63790 - protein, 203 aa, Triticum aestivum
  peptide (1)..(203): Ceres Seq. ID no. 13585374
  misc_feature (54)..(200): Pfam Name: Universal stress protein family Pfam Description: Universal stress protein family
  misc_feature (56)..(200): Homolog of NCBI NO: 5669654 NR Description: ER6 protein [Lycopersicon esculentum]
  misc_feature (56)..(203): Homolog of NCBI NO: 25402571 NR Description: hypothetical protein [imported] - Arabidopsis
  misc_feature (24)..(200): Homolog of NCBI NO: 21594903 NR Description: ethylene-responsive protein, putative
  misc_feature (178)..(200): Homolog of NCBI NO: 30681959 NR Description: ethylene-responsive protein -related [Arabidopsis
  misc_feature (24)..(187): Homolog of NCBI NO: 30681959 NR Description: ethylene-responsive protein -related [Arabidopsis
  misc_feature (24)..(200): Homolog of NCBI NO: 30681955 NR Description: ethylene-responsive protein -related [Arabidopsis
  misc_feature (56)..(203): Homolog of NCBI NO: 30681321 NR Description: ER6 protein -related [Arabidopsis thaliana]
  misc_feature (24)..(200): Homolog of NCBI NO: 18399413 NR Description: ethylene-responsive protein -related [Arabidopsis
  misc_feature (54)..(202): Homolog of NCBI NO: 18408994 NR Description: expressed protein [Arabidopsis thaliana]
  misc_feature (46)..(203): Homolog of NCBI NO: 34914610 NR Description: P0520B06.18 [Oryza sativa (japonica
GPFVLVLQTDRSRSNQPKLVPRRQLDSRLDPSSIPSRQQPTMAAQAPPPPPPEQKMMVAIDESECSHYALEWALRNLAPRRLILFTVQPFSPLSYLPVGSPLGPSVASPELIRSVTEHQRQLAQALVDKAKAICAEHGVDAETVIEVGDPKETICEAAEKLNVDLLILGSHSRGPVQRFFLGSVSNYCSHHAKCPVLVVKKKE

SEQ ID NO: 63791 - protein, 162 aa, Triticum aestivum
  peptide (1)..(162): Ceres Seq. ID no. 13585375
  misc_feature (13)..(159): Pfam Name: Universal stress protein family Pfam Description: Universal stress protein family
  misc_feature (15)..(159): Homolog of NCBI NO: 5669654 NR Description: ER6 protein [Lycopersicon esculentum]
  misc_feature (15)..(162): Homolog of NCBI NO: 25402571 NR Description: hypothetical protein [imported] - Arabidopsis
  misc_feature (1)..(159): Homolog of NCBI NO: 21594903 NR Description: ethylene-responsive protein, putative
  misc_feature (137)..(159): Homolog of NCBI NO: 30681959 NR Description: ethylene-responsive protein -related [Arabidopsis
  misc_feature (1)..(146): Homolog of NCBI NO: 30681959 NR Description: ethylene-responsive protein -related [Arabidopsis
  misc_feature (1)..(159): Homolog of NCBI NO: 30681955 NR Description: ethylene-responsive protein -related [Arabidopsis
  misc_feature (15)..(162): Homolog of NCBI NO: 30681321 NR Description: ER6 protein -related [Arabidopsis thaliana]
  misc_feature (1)..(159): Homolog of NCBI NO: 18399413 NR Description: ethylene-responsive protein -related [Arabidopsis
  misc_feature (13)..(161): Homolog of NCBI NO: 18408994 NR Description: expressed protein [Arabidopsis thaliana]
  misc_feature (5)..(162): Homolog of NCBI NO: 34914610 NR Description: P0520B06.18 [Oryza sativa (japonica
MAAQAPPPPPPEQKMMVAIDESECSHYALEWALRNLAPRRLILFTVQPFSPLSYLPVGSPLGPSVASPELIRSVTEHQRQLAQALVDKAKAICAEHGVDAETVIEVGDPKETICEAAEKLNVDLLILGSHSRGPVQRFFLGSVSNYCSHHAKCPVLVVKKKE

SEQ ID NO: 63792 - protein, 148 aa, Triticum aestivum
  peptide (1)..(148): Ceres Seq. ID no. 13585376
  misc_feature (1)..(145): Pfam Name: Universal stress protein family Pfam Description: Universal stress protein family
  misc_feature (1)..(145): Homolog of NCBI NO: 5669654 NR Description: ER6 protein [Lycopersicon esculentum]
  misc_feature (1)..(148): Homolog of NCBI NO: 25402571 NR Description: hypothetical protein [imported] - Arabidopsis
  misc_feature (1)..(145): Homolog of NCBI NO: 21594903 NR Description: ethylene-responsive protein, putative
  misc_feature (123)..(145): Homolog of NCBI NO: 30681959 NR Description: ethylene-responsive protein -related [Arabidopsis
  misc_feature (1)..(132): Homolog of NCBI NO: 30681959 NR Description: ethylene-responsive protein -related [Arabidopsis
  misc_feature (1)..(145): Homolog of NCBI NO: 30681955 NR Description: ethylene-responsive protein -related [Arabidopsis
  misc_feature (1)..(148): Homolog of NCBI NO: 30681321 NR Description: ER6 protein -related [Arabidopsis thaliana]
  misc_feature (1)..(145): Homolog of NCBI NO: 18399413 NR Description: ethylene-responsive protein -related [Arabidopsis
  misc_feature (1)..(147): Homolog of NCBI NO: 18408994 NR Description: expressed protein [Arabidopsis thaliana]
  misc_feature (1)..(148): Homolog of NCBI NO: 34914610 NR Description: P0520B06.18 [Oryza sativa (japonica
MMVAIDESECSHYALEWALRNLAPRRLILFTVQPFSPLSYLPVGSPLGPSVASPELIRSVTEHQRQLAQALVDKAKAICAEHGVDAETVIEVGDPKETICEAAEKLNVDLLILGSHSRGPVQRFFLGSVSNYCSHHAKCPVLVVKKKE

SEQ ID NO: 63793 - DNA, 999 bp, Triticum aestivum
  misc_feature (1)..(999): Ceres Seq. ID no. 15173326
cctatcggcgagaagtgggggagatcttcgtcttccgcactcgcgcgcgcaagctcactcgctccagatcttcccttaccgtcgtagatctcacgaccccaagccgccaagcccccaacgaaaccctagctcgcgcccctccgccgcgtaggggcgccgtcatgggcatcgtgttcacgcggctcttctcgtcggtattcggaaaccgcgaggcccgcatcctcgtcctcggcctcgacaatgccggcaagactactatcctctatcggctgcagatggggggaggtcgtttccacgatcccaagtgggtttcctgttctgcgatcgggttcaacgtggagacggtgcagtacaataacatcaagttccaagtttgggatctcggtggtcaaacaagcatcaggccatactggagatgctacttttcaaacactcaggctatcatatatgttgttgattcaagtgatactgataggctggtaactgcaaaagaagaatttcattccatccttgaggagcatgagctgaaaggtgcggttgtccttgtatatgcaaataaacaggaccttccaggtgcacttaatgatgctgccataactgaatcattagaacttcacaagattaagagccgccaatgggcaattttcaaaacatctgctataaaaggggaggggctttttgaaggcttgaactggctcagtaatgcactcaagtccggaggcagctaatgtaggaggcccagcctccattccgtgaatcattgcttgatggtaaggaacagggacgatgacagccttctcgctagtctgcgtgaaaatgagaatctctttatttttactccggaagttatacacaatcagttttctgtagagtgcttgttgaagtttccagatacaacactaggtgtaccatgtcgagagcaagaatatatttgtagaaaataccgagcaaatgattacggtttgaaatatgtggcttcaccgcgtaaaatttcacccc

SEQ ID NO: 63794 - protein, 241 aa, Triticum aestivum
  peptide (1)..(241): Ceres Seq. ID no. 15173327
  misc_feature (57)..(236): Pfam Name: ADP-ribosylation factor family Pfam Description: ADP-ribosylation factor family
  misc_feature (54)..(236): Homolog of NCBI NO: 29841386 NR Description: similar to GenBank Accession Number M61127
  misc_feature (54)..(237): Homolog of NCBI NO: 23508140 NR Description: ADP-ribosylation factor-like protein [Plasmodium
  misc_feature (54)..(238): Homolog of NCBI NO: 11131026 NR Description: ADP-ribosylation factor
  misc_feature (54)..(238): Homolog of NCBI NO: 39653273 NR Description: ADP-ribosylation factor [Medicago sativa]
  misc_feature (54)..(238): Homolog of NCBI NO: 11693150 NR Description: ADP-ribosylation factor-like 1 [Rattus
  misc_feature (54)..(238): Homolog of NCBI NO: 13385340 NR Description: ADP-ribosylation-like 1 [Mus musculus]
  misc_feature (54)..(238): Homolog of NCBI NO: 4502227 NR Description: ADP-ribosylation factor-like 1 [Homo sapiens]
  misc_feature (54)..(239): Homolog of NCBI NO: 30682545 NR Description: ADP-ribosylation factor 3 (ARF3) [Arabidopsis
  misc_feature (54)..(239): Homolog of NCBI NO: 3182922 NR Description: ADP-ribosylation factor 1
  misc_feature (54)..(241): Homolog of NCBI NO: 40253742 NR Description: putative ADP-ribosylation factor 3
YRREVGEIFVFRTRARKLTRSRSSLTVVDLTTPSRQAPNETLARAPPPRRGAVMGIVFTRLFSSVFGNREARILVLGLDNAGKTTILYRLQMGGGRFHDPKWVSCSAIGFNVETVQYNNIKFQVWDLGGQTSIRPYWRCYFSNTQAIIYVVDSSDTDRLVTAKEEFHSILEEHELKGAVVLVYANKQDLPGALNDAAITESLELHKIKSRQWAIFKTSAIKGEGLFEGLNWLSNALKSGGS

SEQ ID NO: 63795 - protein, 188 aa, Triticum aestivum
  peptide (1)..(188): Ceres Seq. ID no. 15173328
  misc_feature (4)..(183): Pfam Name: ADP-ribosylation factor family Pfam Description: ADP-ribosylation factor family
  misc_feature (1)..(183): Homolog of NCBI NO: 29841386 NR Description: similar to GenBank Accession Number M61127
  misc_feature (1)..(184): Homolog of NCBI NO: 23508140 NR Description: ADP-ribosylation factor-like protein [Plasmodium
  misc_feature (1)..(185): Homolog of NCBI NO: 11131026 NR Description: ADP-ribosylation factor
  misc_feature (1)..(185): Homolog of NCBI NO: 39653273 NR Description: ADP-ribosylation factor [Medicago sativa]
  misc_feature (1)..(185): Homolog of NCBI NO: 11693150 NR Description: ADP-ribosylation factor-like 1 [Rattus
  misc_feature (1)..(185): Homolog of NCBI NO: 13385340 NR Description: ADP-ribosylation-like 1 [Mus musculus]
  misc_feature (1)..(185): Homolog of NCBI NO: 4502227 NR Description: ADP-ribosylation factor-like 1 [Homo sapiens]
  misc_feature (1)..(186): Homolog of NCBI NO: 30682545 NR Description: ADP-ribosylation factor 3 (ARF3) [Arabidopsis
  misc_feature (1)..(186): Homolog of NCBI NO: 3182922 NR Description: ADP-ribosylation factor 1
  misc_feature (1)..(188): Homolog of NCBI NO: 40253742 NR Description: putative ADP-ribosylation factor 3
MGIVFTRLFSSVFGNREARILVLGLDNAGKTTILYRLQMGGGRFHDPKWVSCSAIGFNVETVQYNNIKFQVWDLGGQTSIRPYWRCYFSNTQAIIYVVDSSDTDRLVTAKEEFHSILEEHELKGAVVLVYANKQDLPGALNDAAITESLELHKIKSRQWAIFKTSAIKGEGLFEGLNWLSNALKSGGS

SEQ ID NO: 63796 - protein, 150 aa, Triticum aestivum
  peptide (1)..(150): Ceres Seq. ID no. 15173329
  misc_feature (1)..(145): Pfam Name: ADP-ribosylation factor family Pfam Description: ADP-ribosylation factor family
  misc_feature (1)..(145): Homolog of NCBI NO: 29841386 NR Description: similar to GenBank Accession Number M61127
  misc_feature (1)..(146): Homolog of NCBI NO: 23508140 NR Description: ADP-ribosylation factor-like protein [Plasmodium
  misc_feature (1)..(147): Homolog of NCBI NO: 11131026 NR Description: ADP-ribosylation factor
  misc_feature (1)..(147): Homolog of NCBI NO: 39653273 NR Description: ADP-ribosylation factor [Medicago sativa]
  misc_feature (1)..(147): Homolog of NCBI NO: 11693150 NR Description: ADP-ribosylation factor-like 1 [Rattus
  misc_feature (1)..(147): Homolog of NCBI NO: 13385340 NR Description: ADP-ribosylation-like 1 [Mus musculus]
  misc_feature (1)..(147): Homolog of NCBI NO: 4502227 NR Description: ADP-ribosylation factor-like 1 [Homo sapiens]
  misc_feature (1)..(148): Homolog of NCBI NO: 30682545 NR Description: ADP-ribosylation factor 3 (ARF3) [Arabidopsis
  misc_feature (1)..(148): Homolog of NCBI NO: 3182922 NR Description: ADP-ribosylation factor 1
  misc_feature (1)..(150): Homolog of NCBI NO: 40253742 NR Description: putative ADP-ribosylation factor 3
MGGGRFHDPKWVSCSAIGFNVETVQYNNIKFQVWDLGGQTSIRPYWRCYFSNTQAIIYVVDSSDTDRLVTAKEEFHSILEEHELKGAVVLVYANKQDLPGALNDAAITESLELHKIKSRQWAIFKTSAIKGEGLFEGLNWLSNALKSGGS

SEQ ID NO: 63797 - DNA, 978 bp, Triticum aestivum
  misc_feature (1)..(978): Ceres Seq. ID no. 15173334
atcgtcttgagccggccctcttctccttcctcccactcaaggatacaaggggaacaaggcaggggtctaggtgctactccggcacggtggcacacccatctctcttcaagcttggcccgcccagcaatttgtttgtagctccgccactgctgagacccctacgttcccagccacgccttgcccactcgcgctgtgtgtgcctcggagatggccggcacgtcatgttgtgataggatggtttcccagcttcagtcgacatccaagtactacactggatatcccaaggatctagggccatcaagaatcataccgttcacatcagagcgtcagtttgtgcagctattacatgaaggacggcctgtagttgcggcctttaccattaagtgcacttatacacagcatcttgacaaagtactggaggaagctgctgctacattttatcctcatataacgtttgttcgggtggaatgcccaaagtatcctgggttttgcctcacgaggcaaaagactgagtatccatttcttgaagtattttacaacccagaacaggctgctaacccaggtaagatcgtggatccgagcatcacgaaatactccgcaaaagtcctacctttcaactatgaccagagcgtgtatggatttcgagagtattttaagaagtatgggttcaagtattccgaagcaaactaggtttgtcatggtggagccctgcagagtcagccagtccaactccaactggtttgaatttactttcagcctgtactaacagtgatactgcattcttaagaatcagcaccccctgcatactgggctggctctgccttggcaaatggttggaaaaatggccaagctgttagctaggtttccagtatgctcaagattgtagtagaatttctggatgttgcatgttgttctttgtcaaatctctgaactgcattatcagactcgctattaataaaatatattctgcggctcact

SEQ ID NO: 63798 - protein, 160 aa, Triticum aestivum
  peptide (1)..(160): Ceres Seq. ID no. 15173335
  misc_feature (1)..(158): Homolog of NCBI NO: 15242070 NR Description: hypothetical protein [Arabidopsis thaliana]
MAGTSCCDRMVSQLQSTSKYYTGYPKDLGPSRIIPFTSERQFVQLLHEGRPVVAAFTIKCTYTQHLDKVLEEAAATFYPHITFVRVECPKYPGFCLTRQKTEYPFLEVFYNPEQAANPGKIVDPSITKYSAKVLPFNYDQSVYGFREYFKKYGFKYSEAN

SEQ ID NO: 63799 - protein, 151 aa, Triticum aestivum
  peptide (1)..(151): Ceres Seq. ID no. 15173336
  misc_feature (1)..(149): Homolog of NCBI NO: 15242070 NR Description: hypothetical protein [Arabidopsis thaliana]
MVSQLQSTSKYYTGYPKDLGPSRIIPFTSERQFVQLLHEGRPVVAAFTIKCTYTQHLDKVLEEAAATFYPHITFVRVECPKYPGFCLTRQKTEYPFLEVFYNPEQAANPGKIVDPSITKYSAKVLPFNYDQSVYGFREYFKKYGFKYSEAN

SEQ ID NO: 63800 - DNA, 669 bp, Triticum aestivum
  misc_feature (1)..(669): Ceres Seq. ID no. 15173341
acaacactcaaatctgaattccccctcgccaaatctccccgcaccatcgcggatcgcgccaaatctcaaatccgctctagccgccatggacgcctcagccaccggcgccgtctccaaggtgaagaagtacgtggtgggcgcaagcttggcggcggccccaggaagcaggcggtggcgcggtccgtcaaggccgggctgcagttccccgtcggccgcatcggccgcttcctcaagaagggccgctacgcgcagcgcgtcggcatgggcgcccccgtctacctcgcctccgtcctcgagtacctcgccgccgagctgctcgagctcgccggcaacgccgccaaggacaacaagaagtcccgcatcatcccgcgccacctgctgctcgccatccggaacgaccaggagctcggcaagctgctcgccggcgtcaccatcgcgcacggcggtgtgcttcccaacatcaaccccgtgctgctccccaagaagacggccgagaaggagaccaagaaggccgccaagtcccccaagaaggcttagtcgattgtggcaggctatctagtgcatcgtaatagaattagtgtttgcagtttggctaatggtgttgatgtgatgttctgatctgctgagaaaaagatcgtcagaaatctctctgacttacagtaaattcat

SEQ ID NO: 63801 - protein, 185 aa, Triticum aestivum
  peptide (1)..(185): Ceres Seq. ID no. 15173342
  misc_feature (66)..(160): Pfam Name: Mucin-like glycoprotein Pfam Description: Mucin-like glycoprotein
  misc_feature (1)..(175): Homolog of NCBI NO: 39580884 NR Description: Hypothetical protein CBG21477 [Caenorhabditis
  misc_feature (3)..(148): Homolog of NCBI NO: 11359723 NR Description: proteophosphoglycan, membrane-associated
  misc_feature (3)..(159): Homolog of NCBI NO: 11359723 NR Description: proteophosphoglycan, membrane-associated
  misc_feature (6)..(173): Homolog of NCBI NO: 11359723 NR Description: proteophosphoglycan, membrane-associated
  misc_feature (3)..(156): Homolog of NCBI NO: 11359723 NR Description: proteophosphoglycan, membrane-associated
  misc_feature (6)..(175): Homolog of NCBI NO: 11359723 NR Description: proteophosphoglycan, membrane-associated
  misc_feature (6)..(173): Homolog of NCBI NO: 11359723 NR Description: proteophosphoglycan, membrane-associated
  misc_feature (3)..(160): Homolog of NCBI NO: 11359723 NR Description: proteophosphoglycan, membrane-associated
  misc_feature (3)..(160): Homolog of NCBI NO: 11359723 NR Description: proteophosphoglycan, membrane-associated
QHSNLNSPSPNLPAPSRIAPNLKSALAAMDASATGAVSKVKKYVVGASLAAAPGSRRWRGPSRPGCSSPSAASAASSRRAATRSASAWAPPSTSPPSSSTSPPSCSSSPATPPRTTRSPASSRATCCSPSGTTRSSASCSPASPSRTAVCFPTSTPCCSPRRRPRRRPRRPPSPPRRLSRLWQAI

SEQ ID NO: 63802 - protein, 178 aa, Triticum aestivum
  peptide (1)..(178): Ceres Seq. ID no. 15173343
  misc_feature (46)..(162): Pfam Name: Core histone H2A/H2B/H3/H4 Pfam Description: Core histone H2A/H2B/H3/H4
  misc_feature (43)..(173): Homolog of NCBI NO: 34858256 NR Description: similar to Histone H2A.o (H2A/o) (H2A.2)
  misc_feature (51)..(177): Homolog of NCBI NO: 121974 NR Description: HISTONE H2A.2.1
  misc_feature (46)..(178): Homolog of NCBI NO: 7649159 NR Description: histone H2A [Euphorbia esula]
  misc_feature (45)..(178): Homolog of NCBI NO: 122003 NR Description: HISTONE H2A
  misc_feature (45)..(178): Homolog of NCBI NO: 729669 NR Description: Histone H2A
  misc_feature (45)..(178): Homolog of NCBI NO: 27529852 NR Description: H2A histone [Nicotiana tabacum]
  misc_feature (46)..(178): Homolog of NCBI NO: 121982 NR Description: HISTONE H2A.2.2
  misc_feature (39)..(178): Homolog of NCBI NO: 729671 NR Description: Histone H2A
  misc_feature (45)..(178): Homolog of NCBI NO: 122007 NR Description: Histone H2A
  misc_feature (46)..(178): Homolog of NCBI NO: 34914498 NR Description: putative histone H2A [Oryza sativa (japonica
TTLKSEFPLAKSPRTIADRAKSQIRSSRHGRLSHRRRLQGEEVRGGRKLGGGPRKQAVARSVKAGLQFPVGRIGRFLKKGRYAQRVGMGAPVYLASVLEYLAAELLELAGNAAKDNKKSRIIPRHLLLAIRNDQELGKLLAGVTIAHGGVLPNINPVLLPKKTAEKETKKAAKSPKKA

SEQ ID NO: 63803 - protein, 157 aa, Triticum aestivum
  peptide (1)..(157): Ceres Seq. ID no. 15173344
  misc_feature (38)..(132): Pfam Name: Mucin-like glycoprotein Pfam Description: Mucin-like glycoprotein
  misc_feature (1)..(147): Homolog of NCBI NO: 39580884 NR Description: Hypothetical protein CBG21477 [Caenorhabditis
  misc_feature (1)..(120): Homolog of NCBI NO: 11359723 NR Description: proteophosphoglycan, membrane-associated
  misc_feature (1)..(131): Homolog of NCBI NO: 11359723 NR Description: proteophosphoglycan, membrane-associated
  misc_feature (1)..(145): Homolog of NCBI NO: 11359723 NR Description: proteophosphoglycan, membrane-associated
  misc_feature (1)..(128): Homolog of NCBI NO: 11359723 NR Description: proteophosphoglycan, membrane-associated
  misc_feature (1)..(147): Homolog of NCBI NO: 11359723 NR Description: proteophosphoglycan, membrane-associated
  misc_feature (1)..(145): Homolog of NCBI NO: 11359723 NR Description: proteophosphoglycan, membrane-associated
  misc_feature (1)..(132): Homolog of NCBI NO: 11359723 NR Description: proteophosphoglycan, membrane-associated
  misc_feature (1)..(132): Homolog of NCBI NO: 11359723 NR Description: proteophosphoglycan, membrane-associated
MDASATGAVSKVKKYVVGASLAAAPGSRRWRGPSRPGCSSPSAASAASSRRAATRSASAWAPPSTSPPSSSTSPPSCSSSPATPPRTTRSPASSRATCCSPSGTTRSSASCSPASPSRTAVCFPTSTPCCSPRRRPRRRPRRPPSPPRRLSRLWQAI

SEQ ID NO: 63804 - protein, 91 aa, Triticum aestivum
  peptide (1)..(91): Ceres Seq. ID no. 15173345
  misc_feature (1)..(75): Pfam Name: Core histone H2A/H2B/H3/H4 Pfam Description: Core histone H2A/H2B/H3/H4
  misc_feature (1)..(86): Homolog of NCBI NO: 34858256 NR Description: similar to Histone H2A.o (H2A/o) (H2A.2)
  misc_feature (1)..(90): Homolog of NCBI NO: 121974 NR Description: HISTONE H2A.2.1
  misc_feature (1)..(91): Homolog of NCBI NO: 7649159 NR Description: histone H2A [Euphorbia esula]
  misc_feature (1)..(91): Homolog of NCBI NO: 122003 NR Description: HISTONE H2A
  misc_feature (1)..(91): Homolog of NCBI NO: 729669 NR Description: Histone H2A
  misc_feature (1)..(91): Homolog of NCBI NO: 27529852 NR Description: H2A histone [Nicotiana tabacum]
  misc_feature (1)..(91): Homolog of NCBI NO: 121982 NR Description: HISTONE H2A.2.2
  misc_feature (1)..(91): Homolog of NCBI NO: 729671 NR Description: Histone H2A
  misc_feature (1)..(91): Homolog of NCBI NO: 122007 NR Description: Histone H2A
  misc_feature (1)..(91): Homolog of NCBI NO: 34914498 NR Description: putative histone H2A [Oryza sativa (japonica
MGAPVYLASVLEYLAAELLELAGNAAKDNKKSRIIPRHLLLAIRNDQELGKLLAGVTIAHGGVLPNINPVLLPKKTAEKETKKAAKSPKKA

SEQ ID NO: 63805 - DNA, 1065 bp, Triticum aestivum
  misc_feature (1)..(1065): Ceres Seq. ID no. 15225478
atcacctcgcgatccccagatcccacacgggaaaaatgtgcacagtggagaagcgcggccgcgtccacctcatcaccctcaccggcgccggtgagcaccgactcagcccatccctcatctcggccctccgcacagccgtggccaccgtccgcgcctcccccggtgccggtgccctcgtgctggccgccgagggcaagtacttctccaacggcttcgaccaagcctgggcgcgcacggtcccgccccacctccacgactccatgagaggagccttccgcgccctcgtggccgacctcctcgcgctgcccatgcccaccgtggccgccgtcacgggccacgcagccgccgccggctgcgcgctggccctcgcgcacgactccgtcgtcatgcgcgcctcccgcgggttcctgtacatgagcgaggtcgacgtcggcctcaagttcgccgactacttcggggagctactccggcagaaggtccccaacgcagcggccaggagggacatggtcctcggggggaagaagatgacggcggctgaggcggtgcggctgggcatcgtggacgcggccgcggacggcggcgtcgaagacgtggtggccgcgggcgtcgcggcagccgaggtgctcgcgacgaggggttgggacggggagatcgtggccgagatccggaaggcgatgtggcccgccgtgtggggcaaggtcaaggaccacggcgccgaggcagcggcagcgcggccgcgtctgtaggctccggtatatcgtacgaggccactccttgtgctcgagcattcgcgtagcctgaagaattgctctggatccacggcatgccgtggatctgggaacttcagctgagaacagagtaatgttcaggaactgctcgaacagaatcgtgtcgccaagaagatccgcaccggcgacatgtgatgagcgcaccgtgctggtggttttccttgtactcctattgatcttcgcatcgggtttcattgactgttgttactctgacggaagctcgttgctgatagacttctgaacttctgaagcatgactgaatgaagagatgaagatg

SEQ ID NO: 63806 - protein, 247 aa, Triticum aestivum
  peptide (1)..(247): Ceres Seq. ID no. 15225479
  misc_feature (22)..(191): Pfam Name: Enoyl-CoA hydratase/isomerase family Pfam Description: Enoyl-CoA hydratase/isomerase family
  misc_feature (19)..(203): Homolog of NCBI NO: 21230604 NR Description: conserved hypothetical protein
  misc_feature (9)..(226): Homolog of NCBI NO: 40739395 NR Description: hypothetical protein AN6767.2 [Aspergillus
  misc_feature (18)..(246): Homolog of NCBI NO: 32404374 NR Description: hypothetical protein ( hypothetical protein
  misc_feature (20)..(226): Homolog of NCBI NO: 15828352 NR Description: possible enoyl-CoA hydratase [Mycobacterium
  misc_feature (12)..(226): Homolog of NCBI NO: 23017142 NR Description: COG1024: Enoyl-CoA hydratase/carnithine racemase
  misc_feature (12)..(225): Homolog of NCBI NO: 15218713 NR Description: enoyl-CoA hydratase/isomerase family [Arabidopsis
  misc_feature (12)..(227): Homolog of NCBI NO: 15236499 NR Description: enoyl-CoA hydratase/isomerase family [Arabidopsis
  misc_feature (12)..(227): Homolog of NCBI NO: 21555734 NR Description: carnitine racemase like protein [Arabidopsis
  misc_feature (12)..(247): Homolog of NCBI NO: 15236498 NR Description: enoyl-CoA hydratase/isomerase family [Arabidopsis
  misc_feature (9)..(245): Homolog of NCBI NO: 34903766 NR Description: unnamed protein product [Oryza sativa (japonica
HLAIPRSHTGKMCTVEKRGRVHLITLTGAGEHRLSPSLISALRTAVATVRASPGAGALVLAAEGKYFSNGFDQAWARTVPPHLHDSMRGAFRALVADLLALPMPTVAAVTGHAAAAGCALALAHDSVVMRASRGFLYMSEVDVGLKFADYFGELLRQKVPNAAARRDMVLGGKKMTAAEAVRLGIVDAAADGGVEDVVAAGVAAAEVLATRGWDGEIVAEIRKAMWPAVWGKVKDHGAEAAAARPRL

SEQ ID NO: 63807 - protein, 236 aa, Triticum aestivum
  peptide (1)..(236): Ceres Seq. ID no. 15225480
  misc_feature (11)..(180): Pfam Name: Enoyl-CoA hydratase/isomerase family Pfam Description: Enoyl-CoA hydratase/isomerase family
  misc_feature (8)..(192): Homolog of NCBI NO: 21230604 NR Description: conserved hypothetical protein
  misc_feature (1)..(215): Homolog of NCBI NO: 40739395 NR Description: hypothetical protein AN6767.2 [Aspergillus
  misc_feature (7)..(235): Homolog of NCBI NO: 32404374 NR Description: hypothetical protein ( hypothetical protein
  misc_feature (9)..(215): Homolog of NCBI NO: 15828352 NR Description: possible enoyl-CoA hydratase [Mycobacterium
  misc_feature (1)..(215): Homolog of NCBI NO: 23017142 NR Description: COG1024: Enoyl-CoA hydratase/carnithine racemase
  misc_feature (1)..(214): Homolog of NCBI NO: 15218713 NR Description: enoyl-CoA hydratase/isomerase family [Arabidopsis
  misc_feature (1)..(216): Homolog of NCBI NO: 15236499 NR Description: enoyl-CoA hydratase/isomerase family [Arabidopsis
  misc_feature (1)..(216): Homolog of NCBI NO: 21555734 NR Description: carnitine racemase like protein [Arabidopsis
  misc_feature (1)..(236): Homolog of NCBI NO: 15236498 NR Description: enoyl-CoA hydratase/isomerase family [Arabidopsis
  misc_feature (1)..(234): Homolog of NCBI NO: 34903766 NR Description: unnamed protein product [Oryza sativa (japonica
MCTVEKRGRVHLITLTGAGEHRLSPSLISALRTAVATVRASPGAGALVLAAEGKYFSNGFDQAWARTVPPHLHDSMRGAFRALVADLLALPMPTVAAVTGHAAAAGCALALAHDSVVMRASRGFLYMSEVDVGLKFADYFGELLRQKVPNAAARRDMVLGGKKMTAAEAVRLGIVDAAADGGVEDVVAAGVAAAEVLATRGWDGEIVAEIRKAMWPAVWGKVKDHGAEAAAARPRL

SEQ ID NO: 63808 - protein, 161 aa, Triticum aestivum
  peptide (1)..(161): Ceres Seq. ID no. 15225481
  misc_feature (1)..(105): Pfam Name: Enoyl-CoA hydratase/isomerase family Pfam Description: Enoyl-CoA hydratase/isomerase family
  misc_feature (1)..(117): Homolog of NCBI NO: 21230604 NR Description: conserved hypothetical protein
  misc_feature (1)..(140): Homolog of NCBI NO: 40739395 NR Description: hypothetical protein AN6767.2 [Aspergillus
  misc_feature (1)..(160): Homolog of NCBI NO: 32404374 NR Description: hypothetical protein ( hypothetical protein
  misc_feature (1)..(140): Homolog of NCBI NO: 15828352 NR Description: possible enoyl-CoA hydratase [Mycobacterium
  misc_feature (1)..(140): Homolog of NCBI NO: 23017142 NR Description: COG1024: Enoyl-CoA hydratase/carnithine racemase
  misc_feature (1)..(139): Homolog of NCBI NO: 15218713 NR Description: enoyl-CoA hydratase/isomerase family [Arabidopsis
  misc_feature (1)..(141): Homolog of NCBI NO: 15236499 NR Description: enoyl-CoA hydratase/isomerase family [Arabidopsis
  misc_feature (1)..(141): Homolog of NCBI NO: 21555734 NR Description: carnitine racemase like protein [Arabidopsis
  misc_feature (1)..(161): Homolog of NCBI NO: 15236498 NR Description: enoyl-CoA hydratase/isomerase family [Arabidopsis
  misc_feature (1)..(159): Homolog of NCBI NO: 34903766 NR Description: unnamed protein product [Oryza sativa (japonica
MRGAFRALVADLLALPMPTVAAVTGHAAAAGCALALAHDSVVMRASRGFLYMSEVDVGLKFADYFGELLRQKVPNAAARRDMVLGGKKMTAAEAVRLGIVDAAADGGVEDVVAAGVAAAEVLATRGWDGEIVAEIRKAMWPAVWGKVKDHGAEAAAARPRL

SEQ ID NO: 63809 - DNA, 658 bp, Triticum aestivum
  misc_feature (1)..(658): Ceres Seq. ID no. 13655523
gtgccaagaaaggatatattcaggcgcagttctactcagatggtgaacgatccatacaccctggtgatagccctcaatagctcgggttctgcagaaggtgaactttatgtggatgatgggaaaagttatgattatcagcaaggggcattcatccatcggcgttttgtatttgcagacaataaactaacttcaatcaatattgcgcctgatagtctgggcaagaaggtgtattcaactgagtgtgtgattgaaagaattatagtgcttgggttatcatcgggagcaaagaaggctatcattgaacctgggaaccaagaagtggaaattgatctgggaccgattagtttaaggagtggttcaaagtctgttgcgccaacagtcaggaggcccaatgttcgtgttgtagatgattggacgataaggatcgcatgatatgcagcccattcacatctggagcctgatgtctccattgttcgctgtcaggctataaactcgagcaatgctagaagcgtagtttcagactcgtaaatgttatctgtggacacccaaatttcattgtttcagacttccagtggacccaaaatttctgcaggtgcctggtacgcatgctgtttgtactcccaattttgacataagtcgtgacataaattgctgatgc

SEQ ID NO: 63810 - protein, 143 aa, Triticum aestivum
  peptide (1)..(143): Ceres Seq. ID no. 13655524
  misc_feature (1)..(100): Pfam Name: Glycosyl hydrolases family 31 Pfam Description: Glycosyl hydrolases family 31
  misc_feature (1)..(142): Homolog of NCBI NO: 34861580 NR Description: similar to alpha glucosidase II, alpha subunit
  misc_feature (1)..(142): Homolog of NCBI NO: 1613878 NR Description: ModA [Dictyostelium discoideum]
  misc_feature (1)..(142): Homolog of NCBI NO: 1890664 NR Description: glucosidase II [Sus scrofa]
  misc_feature (1)..(142): Homolog of NCBI NO: 21357605 NR Description: CG14476-PB [Drosophila melanogaster]
  misc_feature (1)..(142): Homolog of NCBI NO: 31219761 NR Description: ENSANGP00000010269 [Anopheles gambiae]
  misc_feature (1)..(142): Homolog of NCBI NO: 13529302 NR Description: Unknown (protein for IMAGE:3458604) [Homo sapiens]
  misc_feature (1)..(130): Homolog of NCBI NO: 40739683 NR Description: hypothetical protein AN8217.2 [Aspergillus
  misc_feature (1)..(143): Homolog of NCBI NO: 34856729 NR Description: similar to FLJ00088 protein [Rattus norvegicus]
  misc_feature (1)..(142): Homolog of NCBI NO: 7489249 NR Description: probable alpha-glucosidase (EC 3.2.1.20) - potato
  misc_feature (1)..(142): Homolog of NCBI NO: 15237538 NR Description: glycosyl hydrolase family 31 [Arabidopsis
VPRKDIFRRSSTQMVNDPYTLVIALNSSGSAEGELYVDDGKSYDYQQGAFIHRRFVFADNKLTSINIAPDSLGKKVYSTECVIERIIVLGLSSGAKKAIIEPGNQEVEIDLGPISLRSGSKSVAPTVRRPNVRVVDDWTIRIA

SEQ ID NO: 63811 - protein, 130 aa, Triticum aestivum
  peptide (1)..(130): Ceres Seq. ID no. 13655525
  misc_feature (1)..(87): Pfam Name: Glycosyl hydrolases family 31 Pfam Description: Glycosyl hydrolases family 31
  misc_feature (1)..(129): Homolog of NCBI NO: 34861580 NR Description: similar to alpha glucosidase II, alpha subunit
  misc_feature (1)..(129): Homolog of NCBI NO: 1613878 NR Description: ModA [Dictyostelium discoideum]
  misc_feature (1)..(129): Homolog of NCBI NO: 1890664 NR Description: glucosidase II [Sus scrofa]
  misc_feature (1)..(129): Homolog of NCBI NO: 21357605 NR Description: CG14476-PB [Drosophila melanogaster]
  misc_feature (1)..(129): Homolog of NCBI NO: 31219761 NR Description: ENSANGP00000010269 [Anopheles gambiae]
  misc_feature (1)..(129): Homolog of NCBI NO: 13529302 NR Description: Unknown (protein for IMAGE:3458604) [Homo sapiens]
  misc_feature (1)..(117): Homolog of NCBI NO: 40739683 NR Description: hypothetical protein AN8217.2 [Aspergillus
  misc_feature (1)..(130): Homolog of NCBI NO: 34856729 NR Description: similar to FLJ00088 protein [Rattus norvegicus]
  misc_feature (1)..(129): Homolog of NCBI NO: 7489249 NR Description: probable alpha-glucosidase (EC 3.2.1.20) - potato
  misc_feature (1)..(129): Homolog of NCBI NO: 15237538 NR Description: glycosyl hydrolase family 31 [Arabidopsis
MVNDPYTLVIALNSSGSAEGELYVDDGKSYDYQQGAFIHRRFVFADNKLTSINIAPDSLGKKVYSTECVIERIIVLGLSSGAKKAIIEPGNQEVEIDLGPISLRSGSKSVAPTVRRPNVRVVDDWTIRIA

SEQ ID NO: 63812 - DNA, 804 bp, Triticum aestivum
  misc_feature (1)..(804): Ceres Seq. ID no. 15175453
aaaagggtcctcgaatcttgggctgcctccatcgccgccgcctagatcccacgcgtcgccgcagccggcgtcacaccccttccctccccgggttcgtcgccgaacttccccgccgcccgccgcagtctcctcccctccgacctcctgccaccaccgaccgccgccggctcctccccatcttcaactctaccgaccgccaccacccaagctaaaatatcgacccaggaatggcagtgtcctggacacgagtattgaagagtggagttattccaagagacacaactcaattggttgggacaagaggctttgccgttgtggccaagggaaagaaggacggaaaaggtggcgcggctgatgctaaacctgtgcccagcaaagaaatgaagagcacacgtgtgtttggggtgaatatcctgaaggagggttctgacccgaatatccaaccagactctgagtgccctggctggctgtggcacatgatcgacaagcatctggtgctgagcgagcttcggaggaaagatgccaagacgctgccctatgaagaccagaagcgtttcgtcaagctggacaaccggactcgggatcaaggagaacaatgctctcacagctaagaactgatcaggacaatctcatctcatcatagtgtcttcttatctggagtagttgattttgggaataatgtagcattgaagtcaagctcacagtagaatgtagcctatgcgaccgagcatattgtttgtcatgttcttgggaagatttaacttgtgtatcttgcagcaaatgctgtagcaagtttcccatgcc

SEQ ID NO: 63813 - protein, 127 aa, Triticum aestivum
  peptide (1)..(127): Ceres Seq. ID no. 15175454
  misc_feature (20)..(118): Homolog of NCBI NO: 15241366 NR Description: hypothetical protein [Arabidopsis thaliana]
  misc_feature (12)..(116): Homolog of NCBI NO: 18395929 NR Description: expressed protein [Arabidopsis thaliana]
MAVSWTRVLKSGVIPRDTTQLVGTRGFAVVAKGKKDGKGGAADAKPVPSKEMKSTRVFGVNILKEGSDPNIQPDSECPGWLWHMIDKHLVLSELRRKDAKTLPYEDQKRFVKLDNRTRDQGEQCSHS

SEQ ID NO: 63814 - protein, 117 aa, Triticum aestivum
  peptide (1)..(117): Ceres Seq. ID no. 15175455
  misc_feature (10)..(74): Pfam Name: Extensin-like region Pfam Description: Extensin-like region
  misc_feature (10)..(74): Homolog of NCBI NO: 7488997 NR Description: extensin class I (clone uG) - tomato (fragment)
  misc_feature (12)..(74): Homolog of NCBI NO: 82091 NR Description: hydroxyproline-rich glycoprotein - tomato
  misc_feature (9)..(68): Homolog of NCBI NO: 7488674 NR Description: extensin homolog HRGP2 - soybean (fragment)
  misc_feature (9)..(72): Homolog of NCBI NO: 2108256 NR Description: extensin [Bromheadia finlaysoniana]
  misc_feature (9)..(73): Homolog of NCBI NO: 37051101 NR Description: hydroxyproline-rich glycoprotein-2 [Pisum sativum]
  misc_feature (9)..(74): Homolog of NCBI NO: 169345 NR Description: hydroxyproline-rich glycoprotein
  misc_feature (9)..(74): Homolog of NCBI NO: 81870 NR Description: hydroxyproline-rich glycoprotein (clone Hyp3.6) -
  misc_feature (9)..(73): Homolog of NCBI NO: 24745586 NR Description: extensin [Solanum tuberosum]
  misc_feature (9)..(68): Homolog of NCBI NO: 82091 NR Description: hydroxyproline-rich glycoprotein - tomato
KGSSNLGLPPSPPPRSHASPQPASHPFPPRVRRRTSPPPAAVSSPPTSCHHRPPPAPPHLQLYRPPPPKLKYRPRNGSVLDTSIEEWSYSKRHNSIGWDKRLCRCGQGKEGRKRWRG

SEQ ID NO: 63815 - protein, 76 aa, Triticum aestivum
  peptide (1)..(76): Ceres Seq. ID no. 15175456
  misc_feature (1)..(67): Homolog of NCBI NO: 15241366 NR Description: hypothetical protein [Arabidopsis thaliana]
  misc_feature (1)..(65): Homolog of NCBI NO: 18395929 NR Description: expressed protein [Arabidopsis thaliana]
MKSTRVFGVNILKEGSDPNIQPDSECPGWLWHMIDKHLVLSELRRKDAKTLPYEDQKRFVKLDNRTRDQGEQCSHS

SEQ ID NO: 63816 - DNA, 1052 bp, Triticum aestivum
  misc_feature (1)..(1052): Ceres Seq. ID no. 12617020
gtcataaattctctcccctttcccggatcacacaacctctctccgagtctcctctcttttccagcttttccctccccccaccaaacttccaccccttcctcgagacctccggccacccacccgccaaggcctccctccgctccgcgctgtccccgctggaccaccgcagcactcccctgtccgatcgggaacgaggagagtgtgccacaggagagcgcgatccgtccgtccggccccaagacgagcgccatggcagacgccggctctcatatcgccgccgtcgtcgccacctccatctgcgcccactgtcaacgagaaattccatcgtcaaacatcgacttgcattcctacactgtgctcgtaaccttcaaaagtgcgagcactgtggagaaatggttcccaggaagcttatggaagaacactacaatgaaaatcacgctccggtaaattgctccctgtgcaaagaaaccttgcgaccggagatacttgatcttcacaaaagtgaacagtgcacacagaggatggttgcgtgtgcatattgtgagtacgaattgcctgcaattgatattcatgaacatcaggatgtatgtggaaaccgaacggagttttgtcaaacatgcaagaagtatattagacttcgtgaatggatagggcatgaaatgcagtgccacgttagctcaaatggttctgaagaatcatcaagtgccagaaccattccagagagagaagtgcggcctcctccaccggtacgaccagcgcgtgctgtgcctgctgcacaacacaggcgacttctctttacgattgctgtaactggaatcgccgtcatggttggatcaatactgttccagaaggaggagagtttctaggtccggcagccatggacttcatatgccagagttgttttcaacagtagtatgataagataatataatcttttgatgtataatgttatccccatattcagttggcacgtcttgcttgcttaagagtacagttccagtcatggccttgttggaagaatcgaaataaccatccaaatatttgttgttctc

SEQ ID NO: 63817 - protein, 287 aa, Triticum aestivum
  peptide (1)..(287): Ceres Seq. ID no. 12617021
  misc_feature (117)..(184): Pfam Name: TRAF-type zinc finger Pfam Description: TRAF-type zinc finger
  misc_feature (119)..(227): Homolog of NCBI NO: 18414447 NR Description: UFD1 like protein
  misc_feature (116)..(246): Homolog of NCBI NO: 26986577 NR Description: FLN29 gene product [Mus musculus]
  misc_feature (116)..(239): Homolog of NCBI NO: 5729828 NR Description: FLN29 gene product [Homo sapiens]
  misc_feature (116)..(246): Homolog of NCBI NO: 34872552 NR Description: similar to FLN29 gene product [Rattus norvegicus]
  misc_feature (117)..(243): Homolog of NCBI NO: 40288191 NR Description: XIAP associated factor-1 isoform 1 [Homo sapiens]
  misc_feature (117)..(243): Homolog of NCBI NO: 1869901 NR Description: XIAP associated factor-1 (ZAP-1) [Homo sapiens]
  misc_feature (98)..(201): Homolog of NCBI NO: 34899048 NR Description: contains ESTs
  misc_feature (116)..(284): Homolog of NCBI NO: 21593788 NR Description: unknown [Arabidopsis thaliana]
  misc_feature (116)..(284): Homolog of NCBI NO: 18391087 NR Description: expressed protein
  misc_feature (96)..(283): Homolog of NCBI NO: 33354198 NR Description: XIAP associated factor-1-like protein
HKFSPLSRITQPLSESPLFSSFSLPPPNFHPFLETSGHPPAKASLRSALSPLDHRSTPLSDRERGECATGERDPSVRPQDERHGRRRLSYRRRRRHLHLRPLSTRNSIVKHRLAFLHCARNLQKCEHCGEMVPRKLMEEHYNENHAPVNCSLCKETLRPEILDLHKSEQCTQRMVACAYCEYELPAIDIHEHQDVCGNRTEFCQTCKKYIRLREWIGHEMQCHVSSNGSEESSSARTIPEREVRPPPPVRPARAVPAAQHRRLLFTIAVTGIAVMVGSILFQKEESF

SEQ ID NO: 63818 - protein, 157 aa, Triticum aestivum
  peptide (1)..(157): Ceres Seq. ID no. 12617022
  misc_feature (1)..(54): Pfam Name: TRAF-type zinc finger Pfam Description: TRAF-type zinc finger
  misc_feature (1)..(97): Homolog of NCBI NO: 18414447 NR Description: UFD1 like protein
  misc_feature (1)..(116): Homolog of NCBI NO: 26986577 NR Description: FLN29 gene product [Mus musculus]
  misc_feature (1)..(109): Homolog of NCBI NO: 5729828 NR Description: FLN29 gene product [Homo sapiens]
  misc_feature (1)..(116): Homolog of NCBI NO: 34872552 NR Description: similar to FLN29 gene product [Rattus norvegicus]
  misc_feature (1)..(113): Homolog of NCBI NO: 40288191 NR Description: XIAP associated factor-1 isoform 1 [Homo sapiens]
  misc_feature (1)..(113): Homolog of NCBI NO: 1869901 NR Description: XIAP associated factor-1 (ZAP-1) [Homo sapiens]
  misc_feature (1)..(71): Homolog of NCBI NO: 34899048 NR Description: contains ESTs
  misc_feature (1)..(154): Homolog of NCBI NO: 21593788 NR Description: unknown [Arabidopsis thaliana]
  misc_feature (1)..(154): Homolog of NCBI NO: 18391087 NR Description: expressed protein
  misc_feature (1)..(153): Homolog of NCBI NO: 33354198 NR Description: XIAP associated factor-1-like protein
MVPRKLMEEHYNENHAPVNCSLCKETLRPEILDLHKSEQCTQRMVACAYCEYELPAIDIHEHQDVCGNRTEFCQTCKKYIRLREWIGHEMQCHVSSNGSEESSSARTIPEREVRPPPPVRPARAVPAAQHRRLLFTIAVTGIAVMVGSILFQKEESF

SEQ ID NO: 63819 - protein, 151 aa, Triticum aestivum
  peptide (1)..(151): Ceres Seq. ID no. 12617023
  misc_feature (1)..(91): Homolog of NCBI NO: 18414447 NR Description: UFD1 like protein
  misc_feature (1)..(110): Homolog of NCBI NO: 26986577 NR Description: FLN29 gene product [Mus musculus]
  misc_feature (1)..(103): Homolog of NCBI NO: 5729828 NR Description: FLN29 gene product [Homo sapiens]
  misc_feature (1)..(110): Homolog of NCBI NO: 34872552 NR Description: similar to FLN29 gene product [Rattus norvegicus]
  misc_feature (1)..(107): Homolog of NCBI NO: 40288191 NR Description: XIAP associated factor-1 isoform 1 [Homo sapiens]
  misc_feature (1)..(107): Homolog of NCBI NO: 1869901 NR Description: XIAP associated factor-1 (ZAP-1) [Homo sapiens]
  misc_feature (1)..(65): Homolog of NCBI NO: 34899048 NR Description: contains ESTs
  misc_feature (1)..(148): Homolog of NCBI NO: 21593788 NR Description: unknown [Arabidopsis thaliana]
  misc_feature (1)..(148): Homolog of NCBI NO: 18391087 NR Description: expressed protein
  misc_feature (1)..(147): Homolog of NCBI NO: 33354198 NR Description: XIAP associated factor-1-like protein
MEEHYNENHAPVNCSLCKETLRPEILDLHKSEQCTQRMVACAYCEYELPAIDIHEHQDVCGNRTEFCQTCKKYIRLREWIGHEMQCHVSSNGSEESSSARTIPEREVRPPPPVRPARAVPAAQHRRLLFTIAVTGIAVMVGSILFQKEESF

SEQ ID NO: 63820 - DNA, 752 bp, Triticum aestivum
  misc_feature (1)..(752): Ceres Seq. ID no. 13591134
agcgcgtccccattccgatccgttggcttcctgttcatacattctcccctcccggcgccgcctccagcctagggtttcctcccgccgtccgccgccatggctcgccgcagcggaggaggaaggtcttcccgccctgctccacgtgctgctccagtgagaaacccaccagcgccagcccgtcaagctcctccacctgctactacccagaatagcggtggtggtatcatgagtggaattgggtccaccattgctcagggcatggctttcggtactggcagtgccatggcgcacagggctgttgatgctgtgatgggtccccgcaccattcagcatgagactgttgtcggtgaggctgctgcatctatgactccaatggacaatgctgctgatgacaagtgtggcaacccttccaaggccttccaagattgcatcaaccactacggaagcgacatcagcaagtgccagttctacctcgacatgctgaacgagtgccgccgtggaggagcaggagctggtgcaactctttaagctactatctttgcttgattgcggcttaattggtcggaacctgttttcagtcatgatgatgatgatatatatctcctaaataattcattggcaatattatgaacctatgccacagcttatgtctattacctaccctagtttgtggtctctgttgtcctgggagtatttccttgtattgatgttggaattaccttcatggcagtgggtttataaatatggagttt

SEQ ID NO: 63821 - protein, 143 aa, Triticum aestivum
  peptide (1)..(143): Ceres Seq. ID no. 13591135
  misc_feature (38)..(134): Homolog of NCBI NO: 23509031 NR Description: hypothetical protein, conserved [Plasmodium
  misc_feature (1)..(141): Homolog of NCBI NO: 15242455 NR Description: expressed protein [Arabidopsis thaliana]
  misc_feature (1)..(141): Homolog of NCBI NO: 15237688 NR Description: expressed protein [Arabidopsis thaliana]
  misc_feature (1)..(139): Homolog of NCBI NO: 13174237 NR Description: unknown protein [Oryza sativa]
MARRSGGGRSSRPAPRAAPVRNPPAPARQAPPPATTQNSGGGIMSGIGSTIAQGMAFGTGSAMAHRAVDAVMGPRTIQHETVVGEAAASMTPMDNAADDKCGNPSKAFQDCINHYGSDISKCQFYLDMLNECRRGGAGAGATL

SEQ ID NO: 63822 - protein, 100 aa, Triticum aestivum
  peptide (1)..(100): Ceres Seq. ID no. 13591136
  misc_feature (1)..(91): Homolog of NCBI NO: 23509031 NR Description: hypothetical protein, conserved [Plasmodium
  misc_feature (1)..(98): Homolog of NCBI NO: 15242455 NR Description: expressed protein [Arabidopsis thaliana]
  misc_feature (1)..(98): Homolog of NCBI NO: 15237688 NR Description: expressed protein [Arabidopsis thaliana]
  misc_feature (1)..(96): Homolog of NCBI NO: 13174237 NR Description: unknown protein [Oryza sativa]
MSGIGSTIAQGMAFGTGSAMAHRAVDAVMGPRTIQHETVVGEAAASMTPMDNAADDKCGNPSKAFQDCINHYGSDISKCQFYLDMLNECRRGGAGAGATL

SEQ ID NO: 63823 - protein, 89 aa, Triticum aestivum
  peptide (1)..(89): Ceres Seq. ID no. 13591137
  misc_feature (1)..(80): Homolog of NCBI NO: 23509031 NR Description: hypothetical protein, conserved [Plasmodium
  misc_feature (1)..(87): Homolog of NCBI NO: 15242455 NR Description: expressed protein [Arabidopsis thaliana]
  misc_feature (1)..(87): Homolog of NCBI NO: 15237688 NR Description: expressed protein [Arabidopsis thaliana]
  misc_feature (1)..(85): Homolog of NCBI NO: 13174237 NR Description: unknown protein [Oryza sativa]
MAFGTGSAMAHRAVDAVMGPRTIQHETVVGEAAASMTPMDNAADDKCGNPSKAFQDCINHYGSDISKCQFYLDMLNECRRGGAGAGATL

SEQ ID NO: 63824 - DNA, 882 bp, Triticum aestivum
  misc_feature (1)..(882): Ceres Seq. ID no. 13662677
ctcactttccccagcagagcaagcaaccacctcggagaggcagagcgcaatggcaatggcgtccatcctcgtgcaggtgtccgccctgctcctcaacctcatcgccttcggcctcgccgtcgccgccgagcagcgccgcagcaaggccacggtgacgccggatctggccaaggagtacgactactgcgtctacgactcggacgtcgccaccggctacggcgtcggcgcgctgctcctcctcgtcgccgcgcaggccgtcgtcatgctcgccagccgctgcttctgctgcggccgcgggctcaagccggggggctcgcgcgcctgcgccctcatgctcttcctcttctcatggttgaccttcctcgtcgcagcggcgtgtttgctggcaggatcagtccgtaatgcataccacacccggtacagggggatcttcaacggcgacccgctctcttgcgagacgctgcgcaagggcgtcttcgctgctggtgcagccttcaccttcttcaccgccatcctcagcgagttctactacatcagctactccaaatcccgggatgccgccggcggcgctccatacggcggctccagcatcggcatgggcccttacacttaaggagcttgtgtgctggaggtttatggaaaggttcagtccgtttcactttcagggcggatcatgcatatgtagttcgtggagtgcggtgttcttgtttttttttataaaggtgttcttgttaacattagagtggtagatacggtggaaatgagttcgctgtcttcactggttatgtatgagattgcctggtgtgcatccggacatttcgttgttgcagatgttgggtgtaattggtatctccaaatgatattaatatatttcatttgttc

SEQ ID NO: 63825 - protein, 203 aa, Triticum aestivum
  peptide (1)..(203): Ceres Seq. ID no. 13662678
  misc_feature (20)..(202): Homolog of NCBI NO: 18391509 NR Description: expressed protein [Arabidopsis thaliana]
  misc_feature (19)..(185): Homolog of NCBI NO: 21554630 NR Description: unknown [Arabidopsis thaliana]
  misc_feature (19)..(185): Homolog of NCBI NO: 18407003 NR Description: expressed protein [Arabidopsis thaliana]
  misc_feature (19)..(199): Homolog of NCBI NO: 38344206 NR Description: OSJNBa0064G10.22 [Oryza sativa (japonica
  misc_feature (29)..(203): Homolog of NCBI NO: 22748411 NR Description: hypothetical protein [Oryza sativa (japonica
  misc_feature (19)..(192): Homolog of NCBI NO: 18416991 NR Description: expressed protein [Arabidopsis thaliana]
  misc_feature (19)..(192): Homolog of NCBI NO: 18400781 NR Description: expressed protein [Arabidopsis thaliana]
  misc_feature (19)..(185): Homolog of NCBI NO: 18404242 NR Description: expressed protein [Arabidopsis thaliana]
  misc_feature (19)..(202): Homolog of NCBI NO: 38016521 NR Description: fiber protein Fb34 [Gossypium barbadense]
  misc_feature (19)..(203): Homolog of NCBI NO: 34394069 NR Description: unknown protein [Oryza sativa (japonica
SLSPAEQATTSERQSAMAMASILVQVSALLLNLIAFGLAVAAEQRRSKATVTPDLAKEYDYCVYDSDVATGYGVGALLLLVAAQAVVMLASRCFCCGRGLKPGGSRACALMLFLFSWLTFLVAAACLLAGSVRNAYHTRYRGIFNGDPLSCETLRKGVFAAGAAFTFFTAILSEFYYISYSKSRDAAGGAPYGGSSIGMGPYT

SEQ ID NO: 63826 - protein, 187 aa, Triticum aestivum
  peptide (1)..(187): Ceres Seq. ID no. 13662679
  misc_feature (4)..(186): Homolog of NCBI NO: 18391509 NR Description: expressed protein [Arabidopsis thaliana]
  misc_feature (3)..(169): Homolog of NCBI NO: 21554630 NR Description: unknown [Arabidopsis thaliana]
  misc_feature (3)..(169): Homolog of NCBI NO: 18407003 NR Description: expressed protein [Arabidopsis thaliana]
  misc_feature (3)..(183): Homolog of NCBI NO: 38344206 NR Description: OSJNBa0064G10.22 [Oryza sativa (japonica
  misc_feature (13)..(187): Homolog of NCBI NO: 22748411 NR Description: hypothetical protein [Oryza sativa (japonica
  misc_feature (3)..(176): Homolog of NCBI NO: 18416991 NR Description: expressed protein [Arabidopsis thaliana]
  misc_feature (3)..(176): Homolog of NCBI NO: 18400781 NR Description: expressed protein [Arabidopsis thaliana]
  misc_feature (3)..(169): Homolog of NCBI NO: 18404242 NR Description: expressed protein [Arabidopsis thaliana]
  misc_feature (3)..(186): Homolog of NCBI NO: 38016521 NR Description: fiber protein Fb34 [Gossypium barbadense]
  misc_feature (3)..(187): Homolog of NCBI NO: 34394069 NR Description: unknown protein [Oryza sativa (japonica
MAMASILVQVSALLLNLIAFGLAVAAEQRRSKATVTPDLAKEYDYCVYDSDVATGYGVGALLLLVAAQAVVMLASRCFCCGRGLKPGGSRACALMLFLFSWLTFLVAAACLLAGSVRNAYHTRYRGIFNGDPLSCETLRKGVFAAGAAFTFFTAILSEFYYISYSKSRDAAGGAPYGGSSIGMGPYT

SEQ ID NO: 63827 - protein, 185 aa, Triticum aestivum
  peptide (1)..(185): Ceres Seq. ID no. 13662680
  misc_feature (2)..(184): Homolog of NCBI NO: 18391509 NR Description: expressed protein [Arabidopsis thaliana]
  misc_feature (1)..(167): Homolog of NCBI NO: 21554630 NR Description: unknown [Arabidopsis thaliana]
  misc_feature (1)..(167): Homolog of NCBI NO: 18407003 NR Description: expressed protein [Arabidopsis thaliana]
  misc_feature (1)..(181): Homolog of NCBI NO: 38344206 NR Description: OSJNBa0064G10.22 [Oryza sativa (japonica
  misc_feature (11)..(185): Homolog of NCBI NO: 22748411 NR Description: hypothetical protein [Oryza sativa (japonica
  misc_feature (1)..(174): Homolog of NCBI NO: 18416991 NR Description: expressed protein [Arabidopsis thaliana]
  misc_feature (1)..(174): Homolog of NCBI NO: 18400781 NR Description: expressed protein [Arabidopsis thaliana]
  misc_feature (1)..(167): Homolog of NCBI NO: 18404242 NR Description: expressed protein [Arabidopsis thaliana]
  misc_feature (1)..(184): Homolog of NCBI NO: 38016521 NR Description: fiber protein Fb34 [Gossypium barbadense]
  misc_feature (1)..(185): Homolog of NCBI NO: 34394069 NR Description: unknown protein [Oryza sativa (japonica
MASILVQVSALLLNLIAFGLAVAAEQRRSKATVTPDLAKEYDYCVYDSDVATGYGVGALLLLVAAQAVVMLASRCFCCGRGLKPGGSRACALMLFLFSWLTFLVAAACLLAGSVRNAYHTRYRGIFNGDPLSCETLRKGVFAAGAAFTFFTAILSEFYYISYSKSRDAAGGAPYGGSSIGMGPYT

SEQ ID NO: 63828 - DNA, 735 bp, Triticum aestivum
  misc_feature (1)..(735): Ceres Seq. ID no. 12586244
atctcatccatcacacttcacacaagctactagaaagtactctgctcaatcggtcgatgagggtgtcaagcatggcgtccaagggtctcgttgtgtttgctgtcctgcttgctgcggctttcctcgtggccacagctgaacaaactcaggccaagaaggaagagactaaggccggtgttcagggttaccacggcggcggcagcggaggcggtggctaccatggcggcggcggcggcggcggggggtaccctggccacgggggcggcggcggcgggtatcctggccacggtggcggcggaggtggcggcggctaccctggccacggtggtggcggaggtggcggcggctaccctggccatgggggtggcggcggcggcggcggcagcggctgccggtaccagtgctgcgggcacgggcatagtggctgccgctgctgcgcaagccccaacgagatcccggagcccatgtatcgggcggaggtccgcaactaagtatcagatgctacatacggacgttgctacttgcctgcacgtagtaactactcgtatatgtggtcaataagaaggtaggtgcatgtatgtatgtatgtacgcatacgtatagattgcacagttatgttgatccaataatgccaggactctgtcctgatcgtgtattcaccctgtaagacttctctttcttgcataatacatgcaactgtcatgcatgtataacaaaatctcatgactcttgttc

SEQ ID NO: 63829 - protein, 162 aa, Triticum aestivum
  peptide (1)..(162): Ceres Seq. ID no. 12586245
  misc_feature (63)..(155): Pfam Name: Herpesvirus latent membrane protein 1 (LMP1) Pfam Description: Herpesvirus latent membrane protein 1 (LMP1)
  misc_feature (57)..(147): Homolog of NCBI NO: 121631 NR Description: Glycine-rich protein 2
  misc_feature (24)..(129): Homolog of NCBI NO: 15224547 NR Description: putative glycine-rich protein; protein id:
  misc_feature (58)..(144): Homolog of NCBI NO: 121644 NR Description: Glycine-rich cell wall structural protein
  misc_feature (24)..(150): Homolog of NCBI NO: 259447 NR Description: glycine-rich protein; atGRP [Arabidopsis thaliana]
  misc_feature (24)..(150): Homolog of NCBI NO: 15224548 NR Description: putative glycine-rich protein
  misc_feature (58)..(141): Homolog of NCBI NO: 121644 NR Description: Glycine-rich cell wall structural protein
  misc_feature (93)..(162): Homolog of NCBI NO: 1076719 NR Description: glycine rich protein - barley (fragment)
  misc_feature (24)..(159): Homolog of NCBI NO: 27461096 NR Description: glycine-rich protein [Lilium hybrid cv. 'Star
  misc_feature (58)..(153): Homolog of NCBI NO: 121644 NR Description: Glycine-rich cell wall structural protein
  misc_feature (26)..(141): Homolog of NCBI NO: 121644 NR Description: Glycine-rich cell wall structural protein
LIHHTSHKLLESTLLNRSMRVSSMASKGLVVFAVLLAAAFLVATAEQTQAKKEETKAGVQGYHGGGSGGGGYHGGGGGGGGYPGHGGGGGGYPGHGGGGGGGGYPGHGGGGGGGGYPGHGGGGGGGGSGCRYQCCGHGHSGCRCCASPNEIPEPMYRAEVRN

SEQ ID NO: 63830 - protein, 144 aa, Triticum aestivum
  peptide (1)..(144): Ceres Seq. ID no. 12586246
  misc_feature (45)..(137): Pfam Name: Herpesvirus latent membrane protein 1 (LMP1) Pfam Description: Herpesvirus latent membrane protein 1 (LMP1)
  misc_feature (39)..(129): Homolog of NCBI NO: 121631 NR Description: Glycine-rich protein 2
  misc_feature (6)..(111): Homolog of NCBI NO: 15224547 NR Description: putative glycine-rich protein; protein id:
  misc_feature (40)..(126): Homolog of NCBI NO: 121644 NR Description: Glycine-rich cell wall structural protein
  misc_feature (6)..(132): Homolog of NCBI NO: 259447 NR Description: glycine-rich protein; atGRP [Arabidopsis thaliana]
  misc_feature (6)..(132): Homolog of NCBI NO: 15224548 NR Description: putative glycine-rich protein
  misc_feature (40)..(123): Homolog of NCBI NO: 121644 NR Description: Glycine-rich cell wall structural protein
  misc_feature (75)..(144): Homolog of NCBI NO: 1076719 NR Description: glycine rich protein - barley (fragment)
  misc_feature (6)..(141): Homolog of NCBI NO: 27461096 NR Description: glycine-rich protein [Lilium hybrid cv. 'Star
  misc_feature (40)..(135): Homolog of NCBI NO: 121644 NR Description: Glycine-rich cell wall structural protein
  misc_feature (8)..(123): Homolog of NCBI NO: 121644 NR Description: Glycine-rich cell wall structural protein
MRVSSMASKGLVVFAVLLAAAFLVATAEQTQAKKEETKAGVQGYHGGGSGGGGYHGGGGGGGGYPGHGGGGGGYPGHGGGGGGGGYPGHGGGGGGGGYPGHGGGGGGGGSGCRYQCCGHGHSGCRCCASPNEIPEPMYRAEVRN

SEQ ID NO: 63831 - protein, 139 aa, Triticum aestivum
  peptide (1)..(139): Ceres Seq. ID no. 12586247
  misc_feature (40)..(132): Pfam Name: Herpesvirus latent membrane protein 1 (LMP1) Pfam Description: Herpesvirus latent membrane protein 1 (LMP1)
  misc_feature (34)..(124): Homolog of NCBI NO: 121631 NR Description: Glycine-rich protein 2
  misc_feature (1)..(106): Homolog of NCBI NO: 15224547 NR Description: putative glycine-rich protein; protein id:
  misc_feature (35)..(121): Homolog of NCBI NO: 121644 NR Description: Glycine-rich cell wall structural protein
  misc_feature (1)..(127): Homolog of NCBI NO: 259447 NR Description: glycine-rich protein; atGRP [Arabidopsis thaliana]
  misc_feature (1)..(127): Homolog of NCBI NO: 15224548 NR Description: putative glycine-rich protein
  misc_feature (35)..(118): Homolog of NCBI NO: 121644 NR Description: Glycine-rich cell wall structural protein
  misc_feature (70)..(139): Homolog of NCBI NO: 1076719 NR Description: glycine rich protein - barley (fragment)
  misc_feature (1)..(136): Homolog of NCBI NO: 27461096 NR Description: glycine-rich protein [Lilium hybrid cv. 'Star
  misc_feature (35)..(130): Homolog of NCBI NO: 121644 NR Description: Glycine-rich cell wall structural protein
  misc_feature (3)..(118): Homolog of NCBI NO: 121644 NR Description: Glycine-rich cell wall structural protein
MASKGLVVFAVLLAAAFLVATAEQTQAKKEETKAGVQGYHGGGSGGGGYHGGGGGGGGYPGHGGGGGGYPGHGGGGGGGGYPGHGGGGGGGGYPGHGGGGGGGGSGCRYQCCGHGHSGCRCCASPNEIPEPMYRAEVRN

SEQ ID NO: 63832 - DNA, 951 bp, Triticum aestivum
  misc_feature (1)..(951): Ceres Seq. ID no. 12586030
atcaaagaaagtggcagtagggttcgagagagctgctctctgacgatggcgatgctccggtacgccgccagcctggcgctccgccggtcggcatctccacctgacaccgtggtctcgcgcttcttgggcagcgctggatgcggcaaccccgccgccggcctgccgctcctccggcggccgtcacctccgcctggtgttgctgctgctgcgacggcggcggcctctcgcttcttcagcaacggcagccggcctggatccagcaacaccaactcgacgcttggcaagcctattgaggacaccaaggaagatgtgtacccaaggacccgcaagtcacctgccaagatacgcataattctgaaatctttcaataaccagaagaacaatctgaaggagcttgcgccgtacatgcataaggtcgggttgcctgaatcgcggtccttatacaccgtgctgcgatcacctcatattgataagaaatccagggagcaattctcaacgcatgtgaagaaagtgtttgtggagaaaacagcggagacgcatgaactggccaagaagttctactggttgaaacggcttcgtatattgggggctcagtacgaagtcgtcattaatttcaagacacgcttgggtaagaagattggctgcagcaaaggtggtggcctgcttcgacatccaaaacagggttcaggcatagaataaaaaggaggtactagagctgctttcaggccacacacaagctatccatccaacttgtgtggatcttaatttctggccttggtctgatctagcatataagtagtactatatattctatgtaatgtcatatggaactaaggatgcatgtgacctatctgagaatgttcttgtttggtaatcatccatgtatttcgaaagatggtgataataatatgtggagaagaggatcgacgatgcctgtcttctttttttgcg

SEQ ID NO: 63833 - protein, 232 aa, Triticum aestivum
  peptide (1)..(232): Ceres Seq. ID no. 12586031
  misc_feature (114)..(203): Pfam Name: Ribosomal protein S10p/S20e Pfam Description: Ribosomal protein S10p/S20e
  misc_feature (9)..(209): Homolog of NCBI NO: 2119078 NR Description: ribosomal protein S10 precursor - Arabidopsis
  misc_feature (114)..(211): Homolog of NCBI NO: 1710792 NR Description: MITOCHONDRIAL RIBOSOMAL PROTEIN S10
  misc_feature (114)..(211): Homolog of NCBI NO: 1362069 NR Description: ribosomal protein S10 - garden pea mitochondrion
  misc_feature (1)..(209): Homolog of NCBI NO: 15228720 NR Description: putative 40S ribosomal protein S10
  misc_feature (1)..(209): Homolog of NCBI NO: 21536735 NR Description: putative 40S ribosomal protein S10 [Arabidopsis
  misc_feature (114)..(211): Homolog of NCBI NO: 2119076 NR Description: ribosomal protein S10 - potato mitochondrion
  misc_feature (113)..(209): Homolog of NCBI NO: 11177526 NR Description: ribosomal protein S10 [Zea mays]
  misc_feature (113)..(211): Homolog of NCBI NO: 9229953 NR Description: mitochondrial ribosomal protein S10
  misc_feature (113)..(209): Homolog of NCBI NO: 11528351 NR Description: ribosomal protein S10 [Zea mays]
  misc_feature (113)..(213): Homolog of NCBI NO: 9229951 NR Description: mitochondrial ribosomal protein S10
IKESGSRVRESCSLTMAMLRYAASLALRRSASPPDTVVSRFLGSAGCGNPAAGLPLLRRPSPPPGVAAAATAAASRFFSNGSRPGSSNTNSTLGKPIEDTKEDVYPRTRKSPAKIRIILKSFNNQKNNLKELAPYMHKVGLPESRSLYTVLRSPHIDKKSREQFSTHVKKVFVEKTAETHELAKKFYWLKRLRILGAQYEVVINFKTRLGKKIGCSKGGGLLRHPKQGSGIE

SEQ ID NO: 63834 - protein, 217 aa, Triticum aestivum
  peptide (1)..(217): Ceres Seq. ID no. 12586032
  misc_feature (99)..(188): Pfam Name: Ribosomal protein S10p/S20e Pfam Description: Ribosomal protein S10p/S20e
  misc_feature (1)..(194): Homolog of NCBI NO: 2119078 NR Description: ribosomal protein S10 precursor - Arabidopsis
  misc_feature (99)..(196): Homolog of NCBI NO: 1710792 NR Description: MITOCHONDRIAL RIBOSOMAL PROTEIN S10
  misc_feature (99)..(196): Homolog of NCBI NO: 1362069 NR Description: ribosomal protein S10 - garden pea mitochondrion
  misc_feature (1)..(194): Homolog of NCBI NO: 15228720 NR Description: putative 40S ribosomal protein S10
  misc_feature (1)..(194): Homolog of NCBI NO: 21536735 NR Description: putative 40S ribosomal protein S10 [Arabidopsis
  misc_feature (99)..(196): Homolog of NCBI NO: 2119076 NR Description: ribosomal protein S10 - potato mitochondrion
  misc_feature (98)..(194): Homolog of NCBI NO: 11177526 NR Description: ribosomal protein S10 [Zea mays]
  misc_feature (98)..(196): Homolog of NCBI NO: 9229953 NR Description: mitochondrial ribosomal protein S10
  misc_feature (98)..(194): Homolog of NCBI NO: 11528351 NR Description: ribosomal protein S10 [Zea mays]
  misc_feature (98)..(198): Homolog of NCBI NO: 9229951 NR Description: mitochondrial ribosomal protein S10
MAMLRYAASLALRRSASPPDTVVSRFLGSAGCGNPAAGLPLLRRPSPPPGVAAAATAAASRFFSNGSRPGSSNTNSTLGKPIEDTKEDVYPRTRKSPAKIRIILKSFNNQKNNLKELAPYMHKVGLPESRSLYTVLRSPHIDKKSREQFSTHVKKVFVEKTAETHELAKKFYWLKRLRILGAQYEVVINFKTRLGKKIGCSKGGGLLRHPKQGSGIE

SEQ ID NO: 63835 - protein, 215 aa, Triticum aestivum
  peptide (1)..(215): Ceres Seq. ID no. 12586033
  misc_feature (97)..(186): Pfam Name: Ribosomal protein S10p/S20e Pfam Description: Ribosomal protein S10p/S20e
  misc_feature (1)..(192): Homolog of NCBI NO: 2119078 NR Description: ribosomal protein S10 precursor - Arabidopsis
  misc_feature (97)..(194): Homolog of NCBI NO: 1710792 NR Description: MITOCHONDRIAL RIBOSOMAL PROTEIN S10
  misc_feature (97)..(194): Homolog of NCBI NO: 1362069 NR Description: ribosomal protein S10 - garden pea mitochondrion
  misc_feature (1)..(192): Homolog of NCBI NO: 15228720 NR Description: putative 40S ribosomal protein S10
  misc_feature (1)..(192): Homolog of NCBI NO: 21536735 NR Description: putative 40S ribosomal protein S10 [Arabidopsis
  misc_feature (97)..(194): Homolog of NCBI NO: 2119076 NR Description: ribosomal protein S10 - potato mitochondrion
  misc_feature (96)..(192): Homolog of NCBI NO: 11177526 NR Description: ribosomal protein S10 [Zea mays]
  misc_feature (96)..(194): Homolog of NCBI NO: 9229953 NR Description: mitochondrial ribosomal protein S10
  misc_feature (96)..(192): Homolog of NCBI NO: 11528351 NR Description: ribosomal protein S10 [Zea mays]
  misc_feature (96)..(196): Homolog of NCBI NO: 9229951 NR Description: mitochondrial ribosomal protein S10
MLRYAASLALRRSASPPDTVVSRFLGSAGCGNPAAGLPLLRRPSPPPGVAAAATAAASRFFSNGSRPGSSNTNSTLGKPIEDTKEDVYPRTRKSPAKIRIILKSFNNQKNNLKELAPYMHKVGLPESRSLYTVLRSPHIDKKSREQFSTHVKKVFVEKTAETHELAKKFYWLKRLRILGAQYEVVINFKTRLGKKIGCSKGGGLLRHPKQGSGIE

SEQ ID NO: 63836 - DNA, 1031 bp, Triticum aestivum
  misc_feature (1)..(1031): Ceres Seq. ID no. 13597220
acaagtcctcccgagtccacctccttccccttcccccgatcttatcctcggcgaagctgctctaatggcggatccgccggcgtcgtccccggccgacgaggcgcgggatccaggtagctcagaagctgctcctcatgggagtagtacgtcgcaagacacgaaagagcaggaagacatgaaaggagaagcggctgttgcgacctctgaacccgtgagggaggaactggtccagagtgccgttagttttctgagtcaccccaaagtcgtggcatcttccgatgtccagaggcgttccttcctggaaaataaagggctcaccatggacgaaattgaagaagcatttcgacgtttacttagcccaccttcaaactctacaaactcaaatatgtgtgaatctcaaggaagtcctgatcctgaaactttaacccctgtggtgccccggcacccaaaatcatatatggaggtcatggaaatgatacagaggggagagcggccagatgatatccaggatattaatgatgagccaccaaaccctgatcagccaatctcgaaacccagtatggcacccaagcccaagccgtgggagaagcaaggccaacaaagttccggcctggacctgaaagctcacacaagcaaccccagcgaatcgtcgtcaggagttcaaaccgatggcaccagccaggccacgggatcaaacaacagctccggtcacgggaacttgatgctgacggcagagccggctacaggctctgaagcccccgtggatggcgttgccacctcgccaaagcagtaactctggaaatgcatagacgaacggcggtgggatcaggacatgatgtgaatcagcgtcgacctgatgctgcttcagattccagcaccacattgttgcatcttccgttattatcagaaactagtttagtttagggggtcagcgacatttttgggaagctgggattggattcttgctggaaatgagcacctacaatatgtacttatcattggcattgggcaaaaaaaaaaaaaaaaaagct

SEQ ID NO: 63837 - protein, 263 aa, Triticum aestivum
  peptide (1)..(263): Ceres Seq. ID no. 13597221
  misc_feature (71)..(145): Pfam Name: Peroxisomal membrane anchor protein (Pex14p) Pfam Description: Peroxisomal membrane anchor protein (Pex14p)
  misc_feature (44)..(117): Homolog of NCBI NO: 9945056 NR Description: rice EST D22333 corresponds to a region of the
  misc_feature (25)..(145): Homolog of NCBI NO: 30697742 NR Description: (PEX14) protein [Arabidopsis thaliana]
  misc_feature (25)..(145): Homolog of NCBI NO: 11094252 NR Description: PEX14 [Arabidopsis thaliana]
  misc_feature (25)..(145): Homolog of NCBI NO: 11121113 NR Description: peroxin Pex14 [Arabidopsis thaliana]
  misc_feature (122)..(247): Homolog of NCBI NO: 30697742 NR Description: (PEX14) protein [Arabidopsis thaliana]
  misc_feature (122)..(247): Homolog of NCBI NO: 11121113 NR Description: peroxin Pex14 [Arabidopsis thaliana]
  misc_feature (122)..(247): Homolog of NCBI NO: 11094252 NR Description: PEX14 [Arabidopsis thaliana]
  misc_feature (122)..(247): Homolog of NCBI NO: 20466350 NR Description: putative protein [Arabidopsis thaliana]
  misc_feature (122)..(247): Homolog of NCBI NO: 21593914 NR Description: unknown [Arabidopsis thaliana]
QVLPSPPPSPSPDLILGEAALMADPPASSPADEARDPGSSEAAPHGSSTSQDTKEQEDMKGEAAVATSEPVREELVQSAVSFLSHPKVVASSDVQRRSFLENKGLTMDEIEEAFRRLLSPPSNSTNSNMCESQGSPDPETLTPVVPRHPKSYMEVMEMIQRGERPDDIQDINDEPPNPDQPISKPSMAPKPKPWEKQGQQSSGLDLKAHTSNPSESSSGVQTDGTSQATGSNNSSGHGNLMLTAEPATGSEAPVDGVATSPKQ

SEQ ID NO: 63838 - protein, 242 aa, Triticum aestivum
  peptide (1)..(242): Ceres Seq. ID no. 13597222
  misc_feature (50)..(124): Pfam Name: Peroxisomal membrane anchor protein (Pex14p) Pfam Description: Peroxisomal membrane anchor protein (Pex14p)
  misc_feature (23)..(96): Homolog of NCBI NO: 9945056 NR Description: rice EST D22333 corresponds to a region of the
  misc_feature (4)..(124): Homolog of NCBI NO: 30697742 NR Description: (PEX14) protein [Arabidopsis thaliana]
  misc_feature (4)..(124): Homolog of NCBI NO: 11094252 NR Description: PEX14 [Arabidopsis thaliana]
  misc_feature (4)..(124): Homolog of NCBI NO: 11121113 NR Description: peroxin Pex14 [Arabidopsis thaliana]
  misc_feature (101)..(226): Homolog of NCBI NO: 11121113 NR Description: peroxin Pex14 [Arabidopsis thaliana]
  misc_feature (101)..(226): Homolog of NCBI NO: 30697742 NR Description: (PEX14) protein [Arabidopsis thaliana]
  misc_feature (101)..(226): Homolog of NCBI NO: 11094252 NR Description: PEX14 [Arabidopsis thaliana]
  misc_feature (101)..(226): Homolog of NCBI NO: 20466350 NR Description: putative protein [Arabidopsis thaliana]
  misc_feature (101)..(226): Homolog of NCBI NO: 21593914 NR Description: unknown [Arabidopsis thaliana]
MADPPASSPADEARDPGSSEAAPHGSSTSQDTKEQEDMKGEAAVATSEPVREELVQSAVSFLSHPKVVASSDVQRRSFLENKGLTMDEIEEAFRRLLSPPSNSTNSNMCESQGSPDPETLTPVVPRHPKSYMEVMEMIQRGERPDDIQDINDEPPNPDQPISKPSMAPKPKPWEKQGQQSSGLDLKAHTSNPSESSSGVQTDGTSQATGSNNSSGHGNLMLTAEPATGSEAPVDGVATSPKQ

SEQ ID NO: 63839 - protein, 205 aa, Triticum aestivum
  peptide (1)..(205): Ceres Seq. ID no. 13597223
  misc_feature (13)..(87): Pfam Name: Peroxisomal membrane anchor protein (Pex14p) Pfam Description: Peroxisomal membrane anchor protein (Pex14p)
  misc_feature (1)..(59): Homolog of NCBI NO: 9945056 NR Description: rice EST D22333 corresponds to a region of the
  misc_feature (1)..(87): Homolog of NCBI NO: 30697742 NR Description: (PEX14) protein [Arabidopsis thaliana]
  misc_feature (1)..(87): Homolog of NCBI NO: 11094252 NR Description: PEX14 [Arabidopsis thaliana]
  misc_feature (1)..(87): Homolog of NCBI NO: 11121113 NR Description: peroxin Pex14 [Arabidopsis thaliana]
  misc_feature (64)..(189): Homolog of NCBI NO: 11121113 NR Description: peroxin Pex14 [Arabidopsis thaliana]
  misc_feature (64)..(189): Homolog of NCBI NO: 30697742 NR Description: (PEX14) protein [Arabidopsis thaliana]
  misc_feature (64)..(189): Homolog of NCBI NO: 11094252 NR Description: PEX14 [Arabidopsis thaliana]
  misc_feature (64)..(189): Homolog of NCBI NO: 20466350 NR Description: putative protein [Arabidopsis thaliana]
  misc_feature (64)..(189): Homolog of NCBI NO: 21593914 NR Description: unknown [Arabidopsis thaliana]
MKGEAAVATSEPVREELVQSAVSFLSHPKVVASSDVQRRSFLENKGLTMDEIEEAFRRLLSPPSNSTNSNMCESQGSPDPETLTPVVPRHPKSYMEVMEMIQRGERPDDIQDINDEPPNPDQPISKPSMAPKPKPWEKQGQQSSGLDLKAHTSNPSESSSGVQTDGTSQATGSNNSSGHGNLMLTAEPATGSEAPVDGVATSPKQ

SEQ ID NO: 63840 - DNA, 750 bp, Triticum aestivum
  misc_feature (1)..(750): Ceres Seq. ID no. 15175269
aacacctccaactcaaaaggcccccactttgccgtctctttcacctaacaataatatctgcctacctgtcttgcacaccatacaggtccaagcccgcccgcccgcccatagagctcgccgcctccctccctgtctccttccccgcctctctctcgtcgtcgtcccccgcagcgccggccgaagcaaagcacggggacttaaccgccgccatgagctactacggccagcagcagccgcccgtcggcgcgcctccaccgcaagggtatccaggaaaagaggagtacccgccggcaggctaccctccggccgggtacccaccgccggggcagggacaaggctaccctccccagggatacccgccgcagcaggggggttatccgccgcagcaggggtatccgccacagcagggagggtacccgccgcagcaagggtacccgcagcaggggtacccgcctcagtacgcgcagcagccgccgcggcagcagcagagcagtggcccgtccttcatggagggatgcctggccgccctttgttgctgctgtctgttggatgcttgcttctaagttgatttctaagcggcagggaacagacttggtgcagctgctatgtgttccatattggaaattgggattggcttgttgattaatagtagtacttcgtagaggagattacaagaactccttaccgtcatgtttgtatgttcagatgattggtgtaccttttcgcataaaaaaagatgtttgttgtaag

SEQ ID NO: 63841 - protein, 188 aa, Triticum aestivum
  peptide (1)..(188): Ceres Seq. ID no. 15175270
TPPTQKAPTLPSLSPNNNICLPVLHTIQVQARPPAHRARRLPPCLLPRLSLVVVPRSAGRSKARGLNRRHELLRPAAAARRRASTARVSRKRGVPAGRLPSGRVPTAGAGTRLPSPGIPAAAGGLSAAAGVSATAGRVPAAARVPAAGVPASVRAAAAAAAAEQWPVLHGGMPGRPLLLLSVGCLLLS

SEQ ID NO: 63842 - protein, 186 aa, Triticum aestivum
  peptide (1)..(186): Ceres Seq. ID no. 15175271
  misc_feature (73)..(169): Pfam Name: Extensin-like region Pfam Description: Extensin-like region
  misc_feature (30)..(151): Homolog of NCBI NO: 6469591 NR Description: unknown [Eufolliculina uhligi]
  misc_feature (64)..(160): Homolog of NCBI NO: 671859 NR Description: annexin VII [Dictyostelium discoideum]
  misc_feature (44)..(160): Homolog of NCBI NO: 113965 NR Description: Annexin A7 (Annexin VII) (Synexin)
  misc_feature (70)..(155): Homolog of NCBI NO: 40538901 NR Description: expressed protein [Oryza sativa (japonica
  misc_feature (88)..(186): Homolog of NCBI NO: 1808688 NR Description: hypothetical protein [Sporobolus stapfianus]
  misc_feature (88)..(186): Homolog of NCBI NO: 34393718 NR Description: adhesive/proline-rich protein homolog-like
  misc_feature (76)..(186): Homolog of NCBI NO: 21554421 NR Description: unknown [Arabidopsis thaliana]
  misc_feature (88)..(186): Homolog of NCBI NO: 40538901 NR Description: expressed protein [Oryza sativa (japonica
  misc_feature (84)..(186): Homolog of NCBI NO: 15227350 NR Description: proline-rich protein family [Arabidopsis
  misc_feature (58)..(186): Homolog of NCBI NO: 15229624 NR Description: proline-rich protein family [Arabidopsis
HLQLKRPPLCRLFHLTIISAYLSCTPYRSKPARPPIELAASLPVSFPASLSSSSPAAPAEAKHGDLTAAMSYYGQQQPPVGAPPPQGYPGKEEYPPAGYPPAGYPPPGQGQGYPPQGYPPQQGGYPPQQGYPPQQGGYPPQQGYPQQGYPPQYAQQPPRQQQSSGPSFMEGCLAALCCCCLLDACF

SEQ ID NO: 63843 - protein, 117 aa, Triticum aestivum
  peptide (1)..(117): Ceres Seq. ID no. 15175272
  misc_feature (4)..(100): Pfam Name: Extensin-like region Pfam Description: Extensin-like region
  misc_feature (1)..(82): Homolog of NCBI NO: 6469591 NR Description: unknown [Eufolliculina uhligi]
  misc_feature (1)..(91): Homolog of NCBI NO: 671859 NR Description: annexin VII [Dictyostelium discoideum]
  misc_feature (1)..(91): Homolog of NCBI NO: 113965 NR Description: Annexin A7 (Annexin VII) (Synexin)
  misc_feature (1)..(86): Homolog of NCBI NO: 40538901 NR Description: expressed protein [Oryza sativa (japonica
  misc_feature (19)..(117): Homolog of NCBI NO: 1808688 NR Description: hypothetical protein [Sporobolus stapfianus]
  misc_feature (19)..(117): Homolog of NCBI NO: 34393718 NR Description: adhesive/proline-rich protein homolog-like
  misc_feature (7)..(117): Homolog of NCBI NO: 21554421 NR Description: unknown [Arabidopsis thaliana]
  misc_feature (19)..(117): Homolog of NCBI NO: 40538901 NR Description: expressed protein [Oryza sativa (japonica
  misc_feature (15)..(117): Homolog of NCBI NO: 15227350 NR Description: proline-rich protein family [Arabidopsis
  misc_feature (1)..(117): Homolog of NCBI NO: 15229624 NR Description: proline-rich protein family [Arabidopsis
MSYYGQQQPPVGAPPPQGYPGKEEYPPAGYPPAGYPPPGQGQGYPPQGYPPQQGGYPPQQGYPPQQGGYPPQQGYPQQGYPPQYAQQPPRQQQSSGPSFMEGCLAALCCCCLLDACF

SEQ ID NO: 63844 - DNA, 2292 bp, Triticum aestivum
  misc_feature (1)..(2292): Ceres Seq. ID no. 13655640
acagccgacgaatacaaaacatttcctgattctggcagccgagacggcactgtcaaaccaaggctcctagcaacaagaaagaatgtcgtcccttgtacgccttatcctgacaatctccttgggcctaaacctcgcagccttgatcaccaccgccaacgaccaattcatctactccggattcagtggttccaacctcgccgtcgacgacaccgccaccatcacgccggacgggctcctggagctgacaaacggcacggcgtaccagaaaggccacgcgttccacccggccccgttccgcctccgcgactccacggccaacggcgtcggcgatggcaaggtgcggtccttctccgtcgccttcgtgttcggcatcgtctccgcctaccccgacttcagcgcccacggcatggccttcgtcatcgccccgcggaggaacttctccgatgctcttcctgccaagtatctgggccttaccaacgtccagaacgatggcaacgccagcaacagcatcttcgccgtggagctggacaccatccagagcgtggagttcaaggacatcaacgccaaccacgtcggcatcgacatcaacggcctgcagtccctacggtcatacaacgccggctactacgatgacgagagcggcgacttccgaggcatgaagctcatcagccgcgaggccatgcaagtgtggattgattaccacggggagaggaaggagatcaacgtgacactggctcccttcgacatggccaagcctgctaggccactcctctcggccagctacgacctctccacggtgctcactgagctggtgtatctcgggttctcagcggcgaccggtcgtgtcaactcgcggcatttcgttctcggttggagcttgggcgtgagcagacaagctccggccatcgacatggccaagctgcccaagttgcctcgggttggccccaagcctcggtccaaggtcctggacatcgttctaccaatagttacggccacatttgtacttggtttgggtggtatccttgtcctggtcatgcggaggagatcaaggtacgctgaactgcgggaagattgggaggttgagttcggaccacaccgcttcttgtacaaggatttattccgtgcaactgacggattcaaggacaagcatctacttggcgcaggggggtttggaagggtatacagaggcgtgcttgagacatctaaactggaggttgcggtgaagagggtgtctcacgagtcaagacaggggatgagggagttcatagctgagattacaagcatcggccgcatccgacatcgtaatcttgtagagttgctcggttactgccgtcgaaaaggtgaacttcttttggtgtacgcctacatgcccaacggaagcctggataaacatctatacaacactagagaggatcagcctactctgaattgggctttgaggtttcagaccgtcaaagatgtcgcgtccggcttgctttatctgcatgagaggtgggagaaagttgtcatccacagagacatcaaggccagcaacgtgctcctcgacaaagacatgaacgcccagcttggtgactttgggctagcaaggctgtacgaccatggggcagactcgcaaaccacgcacgtggtcggcaccatgggttacttggctccggagctcatacgcacgggcagggcgtcccctctgaccgatatgttcgcctttggcatattccttcttgaggttgcatgcggacagaaacccatcaaggagaatgcgcaaggcggacagatagcgctcgtcgactgggtgctggagcactggcgtgatggtacgctcatggagacggtggacgcgaggctccagggtgagttcgacatcgaccaggcagggctggtgctcacgctagcgctcatgtgctcacaccttctcgctagcgcgaggcctggcattggacaagtcatgcgctatctgaccggtgttacgcccctccctgagctcacaccaacagatgtgctcaccttgatgcaaaacaaggggtttgacgaatccgccatgtcatatccggatctggtgtcgagctttggcacaatttccaccctctcgggaggaagataacctcagtgctagcttaattcacggcttcaataagttttactagtattatgcatgtgtagtgccagaagttcgtaattagaattgtaaacccaataattatcctttggccgcagtacactttcaaattaccgtggccaacatgtaagaagttatattgttcaaaactcagaactcgaaacaaggtgatacggggc

SEQ ID NO: 63845 - protein, 671 aa, Triticum aestivum
  peptide (1)..(671): Ceres Seq. ID no. 13655641
  misc_feature (8)..(635): Homolog of NCBI NO: 15239263 NR Description: receptor like protein kinase [Arabidopsis
  misc_feature (8)..(635): Homolog of NCBI NO: 15810557 NR Description: putative receptor protein kinase [Arabidopsis
  misc_feature (20)..(671): Homolog of NCBI NO: 38112425 NR Description: lectin-like receptor kinase 7;1 [Medicago
  misc_feature (1)..(619): Homolog of NCBI NO: 31324528 NR Description: receptor kinase Lecrk [Gossypium hirsutum]
  misc_feature (20)..(671): Homolog of NCBI NO: 38112427 NR Description: lectin-like receptor kinase 7;2 [Medicago
  misc_feature (1)..(671): Homolog of NCBI NO: 38346766 NR Description: OSJNBa0081C01.17 [Oryza sativa (japonica
  misc_feature (8)..(671): Homolog of NCBI NO: 38346765 NR Description: OSJNBa0081C01.16 [Oryza sativa (japonica
  misc_feature (7)..(671): Homolog of NCBI NO: 34899520 NR Description: putative receptor-like protein kinase
  misc_feature (1)..(671): Homolog of NCBI NO: 34899508 NR Description: putative receptor-like protein kinase
  misc_feature (1)..(671): Homolog of NCBI NO: 34899502 NR Description: putative receptor-like protein kinase
MSSLVRLILTISLGLNLAALITTANDQFIYSGFSGSNLAVDDTATITPDGLLELTNGTAYQKGHAFHPAPFRLRDSTANGVGDGKVRSFSVAFVFGIVSAYPDFSAHGMAFVIAPRRNFSDALPAKYLGLTNVQNDGNASNSIFAVELDTIQSVEFKDINANHVGIDINGLQSLRSYNAGYYDDESGDFRGMKLISREAMQVWIDYHGERKEINVTLAPFDMAKPARPLLSASYDLSTVLTELVYLGFSAATGRVNSRHFVLGWSLGVSRQAPAIDMAKLPKLPRVGPKPRSKVLDIVLPIVTATFVLGLGGILVLVMRRRSRYAELREDWEVEFGPHRFLYKDLFRATDGFKDKHLLGAGGFGRVYRGVLETSKLEVAVKRVSHESRQGMREFIAEITSIGRIRHRNLVELLGYCRRKGELLLVYAYMPNGSLDKHLYNTREDQPTLNWALRFQTVKDVASGLLYLHERWEKVVIHRDIKASNVLLDKDMNAQLGDFGLARLYDHGADSQTTHVVGTMGYLAPELIRTGRASPLTDMFAFGIFLLEVACGQKPIKENAQGGQIALVDWVLEHWRDGTLMETVDARLQGEFDIDQAGLVLTLALMCSHLLASARPGIGQVMRYLTGVTPLPELTPTDVLTLMQNKGFDESAMSYPDLVSSFGTISTLSGGR

SEQ ID NO: 63846 - protein, 563 aa, Triticum aestivum
  peptide (1)..(563): Ceres Seq. ID no. 13655642
  misc_feature (1)..(527): Homolog of NCBI NO: 15239263 NR Description: receptor like protein kinase [Arabidopsis
  misc_feature (1)..(527): Homolog of NCBI NO: 15810557 NR Description: putative receptor protein kinase [Arabidopsis
  misc_feature (1)..(563): Homolog of NCBI NO: 38112425 NR Description: lectin-like receptor kinase 7;1 [Medicago
  misc_feature (1)..(511): Homolog of NCBI NO: 31324528 NR Description: receptor kinase Lecrk [Gossypium hirsutum]
  misc_feature (1)..(563): Homolog of NCBI NO: 38112427 NR Description: lectin-like receptor kinase 7;2 [Medicago
  misc_feature (1)..(563): Homolog of NCBI NO: 38346766 NR Description: OSJNBa0081C01.17 [Oryza sativa (japonica
  misc_feature (1)..(563): Homolog of NCBI NO: 38346765 NR Description: OSJNBa0081C01.16 [Oryza sativa (japonica
  misc_feature (1)..(563): Homolog of NCBI NO: 34899520 NR Description: putative receptor-like protein kinase
  misc_feature (1)..(563): Homolog of NCBI NO: 34899508 NR Description: putative receptor-like protein kinase
  misc_feature (1)..(563): Homolog of NCBI NO: 34899502 NR Description: putative receptor-like protein kinase
MAFVIAPRRNFSDALPAKYLGLTNVQNDGNASNSIFAVELDTIQSVEFKDINANHVGIDINGLQSLRSYNAGYYDDESGDFRGMKLISREAMQVWIDYHGERKEINVTLAPFDMAKPARPLLSASYDLSTVLTELVYLGFSAATGRVNSRHFVLGWSLGVSRQAPAIDMAKLPKLPRVGPKPRSKVLDIVLPIVTATFVLGLGGILVLVMRRRSRYAELREDWEVEFGPHRFLYKDLFRATDGFKDKHLLGAGGFGRVYRGVLETSKLEVAVKRVSHESRQGMREFIAEITSIGRIRHRNLVELLGYCRRKGELLLVYAYMPNGSLDKHLYNTREDQPTLNWALRFQTVKDVASGLLYLHERWEKVVIHRDIKASNVLLDKDMNAQLGDFGLARLYDHGADSQTTHVVGTMGYLAPELIRTGRASPLTDMFAFGIFLLEVACGQKPIKENAQGGQIALVDWVLEHWRDGTLMETVDARLQGEFDIDQAGLVLTLALMCSHLLASARPGIGQVMRYLTGVTPLPELTPTDVLTLMQNKGFDESAMSYPDLVSSFGTISTLSGGR

SEQ ID NO: 63847 - protein, 480 aa, Triticum aestivum
  peptide (1)..(480): Ceres Seq. ID no. 13655643
  misc_feature (1)..(444): Homolog of NCBI NO: 15239263 NR Description: receptor like protein kinase [Arabidopsis
  misc_feature (1)..(444): Homolog of NCBI NO: 15810557 NR Description: putative receptor protein kinase [Arabidopsis
  misc_feature (1)..(480): Homolog of NCBI NO: 38112425 NR Description: lectin-like receptor kinase 7;1 [Medicago
  misc_feature (1)..(428): Homolog of NCBI NO: 31324528 NR Description: receptor kinase Lecrk [Gossypium hirsutum]
  misc_feature (1)..(480): Homolog of NCBI NO: 38112427 NR Description: lectin-like receptor kinase 7;2 [Medicago
  misc_feature (1)..(480): Homolog of NCBI NO: 38346766 NR Description: OSJNBa0081C01.17 [Oryza sativa (japonica
  misc_feature (1)..(480): Homolog of NCBI NO: 38346765 NR Description: OSJNBa0081C01.16 [Oryza sativa (japonica
  misc_feature (1)..(480): Homolog of NCBI NO: 34899520 NR Description: putative receptor-like protein kinase
  misc_feature (1)..(480): Homolog of NCBI NO: 34899508 NR Description: putative receptor-like protein kinase
  misc_feature (1)..(480): Homolog of NCBI NO: 34899502 NR Description: putative receptor-like protein kinase
MKLISREAMQVWIDYHGERKEINVTLAPFDMAKPARPLLSASYDLSTVLTELVYLGFSAATGRVNSRHFVLGWSLGVSRQAPAIDMAKLPKLPRVGPKPRSKVLDIVLPIVTATFVLGLGGILVLVMRRRSRYAELREDWEVEFGPHRFLYKDLFRATDGFKDKHLLGAGGFGRVYRGVLETSKLEVAVKRVSHESRQGMREFIAEITSIGRIRHRNLVELLGYCRRKGELLLVYAYMPNGSLDKHLYNTREDQPTLNWALRFQTVKDVASGLLYLHERWEKVVIHRDIKASNVLLDKDMNAQLGDFGLARLYDHGADSQTTHVVGTMGYLAPELIRTGRASPLTDMFAFGIFLLEVACGQKPIKENAQGGQIALVDWVLEHWRDGTLMETVDARLQGEFDIDQAGLVLTLALMCSHLLASARPGIGQVMRYLTGVTPLPELTPTDVLTLMQNKGFDESAMSYPDLVSSFGTISTLSGGR

SEQ ID NO: 63848 - DNA, 1866 bp, Triticum aestivum
  misc_feature (1)..(1866): Ceres Seq. ID no. 12465371
cccgaataacctcggattccaggattcccattcggtgataccgcgaggggctccacctccggctcgcctcaaccctaaccccctgcccccctcccctccggcgagatgcccaccggcgcctcggcgtgacgcgacccctcgtcggcggcgaggagcgcgaaccggtggcggcggagggtggatcgagatggaggcgaggcctcggccttccggcgtgcggagggtgaccgccaagaagcggccgaggccggatgcgtcctccaacagcgcgcggaagctacagcgccgggagattgccgcattccccgagcgcaccttcgccgccagcaccacgcgggagcggttccgcaacatccagctccaggaagaatttgatacatatgatcctaaggagaacagttcgctactaccttacttgaggaagcggtctgaaattatcgagatagttggagcccgtgatattatctttgctttatcacagctgggagtatgtgctgcgttcagtagagtgacaaaccagcggatttgctttctgaatggaagtccagatgaagtcatccgtagtttgttctataacaagaacaatgactcgcttataaccgtatcagtttatggttctgaaaatttcagtgctttaagatgcaggacaactcgaatcgagtatatacgccgtggaaagccagatgctggtttccctctttttgagacagaatcgttaaggtggcctggtttcgtggaatttgatgatgtaaacggaaaagtgctgacttactctgctcaagacagtacttacaaggtgtttgacttgaagaattacacacttctgtatacgatatctgataaagatgttcaagagataaaaatcagccctggtataatgctattgatatactctagaaaaaagggctatattcctcttgagattctttctattgaagatggtaagcgcttgaagtcattcaggcatcttcttcatcgcaacaagaagatcgatttcatcgagcaattcaatgaaaagcttctagttaagcaggatggggagaaccttcaaattcttgatgtaacaaactctaagatcacagaagtgagcagcaatgagtttgtgactccatcagcttttatttttctgtacgagatgcagttgttcctgaccttccgtaatcgatcagtatcagtttggaatttccgtggtgaactggtgacatcctttgaggatcatttgttgtggcatcctgattgcaatacaaacagtatttacataactagcaaccaagacctcattatctcttactgcaaagctgaaccggatgatccatcttcagaagacaatgcctgttctataaacatcagcgacatattgaccgggaaatgcatggccaagataaaggcagggaacctgtgcaaacagaagtcgtcgaagttcctgtgcacgcctctagaggccctgggcgacattacatctctgtactacgacgaagagcgtgaggagatcatcaccggcaaccatcaaggcctcatccatgtgtggtcaaattaacagcttggtccagtgcaggcaggttacatcaggcaccaggggatcttcgttagcatttagctagtagtggcaccagtttagtgggcagcctgacctagccgtgggtatctttcgccgcatgggccttcatgttgggaatgtttgtgtatagtactgtagttcatccatcgccagcctgttagctatttgacatttgtcatgtgttttttgggggatccgtgtagctttaggagatgcttatcataggggtcatcgaagagggaaagtttcgggtgcatcgcatgtaagcattattgacctttaagctatttatctgattctgatttccg

SEQ ID NO: 63849 - protein, 511 aa, Triticum aestivum
  peptide (1)..(511): Ceres Seq. ID no. 12465372
  misc_feature (223)..(262): Homolog of NCBI NO: 37535068 NR Description: hypothetical protein [Oryza sativa (japonica
  misc_feature (71)..(117): Homolog of NCBI NO: 37535068 NR Description: hypothetical protein [Oryza sativa (japonica
  misc_feature (65)..(511): Homolog of NCBI NO: 11281174 NR Description: hypothetical protein F24B22.150 - Arabidopsis
  misc_feature (65)..(511): Homolog of NCBI NO: 30687585 NR Description: expressed protein [Arabidopsis thaliana]
  misc_feature (65)..(511): Homolog of NCBI NO: 25344227 NR Description: hypothetical protein At2g38630 [imported] -
  misc_feature (65)..(511): Homolog of NCBI NO: 18410015 NR Description: putative protein
  misc_feature (63)..(511): Homolog of NCBI NO: 34909262 NR Description: B1148D12.19 [Oryza sativa (japonica
  misc_feature (63)..(511): Homolog of NCBI NO: 15128395 NR Description: P0454H12.13 [Oryza sativa (japonica
PNNLGFQDSHSVIPRGAPPPARLNPNPLPPSPPARCPPAPRRDATPRRRRGARTGGGGGWIEMEARPRPSGVRRVTAKKRPRPDASSNSARKLQRREIAAFPERTFAASTTRERFRNIQLQEEFDTYDPKENSSLLPYLRKRSEIIEIVGARDIIFALSQLGVCAAFSRVTNQRICFLNGSPDEVIRSLFYNKNNDSLITVSVYGSENFSALRCRTTRIEYIRRGKPDAGFPLFETESLRWPGFVEFDDVNGKVLTYSAQDSTYKVFDLKNYTLLYTISDKDVQEIKISPGIMLLIYSRKKGYIPLEILSIEDGKRLKSFRHLLHRNKKIDFIEQFNEKLLVKQDGENLQILDVTNSKITEVSSNEFVTPSAFIFLYEMQLFLTFRNRSVSVWNFRGELVTSFEDHLLWHPDCNTNSIYITSNQDLIISYCKAEPDDPSSEDNACSINISDILTGKCMAKIKAGNLCKQKSSKFLCTPLEALGDITSLYYDEEREEIITGNHQGLIHVWSN

SEQ ID NO: 63850 - protein, 449 aa, Triticum aestivum
  peptide (1)..(449): Ceres Seq. ID no. 12465373
  misc_feature (161)..(200): Homolog of NCBI NO: 37535068 NR Description: hypothetical protein [Oryza sativa (japonica
  misc_feature (9)..(55): Homolog of NCBI NO: 37535068 NR Description: hypothetical protein [Oryza sativa (japonica
  misc_feature (3)..(449): Homolog of NCBI NO: 11281174 NR Description: hypothetical protein F24B22.150 - Arabidopsis
  misc_feature (3)..(449): Homolog of NCBI NO: 30687585 NR Description: expressed protein [Arabidopsis thaliana]
  misc_feature (3)..(449): Homolog of NCBI NO: 25344227 NR Description: hypothetical protein At2g38630 [imported] -
  misc_feature (3)..(449): Homolog of NCBI NO: 18410015 NR Description: putative protein
  misc_feature (1)..(449): Homolog of NCBI NO: 34909262 NR Description: B1148D12.19 [Oryza sativa (japonica
  misc_feature (1)..(449): Homolog of NCBI NO: 15128395 NR Description: P0454H12.13 [Oryza sativa (japonica
MEARPRPSGVRRVTAKKRPRPDASSNSARKLQRREIAAFPERTFAASTTRERFRNIQLQEEFDTYDPKENSSLLPYLRKRSEIIEIVGARDIIFALSQLGVCAAFSRVTNQRICFLNGSPDEVIRSLFYNKNNDSLITVSVYGSENFSALRCRTTRIEYIRRGKPDAGFPLFETESLRWPGFVEFDDVNGKVLTYSAQDSTYKVFDLKNYTLLYTISDKDVQEIKISPGIMLLIYSRKKGYIPLEILSIEDGKRLKSFRHLLHRNKKIDFIEQFNEKLLVKQDGENLQILDVTNSKITEVSSNEFVTPSAFIFLYEMQLFLTFRNRSVSVWNFRGELVTSFEDHLLWHPDCNTNSIYITSNQDLIISYCKAEPDDPSSEDNACSINISDILTGKCMAKIKAGNLCKQKSSKFLCTPLEALGDITSLYYDEEREEIITGNHQGLIHVWSN

SEQ ID NO: 63851 - DNA, 830 bp, Triticum aestivum
  misc_feature (1)..(830): Ceres Seq. ID no. 13597309
ccaaattagttagagctttctctcttctcttctcttctcttctcttctcttctcttctctgctctccactgtccaggaacagcaggagcaggaaaaagaaaaagaggaggaagaagatgtcgatcaagcactgcgacaagcacgactgcgagcggcggcggctgtaccgccagttctgcgccgccctggtggccgtcatcctgctcatcctgctcatcgtcctcatcgtctggctcgtgctccgccccaccaggccgcgcttctacctcaacggcctcaccgtggcgtgcctcaacgccacctcctccccggcgtcctacctcaccgtgacgctgcaagcgacgatcgccgcccgcaaccccaactcccgcgtcggcatctacttcgaccggatggacgcctacgccgagtacaaggggcagcaggtgaccgtccccaccgcgcttcccgtggtgtaccagggccacctcgacgtgtccgtgtggtcgccgttcctggtggggtcgaacgtgccgctggccccctacctggcggtggcgctggcgcaggacgagacggccggctacgtgctgctcacggtgcgggtggacggctggatcaggtggaaggccggggccttcatcaccgggcactaccacctccgggtcaggtgccccgccctgctcaccgtcaacggagggcagggcagctacggctccatcgccggcggcggcgggaacggctacttcaacttccagcgcgccgcgccatgcgttgtcgacgtctgaacccaaccgttctctgaaatccagagcccttttggttctgctgggccgtccctgaaactaatt

SEQ ID NO: 63852 - protein, 254 aa, Triticum aestivum
  peptide (1)..(254): Ceres Seq. ID no. 13597310
  misc_feature (57)..(221): Homolog of NCBI NO: 15233951 NR Description: harpin-induced protein 1 family (HIN1)
  misc_feature (57)..(223): Homolog of NCBI NO: 15227538 NR Description: harpin-induced protein 1 family (HIN1)
  misc_feature (45)..(254): Homolog of NCBI NO: 38344036 NR Description: OJ991214_12.17 [Oryza sativa (japonica
  misc_feature (39)..(235): Homolog of NCBI NO: 15240001 NR Description: harpin-induced protein, putative (HIN1)
  misc_feature (39)..(254): Homolog of NCBI NO: 22326984 NR Description: harpin-induced protein 1 family (HIN1)
  misc_feature (42)..(254): Homolog of NCBI NO: 15231227 NR Description: harpin-induced protein 1 family (HIN1)
  misc_feature (39)..(254): Homolog of NCBI NO: 15229906 NR Description: harpin-induced protein 1 family (HIN1)
  misc_feature (41)..(241): Homolog of NCBI NO: 28392929 NR Description: putative VAMP protein SEC22 [Arabidopsis thaliana]
  misc_feature (41)..(241): Homolog of NCBI NO: 18399308 NR Description: harpin-induced protein 1 family (HIN1)
  misc_feature (39)..(254): Homolog of NCBI NO: 38637038 NR Description: harpin-induced protein 1 family (HIN1)-like
KLVRAFSLLFSSLLFSSLLCSPLSRNSRSRKKKKRRKKMSIKHCDKHDCERRRLYRQFCAALVAVILLILLIVLIVWLVLRPTRPRFYLNGLTVACLNATSSPASYLTVTLQATIAARNPNSRVGIYFDRMDAYAEYKGQQVTVPTALPVVYQGHLDVSVWSPFLVGSNVPLAPYLAVALAQDETAGYVLLTVRVDGWIRWKAGAFITGHYHLRVRCPALLTVNGGQGSYGSIAGGGGNGYFNFQRAAPCVVDV

SEQ ID NO: 63853 - protein, 216 aa, Triticum aestivum
  peptide (1)..(216): Ceres Seq. ID no. 13597311
  misc_feature (19)..(183): Homolog of NCBI NO: 15233951 NR Description: harpin-induced protein 1 family (HIN1)
  misc_feature (19)..(185): Homolog of NCBI NO: 15227538 NR Description: harpin-induced protein 1 family (HIN1)
  misc_feature (7)..(216): Homolog of NCBI NO: 38344036 NR Description: OJ991214_12.17 [Oryza sativa (japonica
  misc_feature (1)..(197): Homolog of NCBI NO: 15240001 NR Description: harpin-induced protein, putative (HIN1)
  misc_feature (1)..(216): Homolog of NCBI NO: 22326984 NR Description: harpin-induced protein 1 family (HIN1)
  misc_feature (4)..(216): Homolog of NCBI NO: 15231227 NR Description: harpin-induced protein 1 family (HIN1)
  misc_feature (1)..(216): Homolog of NCBI NO: 15229906 NR Description: harpin-induced protein 1 family (HIN1)
  misc_feature (3)..(203): Homolog of NCBI NO: 28392929 NR Description: putative VAMP protein SEC22 [Arabidopsis thaliana]
  misc_feature (3)..(203): Homolog of NCBI NO: 18399308 NR Description: harpin-induced protein 1 family (HIN1)
  misc_feature (1)..(216): Homolog of NCBI NO: 38637038 NR Description: harpin-induced protein 1 family (HIN1)-like
MSIKHCDKHDCERRRLYRQFCAALVAVILLILLIVLIVWLVLRPTRPRFYLNGLTVACLNATSSPASYLTVTLQATIAARNPNSRVGIYFDRMDAYAEYKGQQVTVPTALPVVYQGHLDVSVWSPFLVGSNVPLAPYLAVALAQDETAGYVLLTVRVDGWIRWKAGAFITGHYHLRVRCPALLTVNGGQGSYGSIAGGGGNGYFNFQRAAPCVVDV

SEQ ID NO: 63854 - DNA, 547 bp, Triticum aestivum
  misc_feature (1)..(547): Ceres Seq. ID no. 13597312
tcgttcgtttcagatcagatccagcgagagagagagacagagaaatccccaatccaccaaaccctaacccacacccactaggagagatcggcgagagagatcaggcgatggccgttgagaagatgcagtttgccatgccgatggccaccggcttcgagggatttccctacatcccgttccaggcggagaaggagcaggcgcaggcgttcgtcagggccagggcggagccggaggaggaggcggcgctcgtcatggtcaggacgaagccagaggcggcgatccgcaatgccaagtccaaggcgtccctgaaggccaaggccaaggcagagaaggaggcggaggtcctcaaggccaaggcggagaaggaagcggcgatcctcaaggccaaggcggaggcagagaaggaggaagcgatcaaggccaaggccaaggcggcgaaggaggagacgatcatcaaggccaactgctgctgcggctcggacgaggacgatgtgccgtacgacaagctgtgccacgactccgactcggaggaagacccggatataat

SEQ ID NO: 63855 - protein, 181 aa, Triticum aestivum
  peptide (1)..(181): Ceres Seq. ID no. 13597313
  misc_feature (31)..(169): Pfam Name: Caldesmon Pfam Description: Caldesmon
VRFRSDPARERDREIPNPPNPNPHPLGEIGERDQAMAVEKMQFAMPMATGFEGFPYIPFQAEKEQAQAFVRARAEPEEEAALVMVRTKPEAAIRNAKSKASLKAKAKAEKEAEVLKAKAEKEAAILKAKAEAEKEEAIKAKAKAAKEETIIKANCCCGSDEDDVPYDKLCHDSDSEEDPDI

SEQ ID NO: 63856 - protein, 146 aa, Triticum aestivum
  peptide (1)..(146): Ceres Seq. ID no. 13597314
  misc_feature (1)..(134): Pfam Name: Caldesmon Pfam Description: Caldesmon
MAVEKMQFAMPMATGFEGFPYIPFQAEKEQAQAFVRARAEPEEEAALVMVRTKPEAAIRNAKSKASLKAKAKAEKEAEVLKAKAEKEAAILKAKAEAEKEEAIKAKAKAAKEETIIKANCCCGSDEDDVPYDKLCHDSDSEEDPDI

SEQ ID NO: 63857 - protein, 141 aa, Triticum aestivum
  peptide (1)..(141): Ceres Seq. ID no. 13597315
  misc_feature (1)..(129): Pfam Name: Caldesmon Pfam Description: Caldesmon
MQFAMPMATGFEGFPYIPFQAEKEQAQAFVRARAEPEEEAALVMVRTKPEAAIRNAKSKASLKAKAKAEKEAEVLKAKAEKEAAILKAKAEAEKEEAIKAKAKAAKEETIIKANCCCGSDEDDVPYDKLCHDSDSEEDPDI

SEQ ID NO: 63858 - DNA, 1500 bp, Triticum aestivum
  misc_feature (1)..(1500): Ceres Seq. ID no. 13597254
atatatattaatactggcagccgctgccagtgctccgagctcgacgccatcgcgatctccctccagtctcccctccgcccatcacccgtcgccgtcgcagccccgcccctaaaatactcccgcgcccctcctagccgccacccgccatccgtcccccgaaaatctcccagcgcagccgaactgaggtcacccgccctccccctcggccgatttactcctcggcttccctcccctgtttgaggcaatggcggcggcggagaacggcgggggcggggagagcaaggcggcgttcgcgcggatctacgacgcgctcaaggcggagctgctccgggaccccgccttcgagtacacggagtcgtcgcacgagtggatcgaccgcatgctggactacaatgtactgggaggaaagtgcaaccgtgggctctccgtggtcgatagctataagctgttgaaaggtgtcgatgttcttagtgaggaggagatgtttcttgcctccactctcggttggtgcattgaatggctccaagccttctttcttgtgcttgatgatatcatggacgactcccacactcgacgtgggcagccttgttggtttagggtgtctcgggttggcttgattgctgtaaatgatgggattctccttcgcaaccatatttcgagaatgcttcggctccactttaagaagaagccttactatgccgatctccttgatttattcaacgaggttgagttcaagacagcttctggtcaaatgctggatcttattacaacccacgagggagaaaaagatctaacaaaatataacattggagtccaccgccgaattgttcaattcaagacagcctactattcattttatctgccggttgcatgtgcgctgctactctctggtgagagtttggagaactacggtgctgtagagaacatacttgtcgagatgggaacttacttccaagttcaggatgattatctagactgttatggtgatcctgaatttattggcaagattggcaccgacattgaagattacaagtgctcctggctagttgtccaagctcttgagcgtgctgatgagagccaaaagagcattctatttgaaaactatggaaagaaagatccagcatgcgtggcaaaagtgaaggatctctacaaagaacttgaccttgaggcggtatttcatgagtacgagagcgagagctacaagaagctgattgctggtatcgaagcccagccgagcgacgctgttcagaaggttctgaagtccttcttgcacaagatctacaagaggcagaagtagggtgtctcttgggcaggaaatctgctccattgtcgcatgtttgatagatgactagtggtgttgattttatggtttagtgcttcatgttgtatgttgcgccttgctgctcccagtagtaataatgatgcaaggcgctatttcgggtttaatggaccgccttggtgtagacgactgatggttctgtaatttgcaccttgcccttt

SEQ ID NO: 63859 - protein, 350 aa, Triticum aestivum
  peptide (1)..(350): Ceres Seq. ID no. 15222057
  misc_feature (42)..(313): Pfam Name: Polyprenyl synthetase Pfam Description: Polyprenyl synthetase
  misc_feature (13)..(350): Homolog of NCBI NO: 1346030 NR Description: FARNESYL PYROPHOSPHATE SYNTHETASE (FPP
  misc_feature (13)..(350): Homolog of NCBI NO: 20135548 NR Description: farnesyl pyrophosphate synthase [Malus x
  misc_feature (13)..(350): Homolog of NCBI NO: 4324960 NR Description: farnesyl diphosphate synthase [Artemisia annua]
  misc_feature (13)..(350): Homolog of NCBI NO: 1346028 NR Description: Farnesyl pyrophosphate synthetase 1 (FPP
  misc_feature (13)..(350): Homolog of NCBI NO: 7433992 NR Description: farnesyl-pyrophosphate synthetase - Para rubber
  misc_feature (8)..(350): Homolog of NCBI NO: 18958450 NR Description: farnesyl pyrophosphare synthase [Musa acuminata]
  misc_feature (1)..(47): Homolog of NCBI NO: 25458583 NR Description: probable farnesyl pyrophosphate synthase
  misc_feature (54)..(350): Homolog of NCBI NO: 25458583 NR Description: probable farnesyl pyrophosphate synthase
  misc_feature (1)..(350): Homolog of NCBI NO: 34911542 NR Description: putative farnesyl-pyrophosphate synthetase
  misc_feature (1)..(350): Homolog of NCBI NO: 1346033 NR Description: Farnesyl pyrophosphate synthetase (FPP
MAAAENGGGGESKAAFARIYDALKAELLRDPAFEYTESSHEWIDRMLDYNVLGGKCNRGLSVVDSYKLLKGVDVLSEEEMFLASTLGWCIEWLQAFFLVLDDIMDDSHTRRGQPCWFRVSRVGLIAVNDGILLRNHISRMLRLHFKKKPYYADLLDLFNEVEFKTASGQMLDLITTHEGEKDLTKYNIGVHRRIVQFKTAYYSFYLPVACALLLSGESLENYGAVENILVEMGTYFQVQDDYLDCYGDPEFIGKIGTDIEDYKCSWLVVQALERADESQKSILFENYGKKDPACVAKVKDLYKELDLEAVFHEYESESYKKLIAGIEAQPSDAVQKVLKSFLHKIYKRQK

SEQ ID NO: 63860 - protein, 305 aa, Triticum aestivum
  peptide (1)..(305): Ceres Seq. ID no. 15222058
  misc_feature (1)..(268): Pfam Name: Polyprenyl synthetase Pfam Description: Polyprenyl synthetase
  misc_feature (1)..(305): Homolog of NCBI NO: 1346029 NR Description: Farnesyl pyrophosphate synthetase 2 (FPP
  misc_feature (1)..(305): Homolog of NCBI NO: 1346030 NR Description: FARNESYL PYROPHOSPHATE SYNTHETASE (FPP
  misc_feature (1)..(305): Homolog of NCBI NO: 20135548 NR Description: farnesyl pyrophosphate synthase [Malus x
  misc_feature (1)..(305): Homolog of NCBI NO: 4324960 NR Description: farnesyl diphosphate synthase [Artemisia annua]
  misc_feature (1)..(305): Homolog of NCBI NO: 1346028 NR Description: Farnesyl pyrophosphate synthetase 1 (FPP
  misc_feature (1)..(305): Homolog of NCBI NO: 7433992 NR Description: farnesyl-pyrophosphate synthetase - Para rubber
  misc_feature (1)..(305): Homolog of NCBI NO: 18958450 NR Description: farnesyl pyrophosphare synthase [Musa acuminata]
  misc_feature (9)..(305): Homolog of NCBI NO: 25458583 NR Description: probable farnesyl pyrophosphate synthase
  misc_feature (1)..(305): Homolog of NCBI NO: 34911542 NR Description: putative farnesyl-pyrophosphate synthetase
  misc_feature (1)..(305): Homolog of NCBI NO: 1346033 NR Description: Farnesyl pyrophosphate synthetase (FPP
MLDYNVLGGKCNRGLSVVDSYKLLKGVDVLSEEEMFLASTLGWCIEWLQAFFLVLDDIMDDSHTRRGQPCWFRVSRVGLIAVNDGILLRNHISRMLRLHFKKKPYYADLLDLFNEVEFKTASGQMLDLITTHEGEKDLTKYNIGVHRRIVQFKTAYYSFYLPVACALLLSGESLENYGAVENILVEMGTYFQVQDDYLDCYGDPEFIGKIGTDIEDYKCSWLVVQALERADESQKSILFENYGKKDPACVAKVKDLYKELDLEAVFHEYESESYKKLIAGIEAQPSDAVQKVLKSFLHKIYKRQK

SEQ ID NO: 63861 - protein, 271 aa, Triticum aestivum
  peptide (1)..(271): Ceres Seq. ID no. 15222059
  misc_feature (1)..(234): Pfam Name: Polyprenyl synthetase Pfam Description: Polyprenyl synthetase
  misc_feature (1)..(271): Homolog of NCBI NO: 1346029 NR Description: Farnesyl pyrophosphate synthetase 2 (FPP
  misc_feature (1)..(271): Homolog of NCBI NO: 1346030 NR Description: FARNESYL PYROPHOSPHATE SYNTHETASE (FPP
  misc_feature (1)..(271): Homolog of NCBI NO: 20135548 NR Description: farnesyl pyrophosphate synthase [Malus x
  misc_feature (1)..(271): Homolog of NCBI NO: 4324960 NR Description: farnesyl diphosphate synthase [Artemisia annua]
  misc_feature (1)..(271): Homolog of NCBI NO: 1346028 NR Description: Farnesyl pyrophosphate synthetase 1 (FPP
  misc_feature (1)..(271): Homolog of NCBI NO: 7433992 NR Description: farnesyl-pyrophosphate synthetase - Para rubber
  misc_feature (1)..(271): Homolog of NCBI NO: 18958450 NR Description: farnesyl pyrophosphare synthase [Musa acuminata]
  misc_feature (1)..(271): Homolog of NCBI NO: 25458583 NR Description: probable farnesyl pyrophosphate synthase
  misc_feature (1)..(271): Homolog of NCBI NO: 34911542 NR Description: putative farnesyl-pyrophosphate synthetase
  misc_feature (1)..(271): Homolog of NCBI NO: 1346033 NR Description: Farnesyl pyrophosphate synthetase (FPP
MFLASTLGWCIEWLQAFFLVLDDIMDDSHTRRGQPCWFRVSRVGLIAVNDGILLRNHISRMLRLHFKKKPYYADLLDLFNEVEFKTASGQMLDLITTHEGEKDLTKYNIGVHRRIVQFKTAYYSFYLPVACALLLSGESLENYGAVENILVEMGTYFQVQDDYLDCYGDPEFIGKIGTDIEDYKCSWLVVQALERADESQKSILFENYGKKDPACVAKVKDLYKELDLEAVFHEYESESYKKLIAGIEAQPSDAVQKVLKSFLHKIYKRQK

SEQ ID NO: 63862 - DNA, 1571 bp, Triticum aestivum
  misc_feature (1)..(1571): Ceres Seq. ID no. 13598488
caccctaatcgaaaaaacttttgcttcgccgtggaagggatcgtcgtagctggcttagcttgctgctttgcttccaagtgttgctgctggtggtgctgtggtagtgtggtgtgaggtgtgatggagctgcaggggctggggaggtactggggcgtgggcggcaggaggtgcgggtcgtgccgggggtcgccggcggcggtgcactgccggacgtgcgatgggggcagtggggacggggcgtacctgtgcgcgggctgtggcgaggggcacgcgcgggcggggcacgagagggtgtgggtctgcgaggtgtgcgagctcgcgccggccgcggtcacctgcaaggccgacgccgccgcgctctgcgccgcctgcgacgccgacatccaccacgccaacccgctcgcgcgccgccacgagcgcgtccccgtgcagcccatcgggtcctcgtcacccgaggggcaggagcaggagcaggatgcgttcgtgatgtcgttcggcggctcggtcgacggggagaagcagcagaaccccgtggtgaacctgaacgacgctctggaggccggcgccggcgggaaggagaacgtgaagctggacttcctgttcgcggacatgatggaccctttcttcggctccgagctcccgcgcttcccgcacgccgacagcgttgtccccagcggcggcgcggtggagctggacttcggtggcgtcgccgcccccgtcgtcgtctccaacccgtcctacagctcctacacggcggcgtcgctcggtggaagtggctcgtcgtcggaggtcggcttggtgccggacgcgatctgtggccgaggcggcggcatcatcgagctggacttcgcacagtccaaggccgcgtacctgccctacacccccacaccaagccacagtaccgtctcctcggtggatgttgggtcggtgccggagcggagcgacagcgccgtcgcggcggcgacgccggcgacgggggaggggagggaggcgcgtctgatgcggtaccgcgagaagcgcaagaaccggcggttcgagaagaccatccggtacgcgtcccggaaggcctacgccgagagcaggccgcgcgtcaagggccgcttcgccaagcgcgccgacgacgcggacaccgacgccgtcgcggcggccacgatcaccacgccggggccatgcgtgctcgacttcggcagctacggcgtcgtgcccaccttctgaggcggcgcctgatttcgtgtccatttcctccggcgagcgtgccggctgggtgcctaattaaatccggcaccgccatggccggcacgagcgcgccgacgtgcatgcgtcgtgttccctcttgtataattgcatgtaatgtttttcgagctggctgatcgctggctggcgtgtagtatactgtaatcaacatgcacgcacgcacgcacgcatgttttgctagaactagaataatacagatagttctagttgactagtctactaccctgtaccctttccctgggctagcttgatgccaaattaggctagggcaatgtaacgtgtttgctggaacagcttagttctagttttggatccgc

SEQ ID NO: 63863 - protein, 364 aa, Triticum aestivum
  peptide (1)..(364): Ceres Seq. ID no. 13598489
  misc_feature (56)..(103): Pfam Name: B-box zinc finger Pfam Description: B-box zinc finger
  misc_feature (15)..(129): Homolog of NCBI NO: 15224620 NR Description: CONSTANS B-box zinc finger family protein
  misc_feature (240)..(364): Homolog of NCBI NO: 21594050 NR Description: CONSTANS-like B-box zinc finger protein-like
  misc_feature (1)..(178): Homolog of NCBI NO: 21594050 NR Description: CONSTANS-like B-box zinc finger protein-like
  misc_feature (240)..(364): Homolog of NCBI NO: 18424009 NR Description: CONSTANS B-box zinc finger family protein
  misc_feature (1)..(178): Homolog of NCBI NO: 18424009 NR Description: CONSTANS B-box zinc finger family protein
  misc_feature (240)..(364): Homolog of NCBI NO: 17433047 NR Description: Zinc finger protein constans-like 15
  misc_feature (1)..(178): Homolog of NCBI NO: 17433047 NR Description: Zinc finger protein constans-like 15
  misc_feature (23)..(338): Homolog of NCBI NO: 21655160 NR Description: CONSTANS-like protein CO6 [Hordeum vulgare subsp.
  misc_feature (1)..(338): Homolog of NCBI NO: 21655158 NR Description: CONSTANS-like protein CO6 [Hordeum vulgare subsp.
  misc_feature (124)..(364): Homolog of NCBI NO: 21655164 NR Description: CONSTANS-like protein CO7 [Hordeum vulgare subsp.
MELQGLGRYWGVGGRRCGSCRGSPAAVHCRTCDGGSGDGAYLCAGCGEGHARAGHERVWVCEVCELAPAAVTCKADAAALCAACDADIHHANPLARRHERVPVQPIGSSSPEGQEQEQDAFVMSFGGSVDGEKQQNPVVNLNDALEAGAGGKENVKLDFLFADMMDPFFGSELPRFPHADSVVPSGGAVELDFGGVAAPVVVSNPSYSSYTAASLGGSGSSSEVGLVPDAICGRGGGIIELDFAQSKAAYLPYTPTPSHSTVSSVDVGSVPERSDSAVAAATPATGEGREARLMRYREKRKNRRFEKTIRYASRKAYAESRPRVKGRFAKRADDADTDAVAAATITTPGPCVLDFGSYGVVPTF

SEQ ID NO: 63864 - protein, 242 aa, Triticum aestivum
  peptide (1)..(242): Ceres Seq. ID no. 13598490
  misc_feature (172)..(211): Pfam Name: CCT motif Pfam Description: CCT motif
  misc_feature (137)..(242): Homolog of NCBI NO: 15224620 NR Description: CONSTANS B-box zinc finger family protein
  misc_feature (118)..(242): Homolog of NCBI NO: 21594050 NR Description: CONSTANS-like B-box zinc finger protein-like
  misc_feature (1)..(56): Homolog of NCBI NO: 21594050 NR Description: CONSTANS-like B-box zinc finger protein-like
  misc_feature (118)..(242): Homolog of NCBI NO: 18424009 NR Description: CONSTANS B-box zinc finger family protein
  misc_feature (1)..(56): Homolog of NCBI NO: 18424009 NR Description: CONSTANS B-box zinc finger family protein
  misc_feature (118)..(242): Homolog of NCBI NO: 17433047 NR Description: Zinc finger protein constans-like 15
  misc_feature (1)..(56): Homolog of NCBI NO: 17433047 NR Description: Zinc finger protein constans-like 15
  misc_feature (1)..(216): Homolog of NCBI NO: 21655160 NR Description: CONSTANS-like protein CO6 [Hordeum vulgare subsp.
  misc_feature (1)..(216): Homolog of NCBI NO: 21655158 NR Description: CONSTANS-like protein CO6 [Hordeum vulgare subsp.
  misc_feature (2)..(242): Homolog of NCBI NO: 21655164 NR Description: CONSTANS-like protein CO7 [Hordeum vulgare subsp.
MSFGGSVDGEKQQNPVVNLNDALEAGAGGKENVKLDFLFADMMDPFFGSELPRFPHADSVVPSGGAVELDFGGVAAPVVVSNPSYSSYTAASLGGSGSSSEVGLVPDAICGRGGGIIELDFAQSKAAYLPYTPTPSHSTVSSVDVGSVPERSDSAVAAATPATGEGREARLMRYREKRKNRRFEKTIRYASRKAYAESRPRVKGRFAKRADDADTDAVAAATITTPGPCVLDFGSYGVVPTF

SEQ ID NO: 63865 - protein, 201 aa, Triticum aestivum
  peptide (1)..(201): Ceres Seq. ID no. 13598491
  misc_feature (131)..(170): Pfam Name: CCT motif Pfam Description: CCT motif
  misc_feature (96)..(201): Homolog of NCBI NO: 15224620 NR Description: CONSTANS B-box zinc finger family protein
  misc_feature (77)..(201): Homolog of NCBI NO: 21594050 NR Description: CONSTANS-like B-box zinc finger protein-like
  misc_feature (1)..(15): Homolog of NCBI NO: 21594050 NR Description: CONSTANS-like B-box zinc finger protein-like
  misc_feature (77)..(201): Homolog of NCBI NO: 18424009 NR Description: CONSTANS B-box zinc finger family protein
  misc_feature (1)..(15): Homolog of NCBI NO: 18424009 NR Description: CONSTANS B-box zinc finger family protein
  misc_feature (77)..(201): Homolog of NCBI NO: 17433047 NR Description: Zinc finger protein constans-like 15
  misc_feature (1)..(15): Homolog of NCBI NO: 17433047 NR Description: Zinc finger protein constans-like 15
  misc_feature (1)..(175): Homolog of NCBI NO: 21655160 NR Description: CONSTANS-like protein CO6 [Hordeum vulgare subsp.
  misc_feature (1)..(175): Homolog of NCBI NO: 21655158 NR Description: CONSTANS-like protein CO6 [Hordeum vulgare subsp.
  misc_feature (1)..(201): Homolog of NCBI NO: 21655164 NR Description: CONSTANS-like protein CO7 [Hordeum vulgare subsp.
MMDPFFGSELPRFPHADSVVPSGGAVELDFGGVAAPVVVSNPSYSSYTAASLGGSGSSSEVGLVPDAICGRGGGIIELDFAQSKAAYLPYTPTPSHSTVSSVDVGSVPERSDSAVAAATPATGEGREARLMRYREKRKNRRFEKTIRYASRKAYAESRPRVKGRFAKRADDADTDAVAAATITTPGPCVLDFGSYGVVPTF

SEQ ID NO: 63866 - DNA, 1413 bp, Triticum aestivum
  misc_feature (1)..(1413): Ceres Seq. ID no. 13655684
acccgcgacgaattccgcaaggagagaacgcgaaatatagatccgccgtgaaggcccaacggcggctcaccgaaacccggggccgccgccggcgctcgcacccgaagcccccactccgcacgggcagtccaggcagagatggtggcgatctcgatgtaccgcggcaacctccaccggggcggggacgacgccgcgcgccgctggccggtgcccccacccacgctctccgcgtcccagttccgccgcctcctccaccgccggtccctcgccgtctcccgcctcgccggggctccccggcccaactcccccaactcccgcccggacgacggcgccgcggggcccgtggccgtgggggaggcgccggaggtggacgggggtcagcagcagcatcaggccgagcggcaggaggaggaggggcatgatgtgcagatgcagcagcagcagcagcagggggaggaagaggggcagggtgtgcaggatcaacagggggagggagatggccaagacgagcagcagcaaggagatgaggaggagcaggaggagggggcggtggaggatgtggaaatggacgatgcggnggaggtggtcgccggagatgctgatgccggcggcaatggtgaccctgaagaagggcaaggcgaaagcgaaggcttcgaccccaactcggaggtgggtcaacctgatggagttgaagaaaggaagagagagttgactgacaagctggataccttaagtaagaaaaagcatgatcttgtgcagatgctgaagcagattttaaatgccgaagaagaaatcagaacacgtagcatgcaggtttcgctgcgtgctgccatgcctcagccgccagaaaacacagctgatggaagtgttcctagacaggtgccgagaatgaccgttgatgtcaatttcagcgagtttgctggggagtcagatgctggttccaaccagggcactcctgggcgccccttgcatcatgtccacagtatttctccttcaacagcctcctttgctaggtctccattcggttctcgcaaccacaaacctcgcaacactccaagaagtccagcacctttctttacagcaagcccgtctcgcttcgcaggtaccgggcatcaaggacaccacccctcggcatcattaccagcaggcaactttgtagcatcgtcgccttcccctgctgcatccggtggctcttcctctgtattcagggactatcgcccgcccagttcaacataattccacaaaacccgaatgaaggccaatgtacatgagtcaccctgaatagtttgaatgctctttgtgctcctccttgcattgttactttattgacaatattatcagattgcgaagagcaactcagggagaacaaggtcatgttgaagtatcattttgtatatctgngccagtgctgct

SEQ ID NO: 63867 - protein, 365 aa, Triticum aestivum
  peptide (1)..(365): Ceres Seq. ID no. 13655685
  misc_feature (64)..(136): Pfam Name: Cupin Pfam Description: Cupin
  misc_feature (72)..(190): Homolog of NCBI NO: 9837381 NR Description: retinitis pigmentosa GTPase regulator [Mus
  misc_feature (72)..(190): Homolog of NCBI NO: 9837379 NR Description: retinitis pigmentosa GTPase regulator [Homo
  misc_feature (60)..(218): Homolog of NCBI NO: 9837383 NR Description: retinitis pigmentosa GTPase regulator [Bos taurus]
  misc_feature (73)..(186): Homolog of NCBI NO: 9837379 NR Description: retinitis pigmentosa GTPase regulator [Homo
  misc_feature (72)..(190): Homolog of NCBI NO: 9837379 NR Description: retinitis pigmentosa GTPase regulator [Homo
  misc_feature (62)..(190): Homolog of NCBI NO: 9837379 NR Description: retinitis pigmentosa GTPase regulator [Homo
  misc_feature (1)..(155): Homolog of NCBI NO: 21592503 NR Description: unknown [Arabidopsis thaliana]
  misc_feature (181)..(360): Homolog of NCBI NO: 21592503 NR Description: unknown [Arabidopsis thaliana]
  misc_feature (1)..(155): Homolog of NCBI NO: 15228266 NR Description: expressed protein [Arabidopsis thaliana]
  misc_feature (181)..(360): Homolog of NCBI NO: 15228266 NR Description: expressed protein [Arabidopsis thaliana]
  misc_feature (147)..(147): Xaa is any aa, unknown or other
MVAISMYRGNLHRGGDDAARRWPVPPPTLSASQFRRLLHRRSLAVSRLAGAPRPNSPNSRPDDGAAGPVAVGEAPEVDGGQQQHQAERQEEEGHDVQMQQQQQQGEEEGQGVQDQQGEGDGQDEQQQGDEEEQEEGAVEDVEMDDAXEVVAGDADAGGNGDPEEGQGESEGFDPNSEVGQPDGVEERKRELTDKLDTLSKKKHDLVQMLKQILNAEEEIRTRSMQVSLRAAMPQPPENTADGSVPRQVPRMTVDVNFSEFAGESDAGSNQGTPGRPLHHVHSISPSTASFARSPFGSRNHKPRNTPRSPAPFFTASPSRFAGTGHQGHHPSASLPAGNFVASSPSPAASGGSSSVFRDYRPPSST

SEQ ID NO: 63868 - protein, 360 aa, Triticum aestivum
  peptide (1)..(360): Ceres Seq. ID no. 13655686
  misc_feature (59)..(131): Pfam Name: Cupin Pfam Description: Cupin
  misc_feature (67)..(185): Homolog of NCBI NO: 9837381 NR Description: retinitis pigmentosa GTPase regulator [Mus
  misc_feature (67)..(185): Homolog of NCBI NO: 9837379 NR Description: retinitis pigmentosa GTPase regulator [Homo
  misc_feature (55)..(213): Homolog of NCBI NO: 9837383 NR Description: retinitis pigmentosa GTPase regulator [Bos taurus]
  misc_feature (68)..(181): Homolog of NCBI NO: 9837379 NR Description: retinitis pigmentosa GTPase regulator [Homo
  misc_feature (67)..(185): Homolog of NCBI NO: 9837379 NR Description: retinitis pigmentosa GTPase regulator [Homo
  misc_feature (57)..(185): Homolog of NCBI NO: 9837379 NR Description: retinitis pigmentosa GTPase regulator [Homo
  misc_feature (1)..(150): Homolog of NCBI NO: 21592503 NR Description: unknown [Arabidopsis thaliana]
  misc_feature (176)..(355): Homolog of NCBI NO: 21592503 NR Description: unknown [Arabidopsis thaliana]
  misc_feature (1)..(150): Homolog of NCBI NO: 15228266 NR Description: expressed protein [Arabidopsis thaliana]
  misc_feature (176)..(355): Homolog of NCBI NO: 15228266 NR Description: expressed protein [Arabidopsis thaliana]
  misc_feature (142)..(142): Xaa is any aa, unknown or other
MYRGNLHRGGDDAARRWPVPPPTLSASQFRRLLHRRSLAVSRLAGAPRPNSPNSRPDDGAAGPVAVGEAPEVDGGQQQHQAERQEEEGHDVQMQQQQQQGEEEGQGVQDQQGEGDGQDEQQQGDEEEQEEGAVEDVEMDDAXEVVAGDADAGGNGDPEEGQGESEGFDPNSEVGQPDGVEERKRELTDKLDTLSKKKHDLVQMLKQILNAEEEIRTRSMQVSLRAAMPQPPENTADGSVPRQVPRMTVDVNFSEFAGESDAGSNQGTPGRPLHHVHSISPSTASFARSPFGSRNHKPRNTPRSPAPFFTASPSRFAGTGHQGHHPSASLPAGNFVASSPSPAASGGSSSVFRDYRPPSST

SEQ ID NO: 63869 - protein, 268 aa, Triticum aestivum
  peptide (1)..(268): Ceres Seq. ID no. 13655687
  misc_feature (1)..(93): Homolog of NCBI NO: 9837381 NR Description: retinitis pigmentosa GTPase regulator [Mus
  misc_feature (1)..(93): Homolog of NCBI NO: 9837379 NR Description: retinitis pigmentosa GTPase regulator [Homo
  misc_feature (1)..(121): Homolog of NCBI NO: 9837383 NR Description: retinitis pigmentosa GTPase regulator [Bos taurus]
  misc_feature (1)..(89): Homolog of NCBI NO: 9837379 NR Description: retinitis pigmentosa GTPase regulator [Homo
  misc_feature (1)..(93): Homolog of NCBI NO: 9837379 NR Description: retinitis pigmentosa GTPase regulator [Homo
  misc_feature (1)..(93): Homolog of NCBI NO: 9837379 NR Description: retinitis pigmentosa GTPase regulator [Homo
  misc_feature (1)..(58): Homolog of NCBI NO: 21592503 NR Description: unknown [Arabidopsis thaliana]
  misc_feature (84)..(263): Homolog of NCBI NO: 21592503 NR Description: unknown [Arabidopsis thaliana]
  misc_feature (1)..(58): Homolog of NCBI NO: 15228266 NR Description: expressed protein [Arabidopsis thaliana]
  misc_feature (84)..(263): Homolog of NCBI NO: 15228266 NR Description: expressed protein [Arabidopsis thaliana]
  misc_feature (50)..(50): Xaa is any aa, unknown or other
MQQQQQQGEEEGQGVQDQQGEGDGQDEQQQGDEEEQEEGAVEDVEMDDAXEVVAGDADAGGNGDPEEGQGESEGFDPNSEVGQPDGVEERKRELTDKLDTLSKKKHDLVQMLKQILNAEEEIRTRSMQVSLRAAMPQPPENTADGSVPRQVPRMTVDVNFSEFAGESDAGSNQGTPGRPLHHVHSISPSTASFARSPFGSRNHKPRNTPRSPAPFFTASPSRFAGTGHQGHHPSASLPAGNFVASSPSPAASGGSSSVFRDYRPPSST

SEQ ID NO: 63870 - DNA, 1208 bp, Triticum aestivum
  misc_feature (1)..(1208): Ceres Seq. ID no. 13597245
tcgcatccctagctacaaacaactcccttgcatttggagaccgacctattgctatctgtcacagtagtagtacaacaagcgccaccggtaagatggaattccaggggcagcagggcaaccgcgtggaccagcacggcaacccggtcgccgccgcacctggagccaccgccgtgacgggggcgcccgccggcgggcagctgcagcccggcagggaggagcacaagacccgcggcatactccaccggtccagcagctccagctccagctcgtccgaggacgatggcatgggtggacggaggaagaagggcatcaaggagaagatcaaggataagcttcccggggctcgcaagcagacttacggccagcccgccgcgcccgcgggcatgaccggcaccggggcgaccggcggcccttactacgtgcagcccgctccggctggcaccggagcgcacgggaccacggcgacgaccggcacctacgggcagcccgctccggctggcatgaccggcaccggggcgcacgggaccacggcgactggtgagaagaagggcatgaaggacaagatcatggagaaactcccgggaggtcacaagaacgagcagcacaccatgcccaccgccggcgcctacggacagcccgggatgactggcaccggagtgcatgggaacaccgctcccggtgggggctatggtggtcagccagggcacgctggtatgatcggcactggaacgcatgggagcgggacaacgggcggtccttacgatcatcaagggcaccccggagtgaccggcaccggagcacacgggaccacggcgaccggcggtgcttacaaccagcaaggtcacgctggggtgacaggcaccggcgagaagaaaggtattatgggcaagatcaaggaaaagctgcctggccagcactaggcgccagtcagcgtgtttgtgaacaataggtacgagcggaggtggagcaataagcctataagtggctcacgtttgtgtgtagcgttggagtagttggtatgctgcagtactgtactgtgacgtagtgcggatgacacgtggagtcaggtgctagagtccacacgacagcgatcgtatcgtactgcagaagatctcaaccctatgtcgatgtatgagcatgttgtaagttgtaaccgttgtgtgaagtttcactatgttaaatattactttgtgtgcgcacaataatgg

SEQ ID NO: 63871 - protein, 305 aa, Triticum aestivum
  peptide (1)..(305): Ceres Seq. ID no. 13597246
  misc_feature (31)..(178): Pfam Name: Dehydrin Pfam Description: Dehydrin
  misc_feature (31)..(196): Homolog of NCBI NO: 6017932 NR Description: dehydrin; DHN3 [Hordeum vulgare]
  misc_feature (31)..(230): Homolog of NCBI NO: 118489 NR Description: DEHYDRIN DHN4 (B18)
  misc_feature (52)..(288): Homolog of NCBI NO: 1169099 NR Description: COLD-SHOCK PROTEIN CS120
  misc_feature (31)..(196): Homolog of NCBI NO: 4105113 NR Description: dehydrin 7 [Hordeum vulgare]
  misc_feature (31)..(257): Homolog of NCBI NO: 4105109 NR Description: dehydrin 4 [Hordeum vulgare]
  misc_feature (30)..(305): Homolog of NCBI NO: 7489666 NR Description: COR39 protein - wheat
  misc_feature (31)..(288): Homolog of NCBI NO: 4105119 NR Description: dehydrin 10 [Hordeum vulgare]
  misc_feature (31)..(288): Homolog of NCBI NO: 6017946 NR Description: dehydrin; DHN10 [Hordeum vulgare]
  misc_feature (119)..(305): Homolog of NCBI NO: 4105119 NR Description: dehydrin 10 [Hordeum vulgare]
  misc_feature (119)..(305): Homolog of NCBI NO: 6017946 NR Description: dehydrin; DHN10 [Hordeum vulgare]
ASLATNNSLAFGDRPIAICHSSSTTSATGKMEFQGQQGNRVDQHGNPVAAAPGATAVTGAPAGGQLQPGREEHKTRGILHRSSSSSSSSSEDDGMGGRRKKGIKEKIKDKLPGARKQTYGQPAAPAGMTGTGATGGPYYVQPAPAGTGAHGTTATTGTYGQPAPAGMTGTGAHGTTATGEKKGMKDKIMEKLPGGHKNEQHTMPTAGAYGQPGMTGTGVHGNTAPGGGYGGQPGHAGMIGTGTHGSGTTGGPYDHQGHPGVTGTGAHGTTATGGAYNQQGHAGVTGTGEKKGIMGKIKEKLPGQH

SEQ ID NO: 63872 - protein, 275 aa, Triticum aestivum
  peptide (1)..(275): Ceres Seq. ID no. 13597247
  misc_feature (1)..(148): Pfam Name: Dehydrin Pfam Description: Dehydrin
  misc_feature (1)..(166): Homolog of NCBI NO: 6017932 NR Description: dehydrin; DHN3 [Hordeum vulgare]
  misc_feature (1)..(200): Homolog of NCBI NO: 118489 NR Description: DEHYDRIN DHN4 (B18)
  misc_feature (22)..(258): Homolog of NCBI NO: 1169099 NR Description: COLD-SHOCK PROTEIN CS120
  misc_feature (1)..(166): Homolog of NCBI NO: 4105113 NR Description: dehydrin 7 [Hordeum vulgare]
  misc_feature (1)..(227): Homolog of NCBI NO: 4105109 NR Description: dehydrin 4 [Hordeum vulgare]
  misc_feature (1)..(275): Homolog of NCBI NO: 7489666 NR Description: COR39 protein - wheat
  misc_feature (1)..(258): Homolog of NCBI NO: 4105119 NR Description: dehydrin 10 [Hordeum vulgare]
  misc_feature (1)..(258): Homolog of NCBI NO: 6017946 NR Description: dehydrin; DHN10 [Hordeum vulgare]
  misc_feature (89)..(275): Homolog of NCBI NO: 4105119 NR Description: dehydrin 10 [Hordeum vulgare]
  misc_feature (89)..(275): Homolog of NCBI NO: 6017946 NR Description: dehydrin; DHN10 [Hordeum vulgare]
MEFQGQQGNRVDQHGNPVAAAPGATAVTGAPAGGQLQPGREEHKTRGILHRSSSSSSSSSEDDGMGGRRKKGIKEKIKDKLPGARKQTYGQPAAPAGMTGTGATGGPYYVQPAPAGTGAHGTTATTGTYGQPAPAGMTGTGAHGTTATGEKKGMKDKIMEKLPGGHKNEQHTMPTAGAYGQPGMTGTGVHGNTAPGGGYGGQPGHAGMIGTGTHGSGTTGGPYDHQGHPGVTGTGAHGTTATGGAYNQQGHAGVTGTGEKKGIMGKIKEKLPGQH

SEQ ID NO: 63873 - protein, 211 aa, Triticum aestivum
  peptide (1)..(211): Ceres Seq. ID no. 13597248
  misc_feature (1)..(84): Pfam Name: Dehydrin Pfam Description: Dehydrin
  misc_feature (1)..(102): Homolog of NCBI NO: 6017932 NR Description: dehydrin; DHN3 [Hordeum vulgare]
  misc_feature (1)..(136): Homolog of NCBI NO: 118489 NR Description: DEHYDRIN DHN4 (B18)
  misc_feature (1)..(194): Homolog of NCBI NO: 1169099 NR Description: COLD-SHOCK PROTEIN CS120
  misc_feature (1)..(102): Homolog of NCBI NO: 4105113 NR Description: dehydrin 7 [Hordeum vulgare]
  misc_feature (1)..(163): Homolog of NCBI NO: 4105109 NR Description: dehydrin 4 [Hordeum vulgare]
  misc_feature (1)..(211): Homolog of NCBI NO: 7489666 NR Description: COR39 protein - wheat
  misc_feature (1)..(194): Homolog of NCBI NO: 4105119 NR Description: dehydrin 10 [Hordeum vulgare]
  misc_feature (1)..(194): Homolog of NCBI NO: 6017946 NR Description: dehydrin; DHN10 [Hordeum vulgare]
  misc_feature (25)..(211): Homolog of NCBI NO: 4105119 NR Description: dehydrin 10 [Hordeum vulgare]
  misc_feature (25)..(211): Homolog of NCBI NO: 6017946 NR Description: dehydrin; DHN10 [Hordeum vulgare]
MGGRRKKGIKEKIKDKLPGARKQTYGQPAAPAGMTGTGATGGPYYVQPAPAGTGAHGTTATTGTYGQPAPAGMTGTGAHGTTATGEKKGMKDKIMEKLPGGHKNEQHTMPTAGAYGQPGMTGTGVHGNTAPGGGYGGQPGHAGMIGTGTHGSGTTGGPYDHQGHPGVTGTGAHGTTATGGAYNQQGHAGVTGTGEKKGIMGKIKEKLPGQH

SEQ ID NO: 63874 - DNA, 1244 bp, Triticum aestivum
  misc_feature (1)..(1244): Ceres Seq. ID no. 13597255
gggaagagaggagcggacagaaaagcctggaaagccaaaaaagaaatcaccaacgcaaaggggaaaggagagagaggcgaggcgaggctagggtttcgtccaattccgccatggattccggcgacgcgtggggccgctcctcctccacctcctccgccgccgccgccgccgcgaggcgcctgcagtcccgctacgatctgtacatggggttcgacgacgcggacgccggcggggacgaggtggaggcgcgcggggcggaggcatacaactgccccttttgcggcgaggactttgacttcgtcgggctctgctgccacatcgacgacgagcacgccgtcgaggccaagagcggggtatgccccatctgtgctacaagggttggggcggacttgataggccacctgacaatgcagcatggaagttacttcaagatgcaacgcaggcgcagagtccgaaaagtatcttctgggtcccattctttgctgtctttgttgagaaaggatttaagagacggcagtttgcagtcctttcttggtggatcatcctatgtatctaatcctcctgctgccgcccctgatccatttttgcaatctttaatttgtagtttgcctgtggctgaaccatcgaaagattttcgttcagagtcatctgacaaaacatttttgctaaataaattcccagatgaaaagatcgtagagagagctgaaacatctctgtctgataaggatcagaaggagcgggctcaaaggagtgcatttgcccgtgggcttgtgctttccacaatatttgatgatgataccatgtaagggaaatcgactttgagagtggttgcatgacatagtcaagggcactcaacacaagagaatttatctagagcaatgcaaccttgtcatgcagccactgccgctcacaggcgttaacgaccaaccggaggtccatccagttatgaatgtatatgtatttatgtatgccttgccgagagcgcatcatgagaatagtggaggaaggccttgtgttgcagctttccacatggaataaggggatactatccttagtggcattgtgcatatacaaaagaggggcgagctactcgtcatgtattagattatattctgttcatcaatgtaataagtgtgttgtaaactcatctcatccttagtatgtgagattgctttgatgttttctgtatatattcgattgtggtacatttgacatttgaggaaagggaatggagtgaatttaac

SEQ ID NO: 63875 - protein, 267 aa, Triticum aestivum
  peptide (1)..(267): Ceres Seq. ID no. 13597256
  misc_feature (50)..(261): Pfam Name: Drought induced 19 protein (Di19) Pfam Description: Drought induced 19 protein (Di19)
  misc_feature (60)..(264): Homolog of NCBI NO: 30696095 NR Description: drought-induced protein -related [Arabidopsis
  misc_feature (37)..(265): Homolog of NCBI NO: 15230782 NR Description: drought-induced protein -related [Arabidopsis
  misc_feature (46)..(264): Homolog of NCBI NO: 15240426 NR Description: drought-induced protein -related [Arabidopsis
  misc_feature (37)..(264): Homolog of NCBI NO: 15239827 NR Description: drought-induced protein -related [Arabidopsis
  misc_feature (37)..(264): Homolog of NCBI NO: 13937216 NR Description: AT5g49230/K21P3_11 [Arabidopsis thaliana]
  misc_feature (60)..(264): Homolog of NCBI NO: 1076316 NR Description: drought-induced protein Di19 - Arabidopsis
  misc_feature (60)..(264): Homolog of NCBI NO: 15028023 NR Description: unknown protein [Arabidopsis thaliana]
  misc_feature (46)..(264): Homolog of NCBI NO: 28393233 NR Description: unknown protein [Arabidopsis thaliana]
  misc_feature (37)..(265): Homolog of NCBI NO: 18377875 NR Description: AT3g06760/F3E22_10 [Arabidopsis thaliana]
  misc_feature (37)..(264): Homolog of NCBI NO: 25992529 NR Description: fiber protein Fb2 [Gossypium barbadense]
EERSGQKSLESQKRNHQRKGERRERRGEARVSSNSAMDSGDAWGRSSSTSSAAAAAARRLQSRYDLYMGFDDADAGGDEVEARGAEAYNCPFCGEDFDFVGLCCHIDDEHAVEAKSGVCPICATRVGADLIGHLTMQHGSYFKMQRRRRVRKVSSGSHSLLSLLRKDLRDGSLQSFLGGSSYVSNPPAAAPDPFLQSLICSLPVAEPSKDFRSESSDKTFLLNKFPDEKIVERAETSLSDKDQKERAQRSAFARGLVLSTIFDDDTM

SEQ ID NO: 63876 - protein, 231 aa, Triticum aestivum
  peptide (1)..(231): Ceres Seq. ID no. 13597257
  misc_feature (14)..(225): Pfam Name: Drought induced 19 protein (Di19) Pfam Description: Drought induced 19 protein (Di19)
  misc_feature (24)..(228): Homolog of NCBI NO: 30696095 NR Description: drought-induced protein -related [Arabidopsis
  misc_feature (1)..(229): Homolog of NCBI NO: 15230782 NR Description: drought-induced protein -related [Arabidopsis
  misc_feature (10)..(228): Homolog of NCBI NO: 15240426 NR Description: drought-induced protein -related [Arabidopsis
  misc_feature (1)..(228): Homolog of NCBI NO: 15239827 NR Description: drought-induced protein -related [Arabidopsis
  misc_feature (1)..(228): Homolog of NCBI NO: 13937216 NR Description: AT5g49230/K21P3_11 [Arabidopsis thaliana]
  misc_feature (24)..(228): Homolog of NCBI NO: 1076316 NR Description: drought-induced protein Di19 - Arabidopsis
  misc_feature (24)..(228): Homolog of NCBI NO: 15028023 NR Description: unknown protein [Arabidopsis thaliana]
  misc_feature (10)..(228): Homolog of NCBI NO: 28393233 NR Description: unknown protein [Arabidopsis thaliana]
  misc_feature (1)..(229): Homolog of NCBI NO: 18377875 NR Description: AT3g06760/F3E22_10 [Arabidopsis thaliana]
  misc_feature (1)..(228): Homolog of NCBI NO: 25992529 NR Description: fiber protein Fb2 [Gossypium barbadense]
MDSGDAWGRSSSTSSAAAAAARRLQSRYDLYMGFDDADAGGDEVEARGAEAYNCPFCGEDFDFVGLCCHIDDEHAVEAKSGVCPICATRVGADLIGHLTMQHGSYFKMQRRRRVRKVSSGSHSLLSLLRKDLRDGSLQSFLGGSSYVSNPPAAAPDPFLQSLICSLPVAEPSKDFRSESSDKTFLLNKFPDEKIVERAETSLSDKDQKERAQRSAFARGLVLSTIFDDDTM

SEQ ID NO: 63877 - protein, 200 aa, Triticum aestivum
  peptide (1)..(200): Ceres Seq. ID no. 13597258
  misc_feature (1)..(194): Pfam Name: Drought induced 19 protein (Di19) Pfam Description: Drought induced 19 protein (Di19)
  misc_feature (1)..(197): Homolog of NCBI NO: 30696095 NR Description: drought-induced protein -related [Arabidopsis
  misc_feature (1)..(198): Homolog of NCBI NO: 15230782 NR Description: drought-induced protein -related [Arabidopsis
  misc_feature (1)..(197): Homolog of NCBI NO: 15240426 NR Description: drought-induced protein -related [Arabidopsis
  misc_feature (1)..(197): Homolog of NCBI NO: 15239827 NR Description: drought-induced protein -related [Arabidopsis
  misc_feature (1)..(197): Homolog of NCBI NO: 13937216 NR Description: AT5g49230/K21P3_11 [Arabidopsis thaliana]
  misc_feature (1)..(197): Homolog of NCBI NO: 1076316 NR Description: drought-induced protein Di19 - Arabidopsis
  misc_feature (1)..(197): Homolog of NCBI NO: 15028023 NR Description: unknown protein [Arabidopsis thaliana]
  misc_feature (1)..(197): Homolog of NCBI NO: 28393233 NR Description: unknown protein [Arabidopsis thaliana]
  misc_feature (1)..(198): Homolog of NCBI NO: 18377875 NR Description: AT3g06760/F3E22_10 [Arabidopsis thaliana]
  misc_feature (1)..(197): Homolog of NCBI NO: 25992529 NR Description: fiber protein Fb2 [Gossypium barbadense]
MGFDDADAGGDEVEARGAEAYNCPFCGEDFDFVGLCCHIDDEHAVEAKSGVCPICATRVGADLIGHLTMQHGSYFKMQRRRRVRKVSSGSHSLLSLLRKDLRDGSLQSFLGGSSYVSNPPAAAPDPFLQSLICSLPVAEPSKDFRSESSDKTFLLNKFPDEKIVERAETSLSDKDQKERAQRSAFARGLVLSTIFDDDTM

SEQ ID NO: 63878 - DNA, 1563 bp, Triticum aestivum
  misc_feature (1)..(1563): Ceres Seq. ID no. 13590241
aggacaccgcggacggagagcgtcaggtcctcccccgctccgctcatcttgggaaggaagcaaagcagagccgcgccgccgaggaggatatggccgaggccgacgacgccgccgccgcccgccggcgcacggtcatcacggagtaccgcaacaagctcctgaactgccgcgagctggagacgagggtccgcacaggtagggaaaacctaaagaaggcgaagaaagattacgatataactgaagatgatttgaagtccttgcagagtgtgggccaaatcattggtgaagtacttcgaccattggacagtgaaagatttatcgtcaaagccagtagtggcccacgttatgtggttggctgcagaagcaaagttgacaaagaaaagctgacagctgcaacacgagttgtccttgacatgacaacattaacaataatgcgcactctaccacgtgaggttgatcccgtggtctataacatgctacacgaagaccccggcaatgtcagttactcagctgtaggtggactgtcggatcaaataagggagctgcgggagtccatcgagttacctcttatgaatccagaattgtttcttcgtgttgggattaaaccaccaaagggcgttctgctctatggcccacctggaacgggaaagacattgcttgctagagccattgctagcaacatcgatgctaactttttaaagattgtttcaagtgctatcattgacaaatatattggtgaaagtgcacgtcttataagagaaatgtttaactatgcacgtgagcatcaaccatgtattattttcatggatgagattgatgccattggtggccgaagattcagtgagggcactagtgcagatcgtgaaatacaacggacattgatggagctcctaaatcagttggatggattcgatgagctcggaaaggtgaagatgatcatggcgacgaaccggcctgatgtcttggaccctgcgctccttcgtcctggacgcctagaccggaagatagagattccgctgccgaatgagcaatccaggacggaggtcctgaaaatccatgcagctggtatcgccaagcatggcgaaattgattacgaggctgtggttaagctggccgagggcttcaatggcgctgatcttcgcaatgtctgcactgaggctggcatggccgccattcgagcagagcgtgactacgtcatccacgaagacttcatgaaggcagttcggaagttgaatgacgccaagaagctcgagtccagcgcacactacagcgccgactttggcaaggactaagatgagagtaggagactatcaggcgacgcgctgtctgttttcttgtaccatggcggagtttgtcacaccgaccccgacgatatagaacatcatgtgtttctaccttttatatgttgtgggacgactgcctttgccgcgcaagttgatgtaatgaaaagttgaaacaggtctgaaaccgactggtttcttagatttacaaaattgtttccttcaagttactgtgccttgattgtggaatcaaaaaaatgtggaaacattcgcgatttcttcc

SEQ ID NO: 63879 - protein, 429 aa, Triticum aestivum
  peptide (1)..(429): Ceres Seq. ID no. 13590242
  misc_feature (205)..(392): Pfam Name: ATPase family associated with various cellular Pfam Description: ATPase family associated with various cellular
  misc_feature (27)..(422): Homolog of NCBI NO: 6324833 NR Description: Proteasome Cap Subunit; Rpt4p [Saccharomyces
  misc_feature (30)..(422): Homolog of NCBI NO: 2960216 NR Description: 26S proteasome regulatory ATPase subunit 10b
  misc_feature (41)..(422): Homolog of NCBI NO: 6434958 NR Description: 26S proteasome regulatory complex subunit p42D
  misc_feature (41)..(422): Homolog of NCBI NO: 17945503 NR Description: RE23388p [Drosophila melanogaster]
  misc_feature (41)..(422): Homolog of NCBI NO: 24640100 NR Description: CG3455-PA [Drosophila melanogaster]
  misc_feature (30)..(429): Homolog of NCBI NO: 15239140 NR Description: 26S proteasome AAA-ATPase subunit RPT4a
  misc_feature (53)..(429): Homolog of NCBI NO: 17298147 NR Description: 26S proteasome regulatory particle triple-A
  misc_feature (30)..(429): Homolog of NCBI NO: 24745880 NR Description: 26S proteasome AAA-ATPase subunit RPT4a [Solanum
  misc_feature (30)..(429): Homolog of NCBI NO: 15219503 NR Description: 26S proteasome regulatory particle triple-A
  misc_feature (30)..(429): Homolog of NCBI NO: 11094192 NR Description: 26S proteasome regulatory particle triple-A
DTADGERQVLPRSAHLGKEAKQSRAAEEDMAEADDAAAARRRTVITEYRNKLLNCRELETRVRTGRENLKKAKKDYDITEDDLKSLQSVGQIIGEVLRPLDSERFIVKASSGPRYVVGCRSKVDKEKLTAATRVVLDMTTLTIMRTLPREVDPVVYNMLHEDPGNVSYSAVGGLSDQIRELRESIELPLMNPELFLRVGIKPPKGVLLYGPPGTGKTLLARAIASNIDANFLKIVSSAIIDKYIGESARLIREMFNYAREHQPCIIFMDEIDAIGGRRFSEGTSADREIQRTLMELLNQLDGFDELGKVKMIMATNRPDVLDPALLRPGRLDRKIEIPLPNEQSRTEVLKIHAAGIAKHGEIDYEAVVKLAEGFNGADLRNVCTEAGMAAIRAERDYVIHEDFMKAVRKLNDAKKLESSAHYSADFGKD

SEQ ID NO: 63880 - protein, 400 aa, Triticum aestivum
  peptide (1)..(400): Ceres Seq. ID no. 13590243
  misc_feature (176)..(363): Pfam Name: ATPase family associated with various cellular Pfam Description: ATPase family associated with various cellular
  misc_feature (1)..(393): Homolog of NCBI NO: 6324833 NR Description: Proteasome Cap Subunit; Rpt4p [Saccharomyces
  misc_feature (1)..(393): Homolog of NCBI NO: 2960216 NR Description: 26S proteasome regulatory ATPase subunit 10b
  misc_feature (12)..(393): Homolog of NCBI NO: 6434958 NR Description: 26S proteasome regulatory complex subunit p42D
  misc_feature (12)..(393): Homolog of NCBI NO: 17945503 NR Description: RE23388p [Drosophila melanogaster]
  misc_feature (12)..(393): Homolog of NCBI NO: 24640100 NR Description: CG3455-PA [Drosophila melanogaster]
  misc_feature (1)..(400): Homolog of NCBI NO: 15239140 NR Description: 26S proteasome AAA-ATPase subunit RPT4a
  misc_feature (24)..(400): Homolog of NCBI NO: 17298147 NR Description: 26S proteasome regulatory particle triple-A
  misc_feature (1)..(400): Homolog of NCBI NO: 24745880 NR Description: 26S proteasome AAA-ATPase subunit RPT4a [Solanum
  misc_feature (1)..(400): Homolog of NCBI NO: 15219503 NR Description: 26S proteasome regulatory particle triple-A
  misc_feature (1)..(400): Homolog of NCBI NO: 11094192 NR Description: 26S proteasome regulatory particle triple-A
MAEADDAAAARRRTVITEYRNKLLNCRELETRVRTGRENLKKAKKDYDITEDDLKSLQSVGQIIGEVLRPLDSERFIVKASSGPRYVVGCRSKVDKEKLTAATRVVLDMTTLTIMRTLPREVDPVVYNMLHEDPGNVSYSAVGGLSDQIRELRESIELPLMNPELFLRVGIKPPKGVLLYGPPGTGKTLLARAIASNIDANFLKIVSSAIIDKYIGESARLIREMFNYAREHQPCIIFMDEIDAIGGRRFSEGTSADREIQRTLMELLNQLDGFDELGKVKMIMATNRPDVLDPALLRPGRLDRKIEIPLPNEQSRTEVLKIHAAGIAKHGEIDYEAVVKLAEGFNGADLRNVCTEAGMAAIRAERDYVIHEDFMKAVRKLNDAKKLESSAHYSADFGKD

SEQ ID NO: 63881 - protein, 292 aa, Triticum aestivum
  peptide (1)..(292): Ceres Seq. ID no. 13590244
  misc_feature (68)..(255): Pfam Name: ATPase family associated with various cellular Pfam Description: ATPase family associated with various cellular
  misc_feature (1)..(285): Homolog of NCBI NO: 6324833 NR Description: Proteasome Cap Subunit; Rpt4p [Saccharomyces
  misc_feature (1)..(285): Homolog of NCBI NO: 2960216 NR Description: 26S proteasome regulatory ATPase subunit 10b
  misc_feature (1)..(285): Homolog of NCBI NO: 6434958 NR Description: 26S proteasome regulatory complex subunit p42D
  misc_feature (1)..(285): Homolog of NCBI NO: 17945503 NR Description: RE23388p [Drosophila melanogaster]
  misc_feature (1)..(285): Homolog of NCBI NO: 24640100 NR Description: CG3455-PA [Drosophila melanogaster]
  misc_feature (1)..(292): Homolog of NCBI NO: 15239140 NR Description: 26S proteasome AAA-ATPase subunit RPT4a
  misc_feature (1)..(292): Homolog of NCBI NO: 17298147 NR Description: 26S proteasome regulatory particle triple-A
  misc_feature (1)..(292): Homolog of NCBI NO: 24745880 NR Description: 26S proteasome AAA-ATPase subunit RPT4a [Solanum
  misc_feature (1)..(292): Homolog of NCBI NO: 15219503 NR Description: 26S proteasome regulatory particle triple-A
  misc_feature (1)..(292): Homolog of NCBI NO: 11094192 NR Description: 26S proteasome regulatory particle triple-A
MTTLTIMRTLPREVDPVVYNMLHEDPGNVSYSAVGGLSDQIRELRESIELPLMNPELFLRVGIKPPKGVLLYGPPGTGKTLLARAIASNIDANFLKIVSSAIIDKYIGESARLIREMFNYAREHQPCIIFMDEIDAIGGRRFSEGTSADREIQRTLMELLNQLDGFDELGKVKMIMATNRPDVLDPALLRPGRLDRKIEIPLPNEQSRTEVLKIHAAGIAKHGEIDYEAVVKLAEGFNGADLRNVCTEAGMAAIRAERDYVIHEDFMKAVRKLNDAKKLESSAHYSADFGKD

SEQ ID NO: 63882 - DNA, 1108 bp, Triticum aestivum
  misc_feature (1)..(1108): Ceres Seq. ID no. 13598492
aatcgaaaaatcgaccccagccacagccagatccgagagcagcagctactagctagtgagcatggcgtccaacaccgcacccgacgacaacgaggtggcgcacgactacggcctcgtccgcgtctacaagagcggccgcgtcgagcgccccctggtggctccgccagcggcggccggcctcgatcccgccaccggcgtcgagtccaaggacgtccagctcggcgactactccgcccgcctctacctgcccccggccgcgtccacggccacagacaagttccctgtcatcgtctacgtccacgggggcggcttcgtggccgagtccgtcgcgtcccccaacggccaccgcttcctcaacagcctcaccgccgcctgccctgccctcgccgtctccgtcgagtaccgcctcgccccggagcacccgctccccgcggcctacgaggactgcgtcgctgccctcacgtgggtgctctcggccgccgacccgtgggtcgccgagcacggcgacctgggccgcgtcttcgtggccggggacagcgccggggccaacgcctgccaccacctcgtcattcagccgggcgccgtgcgcctcaagggcgcggtgctgatccacccctggttctggggttccgaggccgtcggcgaggagacgcgcaaccccgcgtggcgcgccatgggcgggcggctgtgggagttcgcgtgccccggctcgagcggcgtcgacgacgcgcggatgaacccgatggcgcccggcgcgccggggctggaaacgctcgcgtgcgagagggtcatggtgtgcgtcgcggagggcgacttcctcaggtggcgcggccgcgcgtacgcggaggccgtggccgcggcgaggggcggcgaggggcagggcgtcgagctgctggagacggagggggtggggcacgtcttccacctcttcaagcccgactgcgacaaagccaaggagatgttcgacaggatagtcgccttcgttaacgcgccgtgatgctcgtgtggatgtgcccgcttattatcaggccggcagctttgtgtgtcgcgggggcgccacctactgaaataaatggattgcgataaatgatgaaataaatttggttgg

SEQ ID NO: 63883 - protein, 328 aa, Triticum aestivum
  peptide (1)..(328): Ceres Seq. ID no. 13598493
  misc_feature (156)..(328): Homolog of NCBI NO: 34911756 NR Description: P0038D11.21 [Oryza sativa (japonica
  misc_feature (28)..(278): Homolog of NCBI NO: 23018055 NR Description: hypothetical protein [Thermobifida fusca]
  misc_feature (29)..(270): Homolog of NCBI NO: 29247944 NR Description: GLP_26_54603_52153 [Giardia lamblia ATCC 50803]
  misc_feature (31)..(290): Homolog of NCBI NO: 29247944 NR Description: GLP_26_54603_52153 [Giardia lamblia ATCC 50803]
  misc_feature (6)..(324): Homolog of NCBI NO: 23018055 NR Description: hypothetical protein [Thermobifida fusca]
  misc_feature (47)..(323): Homolog of NCBI NO: 23105183 NR Description: hypothetical protein [Azotobacter vinelandii]
NRKIDPSHSQIREQQLLASEHGVQHRTRRQRGGARLRPRPRLQERPRRAPPGGSASGGRPRSRHRRRVQGRPARRLLRPPLPAPGRVHGHRQVPCHRLRPRGRLRGRVRRVPQRPPLPQQPHRRLPCPRRLRRVPPRPGAPAPRGLRGLRRCPHVGALGRRPVGRRARRPGPRLRGRGQRRGQRLPPPRHSAGRRAPQGRGADPPLVLGFRGRRRGDAQPRVARHGRAAVGVRVPRLERRRRRADEPDGARRAGAGNARVREGHGVRRGGRLPQVARPRVRGGRGRGEGRRGAGRRAAGDGGGGARLPPLQARLRQSQGDVRQDSRLR

SEQ ID NO: 63884 - protein, 311 aa, Triticum aestivum
  peptide (1)..(311): Ceres Seq. ID no. 13598494
  misc_feature (60)..(115): Pfam Name: Carboxylesterase Pfam Description: Carboxylesterase
  misc_feature (12)..(309): Homolog of NCBI NO: 28393060 NR Description: putative esterase [Arabidopsis thaliana]
  misc_feature (1)..(311): Homolog of NCBI NO: 34393975 NR Description: putative PrMC3 [Oryza sativa (japonica
  misc_feature (9)..(309): Homolog of NCBI NO: 15227669 NR Description: expressed protein [Arabidopsis thaliana]
  misc_feature (9)..(308): Homolog of NCBI NO: 15228426 NR Description: expressed protein [Arabidopsis thaliana]
  misc_feature (9)..(308): Homolog of NCBI NO: 15228425 NR Description: expressed protein [Arabidopsis thaliana]
  misc_feature (9)..(308): Homolog of NCBI NO: 18086341 NR Description: AT3g48690/T8P19_200 [Arabidopsis thaliana]
  misc_feature (10)..(311): Homolog of NCBI NO: 34393904 NR Description: putative cell death associated protein
  misc_feature (21)..(309): Homolog of NCBI NO: 18401743 NR Description: expressed protein [Arabidopsis thaliana]
  misc_feature (21)..(309): Homolog of NCBI NO: 21536771 NR Description: unknown [Arabidopsis thaliana]
  misc_feature (3)..(310): Homolog of NCBI NO: 38344841 NR Description: OSJNBa0064H22.22 [Oryza sativa (japonica
MASNTAPDDNEVAHDYGLVRVYKSGRVERPLVAPPAAAGLDPATGVESKDVQLGDYSARLYLPPAASTATDKFPVIVYVHGGGFVAESVASPNGHRFLNSLTAACPALAVSVEYRLAPEHPLPAAYEDCVAALTWVLSAADPWVAEHGDLGRVFVAGDSAGANACHHLVIQPGAVRLKGAVLIHPWFWGSEAVGEETRNPAWRAMGGRLWEFACPGSSGVDDARMNPMAPGAPGLETLACERVMVCVAEGDFLRWRGRAYAEAVAAARGGEGQGVELLETEGVGHVFHLFKPDCDKAKEMFDRIVAFVNAP

SEQ ID NO: 63885 - DNA, 1458 bp, Triticum aestivum
  misc_feature (1)..(1458): Ceres Seq. ID no. 13597260
agcgaatcgggcggaaacacaacgacgcagtcacgcaccggctctttcctccacccctcgtagggctagctagggtttctccgcccaaatcgtgtaataataacccacttgaagattcgcgcgaaagctgcggcgatggccaccaccgtccaaccccactccccggacccaacagccatcaccaccacccctgcccctccccctcctccttctccacctcgccaggagaacccgaccgccgcgggggaaggcgtagagatcgcggcgctcgatgagcagcctgccgccgtcgccgtcgccgacaaggggaatacggcccccggcggcgggaagctggtggcggaggccatgcgcaagtgcgcggcgccccggtcgtcgcgctaccacggcgtgacgaggctcaagtggagcggcaagtacgaggcacacctctgggacaacaccagccaggttgaggggcgcaagcgcaagggcaagcatgtgtacttgggaagctatgttactgaagagaatgctgcaagggcacatgaccttgcagccctgaaatattggggcataactcaacccaccaaactaaacttcaatatttctgattatgcaaaagaaattgagatcatgaagagcatgaatcaagatgaatttgtggcctacataaggaggcagagtagttgtttctcaagaggaacatcgtcatacaggggtgtaacaagacgaaaggatggtaaatggcaagcacgtattggtaggattggtgagagtagagacactaaagacatctatcttgggacctttgaaactgaagtggaggcagctgaagcgtatgacctagcagcaattcagctccgtggtgttcatgctgtgaccaactttgatatcagcaactactccgaagaaggtttgaagaaactagaaggctcatctgaggtagtgaacctggaggaccaatcagaagtcactaagttagctgtgaccaacttggatattagcaaacactgcgaagatggtttgaagaaactagatggcgcatcccaggtagtgaacctggagggccaatcagaagtcaccaagttatctgtgactaactttgatattagcaactgctgtgaagatggtttgaagaaactagaaggctcatccgaggtagcgaacctggaggaccaatcagaagtcacaaagttagctggacaatagatattagaatagcaacatgtaaattatttatttcttcctttttatcttttctctgatcgtcaatctctccacctttctcttttcttgattgatgatgagagtgtcttttcttcgtctgcctttcctgaaacttttttttcccaaggaatttcccttcgctggttgccaactctattatttaccagctccagagtaggatcgtgtgatgctgtactctgtattctcatgtacactgattacaaaccattgatagtatttgtagacatt

SEQ ID NO: 63886 - protein, 351 aa, Triticum aestivum
  peptide (1)..(351): Ceres Seq. ID no. 13597261
  misc_feature (80)..(154): Pfam Name: AP2 domain Pfam Description: AP2 domain
  misc_feature (79)..(262): Homolog of NCBI NO: 21069053 NR Description: AP2/EREBP transcription factor BABY BOOM2
  misc_feature (79)..(280): Homolog of NCBI NO: 21069057 NR Description: BABY BOOM [Arabidopsis thaliana]
  misc_feature (50)..(250): Homolog of NCBI NO: 28201307 NR Description: putative ovule development protein antitegumenta
  misc_feature (79)..(293): Homolog of NCBI NO: 15235690 NR Description: ovule development protein aintegumenta (ANT)
  misc_feature (79)..(293): Homolog of NCBI NO: 1171429 NR Description: CKC
  misc_feature (23)..(262): Homolog of NCBI NO: 21069051 NR Description: AP2/EREBP transcription factor BABY BOOM1
  misc_feature (79)..(272): Homolog of NCBI NO: 15218529 NR Description: ovule development protein, putative [Arabidopsis
  misc_feature (79)..(253): Homolog of NCBI NO: 38492172 NR Description: ANT-like protein [Nicotiana tabacum]
  misc_feature (13)..(190): Homolog of NCBI NO: 40644766 NR Description: putative AP2-like protein [Triticum aestivum]
  misc_feature (1)..(277): Homolog of NCBI NO: 40253775 NR Description: ovule development protein aintegumenta (ANT)-like
MATTVQPHSPDPTAITTTPAPPPPPSPPRQENPTAAGEGVEIAALDEQPAAVAVADKGNTAPGGGKLVAEAMRKCAAPRSSRYHGVTRLKWSGKYEAHLWDNTSQVEGRKRKGKHVYLGSYVTEENAARAHDLAALKYWGITQPTKLNFNISDYAKEIEIMKSMNQDEFVAYIRRQSSCFSRGTSSYRGVTRRKDGKWQARIGRIGESRDTKDIYLGTFETEVEAAEAYDLAAIQLRGVHAVTNFDISNYSEEGLKKLEGSSEVVNLEDQSEVTKLAVTNLDISKHCEDGLKKLDGASQVVNLEGQSEVTKLSVTNFDISNCCEDGLKKLEGSSEVANLEDQSEVTKLAGQ

SEQ ID NO: 63887 - protein, 280 aa, Triticum aestivum
  peptide (1)..(280): Ceres Seq. ID no. 13597262
  misc_feature (9)..(83): Pfam Name: AP2 domain Pfam Description: AP2 domain
  misc_feature (8)..(191): Homolog of NCBI NO: 21069053 NR Description: AP2/EREBP transcription factor BABY BOOM2
  misc_feature (8)..(209): Homolog of NCBI NO: 21069057 NR Description: BABY BOOM [Arabidopsis thaliana]
  misc_feature (1)..(179): Homolog of NCBI NO: 28201307 NR Description: putative ovule development protein antitegumenta
  misc_feature (8)..(222): Homolog of NCBI NO: 15235690 NR Description: ovule development protein aintegumenta (ANT)
  misc_feature (8)..(222): Homolog of NCBI NO: 1171429 NR Description: CKC
  misc_feature (1)..(191): Homolog of NCBI NO: 21069051 NR Description: AP2/EREBP transcription factor BABY BOOM1
  misc_feature (8)..(201): Homolog of NCBI NO: 15218529 NR Description: ovule development protein, putative [Arabidopsis
  misc_feature (8)..(182): Homolog of NCBI NO: 38492172 NR Description: ANT-like protein [Nicotiana tabacum]
  misc_feature (1)..(119): Homolog of NCBI NO: 40644766 NR Description: putative AP2-like protein [Triticum aestivum]
  misc_feature (1)..(206): Homolog of NCBI NO: 40253775 NR Description: ovule development protein aintegumenta (ANT)-like
MRKCAAPRSSRYHGVTRLKWSGKYEAHLWDNTSQVEGRKRKGKHVYLGSYVTEENAARAHDLAALKYWGITQPTKLNFNISDYAKEIEIMKSMNQDEFVAYIRRQSSCFSRGTSSYRGVTRRKDGKWQARIGRIGESRDTKDIYLGTFETEVEAAEAYDLAAIQLRGVHAVTNFDISNYSEEGLKKLEGSSEVVNLEDQSEVTKLAVTNLDISKHCEDGLKKLDGASQVVNLEGQSEVTKLSVTNFDISNCCEDGLKKLEGSSEVANLEDQSEVTKLAGQ

SEQ ID NO: 63888 - protein, 191 aa, Triticum aestivum
  peptide (1)..(191): Ceres Seq. ID no. 13597263
  misc_feature (24)..(90): Pfam Name: AP2 domain Pfam Description: AP2 domain
  misc_feature (1)..(102): Homolog of NCBI NO: 21069053 NR Description: AP2/EREBP transcription factor BABY BOOM2
  misc_feature (1)..(120): Homolog of NCBI NO: 21069057 NR Description: BABY BOOM [Arabidopsis thaliana]
  misc_feature (1)..(90): Homolog of NCBI NO: 28201307 NR Description: putative ovule development protein antitegumenta
  misc_feature (1)..(133): Homolog of NCBI NO: 15235690 NR Description: ovule development protein aintegumenta (ANT)
  misc_feature (1)..(133): Homolog of NCBI NO: 1171429 NR Description: CKC
  misc_feature (1)..(102): Homolog of NCBI NO: 21069051 NR Description: AP2/EREBP transcription factor BABY BOOM1
  misc_feature (1)..(112): Homolog of NCBI NO: 15218529 NR Description: ovule development protein, putative [Arabidopsis
  misc_feature (1)..(93): Homolog of NCBI NO: 38492172 NR Description: ANT-like protein [Nicotiana tabacum]
  misc_feature (1)..(30): Homolog of NCBI NO: 40644766 NR Description: putative AP2-like protein [Triticum aestivum]
  misc_feature (1)..(117): Homolog of NCBI NO: 40253775 NR Description: ovule development protein aintegumenta (ANT)-like
MKSMNQDEFVAYIRRQSSCFSRGTSSYRGVTRRKDGKWQARIGRIGESRDTKDIYLGTFETEVEAAEAYDLAAIQLRGVHAVTNFDISNYSEEGLKKLEGSSEVVNLEDQSEVTKLAVTNLDISKHCEDGLKKLDGASQVVNLEGQSEVTKLSVTNFDISNCCEDGLKKLEGSSEVANLEDQSEVTKLAGQ

SEQ ID NO: 63889 - DNA, 1412 bp, Triticum aestivum
  misc_feature (1)..(1412): Ceres Seq. ID no. 13585382
gaaaatcccccttccattcctcctcccctccttgtccccaccctctctctctctctctccctccgtctgtccgtccgcgcgcgctctgcgttcttggggagggaggaaatggcggcaaagcgcgagctggtggtcagcttcggggagatgctgatagacttcgtgccgacggtggccggggtgtcgctggcggaggcgccggccttcgtcaaggcgcccgggggcgcccccgccaacgtcgccatcgccgtcgcgcgcctcggcggcggggccgccttcgtcggcaagctcggcgacgacgagttcggccgcatgctcgccaaaatcctccgcgaaaacggcgtcgacgccggcggcgtcgtcttcgactcgggcgcgcgcaccgcgctcgccttcgtcacgctccgcgccgacggggagcgcgagttcatgttctaccgcaaccccagcgccgacatgctcctcaccgccgacgagctcaaggtcgacgtcatcaagagggctgcagtcttccactatggatcaataagcttgatcgccgagccttgccggacagcgcatctgcacgccatgaaggttgccaaagaggccggcgcgcttctctcgtatgacccgaacctgagggaggcattgtggccctcccttgaggaggctcgcaccaagatcttgagcatctgggaccaggcagacattgtcaaggtcagcgaggtcgagcttgagtttttgactggcatcaactcggtggaggatgatgttgccatgaagctgtggcgccctacctttaagctcatgcttgtcactcttggagatcaaggatgcaagtactataccaaggatttccgtggaactgtcccatcctacaaggtacagcaagttgatacgacaggtgctggtgatgcatttattggttctctgctccgaaaaattgtccaagatccatcggcattgcaagataaaacaaagcttgagggggcgatcaaatttgccaatgcatgtggagcaatcaccgccacgaagaaaggggcaatcccttcattgcccaaggaagacgaggtgttgcggctgatggagaaggcgtagacgcggcttatgatttccagtagcttcgaattctgcaaattgtattgtaagctgttctggatcaggagcaaggtgtactcctcccaggatgcccctgcctttttgtttgctcccctttacgaaagggtttttgttttggaattcttctcatctgaataagcagatccttcaatattactgtgtcatttctgtaccaagtccttgatggtagtgttcttttttccttgttctgtcatcttatttgggttccaactgtattgggaatttgtggtttagcccctgaggtggtttctgttctcaattttcgacaagtgaaacgcatgtacaacgcc

SEQ ID NO: 63890 - protein, 359 aa, Triticum aestivum
  peptide (1)..(359): Ceres Seq. ID no. 13585383
  misc_feature (42)..(349): Pfam Name: pfkB family carbohydrate kinase Pfam Description: pfkB family carbohydrate kinase
  misc_feature (38)..(357): Homolog of NCBI NO: 32765547 NR Description: fructokinase 2 [Lycopersicon hirsutum]
  misc_feature (38)..(357): Homolog of NCBI NO: 1915974 NR Description: fructokinase [Lycopersicon esculentum]
  misc_feature (40)..(357): Homolog of NCBI NO: 21592495 NR Description: fructokinase-like protein [Arabidopsis thaliana]
  misc_feature (40)..(359): Homolog of NCBI NO: 15221364 NR Description: pfkB type carbohydrate kinase protein family
  misc_feature (41)..(358): Homolog of NCBI NO: 7434223 NR Description: fructokinase (EC 2.7.1.4) - beet
  misc_feature (43)..(358): Homolog of NCBI NO: 33329198 NR Description: putative fructokinase
  misc_feature (38)..(358): Homolog of NCBI NO: 33329200 NR Description: putative fructokinase 2
  misc_feature (43)..(358): Homolog of NCBI NO: 14423528 NR Description: putative fructokinase [Arabidopsis thaliana]
  misc_feature (43)..(358): Homolog of NCBI NO: 15224669 NR Description: fructokinase, putative [Arabidopsis thaliana]
  misc_feature (37)..(359): Homolog of NCBI NO: 34907582 NR Description: putative fructokinase I [Oryza sativa (japonica
ENPPSIPPPLLVPTLSLSLSLRLSVRARSAFLGREEMAAKRELVVSFGEMLIDFVPTVAGVSLAEAPAFVKAPGGAPANVAIAVARLGGGAAFVGKLGDDEFGRMLAKILRENGVDAGGVVFDSGARTALAFVTLRADGEREFMFYRNPSADMLLTADELKVDVIKRAAVFHYGSISLIAEPCRTAHLHAMKVAKEAGALLSYDPNLREALWPSLEEARTKILSIWDQADIVKVSEVELEFLTGINSVEDDVAMKLWRPTFKLMLVTLGDQGCKYYTKDFRGTVPSYKVQQVDTTGAGDAFIGSLLRKIVQDPSALQDKTKLEGAIKFANACGAITATKKGAIPSLPKEDEVLRLMEKA

SEQ ID NO: 63891 - protein, 323 aa, Triticum aestivum
  peptide (1)..(323): Ceres Seq. ID no. 13585384
  misc_feature (6)..(313): Pfam Name: pfkB family carbohydrate kinase Pfam Description: pfkB family carbohydrate kinase
  misc_feature (2)..(321): Homolog of NCBI NO: 32765547 NR Description: fructokinase 2 [Lycopersicon hirsutum]
  misc_feature (2)..(321): Homolog of NCBI NO: 1915974 NR Description: fructokinase [Lycopersicon esculentum]
  misc_feature (4)..(321): Homolog of NCBI NO: 21592495 NR Description: fructokinase-like protein [Arabidopsis thaliana]
  misc_feature (4)..(323): Homolog of NCBI NO: 15221364 NR Description: pfkB type carbohydrate kinase protein family
  misc_feature (5)..(322): Homolog of NCBI NO: 7434223 NR Description: fructokinase (EC 2.7.1.4) - beet
  misc_feature (7)..(322): Homolog of NCBI NO: 33329198 NR Description: putative fructokinase
  misc_feature (2)..(322): Homolog of NCBI NO: 33329200 NR Description: putative fructokinase 2
  misc_feature (7)..(322): Homolog of NCBI NO: 14423528 NR Description: putative fructokinase [Arabidopsis thaliana]
  misc_feature (7)..(322): Homolog of NCBI NO: 15224669 NR Description: fructokinase, putative [Arabidopsis thaliana]
  misc_feature (1)..(323): Homolog of NCBI NO: 34907582 NR Description: putative fructokinase I [Oryza sativa (japonica
MAAKRELVVSFGEMLIDFVPTVAGVSLAEAPAFVKAPGGAPANVAIAVARLGGGAAFVGKLGDDEFGRMLAKILRENGVDAGGVVFDSGARTALAFVTLRADGEREFMFYRNPSADMLLTADELKVDVIKRAAVFHYGSISLIAEPCRTAHLHAMKVAKEAGALLSYDPNLREALWPSLEEARTKILSIWDQADIVKVSEVELEFLTGINSVEDDVAMKLWRPTFKLMLVTLGDQGCKYYTKDFRGTVPSYKVQQVDTTGAGDAFIGSLLRKIVQDPSALQDKTKLEGAIKFANACGAITATKKGAIPSLPKEDEVLRLMEKA

SEQ ID NO: 63892 - protein, 310 aa, Triticum aestivum
  peptide (1)..(310): Ceres Seq. ID no. 13585385
  misc_feature (1)..(300): Pfam Name: pfkB family carbohydrate kinase Pfam Description: pfkB family carbohydrate kinase
  misc_feature (1)..(308): Homolog of NCBI NO: 32765547 NR Description: fructokinase 2 [Lycopersicon hirsutum]
  misc_feature (1)..(308): Homolog of NCBI NO: 1915974 NR Description: fructokinase [Lycopersicon esculentum]
  misc_feature (1)..(308): Homolog of NCBI NO: 21592495 NR Description: fructokinase-like protein [Arabidopsis thaliana]
  misc_feature (1)..(310): Homolog of NCBI NO: 15221364 NR Description: pfkB type carbohydrate kinase protein family
  misc_feature (1)..(309): Homolog of NCBI NO: 7434223 NR Description: fructokinase (EC 2.7.1.4) - beet
  misc_feature (1)..(309): Homolog of NCBI NO: 33329198 NR Description: putative fructokinase
  misc_feature (1)..(309): Homolog of NCBI NO: 33329200 NR Description: putative fructokinase 2
  misc_feature (1)..(309): Homolog of NCBI NO: 14423528 NR Description: putative fructokinase [Arabidopsis thaliana]
  misc_feature (1)..(309): Homolog of NCBI NO: 15224669 NR Description: fructokinase, putative [Arabidopsis thaliana]
  misc_feature (1)..(310): Homolog of NCBI NO: 34907582 NR Description: putative fructokinase I [Oryza sativa (japonica
MLIDFVPTVAGVSLAEAPAFVKAPGGAPANVAIAVARLGGGAAFVGKLGDDEFGRMLAKILRENGVDAGGVVFDSGARTALAFVTLRADGEREFMFYRNPSADMLLTADELKVDVIKRAAVFHYGSISLIAEPCRTAHLHAMKVAKEAGALLSYDPNLREALWPSLEEARTKILSIWDQADIVKVSEVELEFLTGINSVEDDVAMKLWRPTFKLMLVTLGDQGCKYYTKDFRGTVPSYKVQQVDTTGAGDAFIGSLLRKIVQDPSALQDKTKLEGAIKFANACGAITATKKGAIPSLPKEDEVLRLMEKA

SEQ ID NO: 63893 - DNA, 1201 bp, Triticum aestivum
  misc_feature (1)..(1201): Ceres Seq. ID no. 13584271
agacagacagagaaaaaaaaaacccagagaaagagatcgagaccctctccaccctccttccccatccccgtcgtcgctcttcgattccgccggcgatccgtgccacagtctagccggaggagaggcgagcagcagggggagcgcgtgcggtctagcgggggctagggtttcctcgcgtgtgagggacgggagaggaggagcagggatggcgcaggcggtggaggagtggtaccggcagatgcccatcatcacgcgctcctacctcaccgccgccgtcctcaccaccgtcggatgcaccctcgagatcatctcgccctaccacctgtacctgaaccccaagctggtggtgcagcactacgagatctggcgcctcgtcaccaacttcctctacttccgcaagatggatttggatttcctgttccacatgttttttcttgcgcgctactgcaaacttctcgaggagaactcattcaggggaagaacagctgactttttctacatgctcttgtttggtgctactgtcctaaccagcatcgttctgattggtgggacaataccttacatttctgagacgtttgccaggattctgttcctcagcaattcattgacgtttatgatggtttatgtctggagcaagcacaatcccttcattcacatgagcttcttgggtctgttcaccttcactgctgcctacttaccttgggtccttcttggcttctctattctggtggggagcagcacatgggttgatcttttgggtatgattgctggccatgtgtattacttcctggaagacgtgtaccctcggatgacgggccgtcgccccctgaagaccccttccttcatcaaggcgctgttcgccgacgacaatgtggtcgtggcggcgcggccccccaacgctggtgtcgcggctgcaaggtttggtggtgtgggtgcagcagacccccagttccagtgatggtctacatgcagtttgttggatataattttgtacacccgtgtccgtgatgatatgtgcaaaaatacatagagagtataattctcagttaggggttgggcttgatgccaatgcgctgctaaccaaagtgtatgtagctgggctcgtgaagccgtctggttgttggttaactttgacttaacgtacttgtctcatcttgcgtggcaccttcgttaattaggcgaaaaaacacgctgaagcctc

SEQ ID NO: 63894 - protein, 318 aa, Triticum aestivum
  peptide (1)..(318): Ceres Seq. ID no. 13584272
  misc_feature (80)..(280): Pfam Name: Der1-like family Pfam Description: Der1-like family
  misc_feature (46)..(282): Homolog of NCBI NO: 34852394 NR Description: similar to carcinoma related gene [Rattus
  misc_feature (71)..(286): Homolog of NCBI NO: 16151831 NR Description: F-LANa [Mus musculus]
  misc_feature (71)..(286): Homolog of NCBI NO: 15808990 NR Description: carcinoma related gene [Mus musculus]
  misc_feature (69)..(286): Homolog of NCBI NO: 40352706 NR Description: Unknown (protein for MGC:63991) [Danio rerio]
  misc_feature (102)..(307): Homolog of NCBI NO: 25407582 NR Description: hypothetical protein AT4g21810 [imported] -
  misc_feature (83)..(307): Homolog of NCBI NO: 7487831 NR Description: hypothetical protein T8O5.20 - Arabidopsis
  misc_feature (69)..(307): Homolog of NCBI NO: 22328865 NR Description: expressed protein [Arabidopsis thaliana]
  misc_feature (69)..(307): Homolog of NCBI NO: 17473759 NR Description: putative protein [Arabidopsis thaliana]
  misc_feature (69)..(307): Homolog of NCBI NO: 15234480 NR Description: expressed protein [Arabidopsis thaliana]
  misc_feature (69)..(318): Homolog of NCBI NO: 27573354 NR Description: putative Der1-like protein
DRQRKKKPRERDRDPLHPPSPSPSSLFDSAGDPCHSLAGGEASSRGSACGLAGARVSSRVRDGRGGAGMAQAVEEWYRQMPIITRSYLTAAVLTTVGCTLEIISPYHLYLNPKLVVQHYEIWRLVTNFLYFRKMDLDFLFHMFFLARYCKLLEENSFRGRTADFFYMLLFGATVLTSIVLIGGTIPYISETFARILFLSNSLTFMMVYVWSKHNPFIHMSFLGLFTFTAAYLPWVLLGFSILVGSSTWVDLLGMIAGHVYYFLEDVYPRMTGRRPLKTPSFIKALFADDNVVVAARPPNAGVAAARFGGVGAADPQFQ

SEQ ID NO: 63895 - protein, 250 aa, Triticum aestivum
  peptide (1)..(250): Ceres Seq. ID no. 13584273
  misc_feature (12)..(212): Pfam Name: Der1-like family Pfam Description: Der1-like family
  misc_feature (1)..(214): Homolog of NCBI NO: 34852394 NR Description: similar to carcinoma related gene [Rattus
  misc_feature (3)..(218): Homolog of NCBI NO: 16151831 NR Description: F-LANa [Mus musculus]
  misc_feature (3)..(218): Homolog of NCBI NO: 15808990 NR Description: carcinoma related gene [Mus musculus]
  misc_feature (1)..(218): Homolog of NCBI NO: 40352706 NR Description: Unknown (protein for MGC:63991) [Danio rerio]
  misc_feature (34)..(239): Homolog of NCBI NO: 25407582 NR Description: hypothetical protein AT4g21810 [imported] -
  misc_feature (15)..(239): Homolog of NCBI NO: 7487831 NR Description: hypothetical protein T8O5.20 - Arabidopsis
  misc_feature (1)..(239): Homolog of NCBI NO: 22328865 NR Description: expressed protein [Arabidopsis thaliana]
  misc_feature (1)..(239): Homolog of NCBI NO: 17473759 NR Description: putative protein [Arabidopsis thaliana]
  misc_feature (1)..(239): Homolog of NCBI NO: 15234480 NR Description: expressed protein [Arabidopsis thaliana]
  misc_feature (1)..(250): Homolog of NCBI NO: 27573354 NR Description: putative Der1-like protein
MAQAVEEWYRQMPIITRSYLTAAVLTTVGCTLEIISPYHLYLNPKLVVQHYEIWRLVTNFLYFRKMDLDFLFHMFFLARYCKLLEENSFRGRTADFFYMLLFGATVLTSIVLIGGTIPYISETFARILFLSNSLTFMMVYVWSKHNPFIHMSFLGLFTFTAAYLPWVLLGFSILVGSSTWVDLLGMIAGHVYYFLEDVYPRMTGRRPLKTPSFIKALFADDNVVVAARPPNAGVAAARFGGVGAADPQFQ

SEQ ID NO: 63896 - protein, 239 aa, Triticum aestivum
  peptide (1)..(239): Ceres Seq. ID no. 13584274
  misc_feature (1)..(201): Pfam Name: Der1-like family Pfam Description: Der1-like family
  misc_feature (1)..(203): Homolog of NCBI NO: 34852394 NR Description: similar to carcinoma related gene [Rattus
  misc_feature (1)..(207): Homolog of NCBI NO: 16151831 NR Description: F-LANa [Mus musculus]
  misc_feature (1)..(207): Homolog of NCBI NO: 15808990 NR Description: carcinoma related gene [Mus musculus]
  misc_feature (1)..(207): Homolog of NCBI NO: 40352706 NR Description: Unknown (protein for MGC:63991) [Danio rerio]
  misc_feature (23)..(228): Homolog of NCBI NO: 25407582 NR Description: hypothetical protein AT4g21810 [imported] -
  misc_feature (4)..(228): Homolog of NCBI NO: 7487831 NR Description: hypothetical protein T8O5.20 - Arabidopsis
  misc_feature (1)..(228): Homolog of NCBI NO: 22328865 NR Description: expressed protein [Arabidopsis thaliana]
  misc_feature (1)..(228): Homolog of NCBI NO: 17473759 NR Description: putative protein [Arabidopsis thaliana]
  misc_feature (1)..(228): Homolog of NCBI NO: 15234480 NR Description: expressed protein [Arabidopsis thaliana]
  misc_feature (1)..(239): Homolog of NCBI NO: 27573354 NR Description: putative Der1-like protein
MPIITRSYLTAAVLTTVGCTLEIISPYHLYLNPKLVVQHYEIWRLVTNFLYFRKMDLDFLFHMFFLARYCKLLEENSFRGRTADFFYMLLFGATVLTSIVLIGGTIPYISETFARILFLSNSLTFMMVYVWSKHNPFIHMSFLGLFTFTAAYLPWVLLGFSILVGSSTWVDLLGMIAGHVYYFLEDVYPRMTGRRPLKTPSFIKALFADDNVVVAARPPNAGVAAARFGGVGAADPQFQ

SEQ ID NO: 63897 - DNA, 1032 bp, Triticum aestivum
  misc_feature (1)..(1032): Ceres Seq. ID no. 13597264
atcgatcaaggatcagacgacacgagctagtagccacaaagccaacgatctcgaccgctcgggtcatcagcaacgaaccatggcgcgggtgctggctctcggcgccgccgcggctttcctcctcctggcagtggcatcgaccatggcggctgcgcagaactgcgggtgcgcggcgagtcagtgctgcagccgctgggggttctgcggcgccaccagcgagtactgcggcacgggctgccgctcgggtccctgcaccgtgcccgtcaccaacaacgtgtccgtgcccgccatcgtcacgccggccttcttcggcgcgctcgtcgcccaggccgccgacgactgcgccgccaagggcttctacacccgcgacgccttcctcacggcgctcggcgggtaccccgccttcggccgcaccggctccgacgacgactccaagcgcgagatcgccgccttcttcgcccacgtcaaccacgagaccataaagttctgctacatcgacgagatcaacgggccgagcaagaactactgcgacccgacgaacgcggagtggccgtgcgccgccgggaagggctactacggccgcgggccgctgcagatctcgtggaactacaactacggggcggcagggcagagcctcggcttcgacgggctcaacgacccggacgcggtggcgcggagccccgtcttggcgttccaagcggcgctctggtactggatgaacagcgtgcacgacgtcatcgtctccggccaggggttcggcgccaccatcagggccatcaatggcgcgctcgagtgcaacggcaagaaccccagcgccgtcaacgaccgcgtcgccttctacaagcagttctgccagcagttcggcgtcgacccggggaccagcctcacctgctaagctcactatctaggacatcgcgtggacttggttgtggcatatgtgcgtgcatctgattcggacagacatattcaggataaaattgctttctgatttgatactatacctgttaatttaatactaccttcgtctcgatg

SEQ ID NO: 63898 - protein, 297 aa, Triticum aestivum
  peptide (1)..(297): Ceres Seq. ID no. 13597265
  misc_feature (97)..(297): Pfam Name: Chitinase class I Pfam Description: Chitinase class I
  misc_feature (37)..(297): Homolog of NCBI NO: 2570166 NR Description: chitinase [Chenopodium amaranticolor]
  misc_feature (32)..(297): Homolog of NCBI NO: 2570162 NR Description: chitinase [Chenopodium amaranticolor]
  misc_feature (25)..(297): Homolog of NCBI NO: 40557195 NR Description: class IV chitinase precursor [Medicago truncatula]
  misc_feature (26)..(297): Homolog of NCBI NO: 2597826 NR Description: class IV chitinase [Arabidopsis thaliana]
  misc_feature (32)..(297): Homolog of NCBI NO: 2570164 NR Description: chitinase [Chenopodium amaranticolor]
  misc_feature (26)..(297): Homolog of NCBI NO: 15232509 NR Description: glycosyl hydrolase family 19 (class IV chitinase)
  misc_feature (27)..(297): Homolog of NCBI NO: 38345417 NR Description: OSJNBb0091E11.8 [Oryza sativa (japonica
  misc_feature (40)..(297): Homolog of NCBI NO: 2306811 NR Description: class IV endochitinase [Vitis vinifera]
  misc_feature (40)..(297): Homolog of NCBI NO: 33329392 NR Description: class IV chitinase [Vitis vinifera]
  misc_feature (26)..(297): Homolog of NCBI NO: 30793457 NR Description: chitinase [Oryza sativa (japonica cultivar-group)]
SIKDQTTRASSHKANDLDRSGHQQRTMARVLALGAAAAFLLLAVASTMAAAQNCGCAASQCCSRWGFCGATSEYCGTGCRSGPCTVPVTNNVSVPAIVTPAFFGALVAQAADDCAAKGFYTRDAFLTALGGYPAFGRTGSDDDSKREIAAFFAHVNHETIKFCYIDEINGPSKNYCDPTNAEWPCAAGKGYYGRGPLQISWNYNYGAAGQSLGFDGLNDPDAVARSPVLAFQAALWYWMNSVHDVIVSGQGFGATIRAINGALECNGKNPSAVNDRVAFYKQFCQQFGVDPGTSLTC

SEQ ID NO: 63899 - protein, 271 aa, Triticum aestivum
  peptide (1)..(271): Ceres Seq. ID no. 13597266
  misc_feature (71)..(271): Pfam Name: Chitinase class I Pfam Description: Chitinase class I
  misc_feature (11)..(271): Homolog of NCBI NO: 2570166 NR Description: chitinase [Chenopodium amaranticolor]
  misc_feature (6)..(271): Homolog of NCBI NO: 2570162 NR Description: chitinase [Chenopodium amaranticolor]
  misc_feature (1)..(271): Homolog of NCBI NO: 40557195 NR Description: class IV chitinase precursor [Medicago truncatula]
  misc_feature (1)..(271): Homolog of NCBI NO: 2597826 NR Description: class IV chitinase [Arabidopsis thaliana]
  misc_feature (6)..(271): Homolog of NCBI NO: 2570164 NR Description: chitinase [Chenopodium amaranticolor]
  misc_feature (1)..(271): Homolog of NCBI NO: 15232509 NR Description: glycosyl hydrolase family 19 (class IV chitinase)
  misc_feature (1)..(271): Homolog of NCBI NO: 38345417 NR Description: OSJNBb0091E11.8 [Oryza sativa (japonica
  misc_feature (14)..(271): Homolog of NCBI NO: 2306811 NR Description: class IV endochitinase [Vitis vinifera]
  misc_feature (14)..(271): Homolog of NCBI NO: 33329392 NR Description: class IV chitinase [Vitis vinifera]
  misc_feature (1)..(271): Homolog of NCBI NO: 30793457 NR Description: chitinase [Oryza sativa (japonica cultivar-group)]
MARVLALGAAAAFLLLAVASTMAAAQNCGCAASQCCSRWGFCGATSEYCGTGCRSGPCTVPVTNNVSVPAIVTPAFFGALVAQAADDCAAKGFYTRDAFLTALGGYPAFGRTGSDDDSKREIAAFFAHVNHETIKFCYIDEINGPSKNYCDPTNAEWPCAAGKGYYGRGPLQISWNYNYGAAGQSLGFDGLNDPDAVARSPVLAFQAALWYWMNSVHDVIVSGQGFGATIRAINGALECNGKNPSAVNDRVAFYKQFCQQFGVDPGTSLTC

SEQ ID NO: 63900 - protein, 250 aa, Triticum aestivum
  peptide (1)..(250): Ceres Seq. ID no. 13597267
  misc_feature (50)..(250): Pfam Name: Chitinase class I Pfam Description: Chitinase class I
  misc_feature (1)..(250): Homolog of NCBI NO: 2570166 NR Description: chitinase [Chenopodium amaranticolor]
  misc_feature (1)..(250): Homolog of NCBI NO: 2570162 NR Description: chitinase [Chenopodium amaranticolor]
  misc_feature (1)..(250): Homolog of NCBI NO: 40557195 NR Description: class IV chitinase precursor [Medicago truncatula]
  misc_feature (1)..(250): Homolog of NCBI NO: 2597826 NR Description: class IV chitinase [Arabidopsis thaliana]
  misc_feature (1)..(250): Homolog of NCBI NO: 2570164 NR Description: chitinase [Chenopodium amaranticolor]
  misc_feature (1)..(250): Homolog of NCBI NO: 15232509 NR Description: glycosyl hydrolase family 19 (class IV chitinase)
  misc_feature (1)..(250): Homolog of NCBI NO: 38345417 NR Description: OSJNBb0091E11.8 [Oryza sativa (japonica
  misc_feature (1)..(250): Homolog of NCBI NO: 2306811 NR Description: class IV endochitinase [Vitis vinifera]
  misc_feature (1)..(250): Homolog of NCBI NO: 33329392 NR Description: class IV chitinase [Vitis vinifera]
  misc_feature (1)..(250): Homolog of NCBI NO: 30793457 NR Description: chitinase [Oryza sativa (japonica cultivar-group)]
MAAAQNCGCAASQCCSRWGFCGATSEYCGTGCRSGPCTVPVTNNVSVPAIVTPAFFGALVAQAADDCAAKGFYTRDAFLTALGGYPAFGRTGSDDDSKREIAAFFAHVNHETIKFCYIDEINGPSKNYCDPTNAEWPCAAGKGYYGRGPLQISWNYNYGAAGQSLGFDGLNDPDAVARSPVLAFQAALWYWMNSVHDVIVSGQGFGATIRAINGALECNGKNPSAVNDRVAFYKQFCQQFGVDPGTSLTC

SEQ ID NO: 63901 - DNA, 1311 bp, Triticum aestivum
  misc_feature (1)..(1311): Ceres Seq. ID no. 13597320
gatttcccccagaaattaataaaccaccaaagccatagcttgaggcggcgagaagcagagccggagaaggaggggagtcggagaagatggttgttctcgtggtagcgacggcgtccgacccggcgtccatcggccccgccgccgcgttcctggctatgcctggctggtcccccggcccgcccatccccgaggggatggagagctttacaaatgggaatgttaggttattgaagcatgaacgcagcattgttgcagaggatgatcttgaccgtcggtggcaggaagccactggagaggctgtttctgaggtcatattcctcagcaaacacactgcagtctccaaccgccctgcactcactgtccatccaatcggtgtgccacatctgagggaggatgagaccccccctcaaggagggaggcctggatgggcaggggtgccaaaccctcgaattggcccatggttccggttgatgcaaaaggttgctgccgaccaaggtcttgttccagagtttgagattacacttgaagctactcaccatggaccacttaccagtacacccacgatgtttgttgagataggaagtacacaagaatactggggtagacaagatgctgcacaggccattgctctagttctatggaaaggtcttggccttgaggaaggaaatgctgttggaacttggctggggagtggtgaaaaggttctactaggtatcggtggtggtcactatgcccctcgccatatggatattgtcatcaaagacggtgtctgggtgggtcatctcctgtctggttactctttgccgatggaggctccacctcaagtaaatggaaagagttctggtgaggttggtgggatgtggaagcattccatcaaagtttcgtatgaagccacaaaggcaggatttcccggtggtgaagttatagcacatcttgatcagaagagcttcaagggctggcaaaagaacgccatcacgagctatttgcaggagcaaaatatcaagataggaaaacccaatgatttcctctgcaaaaaaatttaaccgcgtccgcaaggcaagtcgtcgaagtgacttcaccctccctagggcctggcacatacaaatggagtaaatatagagcactgtattttcgtaacccgatttcaagatgtagagtactccctccccgttcgtcttagaaggcctgacttgtgccaaaaaaaaaaacaggaatatactacgagagagacatatcttaaggacacgactatgcgtgcttgtggttcccagagttggcaggcaaatgggggctatcattatccatattttt

SEQ ID NO: 63902 - protein, 318 aa, Triticum aestivum
  peptide (1)..(318): Ceres Seq. ID no. 13597321
  misc_feature (49)..(310): Pfam Name: Protein of unknown function (DUF516) Pfam Description: Protein of unknown function (DUF516)
  misc_feature (69)..(235): Homolog of NCBI NO: 13540908 NR Description: Uncharacterized conserved protein [Thermoplasma
  misc_feature (4)..(241): Homolog of NCBI NO: 14520224 NR Description: hypothetical protein [Pyrococcus abyssi]
  misc_feature (66)..(239): Homolog of NCBI NO: 23051464 NR Description: hypothetical protein [Methanosarcina barkeri]
  misc_feature (75)..(235): Homolog of NCBI NO: 16081204 NR Description: hypothetical protein [Thermoplasma acidophilum]
  misc_feature (4)..(241): Homolog of NCBI NO: 14589968 NR Description: hypothetical protein [Pyrococcus horikoshii]
  misc_feature (76)..(238): Homolog of NCBI NO: 15668338 NR Description: conserved hypothetical protein [Methanococcus
  misc_feature (70)..(237): Homolog of NCBI NO: 22406443 NR Description: hypothetical protein [Ferroplasma acidarmanus]
  misc_feature (66)..(238): Homolog of NCBI NO: 14601434 NR Description: hypothetical protein [Aeropyrum pernix]
  misc_feature (1)..(313): Homolog of NCBI NO: 15227708 NR Description: expressed protein [Arabidopsis thaliana]
  misc_feature (1)..(313): Homolog of NCBI NO: 38636945 NR Description: putative GEKO1 [Oryza sativa (japonica
MVVLVVATASDPASIGPAAAFLAMPGWSPGPPIPEGMESFTNGNVRLLKHERSIVAEDDLDRRWQEATGEAVSEVIFLSKHTAVSNRPALTVHPIGVPHLREDETPPQGGRPGWAGVPNPRIGPWFRLMQKVAADQGLVPEFEITLEATHHGPLTSTPTMFVEIGSTQEYWGRQDAAQAIALVLWKGLGLEEGNAVGTWLGSGEKVLLGIGGGHYAPRHMDIVIKDGVWVGHLLSGYSLPMEAPPQVNGKSSGEVGGMWKHSIKVSYEATKAGFPGGEVIAHLDQKSFKGWQKNAITSYLQEQNIKIGKPNDFLCKKI

SEQ ID NO: 63903 - protein, 295 aa, Triticum aestivum
  peptide (1)..(295): Ceres Seq. ID no. 13597322
  misc_feature (26)..(287): Pfam Name: Protein of unknown function (DUF516) Pfam Description: Protein of unknown function (DUF516)
  misc_feature (46)..(212): Homolog of NCBI NO: 13540908 NR Description: Uncharacterized conserved protein [Thermoplasma
  misc_feature (1)..(218): Homolog of NCBI NO: 14520224 NR Description: hypothetical protein [Pyrococcus abyssi]
  misc_feature (43)..(216): Homolog of NCBI NO: 23051464 NR Description: hypothetical protein [Methanosarcina barkeri]
  misc_feature (52)..(212): Homolog of NCBI NO: 16081204 NR Description: hypothetical protein [Thermoplasma acidophilum]
  misc_feature (1)..(218): Homolog of NCBI NO: 14589968 NR Description: hypothetical protein [Pyrococcus horikoshii]
  misc_feature (53)..(215): Homolog of NCBI NO: 15668338 NR Description: conserved hypothetical protein [Methanococcus
  misc_feature (47)..(214): Homolog of NCBI NO: 22406443 NR Description: hypothetical protein [Ferroplasma acidarmanus]
  misc_feature (43)..(215): Homolog of NCBI NO: 14601434 NR Description: hypothetical protein [Aeropyrum pernix]
  misc_feature (1)..(290): Homolog of NCBI NO: 15227708 NR Description: expressed protein [Arabidopsis thaliana]
  misc_feature (1)..(290): Homolog of NCBI NO: 38636945 NR Description: putative GEKO1 [Oryza sativa (japonica
MPGWSPGPPIPEGMESFTNGNVRLLKHERSIVAEDDLDRRWQEATGEAVSEVIFLSKHTAVSNRPALTVHPIGVPHLREDETPPQGGRPGWAGVPNPRIGPWFRLMQKVAADQGLVPEFEITLEATHHGPLTSTPTMFVEIGSTQEYWGRQDAAQAIALVLWKGLGLEEGNAVGTWLGSGEKVLLGIGGGHYAPRHMDIVIKDGVWVGHLLSGYSLPMEAPPQVNGKSSGEVGGMWKHSIKVSYEATKAGFPGGEVIAHLDQKSFKGWQKNAITSYLQEQNIKIGKPNDFLCKKI

SEQ ID NO: 63904 - protein, 282 aa, Triticum aestivum
  peptide (1)..(282): Ceres Seq. ID no. 13597323
  misc_feature (13)..(274): Pfam Name: Protein of unknown function (DUF516) Pfam Description: Protein of unknown function (DUF516)
  misc_feature (33)..(199): Homolog of NCBI NO: 13540908 NR Description: Uncharacterized conserved protein [Thermoplasma
  misc_feature (1)..(205): Homolog of NCBI NO: 14520224 NR Description: hypothetical protein [Pyrococcus abyssi]
  misc_feature (30)..(203): Homolog of NCBI NO: 23051464 NR Description: hypothetical protein [Methanosarcina barkeri]
  misc_feature (39)..(199): Homolog of NCBI NO: 16081204 NR Description: hypothetical protein [Thermoplasma acidophilum]
  misc_feature (1)..(205): Homolog of NCBI NO: 14589968 NR Description: hypothetical protein [Pyrococcus horikoshii]
  misc_feature (40)..(202): Homolog of NCBI NO: 15668338 NR Description: conserved hypothetical protein [Methanococcus
  misc_feature (34)..(201): Homolog of NCBI NO: 22406443 NR Description: hypothetical protein [Ferroplasma acidarmanus]
  misc_feature (30)..(202): Homolog of NCBI NO: 14601434 NR Description: hypothetical protein [Aeropyrum pernix]
  misc_feature (1)..(277): Homolog of NCBI NO: 15227708 NR Description: expressed protein [Arabidopsis thaliana]
  misc_feature (1)..(277): Homolog of NCBI NO: 38636945 NR Description: putative GEKO1 [Oryza sativa (japonica
MESFTNGNVRLLKHERSIVAEDDLDRRWQEATGEAVSEVIFLSKHTAVSNRPALTVHPIGVPHLREDETPPQGGRPGWAGVPNPRIGPWFRLMQKVAADQGLVPEFEITLEATHHGPLTSTPTMFVEIGSTQEYWGRQDAAQAIALVLWKGLGLEEGNAVGTWLGSGEKVLLGIGGGHYAPRHMDIVIKDGVWVGHLLSGYSLPMEAPPQVNGKSSGEVGGMWKHSIKVSYEATKAGFPGGEVIAHLDQKSFKGWQKNAITSYLQEQNIKIGKPNDFLCKKI

SEQ ID NO: 63905 - DNA, 1488 bp, Triticum aestivum
  misc_feature (1)..(1488): Ceres Seq. ID no. 13584275
cacttgcacacaacattcttcctcgcaccactcagctagcagctgccaaacacaagctcgcaagctcacggccgggtacgtgcgaagcattgaacatgggagatgcgctgtgcgatcagctcctcgtggacgtcgacggtgagttccagctccccaccgacgccgaagacctattcagcatcctcgagacttgggaggactgcgtccacggcgccgctgcagcgttgagccccaccgccggcgccagcagccgtggtgagctgatgggcggttctgcgccggggaacaaaagcagcaagcggcgagcgcggccggacgaatgtgacggaatagcgcagacgcagaagaggcagaagtgctccccggaggagggaggcggcgcggcgccgaagacagcccacatcacggtggagcgcaaccgccggaagcagatgaacgagcacctgaccgtgctgcggtcgctcatgccctgcttctatgtcaagcgtggtgaccaagcatccatcataggaggagtggtggactacatcaaggagctgcagcaagtgaagcagtcgctggaggccaagaagcagcgcaaggcctacaccgagcacgtcctcagcccgcgtccgcccccgacgtcctacagcccacgcctacctctcagcccgctccacaaatccacgccgccgctcagcccattgctcaggtccactccgccgctcagcccgcgcctcgccgtcccgatcagccctgccaggacgccgccgacgccaggcagcccctacaagctccgccccctgccgccgccgatctccggctccacctacgtgtccccggcgatgacgccgaccggctacgagccgggctcctcctacctcccgtcgctcgacgccatcgccgccgagctgtcggtgtacgccaacaggcaggcgctgcagctgcccccgactgacccactccccgacgtgagggtggagttcgcaggcgcgaacctggtgctgaagacggtgtcgcaccgcgcgccggggcaggtggtgaagatcatcgccgcgctcgagtcacgggcgccggcgctggagattctccacgccaagatcagcaccatcgacgacactgacgtcaacgccttcaccgtcaagattggaatcgagtgttcgctcagcgctgaagagctggtgcaagagattcagcaaacgttctcgtaagcgtttagttaaggtccccgcttcgagttaaactctttcttgtttttcccaacagggctgaaactcgtcgaattagacggtgaagatgcatgtattggtaagcatgcataagtttgtgcatgtgtgtgtcttgtaagatcgaaactgaggatgagctgaggagccgggcacttgaatggtcgtggtacaggtcgtactctagctatagctaactagctagatcgatcatttcttgtgctacctgcgtacgtatgtaactgcagttgttcaatggcacgtgcatttattttcacaactc

SEQ ID NO: 63906 - protein, 395 aa, Triticum aestivum
  peptide (1)..(395): Ceres Seq. ID no. 13584276
  misc_feature (130)..(180): Pfam Name: Helix-loop-helix DNA-binding domain Pfam Description: Helix-loop-helix DNA-binding domain
  misc_feature (63)..(206): Homolog of NCBI NO: 37533680 NR Description: putative helix-loop-helix DNA-binding protein
  misc_feature (79)..(206): Homolog of NCBI NO: 38346722 NR Description: OSJNBa0086O06.20 [Oryza sativa (japonica
  misc_feature (314)..(377): Homolog of NCBI NO: 11994233 NR Description: contains similarity to helix-loop-helix
  misc_feature (110)..(225): Homolog of NCBI NO: 11994233 NR Description: contains similarity to helix-loop-helix
  misc_feature (314)..(395): Homolog of NCBI NO: 30687365 NR Description: bHLH protein family [Arabidopsis thaliana]
  misc_feature (110)..(225): Homolog of NCBI NO: 30687365 NR Description: bHLH protein family [Arabidopsis thaliana]
  misc_feature (132)..(193): Homolog of NCBI NO: 15230639 NR Description: bHLH protein family [Arabidopsis thaliana]
  misc_feature (313)..(394): Homolog of NCBI NO: 15230639 NR Description: bHLH protein family [Arabidopsis thaliana]
  misc_feature (314)..(394): Homolog of NCBI NO: 15238680 NR Description: bHLH protein family [Arabidopsis thaliana]
  misc_feature (55)..(228): Homolog of NCBI NO: 15238680 NR Description: bHLH protein family [Arabidopsis thaliana]
LAHNILPRTTQLAAAKHKLASSRPGTCEALNMGDALCDQLLVDVDGEFQLPTDAEDLFSILETWEDCVHGAAAALSPTAGASSRGELMGGSAPGNKSSKRRARPDECDGIAQTQKRQKCSPEEGGGAAPKTAHITVERNRRKQMNEHLTVLRSLMPCFYVKRGDQASIIGGVVDYIKELQQVKQSLEAKKQRKAYTEHVLSPRPPPTSYSPRLPLSPLHKSTPPLSPLLRSTPPLSPRLAVPISPARTPPTPGSPYKLRPLPPPISGSTYVSPAMTPTGYEPGSSYLPSLDAIAAELSVYANRQALQLPPTDPLPDVRVEFAGANLVLKTVSHRAPGQVVKIIAALESRAPALEILHAKISTIDDTDVNAFTVKIGIECSLSAEELVQEIQQTFS

SEQ ID NO: 63907 - protein, 364 aa, Triticum aestivum
  peptide (1)..(364): Ceres Seq. ID no. 13584277
  misc_feature (99)..(149): Pfam Name: Helix-loop-helix DNA-binding domain Pfam Description: Helix-loop-helix DNA-binding domain
  misc_feature (32)..(175): Homolog of NCBI NO: 37533680 NR Description: putative helix-loop-helix DNA-binding protein
  misc_feature (48)..(175): Homolog of NCBI NO: 38346722 NR Description: OSJNBa0086O06.20 [Oryza sativa (japonica
  misc_feature (283)..(346): Homolog of NCBI NO: 11994233 NR Description: contains similarity to helix-loop-helix
  misc_feature (79)..(194): Homolog of NCBI NO: 11994233 NR Description: contains similarity to helix-loop-helix
  misc_feature (283)..(364): Homolog of NCBI NO: 30687365 NR Description: bHLH protein family [Arabidopsis thaliana]
  misc_feature (79)..(194): Homolog of NCBI NO: 30687365 NR Description: bHLH protein family [Arabidopsis thaliana]
  misc_feature (101)..(162): Homolog of NCBI NO: 15230639 NR Description: bHLH protein family [Arabidopsis thaliana]
  misc_feature (282)..(363): Homolog of NCBI NO: 15230639 NR Description: bHLH protein family [Arabidopsis thaliana]
  misc_feature (283)..(363): Homolog of NCBI NO: 15238680 NR Description: bHLH protein family [Arabidopsis thaliana]
  misc_feature (24)..(197): Homolog of NCBI NO: 15238680 NR Description: bHLH protein family [Arabidopsis thaliana]
MGDALCDQLLVDVDGEFQLPTDAEDLFSILETWEDCVHGAAAALSPTAGASSRGELMGGSAPGNKSSKRRARPDECDGIAQTQKRQKCSPEEGGGAAPKTAHITVERNRRKQMNEHLTVLRSLMPCFYVKRGDQASIIGGVVDYIKELQQVKQSLEAKKQRKAYTEHVLSPRPPPTSYSPRLPLSPLHKSTPPLSPLLRSTPPLSPRLAVPISPARTPPTPGSPYKLRPLPPPISGSTYVSPAMTPTGYEPGSSYLPSLDAIAAELSVYANRQALQLPPTDPLPDVRVEFAGANLVLKTVSHRAPGQVVKIIAALESRAPALEILHAKISTIDDTDVNAFTVKIGIECSLSAEELVQEIQQTFS

SEQ ID NO: 63908 - protein, 308 aa, Triticum aestivum
  peptide (1)..(308): Ceres Seq. ID no. 13584278
  misc_feature (43)..(93): Pfam Name: Helix-loop-helix DNA-binding domain Pfam Description: Helix-loop-helix DNA-binding domain
  misc_feature (1)..(119): Homolog of NCBI NO: 37533680 NR Description: putative helix-loop-helix DNA-binding protein
  misc_feature (1)..(119): Homolog of NCBI NO: 38346722 NR Description: OSJNBa0086O06.20 [Oryza sativa (japonica
  misc_feature (227)..(290): Homolog of NCBI NO: 11994233 NR Description: contains similarity to helix-loop-helix
  misc_feature (23)..(138): Homolog of NCBI NO: 11994233 NR Description: contains similarity to helix-loop-helix
  misc_feature (227)..(308): Homolog of NCBI NO: 30687365 NR Description: bHLH protein family [Arabidopsis thaliana]
  misc_feature (23)..(138): Homolog of NCBI NO: 30687365 NR Description: bHLH protein family [Arabidopsis thaliana]
  misc_feature (45)..(106): Homolog of NCBI NO: 15230639 NR Description: bHLH protein family [Arabidopsis thaliana]
  misc_feature (226)..(307): Homolog of NCBI NO: 15230639 NR Description: bHLH protein family [Arabidopsis thaliana]
  misc_feature (227)..(307): Homolog of NCBI NO: 15238680 NR Description: bHLH protein family [Arabidopsis thaliana]
  misc_feature (1)..(141): Homolog of NCBI NO: 15238680 NR Description: bHLH protein family [Arabidopsis thaliana]
MGGSAPGNKSSKRRARPDECDGIAQTQKRQKCSPEEGGGAAPKTAHITVERNRRKQMNEHLTVLRSLMPCFYVKRGDQASIIGGVVDYIKELQQVKQSLEAKKQRKAYTEHVLSPRPPPTSYSPRLPLSPLHKSTPPLSPLLRSTPPLSPRLAVPISPARTPPTPGSPYKLRPLPPPISGSTYVSPAMTPTGYEPGSSYLPSLDAIAAELSVYANRQALQLPPTDPLPDVRVEFAGANLVLKTVSHRAPGQVVKIIAALESRAPALEILHAKISTIDDTDVNAFTVKIGIECSLSAEELVQEIQQTFS

SEQ ID NO: 63909 - DNA, 1196 bp, Triticum aestivum
  misc_feature (1)..(1196): Ceres Seq. ID no. 12616895
atcacacaattcccagatcacaccgtgcgccacgcccccttccccaaaaacctttcgaaaaccgccgcgccaaccgccacccagccccgtccaagaaaccgcacgccaccgcggacgcgaccccccgccggcgccaagatggtgcggctaagcaacacggtgatcgggatcctgaacgcggtgaccttcctgctctcggtgcccatcctggcgggcggcatctggctgcgggcgcgcgccgacggcaccgagtgcgagcgctacctggcggcgccggtgatcgcggtgggggtgttcctcatgctcgtctccatcgcggggctcgtcggcgcctgctgccgcgtcacctgcctcctctggttctacctcgtcgccatgttcctgctcatcgtcgtcctcctcggcctcaccgtcttcgccttcgtcgtcacgcacaagggcaccggggaggccgtctccggccgcggattcaaggagtacaggctcggggactactccaactggctgcagaagcgggtggagaacgacaagaactggaacaggatcaagggctgcctccaggacgccaaggtctgcaagtcgctcgaggacaagacggtcgaccagttcatgtcctccgatctctcccccatccagtccggctgctgcaagcctccgatcagctgcggcttcacctacgtcaacagcacgcaatggaccggccccgccaagtcgacggagcccgactgcggcgcgtggtccaacgacggggcgctctgctacggctgccagtcgtgcaaggccggcgtggtggccaccctcaagcgcaattggaagcgctccgccatcatcaacatcgtcttcctcgtcttcatcatcattgtctactccgtcggctgctgcgccttcaggaacaaccgccgcgaccaccgcaacggcggcgggtacaagcagcagggcgcgtacgcctgatcgtttggctcggttatttattgcttggattggatggatgcgatcgtcgtgtcattttcattcatcgtcgtgcttctcttaggatggcctgatctagctttgtacaggcgagattattctgtgctctgatcatctactagttaggttctatactccgtggtcatgaggagggttgtgtatatatcttttctgttctttgatatgtatggcagaccattatatatgtaacagattattctggagtc

SEQ ID NO: 63910 - protein, 346 aa, Triticum aestivum
  peptide (1)..(346): Ceres Seq. ID no. 12616896
HTIPRSHRAPRPLPQKPFENRRANRHPAPSKKPHATADATPRRRQDGAAKQHGDRDPERGDLPALGAHPGGRHLAAGARRRHRVRALPGGAGDRGGGVPHARLHRGARRRLLPRHLPPLVLPRRHVPAHRRPPRPHRLRLRRHAQGHRGGRLRPRIQGVQARGLLQLAAEAGGERQELEQDQGLPPGRQGLQVARGQDGRPVHVLRSLPHPVRLLQASDQLRLHLRQQHAMDRPRQVDGARLRRVVQRRGALLRLPVVQGRRGGHPQAQLEALRHHQHRLPRLHHHCLLRRLLRLQEQPPRPPQRRRVQAAGRVRLIVWLGYLLLGLDGCDRRVIFIHRRASLRMA

SEQ ID NO: 63911 - protein, 316 aa, Triticum aestivum
  peptide (1)..(316): Ceres Seq. ID no. 12616897
  misc_feature (51)..(285): Pfam Name: Tetraspanin family Pfam Description: Tetraspanin family
  misc_feature (50)..(298): Homolog of NCBI NO: 17979386 NR Description: putative senescence-associated protein 5
  misc_feature (40)..(298): Homolog of NCBI NO: 34906104 NR Description: putative senescence-assocated protein
  misc_feature (48)..(316): Homolog of NCBI NO: 15238641 NR Description: senescence-associated protein - like; protein id:
  misc_feature (48)..(301): Homolog of NCBI NO: 15231187 NR Description: putative protein
  misc_feature (47)..(307): Homolog of NCBI NO: 21537169 NR Description: senescence-associated protein-like protein
  misc_feature (47)..(307): Homolog of NCBI NO: 15234743 NR Description: senescence-associated protein homolog
  misc_feature (47)..(301): Homolog of NCBI NO: 15234374 NR Description: senescence-associated protein -like
  misc_feature (47)..(307): Homolog of NCBI NO: 3551954 NR Description: senescence-associated protein 5 [Hemerocallis
  misc_feature (47)..(310): Homolog of NCBI NO: 20197174 NR Description: hypothetical protein [Arabidopsis thaliana]
  misc_feature (49)..(316): Homolog of NCBI NO: 29367553 NR Description: senescence-associated protein-like protein
ITQFPDHTVRHAPFPKNLSKTAAPTATQPRPRNRTPPRTRPPAGAKMVRLSNTVIGILNAVTFLLSVPILAGGIWLRARADGTECERYLAAPVIAVGVFLMLVSIAGLVGACCRVTCLLWFYLVAMFLLIVVLLGLTVFAFVVTHKGTGEAVSGRGFKEYRLGDYSNWLQKRVENDKNWNRIKGCLQDAKVCKSLEDKTVDQFMSSDLSPIQSGCCKPPISCGFTYVNSTQWTGPAKSTEPDCGAWSNDGALCYGCQSCKAGVVATLKRNWKRSAIINIVFLVFIIIVYSVGCCAFRNNRRDHRNGGGYKQQGAYA

SEQ ID NO: 63912 - protein, 270 aa, Triticum aestivum
  peptide (1)..(270): Ceres Seq. ID no. 12616898
  misc_feature (5)..(239): Pfam Name: Tetraspanin family Pfam Description: Tetraspanin family
  misc_feature (4)..(252): Homolog of NCBI NO: 17979386 NR Description: putative senescence-associated protein 5
  misc_feature (1)..(252): Homolog of NCBI NO: 34906104 NR Description: putative senescence-assocated protein
  misc_feature (2)..(270): Homolog of NCBI NO: 15238641 NR Description: senescence-associated protein - like; protein id:
  misc_feature (2)..(255): Homolog of NCBI NO: 15231187 NR Description: putative protein
  misc_feature (1)..(261): Homolog of NCBI NO: 21537169 NR Description: senescence-associated protein-like protein
  misc_feature (1)..(261): Homolog of NCBI NO: 15234743 NR Description: senescence-associated protein homolog
  misc_feature (1)..(255): Homolog of NCBI NO: 15234374 NR Description: senescence-associated protein -like
  misc_feature (1)..(261): Homolog of NCBI NO: 3551954 NR Description: senescence-associated protein 5 [Hemerocallis
  misc_feature (1)..(264): Homolog of NCBI NO: 20197174 NR Description: hypothetical protein [Arabidopsis thaliana]
  misc_feature (3)..(270): Homolog of NCBI NO: 29367553 NR Description: senescence-associated protein-like protein
MVRLSNTVIGILNAVTFLLSVPILAGGIWLRARADGTECERYLAAPVIAVGVFLMLVSIAGLVGACCRVTCLLWFYLVAMFLLIVVLLGLTVFAFVVTHKGTGEAVSGRGFKEYRLGDYSNWLQKRVENDKNWNRIKGCLQDAKVCKSLEDKTVDQFMSSDLSPIQSGCCKPPISCGFTYVNSTQWTGPAKSTEPDCGAWSNDGALCYGCQSCKAGVVATLKRNWKRSAIINIVFLVFIIIVYSVGCCAFRNNRRDHRNGGGYKQQGAYA

SEQ ID NO: 63913 - DNA, 855 bp, Triticum aestivum
  misc_feature (1)..(855): Ceres Seq. ID no. 15178538
tcctctcttatcccgattcacccctcgtctccctcccatcccacgctaccgccgcccaccaccccggcgacctccccactggcgatccccggcctctccctctccttctcccctgcatcttcctccgaggcgcggcaaggggaggccgccgtcgtcgccgccgccgcgcgcgatccgggagggcaagaggggaggcggacgcgggcgaggagatggcatcggaggacgtggtggggaagagcaggggcggcacggccatcaacaccatcgtcaacctggctgaggaggccaagctcgcgcgcgagggcgtcaagggccccggccaccaggtcctcaccgtctgcaagtccctcttcgccggaggcgtcgccggcggcctttcattgatgacagccaagggttcatgctcggaaacgactacatcttgctctacgttgtcggctcagctagagtccttaatcatgaggagatgggacacgtcgattgttagagtacacttgacaggggtgaccgacgctgactagcgcagccggtgggcgttgtgctcttcaaccactcagaggcggacttctccgtgaagctggtggccatgtcgcatagatgattgtccaggtgatttcaacgccggaggtcgccgaggtggtggacctcgacgccaccgtccgggggagggaggattcgggtccaccgacgtctaagctccgagccttggtagatacatctagggaagttgtctgtttaggttgatgatggaacaccagggaaggtacccacctttcgatgatcattgtgtgtgtctgaagttaaatggaatcttgagaatgttatgtgatgttggcaaaaaaaaaaaaaaaa

SEQ ID NO: 63914 - protein, 173 aa, Triticum aestivum
  peptide (1)..(173): Ceres Seq. ID no. 15178539
  misc_feature (71)..(127): Homolog of NCBI NO: 15234063 NR Description: mitochondrial carrier protein family [Arabidopsis
LSYPDSPLVSLPSHATAAHHPGDLPTGDPRPLPLLLPCIFLRGAARGGRRRRRRRARSGRARGEADAGEEMASEDVVGKSRGGTAINTIVNLAEEAKLAREGVKGPGHQVLTVCKSLFAGGVAGGLSLMTAKGSCSETTTSCSTLSAQLESLIMRRWDTSIVRVHLTGVTDAD

SEQ ID NO: 63915 - protein, 128 aa, Triticum aestivum
  peptide (1)..(128): Ceres Seq. ID no. 15178540
SSLIPIHPSSPSHPTLPPPTTPATSPLAIPGLSLSFSPASSSEARQGEAAVVAAAARDPGGQEGRRTRARRWHRRTWWGRAGAARPSTPSSTWLRRPSSRARASRAPATRSSPSASPSSPEASPAAFH

SEQ ID NO: 63916 - protein, 103 aa, Triticum aestivum
  peptide (1)..(103): Ceres Seq. ID no. 15178541
  misc_feature (1)..(57): Homolog of NCBI NO: 15234063 NR Description: mitochondrial carrier protein family [Arabidopsis
MASEDVVGKSRGGTAINTIVNLAEEAKLAREGVKGPGHQVLTVCKSLFAGGVAGGLSLMTAKGSCSETTTSCSTLSAQLESLIMRRWDTSIVRVHLTGVTDAD

SEQ ID NO: 63917 - DNA, 1144 bp, Triticum aestivum
  misc_feature (1)..(1144): Ceres Seq. ID no. 12616903
agcatcggctagccaagtccagtaagcatcagcaaatctgacgtaccccattcgtgccccgtctccactcccgctaccgactccggcgaccaccatggccactcgccggagccccgccaccacccaccaccgactcctcctactcctcctccccttgctgctaatcggctcgttcctcctccccctctcgtccgcctaccgccccggcgacatcatccccatgctccgctccggccagtaccacggctcgaggtcggtgtggttcgacgtcatcggccgccactgcccggtcttcgcggtcaaccgggaggtgctgatgccgatccccaagccgacggggttcaccggtgcggatccgtataagataacatttcagattggacacgaaaagttccatgttccttggctttatgttattaatcgcaaaagctctgaagttccactgattgatttccatttaaaatacactggaaacgatttgcttggtgttacggctaaagtagtggacatgcctcaccattttgtggaacttcatcctgacataaagaagaatttctgggatccacagaattggccaaaatatgtacttgttagttatacatgggaggaacaatcagagatagatgttactgcaggattctatgtgttatttggatctggccttgttctttcgttcatccttgcaatctatgtattgcaatcatctcaagataaattaacaaggtttgtacgagaagcggtttctgatagcagtctacctgaaggaggggttgcaaaggttgagtgatgtttccgcgaggggctgttggattatcaacaaatgtccacttatggaaacaccgacaaagacattgtgaacttgagctttcttgggagcgtggacaatagcatgcatctgaagaaccggtgaaccatagcgagttaaatgagagatgaattataggtttttccttgctataacggaacatttagcaaactgaagtatgtgcagttgctagctcattacagttttgatatatgacctgtgtgatttcaatgttgcaagaatttgtcttctacatctacattttgtagaatgtgtaagtagaaacaggcaccgtgtacacctctacagaggaaaagattggtgcaaatgttcattctt

SEQ ID NO: 63918 - protein, 230 aa, Triticum aestivum
  peptide (1)..(230): Ceres Seq. ID no. 12616904
  misc_feature (43)..(220): Homolog of NCBI NO: 11280696 NR Description: hypothetical protein F26O13.250 - Arabidopsis
  misc_feature (21)..(220): Homolog of NCBI NO: 21617957 NR Description: unknown [Arabidopsis thaliana]
  misc_feature (21)..(220): Homolog of NCBI NO: 18409385 NR Description: putative protein
MATRRSPATTHHRLLLLLLPLLLIGSFLLPLSSAYRPGDIIPMLRSGQYHGSRSVWFDVIGRHCPVFAVNREVLMPIPKPTGFTGADPYKITFQIGHEKFHVPWLYVINRKSSEVPLIDFHLKYTGNDLLGVTAKVVDMPHHFVELHPDIKKNFWDPQNWPKYVLVSYTWEEQSEIDVTAGFYVLFGSGLVLSFILAIYVLQSSQDKLTRFVREAVSDSSLPEGGVAKVE

SEQ ID NO: 63919 - protein, 188 aa, Triticum aestivum
  peptide (1)..(188): Ceres Seq. ID no. 12616905
  misc_feature (1)..(178): Homolog of NCBI NO: 11280696 NR Description: hypothetical protein F26O13.250 - Arabidopsis
  misc_feature (1)..(178): Homolog of NCBI NO: 21617957 NR Description: unknown [Arabidopsis thaliana]
  misc_feature (1)..(178): Homolog of NCBI NO: 18409385 NR Description: putative protein
MLRSGQYHGSRSVWFDVIGRHCPVFAVNREVLMPIPKPTGFTGADPYKITFQIGHEKFHVPWLYVINRKSSEVPLIDFHLKYTGNDLLGVTAKVVDMPHHFVELHPDIKKNFWDPQNWPKYVLVSYTWEEQSEIDVTAGFYVLFGSGLVLSFILAIYVLQSSQDKLTRFVREAVSDSSLPEGGVAKVE

SEQ ID NO: 63920 - protein, 156 aa, Triticum aestivum
  peptide (1)..(156): Ceres Seq. ID no. 12616906
  misc_feature (1)..(146): Homolog of NCBI NO: 11280696 NR Description: hypothetical protein F26O13.250 - Arabidopsis
  misc_feature (1)..(146): Homolog of NCBI NO: 21617957 NR Description: unknown [Arabidopsis thaliana]
  misc_feature (1)..(146): Homolog of NCBI NO: 18409385 NR Description: putative protein
MPIPKPTGFTGADPYKITFQIGHEKFHVPWLYVINRKSSEVPLIDFHLKYTGNDLLGVTAKVVDMPHHFVELHPDIKKNFWDPQNWPKYVLVSYTWEEQSEIDVTAGFYVLFGSGLVLSFILAIYVLQSSQDKLTRFVREAVSDSSLPEGGVAKVE

SEQ ID NO: 63921 - DNA, 1467 bp, Triticum aestivum
  misc_feature (1)..(1467): Ceres Seq. ID no. 15224513
cccggccgtcatggcgtcggcggacgaagcgaatgcggcggccgaaggtacggaggggaagaattggcagcggaaggggaagcacaagaaggagaagccgtgggacgatgaccccaacatcgaccgctggacggtggagaagttcgacccctcctggaacgagggcggcctgctggaagtcagctccttctccaccctcttcccccagtaccgagagaagtacctgcaggagacatggccgatcgtcaagggcgcactgaaggagtttggagtctcatgcgagctcaatttggtggaaggatccatgacggtttccaccaccaggaagaccagggacccctacattattcttaaggccagggacctgataaagctcttgtcgcgaagtgtccctgcaccccaagcaattaaagtgctcaatgatgagatgaactgtgatattgtcaagattggtagcatcataagaaacaaggaaagatttgtcaaaaggagagaacgccttttgggccctaacctgtccacccttaaggctatagagattttgactggctgctacatcttagtacagggaaatactgtggctgccatgggttcctttaagggactgaaacaggtccggaagattgtagaggattgcataaagaacataaagcatccagtgtaccacattaaggaactccttattaaacgtgagctggctaaaaatcctgccctagccactgaaagttgggacaggtttctaccgaactttaagaaaaagaatgtcaagcaaaagaagcccaatactaaggagaagaaacaatacacaccctttccgccgcctcagcagcctagcaagattgatcttgaactggagagtggtgagtatttcatgagtgacaagaagaagtcagctaagaaatggcaagagaagctagataagcaatcagagaaatcagaagaaaagaaaagaaagagagaagctgcatttgttccaccaaaggagaacactgctggtctatctgaatctgccaaaagtactaatgacaacgagattgctgatatcacaaaatccttaaagaaaaaggcaaagaaattcagaaatagtgaagctgaggaaaatgtgaaaatcgagtcatatgttgcgagcaacgaagaatcacgctccaaaaagaagcgcagatcgtcatccaagtaaccgcaatatgtcagctactgggatgacaattttaattgtttcaagtagttgaacacctgccattgaagtaggttttcaagcttcaagctttagtggtgaaacagacaaaccttcaaccttaagtggtgaacattgtagtctgtttgttggctactgccgtctgattactccaggagtattgcagctttcctgcatagtccacggcttctaatttacaagatcagatccgtcagcagtctttttagaaacatatgaagagcagttaatgataagtccgttaattcttcttt

SEQ ID NO: 63922 - protein, 391 aa, Triticum aestivum
  peptide (1)..(391): Ceres Seq. ID no. 15224514
  misc_feature (28)..(328): Homolog of NCBI NO: 38106638 NR Description: hypothetical protein MG06049.4 [Magnaporthe
  misc_feature (28)..(341): Homolog of NCBI NO: 32413695 NR Description: hypothetical protein [Neurospora crassa]
  misc_feature (28)..(328): Homolog of NCBI NO: 6319791 NR Description: Involved in cell division and spore germination;
  misc_feature (28)..(379): Homolog of NCBI NO: 40739194 NR Description: hypothetical protein AN5875.2 [Aspergillus
  misc_feature (17)..(330): Homolog of NCBI NO: 19112865 NR Description: strong similarity to yeast cell division and
  misc_feature (4)..(388): Homolog of NCBI NO: 21592614 NR Description: rev interacting protein mis3-like [Arabidopsis
  misc_feature (4)..(388): Homolog of NCBI NO: 15241622 NR Description: rev interacting protein mis3 - like [Arabidopsis
  misc_feature (4)..(157): Homolog of NCBI NO: 34910546 NR Description: rev interacting protein-like
  misc_feature (176)..(389): Homolog of NCBI NO: 34910546 NR Description: rev interacting protein-like
  misc_feature (4)..(389): Homolog of NCBI NO: 37534940 NR Description: unknown protein [Oryza sativa (japonica
PAVMASADEANAAAEGTEGKNWQRKGKHKKEKPWDDDPNIDRWTVEKFDPSWNEGGLLEVSSFSTLFPQYREKYLQETWPIVKGALKEFGVSCELNLVEGSMTVSTTRKTRDPYIILKARDLIKLLSRSVPAPQAIKVLNDEMNCDIVKIGSIIRNKERFVKRRERLLGPNLSTLKAIEILTGCYILVQGNTVAAMGSFKGLKQVRKIVEDCIKNIKHPVYHIKELLIKRELAKNPALATESWDRFLPNFKKKNVKQKKPNTKEKKQYTPFPPPQQPSKIDLELESGEYFMSDKKKSAKKWQEKLDKQSEKSEEKKRKREAAFVPPKENTAGLSESAKSTNDNEIADITKSLKKKAKKFRNSEAEENVKIESYVASNEESRSKKKRRSSSK

SEQ ID NO: 63923 - protein, 388 aa, Triticum aestivum
  peptide (1)..(388): Ceres Seq. ID no. 15224515
  misc_feature (25)..(325): Homolog of NCBI NO: 38106638 NR Description: hypothetical protein MG06049.4 [Magnaporthe
  misc_feature (25)..(338): Homolog of NCBI NO: 32413695 NR Description: hypothetical protein [Neurospora crassa]
  misc_feature (25)..(325): Homolog of NCBI NO: 6319791 NR Description: Involved in cell division and spore germination;
  misc_feature (25)..(376): Homolog of NCBI NO: 40739194 NR Description: hypothetical protein AN5875.2 [Aspergillus
  misc_feature (14)..(327): Homolog of NCBI NO: 19112865 NR Description: strong similarity to yeast cell division and
  misc_feature (1)..(385): Homolog of NCBI NO: 21592614 NR Description: rev interacting protein mis3-like [Arabidopsis
  misc_feature (1)..(385): Homolog of NCBI NO: 15241622 NR Description: rev interacting protein mis3 - like [Arabidopsis
  misc_feature (1)..(154): Homolog of NCBI NO: 34910546 NR Description: rev interacting protein-like
  misc_feature (173)..(386): Homolog of NCBI NO: 34910546 NR Description: rev interacting protein-like
  misc_feature (1)..(386): Homolog of NCBI NO: 37534940 NR Description: unknown protein [Oryza sativa (japonica
MASADEANAAAEGTEGKNWQRKGKHKKEKPWDDDPNIDRWTVEKFDPSWNEGGLLEVSSFSTLFPQYREKYLQETWPIVKGALKEFGVSCELNLVEGSMTVSTTRKTRDPYIILKARDLIKLLSRSVPAPQAIKVLNDEMNCDIVKIGSIIRNKERFVKRRERLLGPNLSTLKAIEILTGCYILVQGNTVAAMGSFKGLKQVRKIVEDCIKNIKHPVYHIKELLIKRELAKNPALATESWDRFLPNFKKKNVKQKKPNTKEKKQYTPFPPPQQPSKIDLELESGEYFMSDKKKSAKKWQEKLDKQSEKSEEKKRKREAAFVPPKENTAGLSESAKSTNDNEIADITKSLKKKAKKFRNSEAEENVKIESYVASNEESRSKKKRRSSSK

SEQ ID NO: 63924 - protein, 290 aa, Triticum aestivum
  peptide (1)..(290): Ceres Seq. ID no. 15224516
  misc_feature (1)..(227): Homolog of NCBI NO: 38106638 NR Description: hypothetical protein MG06049.4 [Magnaporthe
  misc_feature (1)..(240): Homolog of NCBI NO: 32413695 NR Description: hypothetical protein [Neurospora crassa]
  misc_feature (1)..(227): Homolog of NCBI NO: 6319791 NR Description: Involved in cell division and spore germination;
  misc_feature (1)..(278): Homolog of NCBI NO: 40739194 NR Description: hypothetical protein AN5875.2 [Aspergillus
  misc_feature (1)..(229): Homolog of NCBI NO: 19112865 NR Description: strong similarity to yeast cell division and
  misc_feature (1)..(287): Homolog of NCBI NO: 21592614 NR Description: rev interacting protein mis3-like [Arabidopsis
  misc_feature (1)..(287): Homolog of NCBI NO: 15241622 NR Description: rev interacting protein mis3 - like [Arabidopsis
  misc_feature (1)..(56): Homolog of NCBI NO: 34910546 NR Description: rev interacting protein-like
  misc_feature (75)..(288): Homolog of NCBI NO: 34910546 NR Description: rev interacting protein-like
  misc_feature (1)..(288): Homolog of NCBI NO: 37534940 NR Description: unknown protein [Oryza sativa (japonica
MTVSTTRKTRDPYIILKARDLIKLLSRSVPAPQAIKVLNDEMNCDIVKIGSIIRNKERFVKRRERLLGPNLSTLKAIEILTGCYILVQGNTVAAMGSFKGLKQVRKIVEDCIKNIKHPVYHIKELLIKRELAKNPALATESWDRFLPNFKKKNVKQKKPNTKEKKQYTPFPPPQQPSKIDLELESGEYFMSDKKKSAKKWQEKLDKQSEKSEEKKRKREAAFVPPKENTAGLSESAKSTNDNEIADITKSLKKKAKKFRNSEAEENVKIESYVASNEESRSKKKRRSSSK

SEQ ID NO: 63925 - DNA, 1022 bp, Triticum aestivum
  misc_feature (1)..(1022): Ceres Seq. ID no. 13597163
aaccccagacaccacagccagcaatcagaccatggacggcggcggcggcgtgcggccatcgctccagcccgcggcggccggaggaggggcgtcgggcagcccggacgagccccgcgacgcgcgcgtggtgcgggagctcctccgctccatggggctcggcgagggcgagtacgagccgcgcgtcgtgcaccagttcctcgacctcgcctaccgctacgccggggacgtgctcggcgacgcccaggtctacgccgaccacgccggcaagccccagctcgacgccgacgacgtccgcctcgccatccaggccaaggtcaacttctccttctcccagccgccgccccgcgaggttctactcgagctggcacgcagcaggaacaaaatcccgctgcccaagtctattgctccacctggctcgattcctctgccacctgagcaggacaccttgctgagccagaactaccagctcctacccgcattgaagccgccaactcagaccgaggaagcagaagatgacgaggagggtgccaacgcggacgctgccaatcctaacccgaactccttgcaggatcagacgggcaacgagcagcagcagcagcctcagagccagagccagggccagagggtttctttccagctgaacgccgtggccgccgcagctgcaaagcgtctccgaatgacgattgatcagctgaacatgggctgactggatgttgtagatcgttggctggtccctggtactttgtgtcattggtgttgtagattgttggctggtccctgggatcgctatcgccctcctatttcaccatgtgattagtttaaaaaagtaataattcaccatgagaaacgctgatgcttcaggaaacggagcagccttgcaaataagtgtatgttgttgccgtgcaccccgggttgattagtttctgtccatcgttgtcaacttggtttgttttgtagatggtgttgacttgtcaaacttgaactgttccattgttgtttctgaataccaaatcagtgttccc

SEQ ID NO: 63926 - protein, 234 aa, Triticum aestivum
  peptide (1)..(234): Ceres Seq. ID no. 13597164
  misc_feature (32)..(157): Pfam Name: Transcription initiation factor IID, 31kD subunit Pfam Description: Transcription initiation factor IID, 31kD
  misc_feature (33)..(222): Homolog of NCBI NO: 34576553 NR Description: TAF9 RNA polymerase II, TATA box binding protein
  misc_feature (29)..(222): Homolog of NCBI NO: 18079237 NR Description: TAF9 RNA polymerase II, TATA box binding protein
  misc_feature (37)..(165): Homolog of NCBI NO: 30186181 NR Description: Similar to TAF9-like RNA polymerase II, TATA box
  misc_feature (29)..(165): Homolog of NCBI NO: 20070280 NR Description: TBP-associated factor 9L
  misc_feature (29)..(165): Homolog of NCBI NO: 4689154 NR Description: neuronal cell death-related protein [Homo sapiens]
  misc_feature (33)..(222): Homolog of NCBI NO: 33086648 NR Description: Cb1-739 [Rattus norvegicus]
  misc_feature (11)..(194): Homolog of NCBI NO: 24059851 NR Description: transcriptional activation factor TAFII32-like
  misc_feature (32)..(214): Homolog of NCBI NO: 15221048 NR Description: transcriptional activation factor TAFII32
  misc_feature (15)..(116): Homolog of NCBI NO: 30017563 NR Description: putative transcription initiation factor
  misc_feature (117)..(234): Homolog of NCBI NO: 30017563 NR Description: putative transcription initiation factor
TPDTTASNQTMDGGGGVRPSLQPAAAGGGASGSPDEPRDARVVRELLRSMGLGEGEYEPRVVHQFLDLAYRYAGDVLGDAQVYADHAGKPQLDADDVRLAIQAKVNFSFSQPPPREVLLELARSRNKIPLPKSIAPPGSIPLPPEQDTLLSQNYQLLPALKPPTQTEEAEDDEEGANADAANPNPNSLQDQTGNEQQQQPQSQSQGQRVSFQLNAVAAAAAKRLRMTIDQLNMG

SEQ ID NO: 63927 - protein, 224 aa, Triticum aestivum
  peptide (1)..(224): Ceres Seq. ID no. 13597165
  misc_feature (22)..(147): Pfam Name: Transcription initiation factor IID, 31kD subunit Pfam Description: Transcription initiation factor IID, 31kD
  misc_feature (23)..(212): Homolog of NCBI NO: 34576553 NR Description: TAF9 RNA polymerase II, TATA box binding protein
  misc_feature (19)..(212): Homolog of NCBI NO: 18079237 NR Description: TAF9 RNA polymerase II, TATA box binding protein
  misc_feature (27)..(155): Homolog of NCBI NO: 30186181 NR Description: Similar to TAF9-like RNA polymerase II, TATA box
  misc_feature (19)..(155): Homolog of NCBI NO: 20070280 NR Description: TBP-associated factor 9L
  misc_feature (19)..(155): Homolog of NCBI NO: 4689154 NR Description: neuronal cell death-related protein [Homo sapiens]
  misc_feature (23)..(212): Homolog of NCBI NO: 33086648 NR Description: Cb1-739 [Rattus norvegicus]
  misc_feature (1)..(184): Homolog of NCBI NO: 24059851 NR Description: transcriptional activation factor TAFII32-like
  misc_feature (22)..(204): Homolog of NCBI NO: 15221048 NR Description: transcriptional activation factor TAFII32
  misc_feature (5)..(106): Homolog of NCBI NO: 30017563 NR Description: putative transcription initiation factor
  misc_feature (107)..(224): Homolog of NCBI NO: 30017563 NR Description: putative transcription initiation factor
MDGGGGVRPSLQPAAAGGGASGSPDEPRDARVVRELLRSMGLGEGEYEPRVVHQFLDLAYRYAGDVLGDAQVYADHAGKPQLDADDVRLAIQAKVNFSFSQPPPREVLLELARSRNKIPLPKSIAPPGSIPLPPEQDTLLSQNYQLLPALKPPTQTEEAEDDEEGANADAANPNPNSLQDQTGNEQQQQPQSQSQGQRVSFQLNAVAAAAAKRLRMTIDQLNMG

SEQ ID NO: 63928 - protein, 185 aa, Triticum aestivum
  peptide (1)..(185): Ceres Seq. ID no. 13597166
  misc_feature (1)..(108): Pfam Name: Transcription initiation factor IID, 31kD subunit Pfam Description: Transcription initiation factor IID, 31kD
  misc_feature (1)..(173): Homolog of NCBI NO: 34576553 NR Description: TAF9 RNA polymerase II, TATA box binding protein
  misc_feature (1)..(173): Homolog of NCBI NO: 18079237 NR Description: TAF9 RNA polymerase II, TATA box binding protein
  misc_feature (1)..(116): Homolog of NCBI NO: 30186181 NR Description: Similar to TAF9-like RNA polymerase II, TATA box
  misc_feature (1)..(116): Homolog of NCBI NO: 20070280 NR Description: TBP-associated factor 9L
  misc_feature (1)..(116): Homolog of NCBI NO: 4689154 NR Description: neuronal cell death-related protein [Homo sapiens]
  misc_feature (1)..(173): Homolog of NCBI NO: 33086648 NR Description: Cb1-739 [Rattus norvegicus]
  misc_feature (1)..(145): Homolog of NCBI NO: 24059851 NR Description: transcriptional activation factor TAFII32-like
  misc_feature (1)..(165): Homolog of NCBI NO: 15221048 NR Description: transcriptional activation factor TAFII32
  misc_feature (1)..(67): Homolog of NCBI NO: 30017563 NR Description: putative transcription initiation factor
  misc_feature (68)..(185): Homolog of NCBI NO: 30017563 NR Description: putative transcription initiation factor
MGLGEGEYEPRVVHQFLDLAYRYAGDVLGDAQVYADHAGKPQLDADDVRLAIQAKVNFSFSQPPPREVLLELARSRNKIPLPKSIAPPGSIPLPPEQDTLLSQNYQLLPALKPPTQTEEAEDDEEGANADAANPNPNSLQDQTGNEQQQQPQSQSQGQRVSFQLNAVAAAAAKRLRMTIDQLNMG

SEQ ID NO: 63929 - DNA, 1314 bp, Triticum aestivum
  misc_feature (1)..(1314): Ceres Seq. ID no. 13597268
aatccattcatctcagatctcaactacatcccctcctggtgttctcttctcagcttggatcccgcaccaactgttcatcttcaaggtgctcattaaatcccacctctggttttctacccagcttggatctctaatcaggcttttctccaagttagagttgctcacctcaataacttcatacatcgtcagcaatggccaccggaggtataaccatagaaaccataccagaggaacttccacttgactttctgaagaaaattacgaataacttctccagcgacagtgatcatctgattggaacaggatcatttgggtcagtttatagggggtttctggataatggcgaggtgattgctgtgaagaaactcggggaagaatcacctgtgccacgtgacaaagtatttgcaaatgaggttaagaatattatggtgctcgaacatgaaaatattgtcaagttgatagcatactgctatgacacaaacaacagattggtgctgagcaatggaagacacattattgcagagattactgaaactttactctgctatgaatacttagctaagggcggcctcgacaagaatcttttcggtgaacccagtattgactgggatacacggttcaaaataataaaggggatttgtgaaggtgtacattttatacataccttacctagtcccattctccatttgggtctgaagactcaaaatatattgctggatgacaacttgacaccaaaactttcggattttggattcgccagaatatttggggaagaatacacccgaataaacacaagaagtgttgtgggacatgttggatacatggccccagagtatctatataatggtgaaatctcggcccgttcggacatatatagtttaggcctaattatattggagatctgcacgaaagagaagaatagttccagcactgaccagaagcatgcaaggaaatatattgacggggtaaaaaaacattggttccaaatagaacaaataatggccgagtattccgatttagaagaacattgttttgaccaaatagaaggctgcatacatattggactagaatgtgtggagcttgatcagaagaagagaccttccatagagcacattgtgaacaagctcaataatctcccaactgagaatagttaattccattagattgtaagacaatatactatgataggttagcaagtgcctacgtacaaagccacactcgtgtcattttttaagttttaagaatgattaaaattcattcctatgtggttattggaaggaagttaaacaagcgaaagggttgaccaaaaaccag

SEQ ID NO: 63930 - protein, 320 aa, Triticum aestivum
  peptide (1)..(320): Ceres Seq. ID no. 15222062
  misc_feature (14)..(315): Homolog of NCBI NO: 21929723 NR Description: barley stem rust resistance protein
  misc_feature (54)..(315): Homolog of NCBI NO: 21724199 NR Description: stem rust resistance protein [Hordeum vulgare
  misc_feature (11)..(133): Homolog of NCBI NO: 38344522 NR Description: OSJNBa0016N04.15 [Oryza sativa (japonica
  misc_feature (146)..(312): Homolog of NCBI NO: 38344522 NR Description: OSJNBa0016N04.15 [Oryza sativa (japonica
  misc_feature (14)..(315): Homolog of NCBI NO: 21929729 NR Description: barley stem rust resistance protein
  misc_feature (14)..(315): Homolog of NCBI NO: 21929723 NR Description: barley stem rust resistance protein
  misc_feature (14)..(315): Homolog of NCBI NO: 21728344 NR Description: stem rust resistance protein Rpg1
  misc_feature (11)..(315): Homolog of NCBI NO: 38344521 NR Description: OSJNBa0016N04.14 [Oryza sativa (japonica
  misc_feature (15)..(105): Homolog of NCBI NO: 37532178 NR Description: putative receptor-like protein kinase
  misc_feature (120)..(312): Homolog of NCBI NO: 37532178 NR Description: putative receptor-like protein kinase
MATGGITIETIPEELPLDFLKKITNNFSSDSDHLIGTGSFGSVYRGFLDNGEVIAVKKLGEESPVPRDKVFANEVKNIMVLEHENIVKLIAYCYDTNNRLVLSNGRHIIAEITETLLCYEYLAKGGLDKNLFGEPSIDWDTRFKIIKGICEGVHFIHTLPSPILHLGLKTQNILLDDNLTPKLSDFGFARIFGEEYTRINTRSVVGHVGYMAPEYLYNGEISARSDIYSLGLIILEICTKEKNSSSTDQKHARKYIDGVKKHWFQIEQIMAEYSDLEEHCFDQIEGCIHIGLECVELDQKKRPSIEHIVNKLNNLPTENS

SEQ ID NO: 63931 - protein, 242 aa, Triticum aestivum
  peptide (1)..(242): Ceres Seq. ID no. 15222063
  misc_feature (1)..(237): Homolog of NCBI NO: 21929723 NR Description: barley stem rust resistance protein
  misc_feature (1)..(237): Homolog of NCBI NO: 21724199 NR Description: stem rust resistance protein [Hordeum vulgare
  misc_feature (1)..(55): Homolog of NCBI NO: 38344522 NR Description: OSJNBa0016N04.15 [Oryza sativa (japonica
  misc_feature (68)..(234): Homolog of NCBI NO: 38344522 NR Description: OSJNBa0016N04.15 [Oryza sativa (japonica
  misc_feature (1)..(237): Homolog of NCBI NO: 21929723 NR Description: barley stem rust resistance protein
  misc_feature (1)..(237): Homolog of NCBI NO: 21929729 NR Description: barley stem rust resistance protein
  misc_feature (1)..(237): Homolog of NCBI NO: 21728344 NR Description: stem rust resistance protein Rpg1
  misc_feature (1)..(237): Homolog of NCBI NO: 38344521 NR Description: OSJNBa0016N04.14 [Oryza sativa (japonica
  misc_feature (1)..(27): Homolog of NCBI NO: 37532178 NR Description: putative receptor-like protein kinase
  misc_feature (42)..(234): Homolog of NCBI NO: 37532178 NR Description: putative receptor-like protein kinase
MVLEHENIVKLIAYCYDTNNRLVLSNGRHIIAEITETLLCYEYLAKGGLDKNLFGEPSIDWDTRFKIIKGICEGVHFIHTLPSPILHLGLKTQNILLDDNLTPKLSDFGFARIFGEEYTRINTRSVVGHVGYMAPEYLYNGEISARSDIYSLGLIILEICTKEKNSSSTDQKHARKYIDGVKKHWFQIEQIMAEYSDLEEHCFDQIEGCIHIGLECVELDQKKRPSIEHIVNKLNNLPTENS

SEQ ID NO: 63932 - DNA, 1354 bp, Triticum aestivum
  misc_feature (1)..(1354): Ceres Seq. ID no. 13597269
aacctatcaccagtcaccaccattataaaccaacggccagctaggtagctaaagtgacctcctgtgagcaagaaaagctcgccaagatcagtagtgctaagcgacaggtagtgagccaagccagagcaacgaaggatggcgtccgagacgagcgtcgccgacgagaaggcgcccgctgggctgagccgctacgaggcggacgcggaggacgggcaggagggcggcggcgacgaaaagtcccggctgtccggcctgctgtggcacggcgggtcggcgtacgacgcgtggttcagctgcgcgtcgaaccaggtcgcgcaggtcctgctgacgctgccctactcgttcgcgcagctgggcatggtgagcggcatcctgttccagctcttctacggcctcctcggcagctggaccgcctacctcatcagcatcctctacctcgagtaccgcacccgcaaggagaaggacaaggtcgacttccgcaaccacgtcatccagtggttcgaggtgctggacgggctgctggggcggcactggcggaacgtggggctggccttcaactgcacgttcctgctgttcgggtcggtgatccagctcatcggctgcgctagcaacatctactacgtgaacgaccacctggacaagcggacgtggacctacatcttcggcgcctgctgcgccaccaccgtcttcatcccctccttccacaactaccgcgtctggtccttcctcggcctcctcatgaccacctacaccgcctggtacatcgccgtcgcctccctcatgcacggccaggccgacgccgtcaagcactccggccccaccaccatcatgctctacttcaccggcgccaccaacatcctctacaccttcggggggcacgctgtcaccgtgtaagccgacacgccccaccccgccccatcgtcccacctgctcacttttcacttgcatgccctaatctttttccaaagctgatcatctagtttatccgtcgtatatatacaatgttgtaacggtcactggtcacggagcgtgcacgctactactgcccagctcggggtcacgtgcaacgggaatgtcgtctgacatgcggggccgtcctgtgtataagcaacgggcgtcacctggggaccacctagacctagacatgcacgcacggtgcccatatgcgtacatgcagtatatcccaagagcacacacgtgctacccacacatcaaccgagcacaatgctcgtggatgctggagcggaacatatacgtttctgaattttcaacataaacaaagttgaaacctgagctagcaggataatatatctatctacgattttcgttaccctcaaaaaagaatttagggtcc

SEQ ID NO: 63933 - protein, 252 aa, Triticum aestivum
  peptide (1)..(252): Ceres Seq. ID no. 13597270
  misc_feature (1)..(252): Homolog of NCBI NO: 34908418 NR Description: putative AUX1-like permease
  misc_feature (24)..(252): Homolog of NCBI NO: 18404642 NR Description: amino acid permease, putative (AUX1) [Arabidopsis
  misc_feature (1)..(252): Homolog of NCBI NO: 25956260 NR Description: AUX1-like auxin transport protein [Cucumis
  misc_feature (32)..(252): Homolog of NCBI NO: 14279184 NR Description: putative AUX1-like permease
  misc_feature (10)..(252): Homolog of NCBI NO: 15217443 NR Description: amino acid permease, putative [Arabidopsis
  misc_feature (32)..(252): Homolog of NCBI NO: 21586474 NR Description: auxin influx carrier protein [Medicago truncatula]
  misc_feature (7)..(252): Homolog of NCBI NO: 10800922 NR Description: putative AUX1-like permease [Medicago truncatula]
  misc_feature (32)..(252): Homolog of NCBI NO: 15226450 NR Description: amino acid permease, putative [Arabidopsis
  misc_feature (1)..(252): Homolog of NCBI NO: 37531048 NR Description: putative AUX1-like permease
  misc_feature (6)..(252): Homolog of NCBI NO: 6689614 NR Description: AUX1 protein [Zea mays]
MASETSVADEKAPAGLSRYEADAEDGQEGGGDEKSRLSGLLWHGGSAYDAWFSCASNQVAQVLLTLPYSFAQLGMVSGILFQLFYGLLGSWTAYLISILYLEYRTRKEKDKVDFRNHVIQWFEVLDGLLGRHWRNVGLAFNCTFLLFGSVIQLIGCASNIYYVNDHLDKRTWTYIFGACCATTVFIPSFHNYRVWSFLGLLMTTYTAWYIAVASLMHGQADAVKHSGPTTIMLYFTGATNILYTFGGHAVTV

SEQ ID NO: 63934 - protein, 178 aa, Triticum aestivum
  peptide (1)..(178): Ceres Seq. ID no. 13597271
  misc_feature (1)..(178): Homolog of NCBI NO: 34908418 NR Description: putative AUX1-like permease
  misc_feature (1)..(178): Homolog of NCBI NO: 18404642 NR Description: amino acid permease, putative (AUX1) [Arabidopsis
  misc_feature (1)..(178): Homolog of NCBI NO: 25956260 NR Description: AUX1-like auxin transport protein [Cucumis
  misc_feature (1)..(178): Homolog of NCBI NO: 14279184 NR Description: putative AUX1-like permease
  misc_feature (1)..(178): Homolog of NCBI NO: 15217443 NR Description: amino acid permease, putative [Arabidopsis
  misc_feature (1)..(178): Homolog of NCBI NO: 21586474 NR Description: auxin influx carrier protein [Medicago truncatula]
  misc_feature (1)..(178): Homolog of NCBI NO: 10800922 NR Description: putative AUX1-like permease [Medicago truncatula]
  misc_feature (1)..(178): Homolog of NCBI NO: 15226450 NR Description: amino acid permease, putative [Arabidopsis
  misc_feature (1)..(178): Homolog of NCBI NO: 37531048 NR Description: putative AUX1-like permease
  misc_feature (1)..(178): Homolog of NCBI NO: 6689614 NR Description: AUX1 protein [Zea mays]
MVSGILFQLFYGLLGSWTAYLISILYLEYRTRKEKDKVDFRNHVIQWFEVLDGLLGRHWRNVGLAFNCTFLLFGSVIQLIGCASNIYYVNDHLDKRTWTYIFGACCATTVFIPSFHNYRVWSFLGLLMTTYTAWYIAVASLMHGQADAVKHSGPTTIMLYFTGATNILYTFGGHAVTV

SEQ ID NO: 63935 - DNA, 1725 bp, Triticum aestivum
  misc_feature (1)..(1725): Ceres Seq. ID no. 13597325
ttttttttcgagcggcgacgaaatgcagtccacctccgtttgctacccacgcacgcggccgcgggcccacggccggaggagctagaaagacctatcgccaccaggcccggtcccgagggaaaggaatccagcaaggcagccaggagcgcgcccccacccgccggcgacggccacatgccgaccgcctcctgcctccgcccgcctctccgcagcggccgctccgccgcggcgggcctcaggttccctcccccggcggggctggcgattgggagctggcggaggaggctcgccggggtcggggtggcggccgcctccgcctcgcccttcgacgagctctacgcgcggggaaggcccatccacggcccctccaagaaatctaccttgtggaatttgatccaagacatagagcctttggatcttagtgtcattcagaaagatgttcctcttgaaacggttgatgcaatgaagaggaccatctctggcatgttgggtctgcttccatctgatcagttccgtgttgttgtagaagccctttggagtccatttttcaagttattggtatcttcaatcatgactgggtatactctacgtaatgctgaatgcaggctctcttttgaaaggaacctagaactttctgaagaagatgctgaatgtgagaaaagagacacgactgaagataatcttcatgatatcaatttgggtaggcctgttacaattttcagattatcggaagacgacatgccccaggactctggaaaaagtgacgaagaatcatctggtgagagtatgggggaaatgttaagtaacttaacaccccaagtggaagagcagattattcggttgcaatctcgtttggatgcgatgaaaaaggagttgcatgacctgaagaggaaaaattctgcccttcaaatgcaacagtttgttggagaagagaaaaatgatctgctagactatctaagatccctaacaccagagaaggttgctgaactctcggaatccacctgtcccggtgtgcaagaggctatccagtctgttgtgcatggtttgcttgctactctttcccccaaggtacactcaaagtctcctccgccactagagaatgctgggggagccctaaatcgtgggggtgaggacgatgactgtgcagagcttgtcgagaatacttccctcccgtttcagcccctaatatctgtcccacgtgattatcttgcacgtttgctattctggtgcatgttgctgggtcactacatccggggtctggaataccggttagagctggcacaccttctcagaatatctagcgacgtggggtctttccccattgatgacaatcattttatttgagaaagcttcgctggcttattgagatccatcagcgaagaggatggaaatgcactggccaagaggccgcagaagttgctgtttggggcatttcctgacaatgaaacagggagttctgggccatagctcctgttgtagttcttgtaaagtcggaacgaaggcgttcgggtgtaaagttagtgttacatatcaatgtgaacaatatattttatttccttctatttattgtgtcgtatacaaaataaacatgttgttcttgctgctaatctcgtggtagcatggtggatactgggtattaggcatcccttgtactcataggttgtatgtatttgtctaatgtttatcacgtgaatgatattatattgtcgagtcgtatcaaggttc

SEQ ID NO: 63936 - protein, 447 aa, Triticum aestivum
  peptide (1)..(447): Ceres Seq. ID no. 13597326
  misc_feature (124)..(438): Homolog of NCBI NO: 15226027 NR Description: expressed protein [Arabidopsis thaliana]
  misc_feature (59)..(447): Homolog of NCBI NO: 40538958 NR Description: expressed protein [Oryza sativa (japonica
FFFERRRNAVHLRLLPTHAAAGPRPEELERPIATRPGPEGKESSKAARSAPPPAGDGHMPTASCLRPPLRSGRSAAAGLRFPPPAGLAIGSWRRRLAGVGVAAASASPFDELYARGRPIHGPSKKSTLWNLIQDIEPLDLSVIQKDVPLETVDAMKRTISGMLGLLPSDQFRVVVEALWSPFFKLLVSSIMTGYTLRNAECRLSFERNLELSEEDAECEKRDTTEDNLHDINLGRPVTIFRLSEDDMPQDSGKSDEESSGESMGEMLSNLTPQVEEQIIRLQSRLDAMKKELHDLKRKNSALQMQQFVGEEKNDLLDYLRSLTPEKVAELSESTCPGVQEAIQSVVHGLLATLSPKVHSKSPPPLENAGGALNRGGEDDDCAELVENTSLPFQPLISVPRDYLARLLFWCMLLGHYIRGLEYRLELAHLLRISSDVGSFPIDDNHFI

SEQ ID NO: 63937 - protein, 389 aa, Triticum aestivum
  peptide (1)..(389): Ceres Seq. ID no. 13597327
  misc_feature (66)..(380): Homolog of NCBI NO: 15226027 NR Description: expressed protein [Arabidopsis thaliana]
  misc_feature (1)..(389): Homolog of NCBI NO: 40538958 NR Description: expressed protein [Oryza sativa (japonica
MPTASCLRPPLRSGRSAAAGLRFPPPAGLAIGSWRRRLAGVGVAAASASPFDELYARGRPIHGPSKKSTLWNLIQDIEPLDLSVIQKDVPLETVDAMKRTISGMLGLLPSDQFRVVVEALWSPFFKLLVSSIMTGYTLRNAECRLSFERNLELSEEDAECEKRDTTEDNLHDINLGRPVTIFRLSEDDMPQDSGKSDEESSGESMGEMLSNLTPQVEEQIIRLQSRLDAMKKELHDLKRKNSALQMQQFVGEEKNDLLDYLRSLTPEKVAELSESTCPGVQEAIQSVVHGLLATLSPKVHSKSPPPLENAGGALNRGGEDDDCAELVENTSLPFQPLISVPRDYLARLLFWCMLLGHYIRGLEYRLELAHLLRISSDVGSFPIDDNHFI

SEQ ID NO: 63938 - protein, 293 aa, Triticum aestivum
  peptide (1)..(293): Ceres Seq. ID no. 13597328
  misc_feature (1)..(284): Homolog of NCBI NO: 15226027 NR Description: expressed protein [Arabidopsis thaliana]
  misc_feature (1)..(293): Homolog of NCBI NO: 40538958 NR Description: expressed protein [Oryza sativa (japonica
MKRTISGMLGLLPSDQFRVVVEALWSPFFKLLVSSIMTGYTLRNAECRLSFERNLELSEEDAECEKRDTTEDNLHDINLGRPVTIFRLSEDDMPQDSGKSDEESSGESMGEMLSNLTPQVEEQIIRLQSRLDAMKKELHDLKRKNSALQMQQFVGEEKNDLLDYLRSLTPEKVAELSESTCPGVQEAIQSVVHGLLATLSPKVHSKSPPPLENAGGALNRGGEDDDCAELVENTSLPFQPLISVPRDYLARLLFWCMLLGHYIRGLEYRLELAHLLRISSDVGSFPIDDNHFI

SEQ ID NO: 63939 - DNA, 1460 bp, Triticum aestivum
  misc_feature (1)..(1460): Ceres Seq. ID no. 13598495
aggtatcgtgcacttcactcgcttggcatttcgtcacgtctcttccttcctttctcagttccccgcagccgcttcgctcgcttgccttctctcgccgtctccgcctcctcctccagtcctccgtcccacccctcgacgattcctcggcgatgggcggcgcggcggcggcgacgggcgccgccaggtggatccagcggctgagcgcggccaggatctcgacggaggcgctggagcggggccagagccgcgtcatcgacgcctccctcaccctcatccgcgagcgcgccaagctcaagggcgagctgctgcgtgctatgggcggtgtcaaagcttctgcaacactcttaggagtaccccttgggcacaactcgtctttcttgcaggggcctgcgtttgctcctcctcgcataagggaggccatttggtgtggaagcaccaactctagcacagaagaaggcaaggaattaaatgatccaagggtgctaactgatgtcggtgatgtccccatacaagagattcgtgactgtggtgttgaagatgacagattgatgcatgtaatcagcgagtctgtcaaaacagtaatggacgaagatcctcttcggccgttggtcttaggaggcgatcactcgatatcttatccagttgttagggctgtgtctgaaaagcttggcggacctgttgacattcttcatcttgacgcacatccagatatctatgactgttttgaaggcaacacttactcacacgcttcttcatttgcaagaataatggaaggaggttatgcgaggcgacttttgcaggttggacttagatcaattaccaaagaaggacgtgagcaagggaagagatttggtgtggaacagtatgagatgcgcaccttctccagagatcgggagaagcttgagaatctgaaacttggggaaggtgtgaagggggtgtatgtctccgttgacgtggactgcctcgaccccgcattcgctcctggcgtgtctcatatcgagccgggaggcctctcatttcgcgacgtgctcaacatcctccagaatctgcaaggcgatgtcgtcgccggagatgtggtggagttcaacccgcagcgcgacacggtcgacgggatgacggctatggtcgccgcgaagctggtccgggagctgagcgccaagatctcaaaatgagcagcgacagtcaggacagaggcagcagcagagaggattttcaggcacagtggtcgttgatcttagttcctgccaatcattcagttgtgccacgttttagtctgacaatcttctataaataataaaatcaggctgcaaaacgacttcgaatttggtatgtgctctgtggtatttgttggttctcctttcacatgcacgcatccaagattaagctcgtaggtgcctagtagtcgataagaacatcgtctctcacgcaaaggatatgttgaaaaatctgaaatgaatttg

SEQ ID NO: 63940 - protein, 389 aa, Triticum aestivum
  peptide (1)..(389): Ceres Seq. ID no. 13598496
  misc_feature (109)..(388): Pfam Name: Arginase family Pfam Description: Arginase family
  misc_feature (62)..(389): Homolog of NCBI NO: 21592908 NR Description: putative arginase [Arabidopsis thaliana]
  misc_feature (62)..(389): Homolog of NCBI NO: 15236635 NR Description: arginase -related [Arabidopsis thaliana]
  misc_feature (61)..(389): Homolog of NCBI NO: 12802155 NR Description: arginase [Pinus taeda]
  misc_feature (62)..(381): Homolog of NCBI NO: 13182957 NR Description: arginase [Brassica napus]
  misc_feature (62)..(389): Homolog of NCBI NO: 15236640 NR Description: arginase [Arabidopsis thaliana]
VSCTSLAWHFVTSLPSFLSSPQPLRSLAFSRRLRLLLQSSVPPLDDSSAMGGAAAATGAARWIQRLSAARISTEALERGQSRVIDASLTLIRERAKLKGELLRAMGGVKASATLLGVPLGHNSSFLQGPAFAPPRIREAIWCGSTNSSTEEGKELNDPRVLTDVGDVPIQEIRDCGVEDDRLMHVISESVKTVMDEDPLRPLVLGGDHSISYPVVRAVSEKLGGPVDILHLDAHPDIYDCFEGNTYSHASSFARIMEGGYARRLLQVGLRSITKEGREQGKRFGVEQYEMRTFSRDREKLENLKLGEGVKGVYVSVDVDCLDPAFAPGVSHIEPGGLSFRDVLNILQNLQGDVVAGDVVEFNPQRDTVDGMTAMVAAKLVRELSAKISK

SEQ ID NO: 63941 - protein, 340 aa, Triticum aestivum
  peptide (1)..(340): Ceres Seq. ID no. 13598497
  misc_feature (60)..(339): Pfam Name: Arginase family Pfam Description: Arginase family
  misc_feature (13)..(340): Homolog of NCBI NO: 21592908 NR Description: putative arginase [Arabidopsis thaliana]
  misc_feature (13)..(340): Homolog of NCBI NO: 15236635 NR Description: arginase -related [Arabidopsis thaliana]
  misc_feature (12)..(340): Homolog of NCBI NO: 12802155 NR Description: arginase [Pinus taeda]
  misc_feature (13)..(332): Homolog of NCBI NO: 13182957 NR Description: arginase [Brassica napus]
  misc_feature (13)..(340): Homolog of NCBI NO: 15236640 NR Description: arginase [Arabidopsis thaliana]
MGGAAAATGAARWIQRLSAARISTEALERGQSRVIDASLTLIRERAKLKGELLRAMGGVKASATLLGVPLGHNSSFLQGPAFAPPRIREAIWCGSTNSSTEEGKELNDPRVLTDVGDVPIQEIRDCGVEDDRLMHVISESVKTVMDEDPLRPLVLGGDHSISYPVVRAVSEKLGGPVDILHLDAHPDIYDCFEGNTYSHASSFARIMEGGYARRLLQVGLRSITKEGREQGKRFGVEQYEMRTFSRDREKLENLKLGEGVKGVYVSVDVDCLDPAFAPGVSHIEPGGLSFRDVLNILQNLQGDVVAGDVVEFNPQRDTVDGMTAMVAAKLVRELSAKISK

SEQ ID NO: 63942 - protein, 285 aa, Triticum aestivum
  peptide (1)..(285): Ceres Seq. ID no. 13598498
  misc_feature (5)..(284): Pfam Name: Arginase family Pfam Description: Arginase family
  misc_feature (1)..(285): Homolog of NCBI NO: 21592908 NR Description: putative arginase [Arabidopsis thaliana]
  misc_feature (1)..(285): Homolog of NCBI NO: 15236635 NR Description: arginase -related [Arabidopsis thaliana]
  misc_feature (1)..(285): Homolog of NCBI NO: 12802155 NR Description: arginase [Pinus taeda]
  misc_feature (1)..(277): Homolog of NCBI NO: 13182957 NR Description: arginase [Brassica napus]
  misc_feature (1)..(285): Homolog of NCBI NO: 15236640 NR Description: arginase [Arabidopsis thaliana]
MGGVKASATLLGVPLGHNSSFLQGPAFAPPRIREAIWCGSTNSSTEEGKELNDPRVLTDVGDVPIQEIRDCGVEDDRLMHVISESVKTVMDEDPLRPLVLGGDHSISYPVVRAVSEKLGGPVDILHLDAHPDIYDCFEGNTYSHASSFARIMEGGYARRLLQVGLRSITKEGREQGKRFGVEQYEMRTFSRDREKLENLKLGEGVKGVYVSVDVDCLDPAFAPGVSHIEPGGLSFRDVLNILQNLQGDVVAGDVVEFNPQRDTVDGMTAMVAAKLVRELSAKISK

SEQ ID NO: 63943 - DNA, 1317 bp, Triticum aestivum
  misc_feature (1)..(1317): Ceres Seq. ID no. 12617080
atccagtccagcgctttctcctcgctcccaccccacccttcccctccaatagccaagcaagaactgggacacaagcaaagctttgccaagaggactaccaccagaggaggagacaaggaatccgccgcgctcgcttcccctccagcccaaccccaaccccaaccaggccccgcggcgaccacaagctcctccgctccccgcaacctcgcctcgccacgctcaggctgttgagtggccagaaatctggatatggatgtgcctgcggctccagccatggcatttaaagcctacaagtacaaagaggttcttgtcagggactacttgctcgcagactcgtatgctccatacgctgctgtgctcggggggatcctgatgtgcaaattggcctatgatttcacgcgcattatcagttcatttaacttcaaaggttatgcttctcttaacaatatgcagaagatcgaatggaacaacagggggatgtccactgtccatgcaatattcattacagttatgtcagtatacctagtgttcttctcgggtatgttttctgaccagctggatggaccagtaacagtgagaagttcaagcctctccagttttacattaggggtctctattgggtatttcattacagacattgccatgatatattggctttaccctgcccttggtggaatggagtatgttatccaccacatgctgtcacttatgtctacaatgtacgctatgctttctggggaagcacatgtatacatatacatgggtctcatcactgagactacaacgccaggaatcaatctaagatggttccttgatgttgctggaatgaagaactccaaagcttaccttgttaacggagttgcaatggttgttacttggctggttgcaaggataatcctgttcatgtacttgttttaccacatgtttgtacattatgaccagattaagaagatgaacaccttcggctattttctggtacttattgcgccttgcataatcttcgtgatgaatgtgctttggttctccaagatcctaaaaggcctcaagaagacgatggccaagaggcatgctgagtagtggaatgtgtgttcatgattaacgtacggccaccatccgatcatctgtagatttggttacatctgcatatagcttatgagtagtcagtcactactgtagcccatacctgtgatttcagctcggctgtcatgtttcggtgtatgactacccagccagcctttcctagacgctcgatttgtatatatgtttggttacggctgcatttacctatttgcatgttaataaatcttttagttgtgt

SEQ ID NO: 63944 - protein, 275 aa, Triticum aestivum
  peptide (1)..(275): Ceres Seq. ID no. 12617081
  misc_feature (32)..(272): Pfam Name: Eukaryotic protein of unknown function (DUF887) Pfam Description: Eukaryotic protein of unknown function (DUF887)
  misc_feature (60)..(270): Homolog of NCBI NO: 34860211 NR Description: similar to RIKEN cDNA C730036B01 [Rattus
  misc_feature (34)..(271): Homolog of NCBI NO: 7486070 NR Description: hypothetical protein F24G24.160 - Arabidopsis
  misc_feature (216)..(272): Homolog of NCBI NO: 25403400 NR Description: protein T19E23.9 [imported] - Arabidopsis
  misc_feature (10)..(170): Homolog of NCBI NO: 25403400 NR Description: protein T19E23.9 [imported] - Arabidopsis
  misc_feature (34)..(271): Homolog of NCBI NO: 21537382 NR Description: unknown [Arabidopsis thaliana]
  misc_feature (34)..(271): Homolog of NCBI NO: 18413327 NR Description: expressed protein
  misc_feature (34)..(275): Homolog of NCBI NO: 34909246 NR Description: B1148D12.11 [Oryza sativa (japonica
  misc_feature (10)..(272): Homolog of NCBI NO: 18397885 NR Description: expressed protein
  misc_feature (9)..(272): Homolog of NCBI NO: 22328807 NR Description: unknown protein; protein id: At4g19645.1
  misc_feature (9)..(271): Homolog of NCBI NO: 40538924 NR Description: expressed protein [Oryza sativa (japonica
MDVPAAPAMAFKAYKYKEVLVRDYLLADSYAPYAAVLGGILMCKLAYDFTRIISSFNFKGYASLNNMQKIEWNNRGMSTVHAIFITVMSVYLVFFSGMFSDQLDGPVTVRSSSLSSFTLGVSIGYFITDIAMIYWLYPALGGMEYVIHHMLSLMSTMYAMLSGEAHVYIYMGLITETTTPGINLRWFLDVAGMKNSKAYLVNGVAMVVTWLVARIILFMYLFYHMFVHYDQIKKMNTFGYFLVLIAPCIIFVMNVLWFSKILKGLKKTMAKRHAE

SEQ ID NO: 63945 - protein, 267 aa, Triticum aestivum
  peptide (1)..(267): Ceres Seq. ID no. 12617082
  misc_feature (24)..(264): Pfam Name: Eukaryotic protein of unknown function (DUF887) Pfam Description: Eukaryotic protein of unknown function (DUF887)
  misc_feature (52)..(262): Homolog of NCBI NO: 34860211 NR Description: similar to RIKEN cDNA C730036B01 [Rattus
  misc_feature (26)..(263): Homolog of NCBI NO: 7486070 NR Description: hypothetical protein F24G24.160 - Arabidopsis
  misc_feature (208)..(264): Homolog of NCBI NO: 25403400 NR Description: protein T19E23.9 [imported] - Arabidopsis
  misc_feature (2)..(162): Homolog of NCBI NO: 25403400 NR Description: protein T19E23.9 [imported] - Arabidopsis
  misc_feature (26)..(263): Homolog of NCBI NO: 21537382 NR Description: unknown [Arabidopsis thaliana]
  misc_feature (26)..(263): Homolog of NCBI NO: 18413327 NR Description: expressed protein
  misc_feature (26)..(267): Homolog of NCBI NO: 34909246 NR Description: B1148D12.11 [Oryza sativa (japonica
  misc_feature (2)..(264): Homolog of NCBI NO: 18397885 NR Description: expressed protein
  misc_feature (1)..(264): Homolog of NCBI NO: 22328807 NR Description: unknown protein; protein id: At4g19645.1
  misc_feature (1)..(263): Homolog of NCBI NO: 40538924 NR Description: expressed protein [Oryza sativa (japonica
MAFKAYKYKEVLVRDYLLADSYAPYAAVLGGILMCKLAYDFTRIISSFNFKGYASLNNMQKIEWNNRGMSTVHAIFITVMSVYLVFFSGMFSDQLDGPVTVRSSSLSSFTLGVSIGYFITDIAMIYWLYPALGGMEYVIHHMLSLMSTMYAMLSGEAHVYIYMGLITETTTPGINLRWFLDVAGMKNSKAYLVNGVAMVVTWLVARIILFMYLFYHMFVHYDQIKKMNTFGYFLVLIAPCIIFVMNVLWFSKILKGLKKTMAKRHAE

SEQ ID NO: 63946 - protein, 234 aa, Triticum aestivum
  peptide (1)..(234): Ceres Seq. ID no. 12617083
  misc_feature (1)..(231): Pfam Name: Eukaryotic protein of unknown function (DUF887) Pfam Description: Eukaryotic protein of unknown function (DUF887)
  misc_feature (19)..(229): Homolog of NCBI NO: 34860211 NR Description: similar to RIKEN cDNA C730036B01 [Rattus
  misc_feature (1)..(230): Homolog of NCBI NO: 7486070 NR Description: hypothetical protein F24G24.160 - Arabidopsis
  misc_feature (175)..(231): Homolog of NCBI NO: 25403400 NR Description: protein T19E23.9 [imported] - Arabidopsis
  misc_feature (1)..(129): Homolog of NCBI NO: 25403400 NR Description: protein T19E23.9 [imported] - Arabidopsis
  misc_feature (1)..(230): Homolog of NCBI NO: 21537382 NR Description: unknown [Arabidopsis thaliana]
  misc_feature (1)..(230): Homolog of NCBI NO: 18413327 NR Description: expressed protein
  misc_feature (1)..(234): Homolog of NCBI NO: 34909246 NR Description: B1148D12.11 [Oryza sativa (japonica
  misc_feature (1)..(231): Homolog of NCBI NO: 18397885 NR Description: expressed protein
  misc_feature (1)..(231): Homolog of NCBI NO: 22328807 NR Description: unknown protein; protein id: At4g19645.1
  misc_feature (1)..(230): Homolog of NCBI NO: 40538924 NR Description: expressed protein [Oryza sativa (japonica
MCKLAYDFTRIISSFNFKGYASLNNMQKIEWNNRGMSTVHAIFITVMSVYLVFFSGMFSDQLDGPVTVRSSSLSSFTLGVSIGYFITDIAMIYWLYPALGGMEYVIHHMLSLMSTMYAMLSGEAHVYIYMGLITETTTPGINLRWFLDVAGMKNSKAYLVNGVAMVVTWLVARIILFMYLFYHMFVHYDQIKKMNTFGYFLVLIAPCIIFVMNVLWFSKILKGLKKTMAKRHAE

SEQ ID NO: 63947 - DNA, 1672 bp, Triticum aestivum
  misc_feature (1)..(1672): Ceres Seq. ID no. 15225196
ttgctacacagaacatcctcaccgcataccactcttccctttccctgtacccgaatcatcatccgttccccatctcatccgttcccttgagagctgcagcggcgacatgggcggcggcggcgcagccggggatgccgatgggtgggcggatcaggaccaggggaacggcgggagccgcggcgggggtgaggcgaagcggtcggagatctatacctacgaggccggttggcacatctacggtatgaactggagcgtgcggcgggacaagaagtaccgactcgccatcgcaagttttctcgagcagctcgtcaatcgcgtggaggtggtccagctcgacgagtccacaggtgacatcgcccccgtgctctccttcgaccaccctttccctccccccaagtccatgttcgtcccggacccccaaggcctccgccccgatctgcttgccacctctgcagacctccttcgcatatggcgcatcacggacgacgacgccgctgccccgggcgctgccgactccaacaatggctccgtccgctgcaacggcgtggggagccccgctggtcagcagccgggcgtcaagctgtgctgcgagctcaacggcaaccgcaacagcgacttctgcggcccgctcacctcctttgactggaacgacgccgacccacgccgcatcggaacatcatccatcgataccacttgcaccatctgggacgttgaacgtgaggtagtcgacacccagctcatagcccatgacaaagaggtctatgacatagcctggggtggcgctggtgtctttgcatctgtttctgcggatggctcggtccgcgtgtttgatcttcgggataaggaacattccacaatcatctatgagagtagttctggcggcggctccaattctgctgctacggatggtggggctgtgttgccgacaccattggttaggctggggtggaacaagcaggacccaaggtatatggcaacaatcatcatggatagccccaaggtggtcgtgcttgacattcgctacccaacactgcctgtcgttgaactccaccgccatcatgctcctgtgaatgcaatcgcatgggcgcctcactcttcttgccacatttgcacagctggggatgactcgcaagcactgatatgggacctctcctccatgggcacggggaacaatagcggaggcaatggaaatggaaatggcaatgctgctgcagctgcagcagcagagggtggtcttgaccctatattggcttacactgcaggggcggaggtggagcagctgcagtggtcagctacccagcctgactgggttgccattgtattcgccaataaactgcagattctcagggtctgatttcttcattctagctttatcaatggtggggcagaaagaggcaaagaagcccatcatggatgatgagagttcaggcaatgggaggacggtaattttgcttttgctttagtgatgtatgttgcagacagctgatatgtgtgctgagttgctgatagaaatgatggttcactaggtagaagctggaattgacaatgaactgagttattaagagtaattagacttataggattagtgttggtgatactgaactaaattgctgttatttaaattgctcgactctagtactgctgttaacttgcttattgctgcaattgtcac

SEQ ID NO: 63948 - protein, 450 aa, Triticum aestivum
  peptide (1)..(450): Ceres Seq. ID no. 15225197
  misc_feature (198)..(236): Pfam Name: WD domain, G-beta repeat Pfam Description: WD domain, G-beta repeat
  misc_feature (409)..(450): Homolog of NCBI NO: 2290528 NR Description: ATAN11 [Arabidopsis thaliana]
  misc_feature (63)..(184): Homolog of NCBI NO: 2290528 NR Description: ATAN11 [Arabidopsis thaliana]
  misc_feature (192)..(387): Homolog of NCBI NO: 2290528 NR Description: ATAN11 [Arabidopsis thaliana]
  misc_feature (409)..(450): Homolog of NCBI NO: 15222113 NR Description: flower pigmentation protein ATAN11 [Arabidopsis
  misc_feature (63)..(184): Homolog of NCBI NO: 15222113 NR Description: flower pigmentation protein ATAN11 [Arabidopsis
  misc_feature (192)..(387): Homolog of NCBI NO: 15222113 NR Description: flower pigmentation protein ATAN11 [Arabidopsis
  misc_feature (409)..(450): Homolog of NCBI NO: 22324803 NR Description: WD-repeat protein GhTTG2 [Gossypium hirsutum]
  misc_feature (49)..(184): Homolog of NCBI NO: 22324803 NR Description: WD-repeat protein GhTTG2 [Gossypium hirsutum]
  misc_feature (198)..(386): Homolog of NCBI NO: 22324803 NR Description: WD-repeat protein GhTTG2 [Gossypium hirsutum]
  misc_feature (40)..(450): Homolog of NCBI NO: 37719680 NR Description: WD40 repeat protein [Zea mays]
CYTEHPHRIPLFPFPVPESSSVPHLIRSLESCSGDMGGGGAAGDADGWADQDQGNGGSRGGGEAKRSEIYTYEAGWHIYGMNWSVRRDKKYRLAIASFLEQLVNRVEVVQLDESTGDIAPVLSFDHPFPPPKSMFVPDPQGLRPDLLATSADLLRIWRITDDDAAAPGAADSNNGSVRCNGVGSPAGQQPGVKLCCELNGNRNSDFCGPLTSFDWNDADPRRIGTSSIDTTCTIWDVEREVVDTQLIAHDKEVYDIAWGGAGVFASVSADGSVRVFDLRDKEHSTIIYESSSGGGSNSAATDGGAVLPTPLVRLGWNKQDPRYMATIIMDSPKVVVLDIRYPTLPVVELHRHHAPVNAIAWAPHSSCHICTAGDDSQALIWDLSSMGTGNNSGGNGNGNGNAAAAAAAEGGLDPILAYTAGAEVEQLQWSATQPDWVAIVFANKLQILRV

SEQ ID NO: 63949 - protein, 415 aa, Triticum aestivum
  peptide (1)..(415): Ceres Seq. ID no. 15225198
  misc_feature (163)..(201): Pfam Name: WD domain, G-beta repeat Pfam Description: WD domain, G-beta repeat
  misc_feature (374)..(415): Homolog of NCBI NO: 2290528 NR Description: ATAN11 [Arabidopsis thaliana]
  misc_feature (28)..(149): Homolog of NCBI NO: 2290528 NR Description: ATAN11 [Arabidopsis thaliana]
  misc_feature (157)..(352): Homolog of NCBI NO: 2290528 NR Description: ATAN11 [Arabidopsis thaliana]
  misc_feature (374)..(415): Homolog of NCBI NO: 15222113 NR Description: flower pigmentation protein ATAN11 [Arabidopsis
  misc_feature (28)..(149): Homolog of NCBI NO: 15222113 NR Description: flower pigmentation protein ATAN11 [Arabidopsis
  misc_feature (157)..(352): Homolog of NCBI NO: 15222113 NR Description: flower pigmentation protein ATAN11 [Arabidopsis
  misc_feature (374)..(415): Homolog of NCBI NO: 22324803 NR Description: WD-repeat protein GhTTG2 [Gossypium hirsutum]
  misc_feature (14)..(149): Homolog of NCBI NO: 22324803 NR Description: WD-repeat protein GhTTG2 [Gossypium hirsutum]
  misc_feature (163)..(351): Homolog of NCBI NO: 22324803 NR Description: WD-repeat protein GhTTG2 [Gossypium hirsutum]
  misc_feature (5)..(415): Homolog of NCBI NO: 37719680 NR Description: WD40 repeat protein [Zea mays]
MGGGGAAGDADGWADQDQGNGGSRGGGEAKRSEIYTYEAGWHIYGMNWSVRRDKKYRLAIASFLEQLVNRVEVVQLDESTGDIAPVLSFDHPFPPPKSMFVPDPQGLRPDLLATSADLLRIWRITDDDAAAPGAADSNNGSVRCNGVGSPAGQQPGVKLCCELNGNRNSDFCGPLTSFDWNDADPRRIGTSSIDTTCTIWDVEREVVDTQLIAHDKEVYDIAWGGAGVFASVSADGSVRVFDLRDKEHSTIIYESSSGGGSNSAATDGGAVLPTPLVRLGWNKQDPRYMATIIMDSPKVVVLDIRYPTLPVVELHRHHAPVNAIAWAPHSSCHICTAGDDSQALIWDLSSMGTGNNSGGNGNGNGNAAAAAAAEGGLDPILAYTAGAEVEQLQWSATQPDWVAIVFANKLQILRV

SEQ ID NO: 63950 - protein, 370 aa, Triticum aestivum
  peptide (1)..(370): Ceres Seq. ID no. 15225199
  misc_feature (118)..(156): Pfam Name: WD domain, G-beta repeat Pfam Description: WD domain, G-beta repeat
  misc_feature (329)..(370): Homolog of NCBI NO: 2290528 NR Description: ATAN11 [Arabidopsis thaliana]
  misc_feature (1)..(104): Homolog of NCBI NO: 2290528 NR Description: ATAN11 [Arabidopsis thaliana]
  misc_feature (112)..(307): Homolog of NCBI NO: 2290528 NR Description: ATAN11 [Arabidopsis thaliana]
  misc_feature (329)..(370): Homolog of NCBI NO: 15222113 NR Description: flower pigmentation protein ATAN11 [Arabidopsis
  misc_feature (1)..(104): Homolog of NCBI NO: 15222113 NR Description: flower pigmentation protein ATAN11 [Arabidopsis
  misc_feature (112)..(307): Homolog of NCBI NO: 15222113 NR Description: flower pigmentation protein ATAN11 [Arabidopsis
  misc_feature (329)..(370): Homolog of NCBI NO: 22324803 NR Description: WD-repeat protein GhTTG2 [Gossypium hirsutum]
  misc_feature (1)..(104): Homolog of NCBI NO: 22324803 NR Description: WD-repeat protein GhTTG2 [Gossypium hirsutum]
  misc_feature (118)..(306): Homolog of NCBI NO: 22324803 NR Description: WD-repeat protein GhTTG2 [Gossypium hirsutum]
  misc_feature (1)..(370): Homolog of NCBI NO: 37719680 NR Description: WD40 repeat protein [Zea mays]
MNWSVRRDKKYRLAIASFLEQLVNRVEVVQLDESTGDIAPVLSFDHPFPPPKSMFVPDPQGLRPDLLATSADLLRIWRITDDDAAAPGAADSNNGSVRCNGVGSPAGQQPGVKLCCELNGNRNSDFCGPLTSFDWNDADPRRIGTSSIDTTCTIWDVEREVVDTQLIAHDKEVYDIAWGGAGVFASVSADGSVRVFDLRDKEHSTIIYESSSGGGSNSAATDGGAVLPTPLVRLGWNKQDPRYMATIIMDSPKVVVLDIRYPTLPVVELHRHHAPVNAIAWAPHSSCHICTAGDDSQALIWDLSSMGTGNNSGGNGNGNGNAAAAAAAEGGLDPILAYTAGAEVEQLQWSATQPDWVAIVFANKLQILRV

SEQ ID NO: 63951 - DNA, 1212 bp, Triticum aestivum
  misc_feature (1)..(1212): Ceres Seq. ID no. 13597272
aaacacaactcgtgcccgtccgtcccggcggctctctcaaacccacactccccaccttcttgcggcacaagccggagccgacgatccccccacccgcgccgccgtcgacgcggcctcctccgcccgccgggatcggagagaactgtataaacgttttagtggttgaagcgacttgagtctttaaccatgagtagcattggaaccgggtatgatctgtccgtcaccactttttccccggacggccgtgtcttccaggtcgagtatgctggcaaggccgtcgacaacagcgggacgattgttgggatcaagtgcaaagatggaattgtcctcggtgtggagaagctgataacgtcgaagatgatacttgctgggtcgaatcggagacttcactctgttcaccggaactctggcttggctgtggctgggttagcagcagacggtaggcaggtggtctcaagagcaaagtcagaagcagccaattatgaaaaggtatacggagaacccatgcctgtgaaggaattagctgatcgtgtagctagctacgttcatctgtgtacactctactggtggctcaggccttttggctgtggagttattcttggaggttatgatagggatgggccacagctctacatgatcgaaccttcagggctctcatataaatattttggtgctgctctgggtaaaggaagacaggctgcaaaaacggagatagagaaattgaagctttctgagctaacctgcagggaaggcattgttgaggttgccaagataatttatggtgtacacgacgaagcgaaagacaaatcttttgagctggaactgagctgggtgtgcgatgaatctaaccgtcagcatgagaaggttccaaatgatcttctggagcaggccaaggcagcagcgcaggcagcgttggaagagatggatgccgactaagaagagaccatgagctctgcttcccatttacttctacgtgcggcataacagatacaggagtggagcggtttgtttccagtgcaaaaaaactaccttcagggcgttgttgcttccagttccatgattccatcccagtcgaggtagcaagcaggttctcgtgttttggggggttgtagtgaatcgtattctccttgctgttggtcacacactgaatcttaatctattgaattccgaacatatttgtcacatatcttaatcacgcgtggcctaagagat

SEQ ID NO: 63952 - protein, 249 aa, Triticum aestivum
  peptide (1)..(249): Ceres Seq. ID no. 15222064
  misc_feature (31)..(216): Pfam Name: Proteasome A-type and B-type Pfam Description: Proteasome A-type and B-type
  misc_feature (1)..(245): Homolog of NCBI NO: 3914440 NR Description: Proteasome subunit alpha type 3
  misc_feature (1)..(249): Homolog of NCBI NO: 542655 NR Description: C 3.4.25.1 proteasome endopeptidase complex ()
  misc_feature (1)..(249): Homolog of NCBI NO: 4506183 NR Description: proteasome alpha 3 subunit isoform 1
  misc_feature (1)..(249): Homolog of NCBI NO: 20810439 NR Description: proteasome (prosome, macropain) subunit, alpha
  misc_feature (3)..(249): Homolog of NCBI NO: 3914413 NR Description: Proteasome subunit alpha type 3
  misc_feature (1)..(249): Homolog of NCBI NO: 2511592 NR Description: multicatalytic endopeptidase complex, proteasome
  misc_feature (1)..(249): Homolog of NCBI NO: 15225839 NR Description: 20S proteasome alpha subunit G (PAG1)
  misc_feature (1)..(249): Homolog of NCBI NO: 3914431 NR Description: Proteasome subunit alpha type 3 (20S proteasome subunit G) (20S proteasome subunit alpha-7) (Proteasome component
  misc_feature (1)..(249): Homolog of NCBI NO: 14594925 NR Description: putative alpha7 proteasome subunit [Nicotiana
  misc_feature (1)..(249): Homolog of NCBI NO: 34909168 NR Description: proteasome subunit alpha type 3
MSSIGTGYDLSVTTFSPDGRVFQVEYAGKAVDNSGTIVGIKCKDGIVLGVEKLITSKMILAGSNRRLHSVHRNSGLAVAGLAADGRQVVSRAKSEAANYEKVYGEPMPVKELADRVASYVHLCTLYWWLRPFGCGVILGGYDRDGPQLYMIEPSGLSYKYFGAALGKGRQAAKTEIEKLKLSELTCREGIVEVAKIIYGVHDEAKDKSFELELSWVCDESNRQHEKVPNDLLEQAKAAAQAALEEMDAD

SEQ ID NO: 63953 - protein, 192 aa, Triticum aestivum
  peptide (1)..(192): Ceres Seq. ID no. 15222065
  misc_feature (1)..(159): Pfam Name: Proteasome A-type and B-type Pfam Description: Proteasome A-type and B-type
  misc_feature (1)..(188): Homolog of NCBI NO: 3914440 NR Description: Proteasome subunit alpha type 3
  misc_feature (1)..(192): Homolog of NCBI NO: 542655 NR Description: C 3.4.25.1 proteasome endopeptidase complex ()
  misc_feature (1)..(192): Homolog of NCBI NO: 4506183 NR Description: proteasome alpha 3 subunit isoform 1
  misc_feature (1)..(192): Homolog of NCBI NO: 20810439 NR Description: proteasome (prosome, macropain) subunit, alpha
  misc_feature (1)..(192): Homolog of NCBI NO: 3914413 NR Description: Proteasome subunit alpha type 3
  misc_feature (1)..(192): Homolog of NCBI NO: 2511592 NR Description: multicatalytic endopeptidase complex, proteasome
  misc_feature (1)..(192): Homolog of NCBI NO: 15225839 NR Description: 20S proteasome alpha subunit G (PAG1)
  misc_feature (1)..(192): Homolog of NCBI NO: 3914431 NR Description: Proteasome subunit alpha type 3 (20S proteasome subunit G) (20S proteasome subunit alpha-7) (Proteasome component
  misc_feature (1)..(192): Homolog of NCBI NO: 14594925 NR Description: putative alpha7 proteasome subunit [Nicotiana
  misc_feature (1)..(192): Homolog of NCBI NO: 34909168 NR Description: proteasome subunit alpha type 3
MILAGSNRRLHSVHRNSGLAVAGLAADGRQVVSRAKSEAANYEKVYGEPMPVKELADRVASYVHLCTLYWWLRPFGCGVILGGYDRDGPQLYMIEPSGLSYKYFGAALGKGRQAAKTEIEKLKLSELTCREGIVEVAKIIYGVHDEAKDKSFELELSWVCDESNRQHEKVPNDLLEQAKAAAQAALEEMDAD

SEQ ID NO: 63954 - protein, 143 aa, Triticum aestivum
  peptide (1)..(143): Ceres Seq. ID no. 15222066
  misc_feature (1)..(110): Pfam Name: Proteasome A-type and B-type Pfam Description: Proteasome A-type and B-type
  misc_feature (1)..(139): Homolog of NCBI NO: 3914440 NR Description: Proteasome subunit alpha type 3
  misc_feature (1)..(143): Homolog of NCBI NO: 542655 NR Description: C 3.4.25.1 proteasome endopeptidase complex ()
  misc_feature (1)..(143): Homolog of NCBI NO: 4506183 NR Description: proteasome alpha 3 subunit isoform 1
  misc_feature (1)..(143): Homolog of NCBI NO: 20810439 NR Description: proteasome (prosome, macropain) subunit, alpha
  misc_feature (1)..(143): Homolog of NCBI NO: 3914413 NR Description: Proteasome subunit alpha type 3
  misc_feature (1)..(143): Homolog of NCBI NO: 2511592 NR Description: multicatalytic endopeptidase complex, proteasome
  misc_feature (1)..(143): Homolog of NCBI NO: 15225839 NR Description: 20S proteasome alpha subunit G (PAG1)
  misc_feature (1)..(143): Homolog of NCBI NO: 3914431 NR Description: Proteasome subunit alpha type 3 (20S proteasome subunit G) (20S proteasome subunit alpha-7) (Proteasome component
  misc_feature (1)..(143): Homolog of NCBI NO: 14594925 NR Description: putative alpha7 proteasome subunit [Nicotiana
  misc_feature (1)..(143): Homolog of NCBI NO: 34909168 NR Description: proteasome subunit alpha type 3
MPVKELADRVASYVHLCTLYWWLRPFGCGVILGGYDRDGPQLYMIEPSGLSYKYFGAALGKGRQAAKTEIEKLKLSELTCREGIVEVAKIIYGVHDEAKDKSFELELSWVCDESNRQHEKVPNDLLEQAKAAAQAALEEMDAD

SEQ ID NO: 63955 - DNA, 1440 bp, Triticum aestivum
  misc_feature (1)..(1440): Ceres Seq. ID no. 13597162
gcaggaattcgccmcsmkmccrttmcmactwkawyrtgyytaatcgaaaaaagacaacatccggtagtagctagagcaacaaggacgaattaaacaacaacacaactactcttaggaatggccggcgaggaggagatgcaggtggtggagtcctgcttcgtgacgccggtggcggacgcaccgagcagggcgatccggctctcgccgttcgacctcatgctagccagcagaggctacaccccactcgtccacttctaccgcccaccagaaaccgtgggcgacgacttcttcgacgtgacaaggttgaagacggcgttgggcaaggcgcttgtgcccttctaccccctggccggccgcttgagggcgggcggcgacggcaggttggagatcgactgcaacggcaagggcatgctcttccttgtggctcagtctcgtctcaccatggatgacttcagcgacttcaagccatcatcaaagcagaggaggctgtttgttcctcatgtcagcgactcagatggcctcttatgggcaacccaggtgacattcttaaagtgtggtggggtggtcttagggtcggcaatccatcatgctggtatggacggatctgttgtattccacttcttaaggacatgatcagctttctccagagacggcgaccgggctatggtgaacctcccctgccatgatcgctcgcgcttgtctgcgcgtgatccacctgttgttcatccctatgctctttccatttttagccccaagataaacctacccccacagccagggctggtcgtcaacgaggttgtagccctcacccttgccaaggaccaactttccactctcaagcacatatctggtggcgatggcgtgagcaccttcagcgccttgagcgcccacctgtggcaatgcatgtgtttagcccggcagctacccccggatgctacgacgcagcttatgttctcggccaacatccgccgcatcatgaggccaccactcccagacggctacttcggcaacgcgataataaacctaagtgtcggcgacaaagcgcgtgcaatcgcctcgcgcgagctgagctacattgcgcggcgaataagagacacccacagacggttgaacgacgagctagtgcattcagcaatcgactacctcgagctagcaaagagggacgacgagcgcccgactacaggcaatttgccggtgactgacattagagttgtcagctggcttggcatgccgtcgtacgatgcggatttcagctggggaaggccattggctatgttccgtgctgaaccaaaccgcggaggttttgttcacctgattgacagcgcacagggtgatggcagtgtgcgcatcatcatgtctatagaggctgcaattctcagcgagttgaagcgtttgttgtatgccaaattcgacaccatgttgtattctaagttttaacct

SEQ ID NO: 63956 - protein, 257 aa, Triticum aestivum
  peptide (1)..(257): Ceres Seq. ID no. 15222043
  misc_feature (1)..(246): Pfam Name: Transferase family Pfam Description: Transferase family
  misc_feature (1)..(246): Homolog of NCBI NO: 7484692 NR Description: anthranilate N-benzoyltransferase (EC 2.3.1.144)
  misc_feature (1)..(246): Homolog of NCBI NO: 7484689 NR Description: anthranilate N-benzoyltransferase (EC 2.3.1.144)
  misc_feature (1)..(246): Homolog of NCBI NO: 40644899 NR Description: hydroxycinnamoyl CoA quinate transferase
  misc_feature (1)..(246): Homolog of NCBI NO: 40644084 NR Description: hydroxycinnamoyl CoA quinate transferase
  misc_feature (1)..(246): Homolog of NCBI NO: 6469032 NR Description: N-hydroxycinnamoyl/benzoyltransferase [Ipomoea
  misc_feature (1)..(246): Homolog of NCBI NO: 38345030 NR Description: OSJNBa0029H02.14 [Oryza sativa (japonica
  misc_feature (1)..(246): Homolog of NCBI NO: 15239747 NR Description: anthranilate
  misc_feature (1)..(246): Homolog of NCBI NO: 21536883 NR Description: anthranilate N-benzoyltransferase [Arabidopsis
  misc_feature (1)..(246): Homolog of NCBI NO: 27475616 NR Description: hydroxycinnamoyl transferase [Nicotiana tabacum]
  misc_feature (1)..(132): Homolog of NCBI NO: 40253398 NR Description: putative hydroxyanthranilate
MVNLPCHDRSRLSARDPPVVHPYALSIFSPKINLPPQPGLVVNEVVALTLAKDQLSTLKHISGGDGVSTFSALSAHLWQCMCLARQLPPDATTQLMFSANIRRIMRPPLPDGYFGNAIINLSVGDKARAIASRELSYIARRIRDTHRRLNDELVHSAIDYLELAKRDDERPTTGNLPVTDIRVVSWLGMPSYDADFSWGRPLAMFRAEPNRGGFVHLIDSAQGDGSVRIIMSIEAAILSELKRLLYAKFDTMLYSKF

SEQ ID NO: 63957 - protein, 177 aa, Triticum aestivum
  peptide (1)..(177): Ceres Seq. ID no. 15222044
  misc_feature (1)..(166): Pfam Name: Transferase family Pfam Description: Transferase family
  misc_feature (1)..(166): Homolog of NCBI NO: 7484692 NR Description: anthranilate N-benzoyltransferase (EC 2.3.1.144)
  misc_feature (1)..(166): Homolog of NCBI NO: 7484689 NR Description: anthranilate N-benzoyltransferase (EC 2.3.1.144)
  misc_feature (1)..(166): Homolog of NCBI NO: 40644899 NR Description: hydroxycinnamoyl CoA quinate transferase
  misc_feature (1)..(166): Homolog of NCBI NO: 40644084 NR Description: hydroxycinnamoyl CoA quinate transferase
  misc_feature (1)..(166): Homolog of NCBI NO: 6469032 NR Description: N-hydroxycinnamoyl/benzoyltransferase [Ipomoea
  misc_feature (1)..(166): Homolog of NCBI NO: 38345030 NR Description: OSJNBa0029H02.14 [Oryza sativa (japonica
  misc_feature (1)..(166): Homolog of NCBI NO: 15239747 NR Description: anthranilate
  misc_feature (1)..(166): Homolog of NCBI NO: 21536883 NR Description: anthranilate N-benzoyltransferase [Arabidopsis
  misc_feature (1)..(166): Homolog of NCBI NO: 27475616 NR Description: hydroxycinnamoyl transferase [Nicotiana tabacum]
  misc_feature (1)..(52): Homolog of NCBI NO: 40253398 NR Description: putative hydroxyanthranilate
MCLARQLPPDATTQLMFSANIRRIMRPPLPDGYFGNAIINLSVGDKARAIASRELSYIARRIRDTHRRLNDELVHSAIDYLELAKRDDERPTTGNLPVTDIRVVSWLGMPSYDADFSWGRPLAMFRAEPNRGGFVHLIDSAQGDGSVRIIMSIEAAILSELKRLLYAKFDTMLYSKF

SEQ ID NO: 63958 - protein, 171 aa, Triticum aestivum
  peptide (1)..(171): Ceres Seq. ID no. 15222045
  misc_feature (6)..(171): Pfam Name: Transferase family Pfam Description: Transferase family
  misc_feature (7)..(171): Homolog of NCBI NO: 7484692 NR Description: anthranilate N-benzoyltransferase (EC 2.3.1.144)
  misc_feature (7)..(171): Homolog of NCBI NO: 7484689 NR Description: anthranilate N-benzoyltransferase (EC 2.3.1.144)
  misc_feature (3)..(171): Homolog of NCBI NO: 40644899 NR Description: hydroxycinnamoyl CoA quinate transferase
  misc_feature (3)..(171): Homolog of NCBI NO: 40644084 NR Description: hydroxycinnamoyl CoA quinate transferase
  misc_feature (1)..(171): Homolog of NCBI NO: 6469032 NR Description: N-hydroxycinnamoyl/benzoyltransferase [Ipomoea
  misc_feature (9)..(171): Homolog of NCBI NO: 38345030 NR Description: OSJNBa0029H02.14 [Oryza sativa (japonica
  misc_feature (6)..(171): Homolog of NCBI NO: 15239747 NR Description: anthranilate
  misc_feature (6)..(171): Homolog of NCBI NO: 21536883 NR Description: anthranilate N-benzoyltransferase [Arabidopsis
  misc_feature (6)..(171): Homolog of NCBI NO: 27475616 NR Description: hydroxycinnamoyl transferase [Nicotiana tabacum]
  misc_feature (4)..(171): Homolog of NCBI NO: 40253398 NR Description: putative hydroxyanthranilate
MAGEEEMQVVESCFVTPVADAPSRAIRLSPFDLMLASRGYTPLVHFYRPPETVGDDFFDVTRLKTALGKALVPFYPLAGRLRAGGDGRLEIDCNGKGMLFLVAQSRLTMDDFSDFKPSSKQRRLFVPHVSDSDGLLWATQVTFLKCGGVVLGSAIHHAGMDGSVVFHFLRT

SEQ ID NO: 63959 - DNA, 789 bp, Triticum aestivum
  misc_feature (1)..(789): Ceres Seq. ID no. 12625648
tactttgtagctagccatgtcgagccatagatcttgtggcctggtggtggtgctcgcctgcgccgctctcatggcggcggtggccggcacggcgcagtacaacgtcggcggcgacaacgggtggggcgtgcccggcgccggcgccgagtcctacaacacctgggccgagaagaccaccttccaggtcggcgaccagctcgtgttcgtgtaccccaaggacaaggactcggtgctgctggtggcgccggccgactacaacgcctgcaacaccaacacctacgacaagcagttcagcgacggcaacaccgtcttcgacctcgaccgcgccggcgccttcttcttcatcagcggcgtcgacgccaactgccgcgccaacgagaagctcatcgtcatggtcgccgccgccgccaagggcgctcccacgcccagccaggggtcgcctgcagcaacagcaacgaccccgccgtctgctccctcaggtggcgccccgccaaactccccagcaaccccaaatgctccggcgggtgaggcgagtaactcaacgccggccaagggcgcacctcctggagccgccagcggcgccggtctcacggtggcaggcctcgccggctcgttcgtggcattgtttggatacgccatgcttgctttctagtactgctttccaaagctatcttttactgctccttttcaaagccggaagactatttgctccttttcagagggcaacgtgtctctgctcagattcttttccgttatgatcaatgacaaatgcaatatgatggttcctgg

SEQ ID NO: 63960 - protein, 211 aa, Triticum aestivum
  peptide (1)..(211): Ceres Seq. ID no. 12625649
  misc_feature (36)..(121): Pfam Name: Plastocyanin-like domain Pfam Description: Plastocyanin-like domain
  misc_feature (29)..(207): Homolog of NCBI NO: 15224081 NR Description: nodulin-like protein; protein id: At2g23990.1
  misc_feature (12)..(186): Homolog of NCBI NO: 21592865 NR Description: unknown [Arabidopsis thaliana]
  misc_feature (12)..(186): Homolog of NCBI NO: 15234164 NR Description: putative protein
  misc_feature (1)..(204): Homolog of NCBI NO: 8515096 NR Description: phytocyanin homolog [Pinus taeda]
  misc_feature (6)..(209): Homolog of NCBI NO: 14140127 NR Description: uclacyanin 3-like protein [Oryza sativa]
  misc_feature (7)..(183): Homolog of NCBI NO: 28396618 NR Description: phytocyanin protein, PUP2 [Arabidopsis thaliana]
  misc_feature (7)..(183): Homolog of NCBI NO: 15238868 NR Description: putative protein; protein id: At5g53870.1
  misc_feature (1)..(202): Homolog of NCBI NO: 21618177 NR Description: unknown [Arabidopsis thaliana]
  misc_feature (1)..(202): Homolog of NCBI NO: 18402674 NR Description: expressed protein
  misc_feature (11)..(196): Homolog of NCBI NO: 34908784 NR Description: P0415A04.29 [Oryza sativa (japonica
MSSHRSCGLVVVLACAALMAAVAGTAQYNVGGDNGWGVPGAGAESYNTWAEKTTFQVGDQLVFVYPKDKDSVLLVAPADYNACNTNTYDKQFSDGNTVFDLDRAGAFFFISGVDANCRANEKLIVMVAAAAKGAPTPSQGSPAATATTPPSAPSGGAPPNSPATPNAPAGEASNSTPAKGAPPGAASGAGLTVAGLAGSFVALFGYAMLAF

SEQ ID NO: 63961 - protein, 193 aa, Triticum aestivum
  peptide (1)..(193): Ceres Seq. ID no. 12625650
  misc_feature (18)..(103): Pfam Name: Plastocyanin-like domain Pfam Description: Plastocyanin-like domain
  misc_feature (11)..(189): Homolog of NCBI NO: 15224081 NR Description: nodulin-like protein; protein id: At2g23990.1
  misc_feature (1)..(168): Homolog of NCBI NO: 21592865 NR Description: unknown [Arabidopsis thaliana]
  misc_feature (1)..(168): Homolog of NCBI NO: 15234164 NR Description: putative protein
  misc_feature (1)..(186): Homolog of NCBI NO: 8515096 NR Description: phytocyanin homolog [Pinus taeda]
  misc_feature (1)..(191): Homolog of NCBI NO: 14140127 NR Description: uclacyanin 3-like protein [Oryza sativa]
  misc_feature (1)..(165): Homolog of NCBI NO: 28396618 NR Description: phytocyanin protein, PUP2 [Arabidopsis thaliana]
  misc_feature (1)..(165): Homolog of NCBI NO: 15238868 NR Description: putative protein; protein id: At5g53870.1
  misc_feature (1)..(184): Homolog of NCBI NO: 21618177 NR Description: unknown [Arabidopsis thaliana]
  misc_feature (1)..(184): Homolog of NCBI NO: 18402674 NR Description: expressed protein
  misc_feature (1)..(178): Homolog of NCBI NO: 34908784 NR Description: P0415A04.29 [Oryza sativa (japonica
MAAVAGTAQYNVGGDNGWGVPGAGAESYNTWAEKTTFQVGDQLVFVYPKDKDSVLLVAPADYNACNTNTYDKQFSDGNTVFDLDRAGAFFFISGVDANCRANEKLIVMVAAAAKGAPTPSQGSPAATATTPPSAPSGGAPPNSPATPNAPAGEASNSTPAKGAPPGAASGAGLTVAGLAGSFVALFGYAMLAF

SEQ ID NO: 63962 - DNA, 971 bp, Triticum aestivum
  misc_feature (1)..(971): Ceres Seq. ID no. 12616929
attccccatctccctccctcaccatggccgccgccgccgccgcttccatggcccgcaggctgctctcccccaccaccaccacctcctactcgaccaccgcccgcctcctcatctcccgccgcctcgcctccgccgcgtccgtcccgcgcgccccggcggcggcggcgaaggagatgctgcgcccggcggccgtcgcctcctcctctctattcttccgcggcgtcgggggcgccaggggcatggcgcggcggcccgggggcggcgacgggtacgcccccgcgcggggcgggggcggagggggcgcgccgacggagatggcgccgctgttccccgggtgcgactacgagcactggctgatcgtcatggacaagcccggcggcgagggcgcctccaagcaccagatgatcgactgctacgtccacaccctcgccaaggtcctcggcagcgaggaggaggccaagaggaagatttacaacgtctcgtgcgagcgctacttcgggttcgggtgcgagatcgacgaggagacatccaacaagcttgaagggattcctggtgttctctttgtgctccctgattcctatgttgaccctgaacacaaggactacggagcggagctgtttgtgaatggggagatcgtgcagagatctcccgagaggcagaggagggtggagcccgtgccgcagagagcgtcggacaggccgaggtacaacgacaggacccggtacgcgcggcggagggagaaccagcagcagcagcagccgcagcgatgatccatcacatgaccgaggcggaggccagagctggaggcaacctgctgtgctggtttcatcccctcgacatagcgagcagttgttattgcttggttttagtaatccgtttcatgttgccactactctgttatctgtatgtatttgacatcttggaacctgaaactgtgaatcttgatagcataaaagaattttagagccggg

SEQ ID NO: 63963 - protein, 255 aa, Triticum aestivum
  peptide (1)..(255): Ceres Seq. ID no. 12616930
  misc_feature (16)..(255): Homolog of NCBI NO: 18400602 NR Description: expressed protein
  misc_feature (28)..(254): Homolog of NCBI NO: 38636775 NR Description: putative DAG protein [Oryza sativa (japonica
  misc_feature (26)..(249): Homolog of NCBI NO: 15226934 NR Description: unknown protein
  misc_feature (26)..(249): Homolog of NCBI NO: 15223247 NR Description: plastid protein, putative
  misc_feature (37)..(247): Homolog of NCBI NO: 21617909 NR Description: plastid protein [Arabidopsis thaliana]
  misc_feature (87)..(247): Homolog of NCBI NO: 25370552 NR Description: DAG protein homolog [imported] - Arabidopsis
  misc_feature (37)..(247): Homolog of NCBI NO: 15226108 NR Description: plastid protein
  misc_feature (37)..(247): Homolog of NCBI NO: 2440029 NR Description: DAL1 protein [Arabidopsis thaliana]
  misc_feature (41)..(252): Homolog of NCBI NO: 38344141 NR Description: OSJNBa0041A02.8 [Oryza sativa (japonica
  misc_feature (8)..(249): Homolog of NCBI NO: 34897972 NR Description: putative plastid protein [Oryza sativa (japonica
SPSPSLTMAAAAAASMARRLLSPTTTTSYSTTARLLISRRLASAASVPRAPAAAAKEMLRPAAVASSSLFFRGVGGARGMARRPGGGDGYAPARGGGGGGAPTEMAPLFPGCDYEHWLIVMDKPGGEGASKHQMIDCYVHTLAKVLGSEEEAKRKIYNVSCERYFGFGCEIDEETSNKLEGIPGVLFVLPDSYVDPEHKDYGAELFVNGEIVQRSPERQRRVEPVPQRASDRPRYNDRTRYARRRENQQQQQPQR

SEQ ID NO: 63964 - protein, 248 aa, Triticum aestivum
  peptide (1)..(248): Ceres Seq. ID no. 12616931
  misc_feature (9)..(248): Homolog of NCBI NO: 18400602 NR Description: expressed protein
  misc_feature (21)..(247): Homolog of NCBI NO: 38636775 NR Description: putative DAG protein [Oryza sativa (japonica
  misc_feature (19)..(242): Homolog of NCBI NO: 15226934 NR Description: unknown protein
  misc_feature (19)..(242): Homolog of NCBI NO: 15223247 NR Description: plastid protein, putative
  misc_feature (30)..(240): Homolog of NCBI NO: 21617909 NR Description: plastid protein [Arabidopsis thaliana]
  misc_feature (80)..(240): Homolog of NCBI NO: 25370552 NR Description: DAG protein homolog [imported] - Arabidopsis
  misc_feature (30)..(240): Homolog of NCBI NO: 15226108 NR Description: plastid protein
  misc_feature (30)..(240): Homolog of NCBI NO: 2440029 NR Description: DAL1 protein [Arabidopsis thaliana]
  misc_feature (34)..(245): Homolog of NCBI NO: 38344141 NR Description: OSJNBa0041A02.8 [Oryza sativa (japonica
  misc_feature (1)..(242): Homolog of NCBI NO: 34897972 NR Description: putative plastid protein [Oryza sativa (japonica
MAAAAAASMARRLLSPTTTTSYSTTARLLISRRLASAASVPRAPAAAAKEMLRPAAVASSSLFFRGVGGARGMARRPGGGDGYAPARGGGGGGAPTEMAPLFPGCDYEHWLIVMDKPGGEGASKHQMIDCYVHTLAKVLGSEEEAKRKIYNVSCERYFGFGCEIDEETSNKLEGIPGVLFVLPDSYVDPEHKDYGAELFVNGEIVQRSPERQRRVEPVPQRASDRPRYNDRTRYARRRENQQQQQPQR

SEQ ID NO: 63965 - protein, 240 aa, Triticum aestivum
  peptide (1)..(240): Ceres Seq. ID no. 12616932
  misc_feature (1)..(240): Homolog of NCBI NO: 18400602 NR Description: expressed protein
  misc_feature (13)..(239): Homolog of NCBI NO: 38636775 NR Description: putative DAG protein [Oryza sativa (japonica
  misc_feature (11)..(234): Homolog of NCBI NO: 15226934 NR Description: unknown protein
  misc_feature (11)..(234): Homolog of NCBI NO: 15223247 NR Description: plastid protein, putative
  misc_feature (22)..(232): Homolog of NCBI NO: 21617909 NR Description: plastid protein [Arabidopsis thaliana]
  misc_feature (72)..(232): Homolog of NCBI NO: 25370552 NR Description: DAG protein homolog [imported] - Arabidopsis
  misc_feature (22)..(232): Homolog of NCBI NO: 15226108 NR Description: plastid protein
  misc_feature (22)..(232): Homolog of NCBI NO: 2440029 NR Description: DAL1 protein [Arabidopsis thaliana]
  misc_feature (26)..(237): Homolog of NCBI NO: 38344141 NR Description: OSJNBa0041A02.8 [Oryza sativa (japonica
  misc_feature (1)..(234): Homolog of NCBI NO: 34897972 NR Description: putative plastid protein [Oryza sativa (japonica
MARRLLSPTTTTSYSTTARLLISRRLASAASVPRAPAAAAKEMLRPAAVASSSLFFRGVGGARGMARRPGGGDGYAPARGGGGGGAPTEMAPLFPGCDYEHWLIVMDKPGGEGASKHQMIDCYVHTLAKVLGSEEEAKRKIYNVSCERYFGFGCEIDEETSNKLEGIPGVLFVLPDSYVDPEHKDYGAELFVNGEIVQRSPERQRRVEPVPQRASDRPRYNDRTRYARRRENQQQQQPQR

SEQ ID NO: 63966 - DNA, 456 bp, Triticum aestivum
  misc_feature (1)..(456): Ceres Seq. ID no. 15173081
agtcgagagggatgactccagagccaagaaccaggatattggtgaaagcaatacatatgaagaaggatgggcctgagactgaagatcgatccccaagtatgactgggaaaaatctaaaattggatcgtcgatcaggacttttccatgttcgtaaatagtcaccggaagatcctgcttaattatcctagcagaagatgctgagcatctgggcttatggaacatcatccagtgactttcaaccttgggctaaaagaaatccacaagagaagagtcattgacaatacgatgccccaaaatttatgctgtttgaaatgtcacagcaggatatgtttaggatgtattgggcaattcaattgcaggtacttgcttagatgcttgtattctggagatgtatgtgtaatacttacatatgtttgtttcttcttgcattatatatgtcgttcgtagttgtttctg

SEQ ID NO: 63967 - protein, 77 aa, Triticum aestivum
  peptide (1)..(77): Ceres Seq. ID no. 15173082
MEHHPVTFNLGLKEIHKRRVIDNTMPQNLCCLKCHSRICLGCIGQFNCRYLLRCLYSGDVCVILTYVCFFLHYICRS

SEQ ID NO: 63968 - protein, 53 aa, Triticum aestivum
  peptide (1)..(53): Ceres Seq. ID no. 15173083
MPQNLCCLKCHSRICLGCIGQFNCRYLLRCLYSGDVCVILTYVCFFLHYICRS

SEQ ID NO: 63969 - protein, 51 aa, Triticum aestivum
  peptide (1)..(51): Ceres Seq. ID no. 15173084
  misc_feature (1)..(51): Homolog of NCBI NO: 34895880 NR Description: P0009G03.20 [Oryza sativa (japonica
SRGMTPEPRTRILVKAIHMKKDGPETEDRSPSMTGKNLKLDRRSGLFHVRK

SEQ ID NO: 63970 - DNA, 1831 bp, Triticum aestivum
  misc_feature (1)..(1831): Ceres Seq. ID no. 14307995
ctgcatccactctcagccatagtgttagaggatgcgaggcgatatggctcaagtactcaccatcttctccccggaagttctgctctcactcttgctctgcttcttcgtactacgccgctactacttggcaagacgatctgcgaacaattgcagtgatcatggccgccgtctcccgccgtcgcctccgaagctccctctcataggccacctgcacctcgtcggccccgacccgcacatctccctcgccgagctctcaaggaagcacgccggccgcgacggcctcatgctcctccgcctcggccaggtgcccaacctcgtcgtctcctccccgagcgccgccgaggccgtcctgcgcacgcacgaccacgtcttcgcctcccgcccgccgtccatcgtcgccggcgtcctcctcagcggcccctccgacgtcgccctcaccccctacggcgagtactggcggcaggccaggaagctcgttaccacccacctgctgagcgcccggaaggtgcgcgcgctccagggcggccgcgaggaggaggtgcgccttgtggtggccaaactccgggcggccgcggccgcccgctctgccgtcgacatgaccgagctgctcggcggcttcaccaacgacgtcgtatgccgcgccgtgtccgggaagttcttcagggaggaaggcaggaacgagctgttccgggagctcatcgccgggaacgtggctgcgataggggggttcaacctggaggactacttcccgagcttggccaaggtaggtcttctccggcgagtggtgctcggcaagacgaggaggctgaagaagagatgggacgagttgctcgacaagatcatagacgaccacgcgaccaaatcaccatggctagtaggagtacatcagcatcaacccaatgagcaagagcaaaaccaacaagatgaagacagagacttggtagatgttctcctctctcttcaacacgagtacagtctcactagagacaacgtcaaggccatcttgttggacatgttctctgcgggcacagacacgtcatccatcgtcctggagttcgccatggcggagctcatgcggaagccacacctcatggccaaactccaggccgacgtgaggagcaagacacccaagacccagcaaacagtcaaggaggacgatctgggcaacatgtcctacctcaaggctgtggtgaaggagacgctccggctccacccaccggcgccgctcctcctcccacacctctccatggccgagtgcgacgacgtcaacggctacatggtcccggcagggacacgcgtcatcatcaacgcgtgggctctctgcagagacaccgagtcctgggggatgaaggcggaggagttctggccggagaggttcatagacggggccaaagcagctgccgacttcaaagggagggatttccaattcctgccgtttggagccgggcggaggatttgccccgggatgggctttgggctcgccacggtcgaggccatgcttgccaaccttgtttattgcttcgactgggagctccccgatgggatgcgggaggaggacgttgacatggccgacgtgtttggagtgacgatgcgtcggaaggagaagcttgttcttgtcccaagaataccacaagatgcaaacatatagtgcatgcgcaccattccatactatcagttagtatagccgcaataaaaatttagaccaactcaaatatgaacatctcctagttatgcttctctcctacagaatgtaaaaaacgcaggaactgtactttttgcaggaattgtttctttaggagagataaagacacatgttgcattggacttctcg

SEQ ID NO: 63971 - protein, 538 aa, Triticum aestivum
  peptide (1)..(538): Ceres Seq. ID no. 14307996
  misc_feature (49)..(529): Pfam Name: Cytochrome P450 Pfam Description: Cytochrome P450
  misc_feature (13)..(279): Homolog of NCBI NO: 13661750 NR Description: putative cytochrome P450 [Lolium rigidum]
  misc_feature (17)..(534): Homolog of NCBI NO: 5921186 NR Description: Cytochrome P450 71C1
  misc_feature (13)..(532): Homolog of NCBI NO: 19909886 NR Description: P450 [Triticum aestivum]
  misc_feature (17)..(534): Homolog of NCBI NO: 7430630 NR Description: cytochrome P450 - maize
  misc_feature (16)..(532): Homolog of NCBI NO: 5921187 NR Description: Cytochrome P450 71C2
  misc_feature (6)..(531): Homolog of NCBI NO: 5921189 NR Description: Cytochrome P450 71C4
  misc_feature (13)..(533): Homolog of NCBI NO: 26655531 NR Description: cytochrome P450 [Triticum aestivum]
  misc_feature (13)..(533): Homolog of NCBI NO: 19909888 NR Description: P450 [Triticum aestivum]
  misc_feature (11)..(530): Homolog of NCBI NO: 19909894 NR Description: P450 [Triticum aestivum]
  misc_feature (11)..(530): Homolog of NCBI NO: 19909892 NR Description: P450 [Triticum aestivum]
MRGDMAQVLTIFSPEVLLSLLLCFFVLRRYYLARRSANNCSDHGRRLPPSPPKLPLIGHLHLVGPDPHISLAELSRKHAGRDGLMLLRLGQVPNLVVSSPSAAEAVLRTHDHVFASRPPSIVAGVLLSGPSDVALTPYGEYWRQARKLVTTHLLSARKVRALQGGREEEVRLVVAKLRAAAAARSAVDMTELLGGFTNDVVCRAVSGKFFREEGRNELFRELIAGNVAAIGGFNLEDYFPSLAKVGLLRRVVLGKTRRLKKRWDELLDKIIDDHATKSPWLVGVHQHQPNEQEQNQQDEDRDLVDVLLSLQHEYSLTRDNVKAILLDMFSAGTDTSSIVLEFAMAELMRKPHLMAKLQADVRSKTPKTQQTVKEDDLGNMSYLKAVVKETLRLHPPAPLLLPHLSMAECDDVNGYMVPAGTRVIINAWALCRDTESWGMKAEEFWPERFIDGAKAAADFKGRDFQFLPFGAGRRICPGMGFGLATVEAMLANLVYCFDWELPDGMREEDVDMADVFGVTMRRKEKLVLVPRIPQDANI

SEQ ID NO: 63972 - protein, 534 aa, Triticum aestivum
  peptide (1)..(534): Ceres Seq. ID no. 14307997
  misc_feature (45)..(525): Pfam Name: Cytochrome P450 Pfam Description: Cytochrome P450
  misc_feature (9)..(275): Homolog of NCBI NO: 13661750 NR Description: putative cytochrome P450 [Lolium rigidum]
  misc_feature (13)..(530): Homolog of NCBI NO: 5921186 NR Description: Cytochrome P450 71C1
  misc_feature (9)..(528): Homolog of NCBI NO: 19909886 NR Description: P450 [Triticum aestivum]
  misc_feature (13)..(530): Homolog of NCBI NO: 7430630 NR Description: cytochrome P450 - maize
  misc_feature (12)..(528): Homolog of NCBI NO: 5921187 NR Description: Cytochrome P450 71C2
  misc_feature (2)..(527): Homolog of NCBI NO: 5921189 NR Description: Cytochrome P450 71C4
  misc_feature (9)..(529): Homolog of NCBI NO: 26655531 NR Description: cytochrome P450 [Triticum aestivum]
  misc_feature (9)..(529): Homolog of NCBI NO: 19909888 NR Description: P450 [Triticum aestivum]
  misc_feature (7)..(526): Homolog of NCBI NO: 19909894 NR Description: P450 [Triticum aestivum]
  misc_feature (7)..(526): Homolog of NCBI NO: 19909892 NR Description: P450 [Triticum aestivum]
MAQVLTIFSPEVLLSLLLCFFVLRRYYLARRSANNCSDHGRRLPPSPPKLPLIGHLHLVGPDPHISLAELSRKHAGRDGLMLLRLGQVPNLVVSSPSAAEAVLRTHDHVFASRPPSIVAGVLLSGPSDVALTPYGEYWRQARKLVTTHLLSARKVRALQGGREEEVRLVVAKLRAAAAARSAVDMTELLGGFTNDVVCRAVSGKFFREEGRNELFRELIAGNVAAIGGFNLEDYFPSLAKVGLLRRVVLGKTRRLKKRWDELLDKIIDDHATKSPWLVGVHQHQPNEQEQNQQDEDRDLVDVLLSLQHEYSLTRDNVKAILLDMFSAGTDTSSIVLEFAMAELMRKPHLMAKLQADVRSKTPKTQQTVKEDDLGNMSYLKAVVKETLRLHPPAPLLLPHLSMAECDDVNGYMVPAGTRVIINAWALCRDTESWGMKAEEFWPERFIDGAKAAADFKGRDFQFLPFGAGRRICPGMGFGLATVEAMLANLVYCFDWELPDGMREEDVDMADVFGVTMRRKEKLVLVPRIPQDANI

SEQ ID NO: 63973 - protein, 454 aa, Triticum aestivum
  peptide (1)..(454): Ceres Seq. ID no. 14307998
  misc_feature (1)..(445): Pfam Name: Cytochrome P450 Pfam Description: Cytochrome P450
  misc_feature (1)..(195): Homolog of NCBI NO: 13661750 NR Description: putative cytochrome P450 [Lolium rigidum]
  misc_feature (1)..(450): Homolog of NCBI NO: 5921186 NR Description: Cytochrome P450 71C1
  misc_feature (1)..(448): Homolog of NCBI NO: 19909886 NR Description: P450 [Triticum aestivum]
  misc_feature (1)..(450): Homolog of NCBI NO: 7430630 NR Description: cytochrome P450 - maize
  misc_feature (1)..(448): Homolog of NCBI NO: 5921187 NR Description: Cytochrome P450 71C2
  misc_feature (1)..(447): Homolog of NCBI NO: 5921189 NR Description: Cytochrome P450 71C4
  misc_feature (1)..(449): Homolog of NCBI NO: 26655531 NR Description: cytochrome P450 [Triticum aestivum]
  misc_feature (1)..(449): Homolog of NCBI NO: 19909888 NR Description: P450 [Triticum aestivum]
  misc_feature (1)..(446): Homolog of NCBI NO: 19909894 NR Description: P450 [Triticum aestivum]
  misc_feature (1)..(446): Homolog of NCBI NO: 19909892 NR Description: P450 [Triticum aestivum]
MLLRLGQVPNLVVSSPSAAEAVLRTHDHVFASRPPSIVAGVLLSGPSDVALTPYGEYWRQARKLVTTHLLSARKVRALQGGREEEVRLVVAKLRAAAAARSAVDMTELLGGFTNDVVCRAVSGKFFREEGRNELFRELIAGNVAAIGGFNLEDYFPSLAKVGLLRRVVLGKTRRLKKRWDELLDKIIDDHATKSPWLVGVHQHQPNEQEQNQQDEDRDLVDVLLSLQHEYSLTRDNVKAILLDMFSAGTDTSSIVLEFAMAELMRKPHLMAKLQADVRSKTPKTQQTVKEDDLGNMSYLKAVVKETLRLHPPAPLLLPHLSMAECDDVNGYMVPAGTRVIINAWALCRDTESWGMKAEEFWPERFIDGAKAAADFKGRDFQFLPFGAGRRICPGMGFGLATVEAMLANLVYCFDWELPDGMREEDVDMADVFGVTMRRKEKLVLVPRIPQDANI

SEQ ID NO: 63974 - DNA, 1233 bp, Triticum aestivum
  misc_feature (1)..(1233): Ceres Seq. ID no. 13597333
gaatccgaccacaaatccgcacccccaggaccagcagcagcagccatgacgccctccgccgtcgccaacctagccggcgcctccccgctgcccgccttcgcgccgaggcccaggtccaggcccaactcggccagcccgggcccgttcgggcccgcgccgcgccggctcgccgtcgccgccccgccgcgggccttcttctcctccgcgccctaccagccgccggagccggagggctactcctccgtccgcgagtacggcctcgtgcccatggtcgtcgagaccacctcccgcggggagcgcgcctacgacatcttctcccgcctgctcaaggagcggatcgtctgcatccacgggcccatcgccgacgagacggcctcgctcgtcgtcgcgcagctgctcttcctcgagtccgagaacccgctcaagcccatcagcctctacatcaactcccccgggggcgtcgtcaccgccgggctcgccatctacgacaccatgcagtacatccgctgccccgtcaacaccatctgcatcggccaggccgcctccatgggctccctcctcctcgccgccggcgcgcgcggggagaggcgggcgctgcccaacgccagggtcatgatccaccagccctccggcggggcccagggccaggccaccgacatcgccatccaggccaaggagatcctcaagctgcgcgaccgcctcaacaagatctacgccaagcacacgggccagaacatcgacaagatcgagcagtgcatggagcgtgaccttttcatggaccccgaggaggcgcgcgaatgggggcttatagacgaggtcatcgagaaccgcccggcctccctcatgcctgagggcctcagtgccgttgacccgcctcaccacggtgggggcgccggcgccaacggccgtggcagggacagggatatggaggagccctccgctgtatgaggggtggccacgaaggtgaaaccttttcctgagtccggtggctatgttgtttgttgttagatctaagttttgatgattcctaatacaacaggtcaacttggtatcttctccctgttgtttcaattgcctgaactgagctattgctgatattattgcaactcgtaaaagggatttcattcctttggtactgataaattgatagtgtgttgaatgtccgttatacgatcaatttcaggttacagcatcaaaaacatgctgttcttttttatgcataggattttcttt

SEQ ID NO: 63975 - protein, 315 aa, Triticum aestivum
  peptide (1)..(315): Ceres Seq. ID no. 15222076
  misc_feature (96)..(277): Pfam Name: Clp protease Pfam Description: Clp protease
  misc_feature (80)..(278): Homolog of NCBI NO: 5174419 NR Description: endopeptidase Clp precursor
  misc_feature (82)..(283): Homolog of NCBI NO: 22964887 NR Description: hypothetical protein [Rhodopseudomonas palustris]
  misc_feature (88)..(277): Homolog of NCBI NO: 3023519 NR Description: ATP-dependent Clp protease proteolytic subunit 1
  misc_feature (87)..(280): Homolog of NCBI NO: 22967580 NR Description: hypothetical protein [Rhodospirillum rubrum]
  misc_feature (55)..(292): Homolog of NCBI NO: 8393156 NR Description: caseinolytic protease, ATP-dependent, proteolytic
  misc_feature (87)..(280): Homolog of NCBI NO: 23014984 NR Description: hypothetical protein [Magnetospirillum
  misc_feature (6)..(296): Homolog of NCBI NO: 34882298 NR Description: similar to ClpP protease [Rattus norvegicus]
  misc_feature (87)..(281): Homolog of NCBI NO: 6685315 NR Description: ATP-dependent Clp protease proteolytic subunit
  misc_feature (83)..(286): Homolog of NCBI NO: 18420643 NR Description: ATP-dependent Clp protease proteolytic subunit
  misc_feature (54)..(313): Homolog of NCBI NO: 38344435 NR Description: OSJNBa0038O10.7 [Oryza sativa (japonica
ESDHKSAPPGPAAAAMTPSAVANLAGASPLPAFAPRPRSRPNSASPGPFGPAPRRLAVAAPPRAFFSSAPYQPPEPEGYSSVREYGLVPMVVETTSRGERAYDIFSRLLKERIVCIHGPIADETASLVVAQLLFLESENPLKPISLYINSPGGVVTAGLAIYDTMQYIRCPVNTICIGQAASMGSLLLAAGARGERRALPNARVMIHQPSGGAQGQATDIAIQAKEILKLRDRLNKIYAKHTGQNIDKIEQCMERDLFMDPEEAREWGLIDEVIENRPASLMPEGLSAVDPPHHGGGAGANGRGRDRDMEEPSAV

SEQ ID NO: 63976 - protein, 300 aa, Triticum aestivum
  peptide (1)..(300): Ceres Seq. ID no. 15222077
  misc_feature (81)..(262): Pfam Name: Clp protease Pfam Description: Clp protease
  misc_feature (65)..(263): Homolog of NCBI NO: 5174419 NR Description: endopeptidase Clp precursor
  misc_feature (67)..(268): Homolog of NCBI NO: 22964887 NR Description: hypothetical protein [Rhodopseudomonas palustris]
  misc_feature (73)..(262): Homolog of NCBI NO: 3023519 NR Description: ATP-dependent Clp protease proteolytic subunit 1
  misc_feature (72)..(265): Homolog of NCBI NO: 22967580 NR Description: hypothetical protein [Rhodospirillum rubrum]
  misc_feature (40)..(277): Homolog of NCBI NO: 8393156 NR Description: caseinolytic protease, ATP-dependent, proteolytic
  misc_feature (72)..(265): Homolog of NCBI NO: 23014984 NR Description: hypothetical protein [Magnetospirillum
  misc_feature (1)..(281): Homolog of NCBI NO: 34882298 NR Description: similar to ClpP protease [Rattus norvegicus]
  misc_feature (72)..(266): Homolog of NCBI NO: 6685315 NR Description: ATP-dependent Clp protease proteolytic subunit
  misc_feature (68)..(271): Homolog of NCBI NO: 18420643 NR Description: ATP-dependent Clp protease proteolytic subunit
  misc_feature (39)..(298): Homolog of NCBI NO: 38344435 NR Description: OSJNBa0038O10.7 [Oryza sativa (japonica
MTPSAVANLAGASPLPAFAPRPRSRPNSASPGPFGPAPRRLAVAAPPRAFFSSAPYQPPEPEGYSSVREYGLVPMVVETTSRGERAYDIFSRLLKERIVCIHGPIADETASLVVAQLLFLESENPLKPISLYINSPGGVVTAGLAIYDTMQYIRCPVNTICIGQAASMGSLLLAAGARGERRALPNARVMIHQPSGGAQGQATDIAIQAKEILKLRDRLNKIYAKHTGQNIDKIEQCMERDLFMDPEEAREWGLIDEVIENRPASLMPEGLSAVDPPHHGGGAGANGRGRDRDMEEPSAV

SEQ ID NO: 63977 - protein, 254 aa, Triticum aestivum
  peptide (1)..(254): Ceres Seq. ID no. 15222078
  misc_feature (107)..(247): Pfam Name: Amidohydrolase family Pfam Description: Amidohydrolase family
IRPQIRTPRTSSSSHDALRRRQPSRRLPAARLRAEAQVQAQLGQPGPVRARAAPARRRRPAAGLLLLRALPAAGAGGLLLRPRVRPRAHGRRDHLPRGARLRHLLPPAQGADRLHPRAHRRRDGLARRRAAALPRVREPAQAHQPLHQLPRGRRHRRARHLRHHAVHPLPRQHHLHRPGRLHGLPPPRRRRARGEAGAAQRQGHDPPALRRGPGPGHRHRHPGQGDPQAARPPQQDLRQAHGPEHRQDRAVHGA

SEQ ID NO: 63978 - DNA, 1121 bp, Triticum aestivum
  misc_feature (1)..(1121): Ceres Seq. ID no. 13585609
aaccatccagatccaggtccttcctcgttatctttcaccatgccttcagcagcttcccgactcgtgcggatcggccgtgccgctcgctcagctgcggcgaccacatctcgcttcgcccaattcgttgaagcagcgaccctctccacgaaggcggtggcgaccaaacctcacgctatcttaggttcagatcgtgccgcctccgtagatctgcgtatgaaccaatccactgtccatgctcctccacgcgccatggcacctgcctccctgacactcagtcacccagaagaacaaaggcaggaaggtaaggtgaagtttgtggtagaggagaaagaccttgagtcagaagcagccctttgggccttgtatgagcgctggtgcaaagatttcaaccaaaagcgtgatcatgatgagatggttcactggttcaacacattcaaggagactgtcctgcttgtccaccgtcggaacaatgctaatctgccctacaaattgggaataaacaaattcgcggatgggaagctaaggaagctctgttgctgtcatgatcctattcttaaaaagattgatgaggagtttggcgacaaaccaggtgaatttattctaggtgatggtgacaaacttctcaagcgagtcttcgctgattataaggtggttcatggcagactgtatgttcatttaccaaagggagttgatgtggaaaccatcaccaccaatcctgaatgggtcgagctggaagcgaccaccaaccctccataccgataccctacttacatctagtggtgctatcattattgctactaagctgtgcttctgccaacggttgcatactaggacttggatgttgtccttcttgctaataaaacatactccctccgtccggaaatacttgtcatcgaaatggataaaagagatgtatttagacgtattttagttttagatacatctcttttgatccattttgatgacaagtattttaggacggagggcgtatgcataataagctaaccgtgagcatatgaggattacgttaatgcttttgtaagatattttaaactttgactaaggtgttgtaatattccagattcatcgttatgtgctcattagtcaggttttttcctctc

SEQ ID NO: 63979 - protein, 258 aa, Triticum aestivum
  peptide (1)..(258): Ceres Seq. ID no. 13585610
  misc_feature (105)..(171): Homolog of NCBI NO: 118158 NR Description: Vignain precursor (Bean endopeptidase) (Cysteine
  misc_feature (107)..(171): Homolog of NCBI NO: 4731374 NR Description: papain-like cysteine protease [Sandersonia
  misc_feature (105)..(171): Homolog of NCBI NO: 18408616 NR Description: cysteine proteinase, putative [Arabidopsis
  misc_feature (109)..(171): Homolog of NCBI NO: 40806500 NR Description: putative cysteine protease 2 [Iris hollandica]
  misc_feature (107)..(172): Homolog of NCBI NO: 34897042 NR Description: hypothetical protein [Oryza sativa (japonica
  misc_feature (105)..(171): Homolog of NCBI NO: 16444924 NR Description: cysteine proteinase [Daucus carota]
  misc_feature (105)..(171): Homolog of NCBI NO: 7435802 NR Description: cysteine proteinase (EC 3.4.22.-) precursor -
  misc_feature (105)..(171): Homolog of NCBI NO: 1336648 NR Description: endopeptidase-like protein
  misc_feature (16)..(172): Homolog of NCBI NO: 40786566 NR Description: putative cysteine proteinase
  misc_feature (10)..(157): Homolog of NCBI NO: 38605767 NR Description: OSJNBa0044K18.10 [Oryza sativa (japonica
NHPDPGPSSLSFTMPSAASRLVRIGRAARSAAATTSRFAQFVEAATLSTKAVATKPHAILGSDRAASVDLRMNQSTVHAPPRAMAPASLTLSHPEEQRQEGKVKFVVEEKDLESEAALWALYERWCKDFNQKRDHDEMVHWFNTFKETVLLVHRRNNANLPYKLGINKFADGKLRKLCCCHDPILKKIDEEFGDKPGEFILGDGDKLLKRVFADYKVVHGRLYVHLPKGVDVETITTNPEWVELEATTNPPYRYPTYI

SEQ ID NO: 63980 - protein, 245 aa, Triticum aestivum
  peptide (1)..(245): Ceres Seq. ID no. 13585611
  misc_feature (92)..(158): Homolog of NCBI NO: 118158 NR Description: Vignain precursor (Bean endopeptidase) (Cysteine
  misc_feature (94)..(158): Homolog of NCBI NO: 4731374 NR Description: papain-like cysteine protease [Sandersonia
  misc_feature (92)..(158): Homolog of NCBI NO: 18408616 NR Description: cysteine proteinase, putative [Arabidopsis
  misc_feature (96)..(158): Homolog of NCBI NO: 40806500 NR Description: putative cysteine protease 2 [Iris hollandica]
  misc_feature (94)..(159): Homolog of NCBI NO: 34897042 NR Description: hypothetical protein [Oryza sativa (japonica
  misc_feature (92)..(158): Homolog of NCBI NO: 16444924 NR Description: cysteine proteinase [Daucus carota]
  misc_feature (92)..(158): Homolog of NCBI NO: 7435802 NR Description: cysteine proteinase (EC 3.4.22.-) precursor -
  misc_feature (92)..(158): Homolog of NCBI NO: 1336648 NR Description: endopeptidase-like protein
  misc_feature (3)..(159): Homolog of NCBI NO: 40786566 NR Description: putative cysteine proteinase
  misc_feature (1)..(144): Homolog of NCBI NO: 38605767 NR Description: OSJNBa0044K18.10 [Oryza sativa (japonica
MPSAASRLVRIGRAARSAAATTSRFAQFVEAATLSTKAVATKPHAILGSDRAASVDLRMNQSTVHAPPRAMAPASLTLSHPEEQRQEGKVKFVVEEKDLESEAALWALYERWCKDFNQKRDHDEMVHWFNTFKETVLLVHRRNNANLPYKLGINKFADGKLRKLCCCHDPILKKIDEEFGDKPGEFILGDGDKLLKRVFADYKVVHGRLYVHLPKGVDVETITTNPEWVELEATTNPPYRYPTYI

SEQ ID NO: 63981 - protein, 187 aa, Triticum aestivum
  peptide (1)..(187): Ceres Seq. ID no. 13585612
  misc_feature (34)..(100): Homolog of NCBI NO: 118158 NR Description: Vignain precursor (Bean endopeptidase) (Cysteine
  misc_feature (36)..(100): Homolog of NCBI NO: 4731374 NR Description: papain-like cysteine protease [Sandersonia
  misc_feature (34)..(100): Homolog of NCBI NO: 18408616 NR Description: cysteine proteinase, putative [Arabidopsis
  misc_feature (38)..(100): Homolog of NCBI NO: 40806500 NR Description: putative cysteine protease 2 [Iris hollandica]
  misc_feature (36)..(101): Homolog of NCBI NO: 34897042 NR Description: hypothetical protein [Oryza sativa (japonica
  misc_feature (34)..(100): Homolog of NCBI NO: 16444924 NR Description: cysteine proteinase [Daucus carota]
  misc_feature (34)..(100): Homolog of NCBI NO: 7435802 NR Description: cysteine proteinase (EC 3.4.22.-) precursor -
  misc_feature (34)..(100): Homolog of NCBI NO: 1336648 NR Description: endopeptidase-like protein
  misc_feature (1)..(101): Homolog of NCBI NO: 40786566 NR Description: putative cysteine proteinase
  misc_feature (1)..(86): Homolog of NCBI NO: 38605767 NR Description: OSJNBa0044K18.10 [Oryza sativa (japonica
MNQSTVHAPPRAMAPASLTLSHPEEQRQEGKVKFVVEEKDLESEAALWALYERWCKDFNQKRDHDEMVHWFNTFKETVLLVHRRNNANLPYKLGINKFADGKLRKLCCCHDPILKKIDEEFGDKPGEFILGDGDKLLKRVFADYKVVHGRLYVHLPKGVDVETITTNPEWVELEATTNPPYRYPTYI

SEQ ID NO: 63982 - DNA, 2156 bp, Triticum aestivum
  misc_feature (1)..(2156): Ceres Seq. ID no. 12597287
ctcccgttcccctttttcgaatcgagcccaaccgcatcgtgcgtgcgcacccccactcctcccccctagggtttcgaggttctccgacgatgtcgctgcggcccaacgagcgggccgaggtgcggcgcagccgctacaaggcgtccgtcgacgccgaggacgggcgccggcggcgggaggatcagatggtggagatccggaagaatcagcgcgacgcgaacctccagaagaagcgccgcgacgggttcccggccggcgccgcgtccgctgccggtggcgcgccgcagatgggccactcctcggctctccagcagaagctggagggcttgcccgcgatggtgcaggcggttctctcggacgacaacgccgtgcagctcgaggccaccacccagttccggaagctgctctccatcgagcgaagccctccaattgaggaagtgatcaacacaggcgtggtgcctcgcttcattgagttcctcacacgggaggactatccccaactccagtttgaggctgcatgggcgctcaccaacatcgcgtcaggcacatcagacaacaccaaagtggtggttgagtatggtgctgtgcccatctttgtcaagctactcagctctcctagtgaggatgtccgcgaacaggctgtttgggctctggggaatgttgctggtgactctccaaagtgccgtgaccttgtgcttggaagtggtggtctgttccctttgttgcagcagctcaatgagcatgccaagctctcgatgctcaggaatgccacatggacactctccaacttctgccgtgggaaaccacagccaaattttgaacaggtcaaaccggctctctcagcactgcagcgccttatccactctcaggatgaggaggtgctaactgatgcctgctgggctctctcgtacctttctgatggaactaatgacaagatccaatccgtgattgagtctggtgtttttcctcggcttgtggagcttctcttgcacccttcggcttctgttctcattccagctctgcgcacggtgggtaacattgtcactggtgatgatttgcagactcagtgtgtcattgatcaccaagcacttccctgtctcttgaacctcttgactaccaaccacaagaaaagcatcaagaaagaagcatgctggacaatctcaaacatcacagctggtaaccgggaccagattcaggctgttatccaggcaaacattattggtccgctggtccatctcctgcaaggtgctgaatttgacattaagaaggagacagcttgggcaatttcaaatgccacttctggtggaacacatgatcagattaagtatcttgttgcccagggttgcatcaagccgctctgtgatctgctcatttgcccggatcccagaattgtaacagtttgcttggaaggtcttgagaacatcctgaaggttggggaggcagaaaagaaccttggagcaggggatgtcaacaactatgcgcagatgattgatgacgctgagggactggaaaagattgagaaccttcagagccatgacaacacagaaatatatgagaaggcagtgaagatgcttgagtcctactggttggaggaggaagatgaggtcatgccctcaggtgataatgcccagaatggcttcaactttggaagtcagcagaactcggttccatcgggtgggttcaactttggctgaagatacccggttggacgtgtaccttagctacttgcttgggactagtcagatttggggaggtctttgtcgttcgagtcattgttgggtcctgtcggtctggtctcaagcagtcgtcaagtcagtctaagcagggtcagtccttgggctgcatcgtcggtggtgcagcttggtcaatggtcagtcttcaaggtcaaccggtcggatcatttgggttctgcctcaccagaggacgtccagagccgcatgtgttgtcgggagagtcgggttttgcctcctaatatagcttgaaccaaaattatattgatatatctgtgtgaggtaaaaagaaccttgaaagatagggttttcacggttgttggttgtgtcggtttttgtcagaagtgtttctgtgctgtattaacttgacgaaagagtatggagcacaccttataaacatcaaaagcaactgggttttgggagtcc

SEQ ID NO: 63983 - protein, 563 aa, Triticum aestivum
  peptide (1)..(563): Ceres Seq. ID no. 12597288
  misc_feature (33)..(130): Pfam Name: Importin beta binding domain Pfam Description: Importin beta binding domain
  misc_feature (41)..(563): Homolog of NCBI NO: 30421147 NR Description: importin alpha [Toxoplasma gondii]
  misc_feature (30)..(562): Homolog of NCBI NO: 25314870 NR Description: probable nuclear transport factor importin alpha
  misc_feature (30)..(562): Homolog of NCBI NO: 13699777 NR Description: AtKAP alpha [Arabidopsis thaliana]
  misc_feature (30)..(562): Homolog of NCBI NO: 15809794 NR Description: AT3g06720/F3E22_14 [Arabidopsis thaliana]
  misc_feature (30)..(562): Homolog of NCBI NO: 25314876 NR Description: probable nuclear transport factor importin
  misc_feature (30)..(562): Homolog of NCBI NO: 13605661 NR Description: AT3g06720/F3E22_14 [Arabidopsis thaliana]
  misc_feature (30)..(562): Homolog of NCBI NO: 15230778 NR Description: importin alpha
  misc_feature (30)..(563): Homolog of NCBI NO: 13752562 NR Description: importin alpha 2 [Capsicum annuum]
  misc_feature (30)..(563): Homolog of NCBI NO: 6682927 NR Description: importin alpha 1b [Oryza sativa (japonica
  misc_feature (30)..(563): Homolog of NCBI NO: 34897636 NR Description: putative impotin alpha 1b [Oryza sativa]
PVPLFRIEPNRIVRAHPHSSPLGFRGSPTMSLRPNERAEVRRSRYKASVDAEDGRRRREDQMVEIRKNQRDANLQKKRRDGFPAGAASAAGGAPQMGHSSALQQKLEGLPAMVQAVLSDDNAVQLEATTQFRKLLSIERSPPIEEVINTGVVPRFIEFLTREDYPQLQFEAAWALTNIASGTSDNTKVVVEYGAVPIFVKLLSSPSEDVREQAVWALGNVAGDSPKCRDLVLGSGGLFPLLQQLNEHAKLSMLRNATWTLSNFCRGKPQPNFEQVKPALSALQRLIHSQDEEVLTDACWALSYLSDGTNDKIQSVIESGVFPRLVELLLHPSASVLIPALRTVGNIVTGDDLQTQCVIDHQALPCLLNLLTTNHKKSIKKEACWTISNITAGNRDQIQAVIQANIIGPLVHLLQGAEFDIKKETAWAISNATSGGTHDQIKYLVAQGCIKPLCDLLICPDPRIVTVCLEGLENILKVGEAEKNLGAGDVNNYAQMIDDAEGLEKIENLQSHDNTEIYEKAVKMLESYWLEEEDEVMPSGDNAQNGFNFGSQQNSVPSGGFNFG

SEQ ID NO: 63984 - protein, 534 aa, Triticum aestivum
  peptide (1)..(534): Ceres Seq. ID no. 12597289
  misc_feature (4)..(101): Pfam Name: Importin beta binding domain Pfam Description: Importin beta binding domain
  misc_feature (12)..(534): Homolog of NCBI NO: 30421147 NR Description: importin alpha [Toxoplasma gondii]
  misc_feature (1)..(533): Homolog of NCBI NO: 25314870 NR Description: probable nuclear transport factor importin alpha
  misc_feature (1)..(533): Homolog of NCBI NO: 13699777 NR Description: AtKAP alpha [Arabidopsis thaliana]
  misc_feature (1)..(533): Homolog of NCBI NO: 15809794 NR Description: AT3g06720/F3E22_14 [Arabidopsis thaliana]
  misc_feature (1)..(533): Homolog of NCBI NO: 25314876 NR Description: probable nuclear transport factor importin
  misc_feature (1)..(533): Homolog of NCBI NO: 13605661 NR Description: AT3g06720/F3E22_14 [Arabidopsis thaliana]
  misc_feature (1)..(533): Homolog of NCBI NO: 15230778 NR Description: importin alpha
  misc_feature (1)..(534): Homolog of NCBI NO: 13752562 NR Description: importin alpha 2 [Capsicum annuum]
  misc_feature (1)..(534): Homolog of NCBI NO: 6682927 NR Description: importin alpha 1b [Oryza sativa (japonica
  misc_feature (1)..(534): Homolog of NCBI NO: 34897636 NR Description: putative impotin alpha 1b [Oryza sativa]
MSLRPNERAEVRRSRYKASVDAEDGRRRREDQMVEIRKNQRDANLQKKRRDGFPAGAASAAGGAPQMGHSSALQQKLEGLPAMVQAVLSDDNAVQLEATTQFRKLLSIERSPPIEEVINTGVVPRFIEFLTREDYPQLQFEAAWALTNIASGTSDNTKVVVEYGAVPIFVKLLSSPSEDVREQAVWALGNVAGDSPKCRDLVLGSGGLFPLLQQLNEHAKLSMLRNATWTLSNFCRGKPQPNFEQVKPALSALQRLIHSQDEEVLTDACWALSYLSDGTNDKIQSVIESGVFPRLVELLLHPSASVLIPALRTVGNIVTGDDLQTQCVIDHQALPCLLNLLTTNHKKSIKKEACWTISNITAGNRDQIQAVIQANIIGPLVHLLQGAEFDIKKETAWAISNATSGGTHDQIKYLVAQGCIKPLCDLLICPDPRIVTVCLEGLENILKVGEAEKNLGAGDVNNYAQMIDDAEGLEKIENLQSHDNTEIYEKAVKMLESYWLEEEDEVMPSGDNAQNGFNFGSQQNSVPSGGFNFG

SEQ ID NO: 63985 - protein, 502 aa, Triticum aestivum
  peptide (1)..(502): Ceres Seq. ID no. 12597290
  misc_feature (1)..(69): Pfam Name: Importin beta binding domain Pfam Description: Importin beta binding domain
  misc_feature (1)..(502): Homolog of NCBI NO: 30421147 NR Description: importin alpha [Toxoplasma gondii]
  misc_feature (1)..(501): Homolog of NCBI NO: 25314870 NR Description: probable nuclear transport factor importin alpha
  misc_feature (1)..(501): Homolog of NCBI NO: 13699777 NR Description: AtKAP alpha [Arabidopsis thaliana]
  misc_feature (1)..(501): Homolog of NCBI NO: 15809794 NR Description: AT3g06720/F3E22_14 [Arabidopsis thaliana]
  misc_feature (1)..(501): Homolog of NCBI NO: 25314876 NR Description: probable nuclear transport factor importin
  misc_feature (1)..(501): Homolog of NCBI NO: 13605661 NR Description: AT3g06720/F3E22_14 [Arabidopsis thaliana]
  misc_feature (1)..(501): Homolog of NCBI NO: 15230778 NR Description: importin alpha
  misc_feature (1)..(502): Homolog of NCBI NO: 13752562 NR Description: importin alpha 2 [Capsicum annuum]
  misc_feature (1)..(502): Homolog of NCBI NO: 6682927 NR Description: importin alpha 1b [Oryza sativa (japonica
  misc_feature (1)..(502): Homolog of NCBI NO: 34897636 NR Description: putative impotin alpha 1b [Oryza sativa]
MVEIRKNQRDANLQKKRRDGFPAGAASAAGGAPQMGHSSALQQKLEGLPAMVQAVLSDDNAVQLEATTQFRKLLSIERSPPIEEVINTGVVPRFIEFLTREDYPQLQFEAAWALTNIASGTSDNTKVVVEYGAVPIFVKLLSSPSEDVREQAVWALGNVAGDSPKCRDLVLGSGGLFPLLQQLNEHAKLSMLRNATWTLSNFCRGKPQPNFEQVKPALSALQRLIHSQDEEVLTDACWALSYLSDGTNDKIQSVIESGVFPRLVELLLHPSASVLIPALRTVGNIVTGDDLQTQCVIDHQALPCLLNLLTTNHKKSIKKEACWTISNITAGNRDQIQAVIQANIIGPLVHLLQGAEFDIKKETAWAISNATSGGTHDQIKYLVAQGCIKPLCDLLICPDPRIVTVCLEGLENILKVGEAEKNLGAGDVNNYAQMIDDAEGLEKIENLQSHDNTEIYEKAVKMLESYWLEEEDEVMPSGDNAQNGFNFGSQQNSVPSGGFNFG

SEQ ID NO: 63986 - DNA, 1988 bp, Triticum aestivum
  misc_feature (1)..(1988): Ceres Seq. ID no. 13597375
aaaaaaccctaatcccctcgcagccgccacagcccccggagcccgcccgcccgaacccaccgccatggccgacgacgcggcatcggccccgccgacggcgcagctggccgccgcctccatctcctcgccgccctcctcggacctcgagccaccgacctcccgcacccgcatccgcgccatcctggacgccggcgacgccatggccggggagcgcgtggtcgtcggcggctgggtcaagaccggccgccagcagggcaagggcgagttcgccttcctcgaggtcaacgacgggtcctgccaggggaacctccaggtcatggtcgaaaaggacgtgcatccgctcgcaagcctcacccacacgggcacctccgtgctcgtcgagggcgtgctcaagaagccccccgcggaagccaagcagcgtatcgagttgaaggtggagcgggtcatcgagctcggggaggtggacgccgccgcctacccgctgcccaagaccaagatcacgctcgagacactcagggactttgtccacctccgcgcacgcaccaacacgataggcgcagttgctcggataaggcaccagcttgcctatgcaacccacagttttttcgatgaaaatggatttttgtatattcacacccccataataaccaccagcgactgtgagggtgcaggtgagatgttccaagtcactgccttattcagccaggctgaaaaggtggagaaggagcttaaggagaaccctgcaccatcagaagctgacgttgaggctgctaagcttgttgttaaagagaaaggagatgcagttgctcaactgaaagcagcaaaagctagcaagcaagagataactgctgctgtttccgtgcttacaaaagctaaagagaatgtgttaagggtggaagagaggtctaagttgaaacctggacttccactcaagggtgatgggaaaattgcgtttgagaatgacttcttcaagcgtcaagcttttctgaccgtttcaggccaacttcaggtcgaaacttatgcttgtgctctcagtaatgtgtatacctttggaccgacattccgggcagagaactcacatacatcaagacatttggcagagttttggatggttgaaccagaaattgcatttgcaaacttgcaggatgatatgaactgtgctgaaaggtatgtacagtacctgtgcaaatggttactcaagcattgccgagaagacatggaattcatggttaaacatgtggacaagaccgcaattgagcgtctggagcttgtttcctctactccgtttgaacgcatttcatatacaaaggctgtggagatcttagaaggtgtagataagaagtttgagaacaaggttgaatggggaattgatttagcgtctgagcatgagaggtatttgactgaggtgatatttaagaggccagttattgtgtataactacccaaaaggaataaaggcattttacatgaggctcaatgatgaccagaagacagtagctgcaatggatgttcttgttcccaaggttggtgaattaatcggtggaagccaaagggaggagcgtcttgatattcttaagcaaaggatactggacgcagatcttcctctggagccgtatgagtggtacctggacctccgacgctttggctcagtgaagcacagcgggttcggcctggggttcgagaggatgatccttttcgccaccggcctggagaacatcagagatgtcatcccgttcccacgataccccgggagggccgatctttgaagggttgcagatttctgccttgaaatataagaacgtcaattacactttcgttagcgtttttggaatagtgttggccgcccggttagattgatatatatacgcatgctgatatcatttgatatgcctcgtgtcttggcttgttgtgattctaaaaagaagtatcaggcttgttttatgattagaatattgaagtattattggtccttagcatcttcttttttgt

SEQ ID NO: 63987 - protein, 587 aa, Triticum aestivum
  peptide (1)..(587): Ceres Seq. ID no. 15222085
  misc_feature (321)..(583): Pfam Name: tRNA synthetases class II (D, K and N) Pfam Description: tRNA synthetases class II (D, K and N)
  misc_feature (62)..(238): Homolog of NCBI NO: 2664210 NR Description: asparaginyl-tRNA synthetase [Arabidopsis thaliana]
  misc_feature (308)..(586): Homolog of NCBI NO: 20139977 NR Description: Asparaginyl-tRNA synthetase,
  misc_feature (308)..(586): Homolog of NCBI NO: 2664210 NR Description: asparaginyl-tRNA synthetase [Arabidopsis thaliana]
  misc_feature (62)..(247): Homolog of NCBI NO: 15236037 NR Description: asparaginyl-tRNA synthetase,
  misc_feature (308)..(586): Homolog of NCBI NO: 15236037 NR Description: asparaginyl-tRNA synthetase,
  misc_feature (53)..(232): Homolog of NCBI NO: 23040758 NR Description: hypothetical protein [Trichodesmium erythraeum
  misc_feature (308)..(586): Homolog of NCBI NO: 23040758 NR Description: hypothetical protein [Trichodesmium erythraeum
  misc_feature (22)..(587): Homolog of NCBI NO: 15223302 NR Description: asparaginyl-tRNA synthetase, cytoplasmic
  misc_feature (22)..(587): Homolog of NCBI NO: 15241897 NR Description: asparaginyl-tRNA synthetase, cytoplasmic 1
  misc_feature (22)..(587): Homolog of NCBI NO: 34914792 NR Description: putative asparaginyl-tRNA synthetase
KNPNPLAAATAPGARPPEPTAMADDAASAPPTAQLAAASISSPPSSDLEPPTSRTRIRAILDAGDAMAGERVVVGGWVKTGRQQGKGEFAFLEVNDGSCQGNLQVMVEKDVHPLASLTHTGTSVLVEGVLKKPPAEAKQRIELKVERVIELGEVDAAAYPLPKTKITLETLRDFVHLRARTNTIGAVARIRHQLAYATHSFFDENGFLYIHTPIITTSDCEGAGEMFQVTALFSQAEKVEKELKENPAPSEADVEAAKLVVKEKGDAVAQLKAAKASKQEITAAVSVLTKAKENVLRVEERSKLKPGLPLKGDGKIAFENDFFKRQAFLTVSGQLQVETYACALSNVYTFGPTFRAENSHTSRHLAEFWMVEPEIAFANLQDDMNCAERYVQYLCKWLLKHCREDMEFMVKHVDKTAIERLELVSSTPFERISYTKAVEILEGVDKKFENKVEWGIDLASEHERYLTEVIFKRPVIVYNYPKGIKAFYMRLNDDQKTVAAMDVLVPKVGELIGGSQREERLDILKQRILDADLPLEPYEWYLDLRRFGSVKHSGFGLGFERMILFATGLENIRDVIPFPRYPGRADL

SEQ ID NO: 63988 - protein, 566 aa, Triticum aestivum
  peptide (1)..(566): Ceres Seq. ID no. 15222086
  misc_feature (300)..(562): Pfam Name: tRNA synthetases class II (D, K and N) Pfam Description: tRNA synthetases class II (D, K and N)
  misc_feature (41)..(217): Homolog of NCBI NO: 2664210 NR Description: asparaginyl-tRNA synthetase [Arabidopsis thaliana]
  misc_feature (287)..(565): Homolog of NCBI NO: 20139977 NR Description: Asparaginyl-tRNA synthetase,
  misc_feature (287)..(565): Homolog of NCBI NO: 2664210 NR Description: asparaginyl-tRNA synthetase [Arabidopsis thaliana]
  misc_feature (41)..(226): Homolog of NCBI NO: 15236037 NR Description: asparaginyl-tRNA synthetase,
  misc_feature (287)..(565): Homolog of NCBI NO: 15236037 NR Description: asparaginyl-tRNA synthetase,
  misc_feature (32)..(211): Homolog of NCBI NO: 23040758 NR Description: hypothetical protein [Trichodesmium erythraeum
  misc_feature (287)..(565): Homolog of NCBI NO: 23040758 NR Description: hypothetical protein [Trichodesmium erythraeum
  misc_feature (1)..(566): Homolog of NCBI NO: 15223302 NR Description: asparaginyl-tRNA synthetase, cytoplasmic
  misc_feature (1)..(566): Homolog of NCBI NO: 15241897 NR Description: asparaginyl-tRNA synthetase, cytoplasmic 1
  misc_feature (1)..(566): Homolog of NCBI NO: 34914792 NR Description: putative asparaginyl-tRNA synthetase
MADDAASAPPTAQLAAASISSPPSSDLEPPTSRTRIRAILDAGDAMAGERVVVGGWVKTGRQQGKGEFAFLEVNDGSCQGNLQVMVEKDVHPLASLTHTGTSVLVEGVLKKPPAEAKQRIELKVERVIELGEVDAAAYPLPKTKITLETLRDFVHLRARTNTIGAVARIRHQLAYATHSFFDENGFLYIHTPIITTSDCEGAGEMFQVTALFSQAEKVEKELKENPAPSEADVEAAKLVVKEKGDAVAQLKAAKASKQEITAAVSVLTKAKENVLRVEERSKLKPGLPLKGDGKIAFENDFFKRQAFLTVSGQLQVETYACALSNVYTFGPTFRAENSHTSRHLAEFWMVEPEIAFANLQDDMNCAERYVQYLCKWLLKHCREDMEFMVKHVDKTAIERLELVSSTPFERISYTKAVEILEGVDKKFENKVEWGIDLASEHERYLTEVIFKRPVIVYNYPKGIKAFYMRLNDDQKTVAAMDVLVPKVGELIGGSQREERLDILKQRILDADLPLEPYEWYLDLRRFGSVKHSGFGLGFERMILFATGLENIRDVIPFPRYPGRADL

SEQ ID NO: 63989 - protein, 521 aa, Triticum aestivum
  peptide (1)..(521): Ceres Seq. ID no. 15222087
  misc_feature (255)..(517): Pfam Name: tRNA synthetases class II (D, K and N) Pfam Description: tRNA synthetases class II (D, K and N)
  misc_feature (1)..(172): Homolog of NCBI NO: 2664210 NR Description: asparaginyl-tRNA synthetase [Arabidopsis thaliana]
  misc_feature (242)..(520): Homolog of NCBI NO: 20139977 NR Description: Asparaginyl-tRNA synthetase,
  misc_feature (242)..(520): Homolog of NCBI NO: 2664210 NR Description: asparaginyl-tRNA synthetase [Arabidopsis thaliana]
  misc_feature (1)..(181): Homolog of NCBI NO: 15236037 NR Description: asparaginyl-tRNA synthetase,
  misc_feature (242)..(520): Homolog of NCBI NO: 15236037 NR Description: asparaginyl-tRNA synthetase,
  misc_feature (1)..(166): Homolog of NCBI NO: 23040758 NR Description: hypothetical protein [Trichodesmium erythraeum
  misc_feature (242)..(520): Homolog of NCBI NO: 23040758 NR Description: hypothetical protein [Trichodesmium erythraeum
  misc_feature (1)..(521): Homolog of NCBI NO: 15223302 NR Description: asparaginyl-tRNA synthetase, cytoplasmic
  misc_feature (1)..(521): Homolog of NCBI NO: 15241897 NR Description: asparaginyl-tRNA synthetase, cytoplasmic 1
  misc_feature (1)..(521): Homolog of NCBI NO: 34914792 NR Description: putative asparaginyl-tRNA synthetase
MAGERVVVGGWVKTGRQQGKGEFAFLEVNDGSCQGNLQVMVEKDVHPLASLTHTGTSVLVEGVLKKPPAEAKQRIELKVERVIELGEVDAAAYPLPKTKITLETLRDFVHLRARTNTIGAVARIRHQLAYATHSFFDENGFLYIHTPIITTSDCEGAGEMFQVTALFSQAEKVEKELKENPAPSEADVEAAKLVVKEKGDAVAQLKAAKASKQEITAAVSVLTKAKENVLRVEERSKLKPGLPLKGDGKIAFENDFFKRQAFLTVSGQLQVETYACALSNVYTFGPTFRAENSHTSRHLAEFWMVEPEIAFANLQDDMNCAERYVQYLCKWLLKHCREDMEFMVKHVDKTAIERLELVSSTPFERISYTKAVEILEGVDKKFENKVEWGIDLASEHERYLTEVIFKRPVIVYNYPKGIKAFYMRLNDDQKTVAAMDVLVPKVGELIGGSQREERLDILKQRILDADLPLEPYEWYLDLRRFGSVKHSGFGLGFERMILFATGLENIRDVIPFPRYPGRADL

SEQ ID NO: 63990 - DNA, 1266 bp, Triticum aestivum
  misc_feature (1)..(1266): Ceres Seq. ID no. 12617235
catcctaatcgaaaaaaaaatatcaaaaccaattcaactccctcagatcctagtcttgcagtccacccacggcggcgatggcggagctcaagagccggcgggtgatcctcaaggactacgtggagggctaccccacggaggcgcacatggagctgctccccgccgcgcccgtcgacgaggccgaggagggctcggtgctggtcaagaacctctacctctcctgcgacccctacatgcgccccaagatgtcccgcccgctgcaccagtcctacaccgccgccttcgtcccgggcgccgccatcaccggttacggcgtgtcccaggtcgtccgctcctcgcgccccgggctcgccgccggcgacctcgtctggggcatgaccggctgggaggactacagcgtcatcaagccgcccttcacggccatactcaccaagatccagcccgacgacggcgtgccgctgtcctactacaccggcatcctcggcatgccggggctcacggcctacgtgggattccaccacatctgctcccccaaggccggcgagacggtgttcgtctccgcggcctccggcgccgtcggccagctcgtcggccagttcgccaggctcctcggctgccacgtcgtcggcagtgcgggctccaaggagaaggtggacctactcatcaacaagttcggcttccacgacgccttcaactacaaggaggaggacgccgacctcgccggcgcgctcaagaagcgcttccccgacggcatcgacgtctacttcgagaacgttggcggcaagatgctcgaggccgtgctgctcaacatgaaggtgcacggacgcatcgccgtctgcggcctcatctcccagtacaacctcaccgccggcgagaaggacgccgacgtcggcgtgcgcaacctcacctccctcgtctccaagcgcatcaagatgcagggcttcatcgagcccgaccacaagcacctctacccggagtacatggcgtgggtgctcccgcacatcaaggagggcagggtcgtctacgtcgaggacgtcgccgacgggctcgacgccgcgcccgcagcgctcatcggcctctaccacggccgcaacgtcggcaagcaggtcgtcaggctcaccaaccccgaccccaagtgactcacacactgtactgtagtagcagatcaattatcaaccacgcgtcaatctattcacatcgcaatcgcatcttggtggttggatggcaacgaaagagtcaaattaaataaaagatccttgctttctc

SEQ ID NO: 63991 - protein, 415 aa, Triticum aestivum
  peptide (1)..(415): Ceres Seq. ID no. 12617236
  misc_feature (144)..(375): Pfam Name: HlyD family secretion protein Pfam Description: HlyD family secretion protein
ILIEKKISKPIQLPQILVLQSTHGGDGGAQEPAGDPQGLRGGLPHGGAHGAAPRRARRRGRGGLGAGQEPLPLLRPLHAPQDVPPAAPVLHRRLRPGRRHHRLRRVPGRPLLAPRARRRRPRLGHDRLGGLQRHQAALHGHTHQDPARRRRAAVLLHRHPRHAGAHGLRGIPPHLLPQGRRDGVRLRGLRRRRPARRPVRQAPRLPRRRQCGLQGEGGPTHQQVRLPRRLQLQGGGRRPRRRAQEALPRRHRRLLRERWRQDARGRAAQHEGARTHRRLRPHLPVQPHRRREGRRRRRAQPHLPRLQAHQDAGLHRARPQAPLPGVHGVGAPAHQGGQGRLRRGRRRRARRRARSAHRPLPRPQRRQAGRQAHQPRPQVTHTLYCSSRSIINHASIYSHRNRILVVGWQRKSQIK

SEQ ID NO: 63992 - protein, 353 aa, Triticum aestivum
  peptide (1)..(353): Ceres Seq. ID no. 12617237
  misc_feature (94)..(345): Pfam Name: Zinc-binding dehydrogenase Pfam Description: Zinc-binding dehydrogenase
  misc_feature (1)..(345): Homolog of NCBI NO: 15228456 NR Description: putative NADP-dependent oxidoreductase; protein
  misc_feature (6)..(345): Homolog of NCBI NO: 17529140 NR Description: putative quinone oxidoreductase [Arabidopsis
  misc_feature (6)..(345): Homolog of NCBI NO: 22326861 NR Description: quinone oxidoreductase - like protein
  misc_feature (6)..(345): Homolog of NCBI NO: 1362014 NR Description: probable NADPH2:quinone reductase (EC 1.6.5.5) P2
  misc_feature (6)..(345): Homolog of NCBI NO: 21554121 NR Description: quinone oxidoreductase-like protein [Arabidopsis
  misc_feature (6)..(345): Homolog of NCBI NO: 21539447 NR Description: quinone oxidoreductase-like protein [Arabidopsis
  misc_feature (6)..(345): Homolog of NCBI NO: 38345384 NR Description: OSJNBa0067K08.13 [Oryza sativa (japonica
  misc_feature (6)..(345): Homolog of NCBI NO: 15237890 NR Description: quinone oxidoreductase - like protein
  misc_feature (6)..(345): Homolog of NCBI NO: 15237888 NR Description: quinone oxidoreductase -like protein; protein id:
  misc_feature (3)..(348): Homolog of NCBI NO: 6692816 NR Description: allyl alcohol dehydrogenase [Nicotiana tabacum]
MAELKSRRVILKDYVEGYPTEAHMELLPAAPVDEAEEGSVLVKNLYLSCDPYMRPKMSRPLHQSYTAAFVPGAAITGYGVSQVVRSSRPGLAAGDLVWGMTGWEDYSVIKPPFTAILTKIQPDDGVPLSYYTGILGMPGLTAYVGFHHICSPKAGETVFVSAASGAVGQLVGQFARLLGCHVVGSAGSKEKVDLLINKFGFHDAFNYKEEDADLAGALKKRFPDGIDVYFENVGGKMLEAVLLNMKVHGRIAVCGLISQYNLTAGEKDADVGVRNLTSLVSKRIKMQGFIEPDHKHLYPEYMAWVLPHIKEGRVVYVEDVADGLDAAPAALIGLYHGRNVGKQVVRLTNPDPK

SEQ ID NO: 63993 - protein, 330 aa, Triticum aestivum
  peptide (1)..(330): Ceres Seq. ID no. 12617238
  misc_feature (71)..(322): Pfam Name: Zinc-binding dehydrogenase Pfam Description: Zinc-binding dehydrogenase
  misc_feature (1)..(322): Homolog of NCBI NO: 15228456 NR Description: putative NADP-dependent oxidoreductase; protein
  misc_feature (1)..(322): Homolog of NCBI NO: 17529140 NR Description: putative quinone oxidoreductase [Arabidopsis
  misc_feature (1)..(322): Homolog of NCBI NO: 22326861 NR Description: quinone oxidoreductase - like protein
  misc_feature (1)..(322): Homolog of NCBI NO: 1362014 NR Description: probable NADPH2:quinone reductase (EC 1.6.5.5) P2
  misc_feature (1)..(322): Homolog of NCBI NO: 21554121 NR Description: quinone oxidoreductase-like protein [Arabidopsis
  misc_feature (1)..(322): Homolog of NCBI NO: 21539447 NR Description: quinone oxidoreductase-like protein [Arabidopsis
  misc_feature (1)..(322): Homolog of NCBI NO: 38345384 NR Description: OSJNBa0067K08.13 [Oryza sativa (japonica
  misc_feature (1)..(322): Homolog of NCBI NO: 15237890 NR Description: quinone oxidoreductase - like protein
  misc_feature (1)..(322): Homolog of NCBI NO: 15237888 NR Description: quinone oxidoreductase -like protein; protein id:
  misc_feature (1)..(325): Homolog of NCBI NO: 6692816 NR Description: allyl alcohol dehydrogenase [Nicotiana tabacum]
MELLPAAPVDEAEEGSVLVKNLYLSCDPYMRPKMSRPLHQSYTAAFVPGAAITGYGVSQVVRSSRPGLAAGDLVWGMTGWEDYSVIKPPFTAILTKIQPDDGVPLSYYTGILGMPGLTAYVGFHHICSPKAGETVFVSAASGAVGQLVGQFARLLGCHVVGSAGSKEKVDLLINKFGFHDAFNYKEEDADLAGALKKRFPDGIDVYFENVGGKMLEAVLLNMKVHGRIAVCGLISQYNLTAGEKDADVGVRNLTSLVSKRIKMQGFIEPDHKHLYPEYMAWVLPHIKEGRVVYVEDVADGLDAAPAALIGLYHGRNVGKQVVRLTNPDPK

SEQ ID NO: 63994 - DNA, 1394 bp, Triticum aestivum
  misc_feature (1)..(1394): Ceres Seq. ID no. 13597225
cccacaccgtccccctcgtctctcctcatctcgcctgtgctctccacacgaccacaccaaaaatccagacctgcccgcccgcctcgcctcctcgtctgcctcctctcctgcgcttcagtttccaggctaggttgctgctgttgttcacatggattcctttttccaaagagctttcggcgacccaatgtgctcggaagacagtaatgttgtccaacaaggaattgagaaatgcccattcctgaggaacatcaacgagcctacgagtttttccttgacatccgttaattttcccgctccggcaaccggagccaagggtccaatttttgaagacgggcccaactttgacacggcatttcgagttttccacggcagagacggggttgttccactttcagaaggagcctttgcacatattgagaagcctctgccaaagcccactcctgaatttaaccccttggcagccaaagcagctaccatcagtctctcgggattcggaggctttttcagcttcggtgatttctcaaacaagcgcaataagcagaactccaacaagaagaatcccaacaacctcccccagaataaaggccagtctaataacaatcatgaagcgatgagcaatgactggctggaaaatggtcaatgccctcttgcaaagtcatatagagcaatcggtggagtcgtgcctcttgtcgcaaagctgctgacacccccagctggtatgaaactgacgtgccctcctgcgattgttgctgcccgtgcagcaatatcccgcacggcgtttgcgaaggggcttcgccctcagcccctaccgacaaaagtagtggtgatcgcactgctcggtatggcagcaaatgttcctcttggcatctggagggagcacactacgaagttttcagtgcaatggtttgcggcggtccatgctgcagtgcctttcatagggatgctgaggaagtccatcctgatgccgaagagcgccatggcccttaccatagctgcctctatattgggtcagacaattggttcaagagctgaacgtatcagattgaagagggcaaaattagcagcagagggccatggccatgaacatgctacccggattgaagctccggtgaccctgaaaactgggagctcaggtgctgtccagctctgggatccgcttggcctcagagtcaaaggcgccgtgtccccagccctggttccgactgttggtgccatgtactgatgagatgatcatgcttcactgcggcggctgcgagaattgtatcaagagttccagaaattgtttcttgtattcattgttattgtgtcttgtaaaggattactggctacattggattcttatccccacatgagtttgggtgcaatcaataaatttcaccatgtcctttggtttc

SEQ ID NO: 63995 - protein, 357 aa, Triticum aestivum
  peptide (1)..(357): Ceres Seq. ID no. 13597226
  misc_feature (25)..(300): Homolog of NCBI NO: 30694759 NR Description: expressed protein [Arabidopsis thaliana]
  misc_feature (25)..(300): Homolog of NCBI NO: 21954084 NR Description: unknown protein [Arabidopsis thaliana]
  misc_feature (25)..(300): Homolog of NCBI NO: 21595083 NR Description: unknown [Arabidopsis thaliana]
  misc_feature (14)..(353): Homolog of NCBI NO: 15234866 NR Description: expressed protein [Arabidopsis thaliana]
  misc_feature (1)..(352): Homolog of NCBI NO: 34899856 NR Description: OJ1714_H10.10 [Oryza sativa (japonica
  misc_feature (1)..(352): Homolog of NCBI NO: 33146734 NR Description: unknown protein [Oryza sativa (japonica
  misc_feature (1)..(155): Homolog of NCBI NO: 34897958 NR Description: contains ESTs AU068434(C30250)~similar to Oryza sativa chromosome 7,
  misc_feature (139)..(352): Homolog of NCBI NO: 34897958 NR Description: contains ESTs AU068434(C30250)~similar to Oryza sativa chromosome 7,
  misc_feature (1)..(352): Homolog of NCBI NO: 37537220 NR Description: unknown protein [Oryza sativa (japonica
MDSFFQRAFGDPMCSEDSNVVQQGIEKCPFLRNINEPTSFSLTSVNFPAPATGAKGPIFEDGPNFDTAFRVFHGRDGVVPLSEGAFAHIEKPLPKPTPEFNPLAAKAATISLSGFGGFFSFGDFSNKRNKQNSNKKNPNNLPQNKGQSNNNHEAMSNDWLENGQCPLAKSYRAIGGVVPLVAKLLTPPAGMKLTCPPAIVAARAAISRTAFAKGLRPQPLPTKVVVIALLGMAANVPLGIWREHTTKFSVQWFAAVHAAVPFIGMLRKSILMPKSAMALTIAASILGQTIGSRAERIRLKRAKLAAEGHGHEHATRIEAPVTLKTGSSGAVQLWDPLGLRVKGAVSPALVPTVGAMY

SEQ ID NO: 63996 - protein, 345 aa, Triticum aestivum
  peptide (1)..(345): Ceres Seq. ID no. 13597227
  misc_feature (13)..(288): Homolog of NCBI NO: 30694759 NR Description: expressed protein [Arabidopsis thaliana]
  misc_feature (13)..(288): Homolog of NCBI NO: 21954084 NR Description: unknown protein [Arabidopsis thaliana]
  misc_feature (13)..(288): Homolog of NCBI NO: 21595083 NR Description: unknown [Arabidopsis thaliana]
  misc_feature (2)..(341): Homolog of NCBI NO: 15234866 NR Description: expressed protein [Arabidopsis thaliana]
  misc_feature (1)..(340): Homolog of NCBI NO: 34899856 NR Description: OJ1714_H10.10 [Oryza sativa (japonica
  misc_feature (1)..(340): Homolog of NCBI NO: 33146734 NR Description: unknown protein [Oryza sativa (japonica
  misc_feature (1)..(143): Homolog of NCBI NO: 34897958 NR Description: contains ESTs AU068434(C30250)~similar to Oryza sativa chromosome 7,
  misc_feature (127)..(340): Homolog of NCBI NO: 34897958 NR Description: contains ESTs AU068434(C30250)~similar to Oryza sativa chromosome 7,
  misc_feature (1)..(340): Homolog of NCBI NO: 37537220 NR Description: unknown protein [Oryza sativa (japonica
MCSEDSNVVQQGIEKCPFLRNINEPTSFSLTSVNFPAPATGAKGPIFEDGPNFDTAFRVFHGRDGVVPLSEGAFAHIEKPLPKPTPEFNPLAAKAATISLSGFGGFFSFGDFSNKRNKQNSNKKNPNNLPQNKGQSNNNHEAMSNDWLENGQCPLAKSYRAIGGVVPLVAKLLTPPAGMKLTCPPAIVAARAAISRTAFAKGLRPQPLPTKVVVIALLGMAANVPLGIWREHTTKFSVQWFAAVHAAVPFIGMLRKSILMPKSAMALTIAASILGQTIGSRAERIRLKRAKLAAEGHGHEHATRIEAPVTLKTGSSGAVQLWDPLGLRVKGAVSPALVPTVGAMY

SEQ ID NO: 63997 - protein, 203 aa, Triticum aestivum
  peptide (1)..(203): Ceres Seq. ID no. 13597228
  misc_feature (1)..(146): Homolog of NCBI NO: 30694759 NR Description: expressed protein [Arabidopsis thaliana]
  misc_feature (1)..(146): Homolog of NCBI NO: 21954084 NR Description: unknown protein [Arabidopsis thaliana]
  misc_feature (1)..(146): Homolog of NCBI NO: 21595083 NR Description: unknown [Arabidopsis thaliana]
  misc_feature (1)..(199): Homolog of NCBI NO: 15234866 NR Description: expressed protein [Arabidopsis thaliana]
  misc_feature (1)..(198): Homolog of NCBI NO: 34899856 NR Description: OJ1714_H10.10 [Oryza sativa (japonica
  misc_feature (1)..(198): Homolog of NCBI NO: 33146734 NR Description: unknown protein [Oryza sativa (japonica
  misc_feature (1)..(198): Homolog of NCBI NO: 34897958 NR Description: contains ESTs AU068434(C30250)~similar to Oryza sativa chromosome 7,
  misc_feature (1)..(198): Homolog of NCBI NO: 37537220 NR Description: unknown protein [Oryza sativa (japonica
MSNDWLENGQCPLAKSYRAIGGVVPLVAKLLTPPAGMKLTCPPAIVAARAAISRTAFAKGLRPQPLPTKVVVIALLGMAANVPLGIWREHTTKFSVQWFAAVHAAVPFIGMLRKSILMPKSAMALTIAASILGQTIGSRAERIRLKRAKLAAEGHGHEHATRIEAPVTLKTGSSGAVQLWDPLGLRVKGAVSPALVPTVGAMY

SEQ ID NO: 63998 - DNA, 1790 bp, Triticum aestivum
  misc_feature (1)..(1790): Ceres Seq. ID no. 13597161
agaagcctacgagaaccacagtccagccgaccagccgccgccgcgcgataaccggagttaatggagacgccgcccccatggagggtcctcgagttctacagcggtatcggcggcatgcggtactcccttgcgtcgtcgggcgttcgagcggaggtggtggaggcctttgacatcaacgacgtcgccaacgacgtctacgagcacaacttcggccaccgcccctgccagggaaacattcaaacactcactgctggtgatctagacaagtacaaggcacatgcatggctcctttctcctccatgtcaaccatatacacggcaaggacttcagaaacattcagctgatgctcgggcattttcatttataaagattttaaaccttatgcaaaacatgagctttcctccacaaatgttatttgtggaaaatgttgtcggattcgaggtatctgatacacatgaccagttgctagcggtcctttcaactctcagtttcaacacacaagaattcatcctaagccccttgcagtttggtgtcccatattctagaccgcgctacttctgtttggcaaaacaggaatctatgtgttttccaaatccatcagtcaatgacaagctgcttaggacacctacatgcctaacattgaacactacgagaactcagaatagctatgaccagaatgaagatgatctggaagtagtatgtaatccaataagaaacttccttgaagcacagagtattggagataaggaatcttcagccatcatctctgactttaaggaggctgatggatgcactccgattgaaactgcttcacatgactacacagttccactaagcttgattgaacggtggggaaatgctatggatattgtataccctgaatcaaaacggtgctgctgttttactaaaagttattatcgctatgtgaagggcacaggctctgtactggttacatctaaaagcctcaaaccagttccaaaagagaaccttgaaatgtcttcactgagtgagttgggtctacggtttttcacccctcgagaggtcgctaatttgcattcatttcccccgagtttccgttttccggatcagataagcctcagacaacagtatgccatgctgggtaatagtctgagcatagcggttgtggctcctttgttgtgctatctgtttgccgagacatagacaagttctcaatcatttggcaggtgatattcaccttggcccgccatctgatatttgtcaaaatcttgccacacttgagttgcaagtatgatattttatccatcagtttttgtgtgtctccgatctgtgcattgttgtgagttgtgatcatgctcatccttcacgccacggtgcagtttcaccgagcttgaggacgtgcggtcaattcgctgacggcctagcaggtagtattacagtgaagaggtgggtgcgtccaaaataaggcggcatgtacggccgaagctcaacctttggatctattgtagcatataccaataccagtcccaagtactccctccgtcccaaaataaaactagtacaaagttgagtcacttatttgtaaaattagtacaaagttgagtcatttattttgggatggagggaatattaggggtcgacctctgctttgtgccttccactccacagccatatttatgttgcaacattgcatgttttgaggcccagttagtaatgtgataattttgttttgggcaagtgtaatgtgatactatgtgatgacttatcgtattgcgtgcaataaatggatgcaaatcaaatcccactatatg

SEQ ID NO: 63999 - protein, 373 aa, Triticum aestivum
  peptide (1)..(373): Ceres Seq. ID no. 15222040
  misc_feature (7)..(371): Pfam Name: C-5 cytosine-specific DNA methylase Pfam Description: C-5 cytosine-specific DNA methylase
  misc_feature (247)..(369): Homolog of NCBI NO: 19112479 NR Description: DNA methyltransferase pmt1 [Schizosaccharomyces
  misc_feature (8)..(170): Homolog of NCBI NO: 19112479 NR Description: DNA methyltransferase pmt1 [Schizosaccharomyces
  misc_feature (231)..(370): Homolog of NCBI NO: 13096616 NR Description: Chain A, Structure Of Human Dnmt2, An Enigmatic
  misc_feature (6)..(222): Homolog of NCBI NO: 13096616 NR Description: Chain A, Structure Of Human Dnmt2, An Enigmatic
  misc_feature (221)..(369): Homolog of NCBI NO: 28422212 NR Description: Similar to DNA (cytosine-5-)-methyltransferase 2
  misc_feature (8)..(190): Homolog of NCBI NO: 28422212 NR Description: Similar to DNA (cytosine-5-)-methyltransferase 2
  misc_feature (6)..(370): Homolog of NCBI NO: 21553420 NR Description: DNA methyltransferase PMT1-like protein
  misc_feature (6)..(370): Homolog of NCBI NO: 18420929 NR Description: DNA methyltransferase PMT1 - like protein
  misc_feature (1)..(373): Homolog of NCBI NO: 34912588 NR Description: putative DNA methyltransferase
  misc_feature (1)..(372): Homolog of NCBI NO: 13936240 NR Description: DNA methyltransferase ZMET4 [Zea mays]
METPPPWRVLEFYSGIGGMRYSLASSGVRAEVVEAFDINDVANDVYEHNFGHRPCQGNIQTLTAGDLDKYKAHAWLLSPPCQPYTRQGLQKHSADARAFSFIKILNLMQNMSFPPQMLFVENVVGFEVSDTHDQLLAVLSTLSFNTQEFILSPLQFGVPYSRPRYFCLAKQESMCFPNPSVNDKLLRTPTCLTLNTTRTQNSYDQNEDDLEVVCNPIRNFLEAQSIGDKESSAIISDFKEADGCTPIETASHDYTVPLSLIERWGNAMDIVYPESKRCCCFTKSYYRYVKGTGSVLVTSKSLKPVPKENLEMSSLSELGLRFFTPREVANLHSFPPSFRFPDQISLRQQYAMLGNSLSIAVVAPLLCYLFAET

SEQ ID NO: 64000 - protein, 355 aa, Triticum aestivum
  peptide (1)..(355): Ceres Seq. ID no. 15222041
  misc_feature (1)..(353): Pfam Name: C-5 cytosine-specific DNA methylase Pfam Description: C-5 cytosine-specific DNA methylase
  misc_feature (229)..(351): Homolog of NCBI NO: 19112479 NR Description: DNA methyltransferase pmt1 [Schizosaccharomyces
  misc_feature (1)..(152): Homolog of NCBI NO: 19112479 NR Description: DNA methyltransferase pmt1 [Schizosaccharomyces
  misc_feature (213)..(352): Homolog of NCBI NO: 13096616 NR Description: Chain A, Structure Of Human Dnmt2, An Enigmatic
  misc_feature (1)..(204): Homolog of NCBI NO: 13096616 NR Description: Chain A, Structure Of Human Dnmt2, An Enigmatic
  misc_feature (203)..(351): Homolog of NCBI NO: 28422212 NR Description: Similar to DNA (cytosine-5-)-methyltransferase 2
  misc_feature (1)..(172): Homolog of NCBI NO: 28422212 NR Description: Similar to DNA (cytosine-5-)-methyltransferase 2
  misc_feature (1)..(352): Homolog of NCBI NO: 21553420 NR Description: DNA methyltransferase PMT1-like protein
  misc_feature (1)..(352): Homolog of NCBI NO: 18420929 NR Description: DNA methyltransferase PMT1 - like protein
  misc_feature (1)..(355): Homolog of NCBI NO: 34912588 NR Description: putative DNA methyltransferase
  misc_feature (1)..(354): Homolog of NCBI NO: 13936240 NR Description: DNA methyltransferase ZMET4 [Zea mays]
MRYSLASSGVRAEVVEAFDINDVANDVYEHNFGHRPCQGNIQTLTAGDLDKYKAHAWLLSPPCQPYTRQGLQKHSADARAFSFIKILNLMQNMSFPPQMLFVENVVGFEVSDTHDQLLAVLSTLSFNTQEFILSPLQFGVPYSRPRYFCLAKQESMCFPNPSVNDKLLRTPTCLTLNTTRTQNSYDQNEDDLEVVCNPIRNFLEAQSIGDKESSAIISDFKEADGCTPIETASHDYTVPLSLIERWGNAMDIVYPESKRCCCFTKSYYRYVKGTGSVLVTSKSLKPVPKENLEMSSLSELGLRFFTPREVANLHSFPPSFRFPDQISLRQQYAMLGNSLSIAVVAPLLCYLFAET

SEQ ID NO: 64001 - protein, 266 aa, Triticum aestivum
  peptide (1)..(266): Ceres Seq. ID no. 15222042
  misc_feature (1)..(264): Pfam Name: C-5 cytosine-specific DNA methylase Pfam Description: C-5 cytosine-specific DNA methylase
  misc_feature (140)..(262): Homolog of NCBI NO: 19112479 NR Description: DNA methyltransferase pmt1 [Schizosaccharomyces
  misc_feature (1)..(63): Homolog of NCBI NO: 19112479 NR Description: DNA methyltransferase pmt1 [Schizosaccharomyces
  misc_feature (124)..(263): Homolog of NCBI NO: 13096616 NR Description: Chain A, Structure Of Human Dnmt2, An Enigmatic
  misc_feature (1)..(115): Homolog of NCBI NO: 13096616 NR Description: Chain A, Structure Of Human Dnmt2, An Enigmatic
  misc_feature (114)..(262): Homolog of NCBI NO: 28422212 NR Description: Similar to DNA (cytosine-5-)-methyltransferase 2
  misc_feature (1)..(83): Homolog of NCBI NO: 28422212 NR Description: Similar to DNA (cytosine-5-)-methyltransferase 2
  misc_feature (1)..(263): Homolog of NCBI NO: 21553420 NR Description: DNA methyltransferase PMT1-like protein
  misc_feature (1)..(263): Homolog of NCBI NO: 18420929 NR Description: DNA methyltransferase PMT1 - like protein
  misc_feature (1)..(266): Homolog of NCBI NO: 34912588 NR Description: putative DNA methyltransferase
  misc_feature (1)..(265): Homolog of NCBI NO: 13936240 NR Description: DNA methyltransferase ZMET4 [Zea mays]
MQNMSFPPQMLFVENVVGFEVSDTHDQLLAVLSTLSFNTQEFILSPLQFGVPYSRPRYFCLAKQESMCFPNPSVNDKLLRTPTCLTLNTTRTQNSYDQNEDDLEVVCNPIRNFLEAQSIGDKESSAIISDFKEADGCTPIETASHDYTVPLSLIERWGNAMDIVYPESKRCCCFTKSYYRYVKGTGSVLVTSKSLKPVPKENLEMSSLSELGLRFFTPREVANLHSFPPSFRFPDQISLRQQYAMLGNSLSIAVVAPLLCYLFAET

SEQ ID NO: 64002 - DNA, 1548 bp, Triticum aestivum
  misc_feature (1)..(1548): Ceres Seq. ID no. 13597376
aaaacaagaagaagagacgcacaagtccccctctctctccctctctcacaaacaaacaaacaaaccgctcttgtctcccattccaatctcgccccgtcggtcgaattacaagttagaagaagaagaagaggaatcagaggaagaagaagatggtgtctgcggtgcttcggacgatcctggtgacgggcggcgcggggtacatcggcagccacacggtgctgcagctgctgctccagggcttccgcgtcctcgtcgtcgacagcctcgacaacgcctccgaggaggccatccgccgcgtccggcaactcgccaacgccccgcaaaacagcctcgacttccgcaaggtggaccttcgtgacaaggaggcgctggacgaaatcttctcgacccaaaggttcgaggctgtgatccactttgccgggctgaaagccgtgggggagagcgtgcagaagcccctgctttactacgacaacaacctcatcggcaccatcaccctcctccaagtcatggcagcacatggatgcaacaagcttgtgttctcatcatcagccactgtgtacgggtggcccaaggaggtgccctgcaccgaggagttcccgctctccgcgaccaacccttacggccgaactaagcttgtcattgaagacatctgccgcgacctccagcgctcggaccccgactggaagatcatcctgctgaggtacttcaacccggtcggcgcgcacccgagtggctacatcggggaagaccccctcggagtccccaacaacctgatgccctatgtccagcaagtcgctgtcgggaggcggcccgcgctgacggtttatgggaccgactacaacaccaaggatggaacaggggtacgtgactacatccatgttgttgacctggctgacggccacatcgccgccctgaggaagctctacgaagattctgacagaatagggtgcgaggtgtacaatctgggcactggaaaggggacgtccgtgctggaaatggttgctgcattcgagaaggcttgcggaaagaaaatccctctggtttatgctggaagaagagctggagatgccgagactgtgtacgctgccaccgccaaagctgagaaggagctcaagtggaaggccaagtatggggtggaggagatgtgcagagacctgtggaactgggccagcaagaacccctacggctacggatccagcgacaacggccactgattaatagtcaccagagcaagtagtaatagcagcatatatacgccaccatccatctatatatttatccaccaccaccaccacagagagcagagagaagaagaggaagactactactgatgtgtatagggaaggagtgagtgagtcggatccatcagtagcttataattaattatattgttcgcgttagaaagctaatcatatccatctcccttatggagtaagtagaagaaataaggttggttcccttgccttgtagaaatatatatatagatatcttgtcggtcatggaataacttactttacctactgatataaatatatatatgcttggttc

SEQ ID NO: 64003 - protein, 354 aa, Triticum aestivum
  peptide (1)..(354): Ceres Seq. ID no. 13597377
  misc_feature (9)..(344): Pfam Name: NAD dependent epimerase/dehydratase family Pfam Description: NAD dependent epimerase/dehydratase family
  misc_feature (9)..(352): Homolog of NCBI NO: 15217653 NR Description: UDP-glucose 4-epimerase (UDP-galactose
  misc_feature (1)..(354): Homolog of NCBI NO: 25553520 NR Description: putative UDP-glucose 4-epimerase
  misc_feature (1)..(354): Homolog of NCBI NO: 40253348 NR Description: putative UDP-glucose 4-epimerase
  misc_feature (7)..(354): Homolog of NCBI NO: 15236988 NR Description: UDP-glucose 4-epimerase (UDP-galactose
  misc_feature (7)..(354): Homolog of NCBI NO: 12643850 NR Description: Probable UDP-glucose 4-epimerase At4g10960
  misc_feature (7)..(354): Homolog of NCBI NO: 21553659 NR Description: UDP-galactose 4-epimerase-like protein
  misc_feature (7)..(353): Homolog of NCBI NO: 21536846 NR Description: UDPglucose 4-epimerase-like protein [Arabidopsis
  misc_feature (7)..(353): Homolog of NCBI NO: 15236663 NR Description: UDP-glucose 4-epimerase (UDP-galactose
  misc_feature (7)..(352): Homolog of NCBI NO: 11386775 NR Description: UDP-glucose 4-epimerase GEPI48 (Galactowaldenase)
  misc_feature (1)..(354): Homolog of NCBI NO: 21715990 NR Description: UDP-glucose 4-epimerase [Oryza sativa (japonica
MVSAVLRTILVTGGAGYIGSHTVLQLLLQGFRVLVVDSLDNASEEAIRRVRQLANAPQNSLDFRKVDLRDKEALDEIFSTQRFEAVIHFAGLKAVGESVQKPLLYYDNNLIGTITLLQVMAAHGCNKLVFSSSATVYGWPKEVPCTEEFPLSATNPYGRTKLVIEDICRDLQRSDPDWKIILLRYFNPVGAHPSGYIGEDPLGVPNNLMPYVQQVAVGRRPALTVYGTDYNTKDGTGVRDYIHVVDLADGHIAALRKLYEDSDRIGCEVYNLGTGKGTSVLEMVAAFEKACGKKIPLVYAGRRAGDAETVYAATAKAEKELKWKAKYGVEEMCRDLWNWASKNPYGYGSSDNGH

SEQ ID NO: 64004 - protein, 235 aa, Triticum aestivum
  peptide (1)..(235): Ceres Seq. ID no. 13597378
  misc_feature (1)..(225): Pfam Name: NAD dependent epimerase/dehydratase family Pfam Description: NAD dependent epimerase/dehydratase family
  misc_feature (1)..(233): Homolog of NCBI NO: 15217653 NR Description: UDP-glucose 4-epimerase (UDP-galactose
  misc_feature (1)..(235): Homolog of NCBI NO: 25553520 NR Description: putative UDP-glucose 4-epimerase
  misc_feature (1)..(235): Homolog of NCBI NO: 40253348 NR Description: putative UDP-glucose 4-epimerase
  misc_feature (1)..(235): Homolog of NCBI NO: 15236988 NR Description: UDP-glucose 4-epimerase (UDP-galactose
  misc_feature (1)..(235): Homolog of NCBI NO: 12643850 NR Description: Probable UDP-glucose 4-epimerase At4g10960
  misc_feature (1)..(235): Homolog of NCBI NO: 21553659 NR Description: UDP-galactose 4-epimerase-like protein
  misc_feature (1)..(234): Homolog of NCBI NO: 21536846 NR Description: UDPglucose 4-epimerase-like protein [Arabidopsis
  misc_feature (1)..(234): Homolog of NCBI NO: 15236663 NR Description: UDP-glucose 4-epimerase (UDP-galactose
  misc_feature (1)..(233): Homolog of NCBI NO: 11386775 NR Description: UDP-glucose 4-epimerase GEPI48 (Galactowaldenase)
  misc_feature (1)..(235): Homolog of NCBI NO: 21715990 NR Description: UDP-glucose 4-epimerase [Oryza sativa (japonica
MAAHGCNKLVFSSSATVYGWPKEVPCTEEFPLSATNPYGRTKLVIEDICRDLQRSDPDWKIILLRYFNPVGAHPSGYIGEDPLGVPNNLMPYVQQVAVGRRPALTVYGTDYNTKDGTGVRDYIHVVDLADGHIAALRKLYEDSDRIGCEVYNLGTGKGTSVLEMVAAFEKACGKKIPLVYAGRRAGDAETVYAATAKAEKELKWKAKYGVEEMCRDLWNWASKNPYGYGSSDNGH

SEQ ID NO: 64005 - DNA, 1412 bp, Triticum aestivum
  misc_feature (1)..(1412): Ceres Seq. ID no. 12617090
attagtagcatctcaggagcagcaacaggagatggaatctctccccgtcccgagcgtgcaggccatggtggcggccaccggcggagccgatgtgccaccgaggtatctccggcctgcggaggcggtcaccggcatcgtcgacggcgagggtgaggcccagatccccatcatcgactaccggaggctgctgctggagctggatcgccgcggcgaggagtccgcgcgcctccacagcgcctgccaggaatggggcttcttccagctggttaaccacagtgtcccggccgatgtggtggagggaatgaaggccaacattcagcaattctttcagctacccgcagagacaaagaaacgattcgcgcaggagcgagggcagctggaaggctacggtcagctgttcgtcgtctcggaggatcagaagcttgactgggccgatatgctttacctgtacacacagccacctgagagcaggaacaccaagttctggcctgaccagcctgttaacttcagatcgacgctggatagatactctggtgctgtgaaggagatagcggattcccttttggcgacgatggcggagaacttgggactgaaacaagaggtgattgctgacagatgcgtgggcggagtgcagtctgtcaggatgaactactacccgccgtgcgctcaagcagagaaagtcgtcggcttctccccgcactctgacgctgatctcctgaccctcgtcctccaagtgaaccatgtccaaggcctgcagatcaagaggaacggcagctggttccccgtcaggcctgtcgagggcgctctcatcgtcaacattggggatatctttgagatcttcacaaatgggaggtacaggagcatcgagcaccgtgcggtcgtcgaccccaaggaggaacggctgtcggccgcggcgttccactccccgaacatccacgccacgataggcccgctgaaggagcttacggcggacgaagacgaggcctacaagacggtggaccacgagaacttcatgaggcttttcttcgcgacgaagctggaggggaagagcttcttggatcggatgaagctgaagtagctagcagctgattgctacgtacccagcatagcaggtaaactgtgtcgttggtcctcgcatcattgtcagatattcaggtagttcatgctctctggaatttagttcctgatggccgtcttgttggagcacaagagagctgaacttggcaaacataataataatactgtggtttcttcagtagttgcttgtgttctgcaaacatttgatagatttgctcctatgtgcttgatgtcgtgtacaaagtgggctatgtgctgctgtgtcatttcagtttctgtccagtgtgaaaacagttgattcccagaaaataagataagaatggaagttgatcccc

SEQ ID NO: 64006 - protein, 358 aa, Triticum aestivum
  peptide (1)..(358): Ceres Seq. ID no. 12617091
  misc_feature (209)..(309): Pfam Name: 2OG-Fe(II) oxygenase superfamily Pfam Description: 2OG-Fe(II) oxygenase superfamily
  misc_feature (6)..(357): Homolog of NCBI NO: 15218400 NR Description: flavanone 3-hydroxylase, putative
  misc_feature (13)..(357): Homolog of NCBI NO: 15235014 NR Description: SRG1-like protein; protein id: At4g25300.1
  misc_feature (6)..(358): Homolog of NCBI NO: 15219986 NR Description: SRG1-like protein; protein id: At1g17010.1
  misc_feature (10)..(357): Homolog of NCBI NO: 15219988 NR Description: SRG1-like protein
  misc_feature (18)..(357): Homolog of NCBI NO: 37536820 NR Description: putative ethylene-forming enzyme
  misc_feature (13)..(358): Homolog of NCBI NO: 37536796 NR Description: putative dioxygenase [Oryza sativa (japonica
  misc_feature (13)..(358): Homolog of NCBI NO: 37536804 NR Description: putative ethylene-forming enzyme
  misc_feature (13)..(357): Homolog of NCBI NO: 37536792 NR Description: putative dioxygenase [Oryza sativa (japonica
  misc_feature (13)..(357): Homolog of NCBI NO: 37536802 NR Description: putative ethylene-forming enzyme
  misc_feature (11)..(356): Homolog of NCBI NO: 34895204 NR Description: P0463A02.24 [Oryza sativa (japonica
LVASQEQQQEMESLPVPSVQAMVAATGGADVPPRYLRPAEAVTGIVDGEGEAQIPIIDYRRLLLELDRRGEESARLHSACQEWGFFQLVNHSVPADVVEGMKANIQQFFQLPAETKKRFAQERGQLEGYGQLFVVSEDQKLDWADMLYLYTQPPESRNTKFWPDQPVNFRSTLDRYSGAVKEIADSLLATMAENLGLKQEVIADRCVGGVQSVRMNYYPPCAQAEKVVGFSPHSDADLLTLVLQVNHVQGLQIKRNGSWFPVRPVEGALIVNIGDIFEIFTNGRYRSIEHRAVVDPKEERLSAAAFHSPNIHATIGPLKELTADEDEAYKTVDHENFMRLFFATKLEGKSFLDRMKLK

SEQ ID NO: 64007 - protein, 348 aa, Triticum aestivum
  peptide (1)..(348): Ceres Seq. ID no. 12617092
  misc_feature (199)..(299): Pfam Name: 2OG-Fe(II) oxygenase superfamily Pfam Description: 2OG-Fe(II) oxygenase superfamily
  misc_feature (1)..(347): Homolog of NCBI NO: 15218400 NR Description: flavanone 3-hydroxylase, putative
  misc_feature (3)..(347): Homolog of NCBI NO: 15235014 NR Description: SRG1-like protein; protein id: At4g25300.1
  misc_feature (1)..(348): Homolog of NCBI NO: 15219986 NR Description: SRG1-like protein; protein id: At1g17010.1
  misc_feature (1)..(347): Homolog of NCBI NO: 15219988 NR Description: SRG1-like protein
  misc_feature (8)..(347): Homolog of NCBI NO: 37536820 NR Description: putative ethylene-forming enzyme
  misc_feature (3)..(348): Homolog of NCBI NO: 37536796 NR Description: putative dioxygenase [Oryza sativa (japonica
  misc_feature (3)..(348): Homolog of NCBI NO: 37536804 NR Description: putative ethylene-forming enzyme
  misc_feature (3)..(347): Homolog of NCBI NO: 37536792 NR Description: putative dioxygenase [Oryza sativa (japonica
  misc_feature (3)..(347): Homolog of NCBI NO: 37536802 NR Description: putative ethylene-forming enzyme
  misc_feature (1)..(346): Homolog of NCBI NO: 34895204 NR Description: P0463A02.24 [Oryza sativa (japonica
MESLPVPSVQAMVAATGGADVPPRYLRPAEAVTGIVDGEGEAQIPIIDYRRLLLELDRRGEESARLHSACQEWGFFQLVNHSVPADVVEGMKANIQQFFQLPAETKKRFAQERGQLEGYGQLFVVSEDQKLDWADMLYLYTQPPESRNTKFWPDQPVNFRSTLDRYSGAVKEIADSLLATMAENLGLKQEVIADRCVGGVQSVRMNYYPPCAQAEKVVGFSPHSDADLLTLVLQVNHVQGLQIKRNGSWFPVRPVEGALIVNIGDIFEIFTNGRYRSIEHRAVVDPKEERLSAAAFHSPNIHATIGPLKELTADEDEAYKTVDHENFMRLFFATKLEGKSFLDRMKLK

SEQ ID NO: 64008 - protein, 337 aa, Triticum aestivum
  peptide (1)..(337): Ceres Seq. ID no. 12617093
  misc_feature (188)..(288): Pfam Name: 2OG-Fe(II) oxygenase superfamily Pfam Description: 2OG-Fe(II) oxygenase superfamily
  misc_feature (1)..(336): Homolog of NCBI NO: 15218400 NR Description: flavanone 3-hydroxylase, putative
  misc_feature (1)..(336): Homolog of NCBI NO: 15235014 NR Description: SRG1-like protein; protein id: At4g25300.1
  misc_feature (1)..(337): Homolog of NCBI NO: 15219986 NR Description: SRG1-like protein; protein id: At1g17010.1
  misc_feature (1)..(336): Homolog of NCBI NO: 15219988 NR Description: SRG1-like protein
  misc_feature (1)..(336): Homolog of NCBI NO: 37536820 NR Description: putative ethylene-forming enzyme
  misc_feature (1)..(337): Homolog of NCBI NO: 37536796 NR Description: putative dioxygenase [Oryza sativa (japonica
  misc_feature (1)..(337): Homolog of NCBI NO: 37536804 NR Description: putative ethylene-forming enzyme
  misc_feature (1)..(336): Homolog of NCBI NO: 37536792 NR Description: putative dioxygenase [Oryza sativa (japonica
  misc_feature (1)..(336): Homolog of NCBI NO: 37536802 NR Description: putative ethylene-forming enzyme
  misc_feature (1)..(335): Homolog of NCBI NO: 34895204 NR Description: P0463A02.24 [Oryza sativa (japonica
MVAATGGADVPPRYLRPAEAVTGIVDGEGEAQIPIIDYRRLLLELDRRGEESARLHSACQEWGFFQLVNHSVPADVVEGMKANIQQFFQLPAETKKRFAQERGQLEGYGQLFVVSEDQKLDWADMLYLYTQPPESRNTKFWPDQPVNFRSTLDRYSGAVKEIADSLLATMAENLGLKQEVIADRCVGGVQSVRMNYYPPCAQAEKVVGFSPHSDADLLTLVLQVNHVQGLQIKRNGSWFPVRPVEGALIVNIGDIFEIFTNGRYRSIEHRAVVDPKEERLSAAAFHSPNIHATIGPLKELTADEDEAYKTVDHENFMRLFFATKLEGKSFLDRMKLK

SEQ ID NO: 64009 - DNA, 1508 bp, Triticum aestivum
  misc_feature (1)..(1508): Ceres Seq. ID no. 15226269
cccgagtccagtcctcccggcggcgccgcctctgcgcgctttgggcaggaggccgacgccaccattgccggagacctcgcaccccttcggacccaagtaggagtccagtgtctttactctggagagcgatggattctccagaaattccgccctctgaccgcagagaagagcggccgccagcgtcgctgccgctgccggcggcctttctcgagttcctcggcgagaatggcctggaccccgcgctctactccaaggcggacaccatcccgcgctacatcaggttaaaaccaggcatggagtccagtgtggtgacagagatcgaaagcgagctcaagtgtgatctcatgagggtgtcgtggctgccggacttctatgcgatcccgcctgaaattcagattgctggatccaaggcttatcagcaagggaagatctatgggattgatgcagcttctggagctgccatcttagcactcgatgttcaatcaggagaccatgttcttgacctctgtgctgcaccaggtgcaaagctttgcatgcttgcagatatgcttggtagctcaggttctttgactggtgttgatgttgcaaagcaccgtcttgcagcctgtcgtacgatgttgcagaagtattctcttggagatcgtagtcgactctttgttgctgatgggacttcgttttccatattgcctgtgaactccaatctggggagcatggaagcttttgttggaattgaggataatggaagcatattctcagaatggacttcaaagagatcatggaaagacagacagaagtctaaaaaggcaaaagcagccggttcacctcatctaccatcaacttccgaacctgaactgatatactatggcaaagattcaggattagttggattgcaaaaacgttatgttcttcacccatcaactgatgctgctgcctgtacatctgggtatgataaggtcctagtggatgcagaatgtactcatgatggatcgataaaacacattcagaagtttgagttctggggatggaaaacattagaccgccgtgtactcaacgtagaaagaactggcaacctacttcatcttcagttagggcttctcacaaatggttttaaattattgaaaacaggcggatcacttgtctatagtacttgcagcttgactgttgcacaaaacgagaatgtggttcagcaattcctctcaaaacatccttcagcagagctgctaaagatcaatccagccgatagctggccctgcagaagcggcggcatccagaaaaccttgcggttcgatcccgcgacgtcacaaactagtggacttttcgttgccaagttcgtcaagttgtgatgttctttatgagatgctcgcaacttcgtataagttaatttcatatgaaaccaggatgtcgtgagtaaattttgctaggttttactctagttctttaaacaacaggttgtcgaagtctgcttgttgtttatttattttactctaatttgaaataagcttcttggg

SEQ ID NO: 64010 - protein, 446 aa, Triticum aestivum
  peptide (1)..(446): Ceres Seq. ID no. 15226270
  misc_feature (356)..(443): Pfam Name: NOL1/NOP2/sun family Pfam Description: NOL1/NOP2/sun family
  misc_feature (40)..(211): Homolog of NCBI NO: 14521455 NR Description: proliferating-cell nucleolar antigen P120,
  misc_feature (94)..(211): Homolog of NCBI NO: 14590712 NR Description: fmu protein [Pyrococcus horikoshii]
  misc_feature (316)..(445): Homolog of NCBI NO: 14590712 NR Description: fmu protein [Pyrococcus horikoshii]
  misc_feature (315)..(446): Homolog of NCBI NO: 14520982 NR Description: NUCLEOLAR PROTEIN [Pyrococcus abyssi]
  misc_feature (61)..(208): Homolog of NCBI NO: 14520982 NR Description: NUCLEOLAR PROTEIN [Pyrococcus abyssi]
  misc_feature (28)..(146): Homolog of NCBI NO: 18481711 NR Description: putative phosphate/phosphoenolpyruvate
  misc_feature (60)..(173): Homolog of NCBI NO: 15239280 NR Description: hypothetical protein [Arabidopsis thaliana]
  misc_feature (243)..(446): Homolog of NCBI NO: 15239280 NR Description: hypothetical protein [Arabidopsis thaliana]
  misc_feature (307)..(446): Homolog of NCBI NO: 18481712 NR Description: putative nucleolar protein [Sorghum bicolor]
  misc_feature (142)..(287): Homolog of NCBI NO: 18481712 NR Description: putative nucleolar protein [Sorghum bicolor]
RVQSSRRRRLCALWAGGRRHHCRRPRTPSDPSRSPVSLLWRAMDSPEIPPSDRREERPPASLPLPAAFLEFLGENGLDPALYSKADTIPRYIRLKPGMESSVVTEIESELKCDLMRVSWLPDFYAIPPEIQIAGSKAYQQGKIYGIDAASGAAILALDVQSGDHVLDLCAAPGAKLCMLADMLGSSGSLTGVDVAKHRLAACRTMLQKYSLGDRSRLFVADGTSFSILPVNSNLGSMEAFVGIEDNGSIFSEWTSKRSWKDRQKSKKAKAAGSPHLPSTSEPELIYYGKDSGLVGLQKRYVLHPSTDAAACTSGYDKVLVDAECTHDGSIKHIQKFEFWGWKTLDRRVLNVERTGNLLHLQLGLLTNGFKLLKTGGSLVYSTCSLTVAQNENVVQQFLSKHPSAELLKINPADSWPCRSGGIQKTLRFDPATSQTSGLFVAKFVKL

SEQ ID NO: 64011 - protein, 404 aa, Triticum aestivum
  peptide (1)..(404): Ceres Seq. ID no. 15226271
  misc_feature (314)..(401): Pfam Name: NOL1/NOP2/sun family Pfam Description: NOL1/NOP2/sun family
  misc_feature (1)..(169): Homolog of NCBI NO: 14521455 NR Description: proliferating-cell nucleolar antigen P120,
  misc_feature (52)..(169): Homolog of NCBI NO: 14590712 NR Description: fmu protein [Pyrococcus horikoshii]
  misc_feature (274)..(403): Homolog of NCBI NO: 14590712 NR Description: fmu protein [Pyrococcus horikoshii]
  misc_feature (273)..(404): Homolog of NCBI NO: 14520982 NR Description: NUCLEOLAR PROTEIN [Pyrococcus abyssi]
  misc_feature (19)..(166): Homolog of NCBI NO: 14520982 NR Description: NUCLEOLAR PROTEIN [Pyrococcus abyssi]
  misc_feature (1)..(104): Homolog of NCBI NO: 18481711 NR Description: putative phosphate/phosphoenolpyruvate
  misc_feature (18)..(131): Homolog of NCBI NO: 15239280 NR Description: hypothetical protein [Arabidopsis thaliana]
  misc_feature (201)..(404): Homolog of NCBI NO: 15239280 NR Description: hypothetical protein [Arabidopsis thaliana]
  misc_feature (265)..(404): Homolog of NCBI NO: 18481712 NR Description: putative nucleolar protein [Sorghum bicolor]
  misc_feature (100)..(245): Homolog of NCBI NO: 18481712 NR Description: putative nucleolar protein [Sorghum bicolor]
MDSPEIPPSDRREERPPASLPLPAAFLEFLGENGLDPALYSKADTIPRYIRLKPGMESSVVTEIESELKCDLMRVSWLPDFYAIPPEIQIAGSKAYQQGKIYGIDAASGAAILALDVQSGDHVLDLCAAPGAKLCMLADMLGSSGSLTGVDVAKHRLAACRTMLQKYSLGDRSRLFVADGTSFSILPVNSNLGSMEAFVGIEDNGSIFSEWTSKRSWKDRQKSKKAKAAGSPHLPSTSEPELIYYGKDSGLVGLQKRYVLHPSTDAAACTSGYDKVLVDAECTHDGSIKHIQKFEFWGWKTLDRRVLNVERTGNLLHLQLGLLTNGFKLLKTGGSLVYSTCSLTVAQNENVVQQFLSKHPSAELLKINPADSWPCRSGGIQKTLRFDPATSQTSGLFVAKFVKL

SEQ ID NO: 64012 - protein, 349 aa, Triticum aestivum
  peptide (1)..(349): Ceres Seq. ID no. 15226272
  misc_feature (259)..(346): Pfam Name: NOL1/NOP2/sun family Pfam Description: NOL1/NOP2/sun family
  misc_feature (1)..(114): Homolog of NCBI NO: 14521455 NR Description: proliferating-cell nucleolar antigen P120,
  misc_feature (1)..(114): Homolog of NCBI NO: 14590712 NR Description: fmu protein [Pyrococcus horikoshii]
  misc_feature (219)..(348): Homolog of NCBI NO: 14590712 NR Description: fmu protein [Pyrococcus horikoshii]
  misc_feature (218)..(349): Homolog of NCBI NO: 14520982 NR Description: NUCLEOLAR PROTEIN [Pyrococcus abyssi]
  misc_feature (1)..(111): Homolog of NCBI NO: 14520982 NR Description: NUCLEOLAR PROTEIN [Pyrococcus abyssi]
  misc_feature (1)..(49): Homolog of NCBI NO: 18481711 NR Description: putative phosphate/phosphoenolpyruvate
  misc_feature (1)..(76): Homolog of NCBI NO: 15239280 NR Description: hypothetical protein [Arabidopsis thaliana]
  misc_feature (146)..(349): Homolog of NCBI NO: 15239280 NR Description: hypothetical protein [Arabidopsis thaliana]
  misc_feature (210)..(349): Homolog of NCBI NO: 18481712 NR Description: putative nucleolar protein [Sorghum bicolor]
  misc_feature (45)..(190): Homolog of NCBI NO: 18481712 NR Description: putative nucleolar protein [Sorghum bicolor]
MESSVVTEIESELKCDLMRVSWLPDFYAIPPEIQIAGSKAYQQGKIYGIDAASGAAILALDVQSGDHVLDLCAAPGAKLCMLADMLGSSGSLTGVDVAKHRLAACRTMLQKYSLGDRSRLFVADGTSFSILPVNSNLGSMEAFVGIEDNGSIFSEWTSKRSWKDRQKSKKAKAAGSPHLPSTSEPELIYYGKDSGLVGLQKRYVLHPSTDAAACTSGYDKVLVDAECTHDGSIKHIQKFEFWGWKTLDRRVLNVERTGNLLHLQLGLLTNGFKLLKTGGSLVYSTCSLTVAQNENVVQQFLSKHPSAELLKINPADSWPCRSGGIQKTLRFDPATSQTSGLFVAKFVKL

SEQ ID NO: 64013 - DNA, 1291 bp, Triticum aestivum
  misc_feature (1)..(1291): Ceres Seq. ID no. 13598499
gaagcttctacatggaacacctcaacctagggccggcagccgcaggagaagaagacaagccgcggtagacatcgagatcagccggagagaaaaatcgaggggacacgatacgagagcaggaagccatggccttcctcctccccaagctcaccacgcctccctgcagatcgccgccgcccagtcccctcaagccccagctcggcctgcccagccacggaggcggcaggctccacggggccggctcggcgcaggccgcggcgccgacccacctcaacctcccgctcctcctcagcgcctcgcagcaagaagcccccacggccaagtccgccgagaccaggaacagggctgcgagcggcggcggcggcggcggcggggacccgcgaaggtcggatttttacctcaaccttggggcggcggtgcgcgcgctgcgggacgacctgccggccgtgtttctccgggaacccaactacgacatctaccgcgaagacatcacatttgttgatccgctgaacactttccatgggattgacaactacaaaacaatcttctgggctctcagattccacggacgtctactattcagtgaaattgggctcgacgtatcacgcatttggcaactaacagaaacctcgatagttgtccggtgggaactgtggggcacaccgcgtgtcccgtgggaatcatatggctgcttcagtggcacatccaggtacaaagtcgacaggaacgggaaaatttacgagcataaagtcgacaacctggcattggacttcccccggccggctgtcaaagtgagcagcattactaacttagtagttgctgcatacccaccgagccccaatccaactttctgggatgtagttgggacaggcgatggatgctcatggacaaagctttaccgagcggtgctggagacagtagagcgggaaggtgacattcccgcaggcatttgcatggaaggtctactcacttgttcatagatggaatcaacttcaggactagctgcttcggtagtgagttttgctagaaaaaatgtatagaatgtggatacatattaatcacatcactgtcagttctctgtttgtataatgtagctcagcactagaacaactttagatcaaattcatggtagatgactatacctcatcatcattgttgtgtattttaggatattactgccacttgcttacatcttatgagatatgaatacaaagttgtagattttctcatgggttaggaaaactctgttccctaaattatttaggaaaatggaagatcttgaagactcaat

SEQ ID NO: 64014 - protein, 284 aa, Triticum aestivum
  peptide (1)..(284): Ceres Seq. ID no. 15222352
  misc_feature (109)..(207): Homolog of NCBI NO: 37522054 NR Description: hypothetical protein glr2485 [Gloeobacter
  misc_feature (98)..(207): Homolog of NCBI NO: 23040676 NR Description: hypothetical protein [Trichodesmium erythraeum
  misc_feature (87)..(207): Homolog of NCBI NO: 23126421 NR Description: hypothetical protein [Nostoc punctiforme]
  misc_feature (92)..(207): Homolog of NCBI NO: 17228448 NR Description: hypothetical protein [Nostoc sp. PCC 7120]
  misc_feature (87)..(208): Homolog of NCBI NO: 25408977 NR Description: hypothetical protein At2g46220 [imported] -
  misc_feature (84)..(209): Homolog of NCBI NO: 34904098 NR Description: unnamed protein product [Oryza sativa (japonica
  misc_feature (87)..(244): Homolog of NCBI NO: 18407008 NR Description: expressed protein [Arabidopsis thaliana]
  misc_feature (1)..(268): Homolog of NCBI NO: 18412399 NR Description: expressed protein [Arabidopsis thaliana]
  misc_feature (1)..(284): Homolog of NCBI NO: 15219209 NR Description: expressed protein [Arabidopsis thaliana]
  misc_feature (1)..(284): Homolog of NCBI NO: 38347356 NR Description: OSJNBa0070C17.17 [Oryza sativa (japonica
MAFLLPKLTTPPCRSPPPSPLKPQLGLPSHGGGRLHGAGSAQAAAPTHLNLPLLLSASQQEAPTAKSAETRNRAASGGGGGGGDPRRSDFYLNLGAAVRALRDDLPAVFLREPNYDIYREDITFVDPLNTFHGIDNYKTIFWALRFHGRLLFSEIGLDVSRIWQLTETSIVVRWELWGTPRVPWESYGCFSGTSRYKVDRNGKIYEHKVDNLALDFPRPAVKVSSITNLVVAAYPPSPNPTFWDVVGTGDGCSWTKLYRAVLETVEREGDIPAGICMEGLLTCS

SEQ ID NO: 64015 - protein, 166 aa, Triticum aestivum
  peptide (1)..(166): Ceres Seq. ID no. 15222353
KLLHGTPQPRAGSRRRRRQAAVDIEISRREKSRGHDTRAGSHGLPPPQAHHASLQIAAAQSPQAPARPAQPRRRQAPRGRLGAGRGADPPQPPAPPQRLAARSPHGQVRRDQEQGCERRRRRRRGPAKVGFLPQPWGGGARAAGRPAGRVSPGTQLRHLPRRHHIC

SEQ ID NO: 64016 - DNA, 1374 bp, Triticum aestivum
  misc_feature (1)..(1374): Ceres Seq. ID no. 13597160
aagacttcatcaccctgtacgtgcgcctctctccactcccatgttcaggaagcgaaaatttcaggggcgttttatctgattggatacctgatgcaaactttactagagtatattcggttcttgctagattgggatatttgggggcacgcggctgatgctagacttggtttatgccggagaaggctgctgtgcttgctgaccgggtgctcacggagctcgttaaggaactgaatattagaccagtacctgttgtgtttgcatccttttcgggaggaccaaaaggttgcacatacaaggttcttcagctgatccagagaaggtgcaaagggcagctgagtttggatgactatcaacttgtacgggactgcgtatgtggacaaatatatgactcgagtcctgtagattttgtgagtgatttaggcacccgctttcttcttcacccaagtgtcctgaagatgcctgaacctccacgtgtcttatcatggatgactagaggcattgcctcgggtctagacactcttttcattggcaagtttgaagcacagcgcaaagaatattgggagacactatactcatcagtgcatgttggcccaatactcatattctgttcagaggatgatgaacttgctccatgttcggccgttcaaaattttggacggcgtctgctggagctgggtggtgatgtgaatttagttaaatggcacagttctccacatgtaggacattacaagcatcacactgaggaataccgagctgcagtgactgagctgctcatgaaggcttcagcgctttacacaagcagaaaacgactcaatgactacagtgtcggcacgagtgaggacagtgacacaccttattcgtctcgcaatctacataagactgctgtaagctccagtgataggctagggagggtttcagttgatccagccaatcatttcttcttaccgagttccatggagtaccatgaaagcaggagtgaagtgctaaaacccgagttgttcaacatgccgagtgttgaaagcgcgaagaaccctgatggcgtgttggggacgatgctctatgatgcatgtgtcccaaagaacgtggaaggctgggacttcaagcttgcatcaatagatggacagcgtatgcattttactgcccgtcagcatggtacttccaatccaacaaaatgtatacgccgctcaagattgtaatgattttgactcaacatctaagtgcattccagcagactgctctatactgccagagtatacttgtttcaggagaatgttattgtgttgaccttttctggaaattttagagtatactgccagagtatactaatgcttttttatggaaattttagttgccgcaaagatggcaaattccttt

SEQ ID NO: 64017 - protein, 341 aa, Triticum aestivum
  peptide (1)..(341): Ceres Seq. ID no. 15222037
  misc_feature (34)..(308): Pfam Name: Eukaryotic protein of unknown function (DUF829) Pfam Description: Eukaryotic protein of unknown function (DUF829)
  misc_feature (1)..(318): Homolog of NCBI NO: 25411656 NR Description: hypothetical protein At2g15690 [imported] -
  misc_feature (1)..(341): Homolog of NCBI NO: 18397898 NR Description: expressed protein [Arabidopsis thaliana]
  misc_feature (1)..(341): Homolog of NCBI NO: 15241450 NR Description: expressed protein [Arabidopsis thaliana]
MPEKAAVLADRVLTELVKELNIRPVPVVFASFSGGPKGCTYKVLQLIQRRCKGQLSLDDYQLVRDCVCGQIYDSSPVDFVSDLGTRFLLHPSVLKMPEPPRVLSWMTRGIASGLDTLFIGKFEAQRKEYWETLYSSVHVGPILIFCSEDDELAPCSAVQNFGRRLLELGGDVNLVKWHSSPHVGHYKHHTEEYRAAVTELLMKASALYTSRKRLNDYSVGTSEDSDTPYSSRNLHKTAVSSSDRLGRVSVDPANHFFLPSSMEYHESRSEVLKPELFNMPSVESAKNPDGVLGTMLYDACVPKNVEGWDFKLASIDGQRMHFTARQHGTSNPTKCIRRSRL

SEQ ID NO: 64018 - protein, 246 aa, Triticum aestivum
  peptide (1)..(246): Ceres Seq. ID no. 15222038
  misc_feature (1)..(213): Pfam Name: Eukaryotic protein of unknown function (DUF829) Pfam Description: Eukaryotic protein of unknown function (DUF829)
  misc_feature (1)..(223): Homolog of NCBI NO: 25411656 NR Description: hypothetical protein At2g15690 [imported] -
  misc_feature (1)..(246): Homolog of NCBI NO: 18397898 NR Description: expressed protein [Arabidopsis thaliana]
  misc_feature (1)..(246): Homolog of NCBI NO: 15241450 NR Description: expressed protein [Arabidopsis thaliana]
MPEPPRVLSWMTRGIASGLDTLFIGKFEAQRKEYWETLYSSVHVGPILIFCSEDDELAPCSAVQNFGRRLLELGGDVNLVKWHSSPHVGHYKHHTEEYRAAVTELLMKASALYTSRKRLNDYSVGTSEDSDTPYSSRNLHKTAVSSSDRLGRVSVDPANHFFLPSSMEYHESRSEVLKPELFNMPSVESAKNPDGVLGTMLYDACVPKNVEGWDFKLASIDGQRMHFTARQHGTSNPTKCIRRSRL

SEQ ID NO: 64019 - protein, 236 aa, Triticum aestivum
  peptide (1)..(236): Ceres Seq. ID no. 15222039
  misc_feature (1)..(203): Pfam Name: Eukaryotic protein of unknown function (DUF829) Pfam Description: Eukaryotic protein of unknown function (DUF829)
  misc_feature (1)..(213): Homolog of NCBI NO: 25411656 NR Description: hypothetical protein At2g15690 [imported] -
  misc_feature (1)..(236): Homolog of NCBI NO: 18397898 NR Description: expressed protein [Arabidopsis thaliana]
  misc_feature (1)..(236): Homolog of NCBI NO: 15241450 NR Description: expressed protein [Arabidopsis thaliana]
MTRGIASGLDTLFIGKFEAQRKEYWETLYSSVHVGPILIFCSEDDELAPCSAVQNFGRRLLELGGDVNLVKWHSSPHVGHYKHHTEEYRAAVTELLMKASALYTSRKRLNDYSVGTSEDSDTPYSSRNLHKTAVSSSDRLGRVSVDPANHFFLPSSMEYHESRSEVLKPELFNMPSVESAKNPDGVLGTMLYDACVPKNVEGWDFKLASIDGQRMHFTARQHGTSNPTKCIRRSRL

SEQ ID NO: 64020 - DNA, 1384 bp, Triticum aestivum
  misc_feature (1)..(1384): Ceres Seq. ID no. 12587535
acactaaacttagatcacagcctgctctagttctcaaagcaccactgcttcactcgctgtgccgtaagacatcgtagatgatggtgagggcaagagagatggtgcaaggtccccgttgcgtcgcgctgttgctgctcgtctgcatggctgctctcgtagcttcggacaccaccgatggcctcctgccgaacggcaacttcgaggaggcgccggaccggtcgcagatggacgggacgagggtgacgggccgctacgcgataccgcggtgggaggcctgcgggtgcgtggagtacatctgctcgggccagaagcagggggacatggtgctgccggtccccgagggcgcccacgccgtgcggctcggcaacgacgcctccgtccagcagcagctcagcgtgacgccggggacgcactacgcgatcaccttcagcgcggcgcgcacctgcgcccaggccgagaagctgaacgtgacggtcggggcgcagtccggcgagctccccatccagacggtgtacaccagcagcggctgggactcctactcctgggcgttcgaggccaaggagagcgtcgtaacgctcaccgtccacaaccccggatatgatgaagacgccgcctgcggccccgtcgtcgactccttcgccatcaggaccctcctgccaccacaaagcaacgaatataacatgctgaagaacggggacttcgaggagggcccgtacatctgccccagcacgtcgtgcggggtgatggtgccgcccatggacgaggacagctactccccgctgttcccgtgggtgatcctgtcgtcgaccaagtccgtccggtacgtggacgcggcgcactacgcggtgccgcagggcgcccgggccgtgcagctggtgttcggcgcggagagcgcgctggtgcaggaggtgtgcaccgtgccgggggtgtcttacaggatggagttctcgatcggggacgcggccgacgggtgcacgggctccctcgccgtggaggcgtacgcggcgggcgggagggtgacggtcccgtacgagtcccagggcacgggcgggttcacgcgcggcgtgctcgagttcacggcgacggaggaccggacgcgggtggtgttcgtcagcgcgagctacaacatgaagtccgacggcacggtctgcgggcccgtcgtcgacgacgcctcgctcgtctgcgcgcagagccacgctcgccggctgcttctgtgattgtgcggcgccgcaatgtacggtccgttggtttgtgacacgaacaatttgacctcttccgttatggagtaggatctaaaattccggacggtcggcagttgtaaaccagggttctgtaatgtatcgtggataatttgcattagggaacatcattttaacatttcttt

SEQ ID NO: 64021 - protein, 379 aa, Triticum aestivum
  peptide (1)..(379): Ceres Seq. ID no. 12587536
  misc_feature (50)..(368): Pfam Name: Protein of unknown function, DUF642 Pfam Description: Protein of unknown function, DUF642
  misc_feature (5)..(364): Homolog of NCBI NO: 34909656 NR Description: OJ1414_E05.5 [Oryza sativa (japonica
  misc_feature (19)..(371): Homolog of NCBI NO: 23397043 NR Description: unknown protein [Arabidopsis thaliana]
  misc_feature (19)..(371): Homolog of NCBI NO: 21554402 NR Description: unknown [Arabidopsis thaliana]
  misc_feature (19)..(371): Homolog of NCBI NO: 15239049 NR Description: putative protein
  misc_feature (17)..(368): Homolog of NCBI NO: 7488898 NR Description: hypothetical protein - castor bean
  misc_feature (15)..(379): Homolog of NCBI NO: 34912572 NR Description: P0410E03.24 [Oryza sativa (japonica
  misc_feature (15)..(377): Homolog of NCBI NO: 38345428 NR Description: OSJNBb0091E11.19 [Oryza sativa (japonica
  misc_feature (11)..(378): Homolog of NCBI NO: 38345423 NR Description: OSJNBb0091E11.14 [Oryza sativa (japonica
  misc_feature (8)..(379): Homolog of NCBI NO: 38345427 NR Description: OSJNBb0091E11.18 [Oryza sativa (japonica
  misc_feature (8)..(378): Homolog of NCBI NO: 38345426 NR Description: OSJNBb0091E11.17 [Oryza sativa (japonica
MMVRAREMVQGPRCVALLLLVCMAALVASDTTDGLLPNGNFEEAPDRSQMDGTRVTGRYAIPRWEACGCVEYICSGQKQGDMVLPVPEGAHAVRLGNDASVQQQLSVTPGTHYAITFSAARTCAQAEKLNVTVGAQSGELPIQTVYTSSGWDSYSWAFEAKESVVTLTVHNPGYDEDAACGPVVDSFAIRTLLPPQSNEYNMLKNGDFEEGPYICPSTSCGVMVPPMDEDSYSPLFPWVILSSTKSVRYVDAAHYAVPQGARAVQLVFGAESALVQEVCTVPGVSYRMEFSIGDAADGCTGSLAVEAYAAGGRVTVPYESQGTGGFTRGVLEFTATEDRTRVVFVSASYNMKSDGTVCGPVVDDASLVCAQSHARRLLL

SEQ ID NO: 64022 - protein, 378 aa, Triticum aestivum
  peptide (1)..(378): Ceres Seq. ID no. 12587537
  misc_feature (49)..(367): Pfam Name: Protein of unknown function, DUF642 Pfam Description: Protein of unknown function, DUF642
  misc_feature (4)..(363): Homolog of NCBI NO: 34909656 NR Description: OJ1414_E05.5 [Oryza sativa (japonica
  misc_feature (18)..(370): Homolog of NCBI NO: 23397043 NR Description: unknown protein [Arabidopsis thaliana]
  misc_feature (18)..(370): Homolog of NCBI NO: 21554402 NR Description: unknown [Arabidopsis thaliana]
  misc_feature (18)..(370): Homolog of NCBI NO: 15239049 NR Description: putative protein
  misc_feature (16)..(367): Homolog of NCBI NO: 7488898 NR Description: hypothetical protein - castor bean
  misc_feature (14)..(378): Homolog of NCBI NO: 34912572 NR Description: P0410E03.24 [Oryza sativa (japonica
  misc_feature (14)..(376): Homolog of NCBI NO: 38345428 NR Description: OSJNBb0091E11.19 [Oryza sativa (japonica
  misc_feature (10)..(377): Homolog of NCBI NO: 38345423 NR Description: OSJNBb0091E11.14 [Oryza sativa (japonica
  misc_feature (7)..(378): Homolog of NCBI NO: 38345427 NR Description: OSJNBb0091E11.18 [Oryza sativa (japonica
  misc_feature (7)..(377): Homolog of NCBI NO: 38345426 NR Description: OSJNBb0091E11.17 [Oryza sativa (japonica
MVRAREMVQGPRCVALLLLVCMAALVASDTTDGLLPNGNFEEAPDRSQMDGTRVTGRYAIPRWEACGCVEYICSGQKQGDMVLPVPEGAHAVRLGNDASVQQQLSVTPGTHYAITFSAARTCAQAEKLNVTVGAQSGELPIQTVYTSSGWDSYSWAFEAKESVVTLTVHNPGYDEDAACGPVVDSFAIRTLLPPQSNEYNMLKNGDFEEGPYICPSTSCGVMVPPMDEDSYSPLFPWVILSSTKSVRYVDAAHYAVPQGARAVQLVFGAESALVQEVCTVPGVSYRMEFSIGDAADGCTGSLAVEAYAAGGRVTVPYESQGTGGFTRGVLEFTATEDRTRVVFVSASYNMKSDGTVCGPVVDDASLVCAQSHARRLLL

SEQ ID NO: 64023 - protein, 372 aa, Triticum aestivum
  peptide (1)..(372): Ceres Seq. ID no. 12587538
  misc_feature (43)..(361): Pfam Name: Protein of unknown function, DUF642 Pfam Description: Protein of unknown function, DUF642
  misc_feature (1)..(357): Homolog of NCBI NO: 34909656 NR Description: OJ1414_E05.5 [Oryza sativa (japonica
  misc_feature (12)..(364): Homolog of NCBI NO: 21554402 NR Description: unknown [Arabidopsis thaliana]
  misc_feature (12)..(364): Homolog of NCBI NO: 23397043 NR Description: unknown protein [Arabidopsis thaliana]
  misc_feature (12)..(364): Homolog of NCBI NO: 15239049 NR Description: putative protein
  misc_feature (10)..(361): Homolog of NCBI NO: 7488898 NR Description: hypothetical protein - castor bean
  misc_feature (8)..(372): Homolog of NCBI NO: 34912572 NR Description: P0410E03.24 [Oryza sativa (japonica
  misc_feature (8)..(370): Homolog of NCBI NO: 38345428 NR Description: OSJNBb0091E11.19 [Oryza sativa (japonica
  misc_feature (4)..(371): Homolog of NCBI NO: 38345423 NR Description: OSJNBb0091E11.14 [Oryza sativa (japonica
  misc_feature (1)..(372): Homolog of NCBI NO: 38345427 NR Description: OSJNBb0091E11.18 [Oryza sativa (japonica
  misc_feature (1)..(371): Homolog of NCBI NO: 38345426 NR Description: OSJNBb0091E11.17 [Oryza sativa (japonica
MVQGPRCVALLLLVCMAALVASDTTDGLLPNGNFEEAPDRSQMDGTRVTGRYAIPRWEACGCVEYICSGQKQGDMVLPVPEGAHAVRLGNDASVQQQLSVTPGTHYAITFSAARTCAQAEKLNVTVGAQSGELPIQTVYTSSGWDSYSWAFEAKESVVTLTVHNPGYDEDAACGPVVDSFAIRTLLPPQSNEYNMLKNGDFEEGPYICPSTSCGVMVPPMDEDSYSPLFPWVILSSTKSVRYVDAAHYAVPQGARAVQLVFGAESALVQEVCTVPGVSYRMEFSIGDAADGCTGSLAVEAYAAGGRVTVPYESQGTGGFTRGVLEFTATEDRTRVVFVSASYNMKSDGTVCGPVVDDASLVCAQSHARRLLL

SEQ ID NO: 64024 - DNA, 1380 bp, Triticum aestivum
  misc_feature (1)..(1380): Ceres Seq. ID no. 13584217
  misc_feature: Pfam Name: ADH_zinc_N Pfam Description: Zinc-binding dehydrogenase
acaggacgtgtaccccaagaaccagagagccaaccaacccaacccctgagcatctccggccacgcatcggctaagcacacgcaaacagccgcccccacgatactcacgaggctccttcccctccgtgcgctctcttgtttcccccatcccatggccaccccaaccacgacgccggcgacgatgcgggccgtgcagtacgacgcctgcggcggaggcgccgccggcctcaagcatgtagaagtccccgtcccttctgcaaagaagaatgaggtcctgctgaaactgcaagctgcaaccatcaacccagttgactggaagatacagaaaggggacttgaggcctctgctgcctcgtagactgccttttatcccagtgactgatgttgcaggagtagttgttgatgttggtcctggagtgaaaggtctcacagcgggtgatcaagtcgtcgccatgttgaactcttttaacggaggtggactggcagagtatgctgtagcatccgcaaacctgaccgtcaaaaggccagctgaggtttctgcagctgagggtgctgggcttcccattgctgcaggcactgcgctccaggcactaaggtccattggtgccaagtttgacggcaccggcaagccattaaacgtgttggtcaccgctgcctctggcggcgtaggcctgtacgcggtgcagcttgcaaagctagcgaaccttcatgttaccgccacctgcggcgcacgcaacatggatcttgtgaagagcttgggcgcagacgaggtgatggactacaggaccccagagggggcgagcctgcagagtccctccggcaggaagtacgacggcgtggttcactgcaccgtcggtgtcagctggtcgtctttccagccattgctcagtgatgccgggcgagtgatcgatatcacccccaacttctcggccatcctcacatctgcgctgcacaggatgacattttccaagaagcgcctggtgcccctgctcctgtcgcccaacaaggcggacctggagttattggttgggttgctcaaggaaggcaagctgaagacggtggtcgactcgaagttcccgttgagcgaggcagacaaggcgtggcagagcagtatcgatggccactggtaagattgtcgttgagatggagagctgatcgtcgtcaatgcttcctagtattaaggacttgcatacagacggtggacgtgaatacttagatgtaatcatacagactagtcacttgtgcgtttgtttattgggtgatggttcgtttattcagtttatattatattatatcttacagtatattattaaaagggtattgagaactatgagttgcaaaaaactgtatggctatcggtaaacaatagcattgtgctgtct

SEQ ID NO: 64025 - protein, 375 aa, Triticum aestivum
  peptide (1)..(375): Ceres Seq. ID no. 15222782
  misc_feature: Pfam Name: ADH_zinc_N Pfam Description: Zinc-binding dehydrogenase
  misc_feature (71)..(361): Homolog of NCBI NO: 23023348 NR Description: hypothetical protein
  misc_feature (61)..(375): Homolog of NCBI NO: 23039352 NR Description: hypothetical protein [Trichodesmium erythraeum
  misc_feature (61)..(337): Homolog of NCBI NO: 5701738 NR Description: LEDI-4 protein [Lithospermum erythrorhizon]
  misc_feature (58)..(374): Homolog of NCBI NO: 38346450 NR Description: OSJNBa0018J19.11 [Oryza sativa (japonica
  misc_feature (58)..(374): Homolog of NCBI NO: 38346442 NR Description: OSJNBa0018J19.3 [Oryza sativa (japonica
  misc_feature (51)..(374): Homolog of NCBI NO: 38346453 NR Description: OSJNBa0018J19.14 [Oryza sativa (japonica
  misc_feature (61)..(374): Homolog of NCBI NO: 38016531 NR Description: fiber quinone-oxidoreductase [Gossypium
  misc_feature (61)..(374): Homolog of NCBI NO: 24370984 NR Description: quinone-oxidoreductase homologue [Spinacia
  misc_feature (61)..(374): Homolog of NCBI NO: 12484050 NR Description: quinone-oxidoreductase QR1 [Triphysaria
  misc_feature (61)..(374): Homolog of NCBI NO: 15235549 NR Description: oxidoreductase, zinc-binding dehydrogenase family
TGRVPQEPESQPTQPLSISGHASAKHTQTAAPTILTRLLPLRALSCFPHPMATPTTTPATMRAVQYDACGGGAAGLKHVEVPVPSAKKNEVLLKLQAATINPVDWKIQKGDLRPLLPRRLPFIPVTDVAGVVVDVGPGVKGLTAGDQVVAMLNSFNGGGLAEYAVASANLTVKRPAEVSAAEGAGLPIAAGTALQALRSIGAKFDGTGKPLNVLVTAASGGVGLYAVQLAKLANLHVTATCGARNMDLVKSLGADEVMDYRTPEGASLQSPSGRKYDGVVHCTVGVSWSSFQPLLSDAGRVIDITPNFSAILTSALHRMTFSKKRLVPLLLSPNKADLELLVGLLKEGKLKTVVDSKFPLSEADKAWQSSIDGHW

SEQ ID NO: 64026 - protein, 325 aa, Triticum aestivum
  peptide (1)..(325): Ceres Seq. ID no. 15222783
  misc_feature: Pfam Name: ADH_zinc_N Pfam Description: Zinc-binding dehydrogenase
  misc_feature (21)..(311): Homolog of NCBI NO: 23023348 NR Description: hypothetical protein
  misc_feature (11)..(325): Homolog of NCBI NO: 23039352 NR Description: hypothetical protein [Trichodesmium erythraeum
  misc_feature (11)..(287): Homolog of NCBI NO: 5701738 NR Description: LEDI-4 protein [Lithospermum erythrorhizon]
  misc_feature (8)..(324): Homolog of NCBI NO: 38346450 NR Description: OSJNBa0018J19.11 [Oryza sativa (japonica
  misc_feature (8)..(324): Homolog of NCBI NO: 38346442 NR Description: OSJNBa0018J19.3 [Oryza sativa (japonica
  misc_feature (1)..(324): Homolog of NCBI NO: 38346453 NR Description: OSJNBa0018J19.14 [Oryza sativa (japonica
  misc_feature (11)..(324): Homolog of NCBI NO: 38016531 NR Description: fiber quinone-oxidoreductase [Gossypium
  misc_feature (11)..(324): Homolog of NCBI NO: 24370984 NR Description: quinone-oxidoreductase homologue [Spinacia
  misc_feature (11)..(324): Homolog of NCBI NO: 12484050 NR Description: quinone-oxidoreductase QR1 [Triphysaria
  misc_feature (11)..(324): Homolog of NCBI NO: 15235549 NR Description: oxidoreductase, zinc-binding dehydrogenase family
MATPTTTPATMRAVQYDACGGGAAGLKHVEVPVPSAKKNEVLLKLQAATINPVDWKIQKGDLRPLLPRRLPFIPVTDVAGVVVDVGPGVKGLTAGDQVVAMLNSFNGGGLAEYAVASANLTVKRPAEVSAAEGAGLPIAAGTALQALRSIGAKFDGTGKPLNVLVTAASGGVGLYAVQLAKLANLHVTATCGARNMDLVKSLGADEVMDYRTPEGASLQSPSGRKYDGVVHCTVGVSWSSFQPLLSDAGRVIDITPNFSAILTSALHRMTFSKKRLVPLLLSPNKADLELLVGLLKEGKLKTVVDSKFPLSEADKAWQSSIDGHW

SEQ ID NO: 64027 - protein, 315 aa, Triticum aestivum
  peptide (1)..(315): Ceres Seq. ID no. 15222784
  misc_feature: Pfam Name: ADH_zinc_N Pfam Description: Zinc-binding dehydrogenase
  misc_feature (11)..(301): Homolog of NCBI NO: 23023348 NR Description: hypothetical protein
  misc_feature (1)..(315): Homolog of NCBI NO: 23039352 NR Description: hypothetical protein [Trichodesmium erythraeum
  misc_feature (1)..(277): Homolog of NCBI NO: 5701738 NR Description: LEDI-4 protein [Lithospermum erythrorhizon]
  misc_feature (1)..(314): Homolog of NCBI NO: 38346450 NR Description: OSJNBa0018J19.11 [Oryza sativa (japonica
  misc_feature (1)..(314): Homolog of NCBI NO: 38346442 NR Description: OSJNBa0018J19.3 [Oryza sativa (japonica
  misc_feature (1)..(314): Homolog of NCBI NO: 38346453 NR Description: OSJNBa0018J19.14 [Oryza sativa (japonica
  misc_feature (1)..(314): Homolog of NCBI NO: 38016531 NR Description: fiber quinone-oxidoreductase [Gossypium
  misc_feature (1)..(314): Homolog of NCBI NO: 24370984 NR Description: quinone-oxidoreductase homologue [Spinacia
  misc_feature (1)..(314): Homolog of NCBI NO: 12484050 NR Description: quinone-oxidoreductase QR1 [Triphysaria
  misc_feature (1)..(314): Homolog of NCBI NO: 15235549 NR Description: oxidoreductase, zinc-binding dehydrogenase family
MRAVQYDACGGGAAGLKHVEVPVPSAKKNEVLLKLQAATINPVDWKIQKGDLRPLLPRRLPFIPVTDVAGVVVDVGPGVKGLTAGDQVVAMLNSFNGGGLAEYAVASANLTVKRPAEVSAAEGAGLPIAAGTALQALRSIGAKFDGTGKPLNVLVTAASGGVGLYAVQLAKLANLHVTATCGARNMDLVKSLGADEVMDYRTPEGASLQSPSGRKYDGVVHCTVGVSWSSFQPLLSDAGRVIDITPNFSAILTSALHRMTFSKKRLVPLLLSPNKADLELLVGLLKEGKLKTVVDSKFPLSEADKAWQSSIDGHW

SEQ ID NO: 64028 - DNA, 883 bp, Triticum aestivum
  misc_feature (1)..(883): Ceres Seq. ID no. 12586351
ctaacagtcaagtcaagcaccaagccaccaaccacacaagagccgatcaagacaccagcaatggccggaggaggaagcgacgaagtgaagctgctgggcatgtgggcgagcccgttcgtccttcgcgtccagctcgcgctcagcctcaagggcgtcggctacgagtacgtcgaagaggacctcaagagcaagagcgagctgctcctcaagtccaaccccgtgctccagaaggtgccggtgctgatccacgacggcaagcccgtgtgcgagtcgtcggtcatcctgcagtacatcgacgaggctttcgccggcgtcggcccctcgctcctcccggaggaaccccacggccgcgccgttgctcgcttctgggccgcttacatcgacggcacgctcgtgaaagcgtcgtcccaggcgtccatggccaagacggaggaggagaaggccgaggggaagaagcaggtgaccgccgcggtggagaccttggagggggccctgagggactgctctaacggcaaacccttcttcggcggcgacaccgcggggtacgtcgacgtgatgctcggcggcctcctcgcatgggtgcacgcgggcgataagatgaagggcgtcaagaccttcgatcccgccaccactccgctcttggctgcgtgggcggacaacttcggatcgttggacgcggtggaggcggtcatgccggacgtgggcaagctggtcgagtttgccatggcgatgcacgctcgcgccgcagccgccgctacaaactaaagagacgtgcctacaatcatatattgttttctgtatatcgtttgtgttatctctgtggaatttgtgtgcctatccatataatacgtcaatatgtcacattcgtcgactttaaatgttg

SEQ ID NO: 64029 - protein, 254 aa, Triticum aestivum
  peptide (1)..(254): Ceres Seq. ID no. 12586352
  misc_feature (21)..(252): Homolog of NCBI NO: 33304610 NR Description: tau class GST protein 4 [Oryza sativa (indica
  misc_feature (21)..(251): Homolog of NCBI NO: 37536250 NR Description: putative glutathione S-transferase
  misc_feature (21)..(254): Homolog of NCBI NO: 11385531 NR Description: glutathione S-transferase GST 40 [Zea mays]
  misc_feature (21)..(254): Homolog of NCBI NO: 37536312 NR Description: putative glutathione S-transferase
  misc_feature (21)..(254): Homolog of NCBI NO: 33304612 NR Description: tau class GST protein 3 [Oryza sativa (indica
  misc_feature (21)..(252): Homolog of NCBI NO: 37536280 NR Description: putative glutathione S-transferase
  misc_feature (21)..(254): Homolog of NCBI NO: 37536308 NR Description: putative glutathione S-transferase
  misc_feature (21)..(254): Homolog of NCBI NO: 37536306 NR Description: putative glutathione S-transferase
  misc_feature (21)..(250): Homolog of NCBI NO: 11385535 NR Description: glutathione S-transferase GST 42 [Zea mays]
  misc_feature (21)..(254): Homolog of NCBI NO: 37536284 NR Description: putative glutathione S-transferase
LTVKSSTKPPTTQEPIKTPAMAGGGSDEVKLLGMWASPFVLRVQLALSLKGVGYEYVEEDLKSKSELLLKSNPVLQKVPVLIHDGKPVCESSVILQYIDEAFAGVGPSLLPEEPHGRAVARFWAAYIDGTLVKASSQASMAKTEEEKAEGKKQVTAAVETLEGALRDCSNGKPFFGGDTAGYVDVMLGGLLAWVHAGDKMKGVKTFDPATTPLLAAWADNFGSLDAVEAVMPDVGKLVEFAMAMHARAAAAATN

SEQ ID NO: 64030 - protein, 234 aa, Triticum aestivum
  peptide (1)..(234): Ceres Seq. ID no. 12586353
  misc_feature (1)..(232): Homolog of NCBI NO: 33304610 NR Description: tau class GST protein 4 [Oryza sativa (indica
  misc_feature (1)..(231): Homolog of NCBI NO: 37536250 NR Description: putative glutathione S-transferase
  misc_feature (1)..(234): Homolog of NCBI NO: 11385531 NR Description: glutathione S-transferase GST 40 [Zea mays]
  misc_feature (1)..(234): Homolog of NCBI NO: 37536312 NR Description: putative glutathione S-transferase
  misc_feature (1)..(234): Homolog of NCBI NO: 33304612 NR Description: tau class GST protein 3 [Oryza sativa (indica
  misc_feature (1)..(232): Homolog of NCBI NO: 37536280 NR Description: putative glutathione S-transferase
  misc_feature (1)..(234): Homolog of NCBI NO: 37536308 NR Description: putative glutathione S-transferase
  misc_feature (1)..(234): Homolog of NCBI NO: 37536306 NR Description: putative glutathione S-transferase
  misc_feature (1)..(230): Homolog of NCBI NO: 11385535 NR Description: glutathione S-transferase GST 42 [Zea mays]
  misc_feature (1)..(234): Homolog of NCBI NO: 37536284 NR Description: putative glutathione S-transferase
MAGGGSDEVKLLGMWASPFVLRVQLALSLKGVGYEYVEEDLKSKSELLLKSNPVLQKVPVLIHDGKPVCESSVILQYIDEAFAGVGPSLLPEEPHGRAVARFWAAYIDGTLVKASSQASMAKTEEEKAEGKKQVTAAVETLEGALRDCSNGKPFFGGDTAGYVDVMLGGLLAWVHAGDKMKGVKTFDPATTPLLAAWADNFGSLDAVEAVMPDVGKLVEFAMAMHARAAAAATN

SEQ ID NO: 64031 - protein, 221 aa, Triticum aestivum
  peptide (1)..(221): Ceres Seq. ID no. 12586354
  misc_feature (1)..(219): Homolog of NCBI NO: 33304610 NR Description: tau class GST protein 4 [Oryza sativa (indica
  misc_feature (1)..(218): Homolog of NCBI NO: 37536250 NR Description: putative glutathione S-transferase
  misc_feature (1)..(221): Homolog of NCBI NO: 11385531 NR Description: glutathione S-transferase GST 40 [Zea mays]
  misc_feature (1)..(221): Homolog of NCBI NO: 37536312 NR Description: putative glutathione S-transferase
  misc_feature (1)..(221): Homolog of NCBI NO: 33304612 NR Description: tau class GST protein 3 [Oryza sativa (indica
  misc_feature (1)..(219): Homolog of NCBI NO: 37536280 NR Description: putative glutathione S-transferase
  misc_feature (1)..(221): Homolog of NCBI NO: 37536308 NR Description: putative glutathione S-transferase
  misc_feature (1)..(221): Homolog of NCBI NO: 37536306 NR Description: putative glutathione S-transferase
  misc_feature (1)..(217): Homolog of NCBI NO: 11385535 NR Description: glutathione S-transferase GST 42 [Zea mays]
  misc_feature (1)..(221): Homolog of NCBI NO: 37536284 NR Description: putative glutathione S-transferase
MWASPFVLRVQLALSLKGVGYEYVEEDLKSKSELLLKSNPVLQKVPVLIHDGKPVCESSVILQYIDEAFAGVGPSLLPEEPHGRAVARFWAAYIDGTLVKASSQASMAKTEEEKAEGKKQVTAAVETLEGALRDCSNGKPFFGGDTAGYVDVMLGGLLAWVHAGDKMKGVKTFDPATTPLLAAWADNFGSLDAVEAVMPDVGKLVEFAMAMHARAAAAATN

SEQ ID NO: 64032 - DNA, 1627 bp, Triticum aestivum
  misc_feature (1)..(1627): Ceres Seq. ID no. 13655744
tctccctctccctatccatcccatcctctcccccgaccccgcgcacccgccagagaagccgcctccatggcctccctcgccgccgcctccgcctccacggcgctcctcttcccctccacctcctcctccaagccccgcctcccgctctccacatcccttggcttctccgcgcccgcgcggtcacgccgcgccactgcggtggcggggagctccggcaggcgcccggggctgctcgtcgtgcgcgccgccaggggcaagttcgagcggaacaagccccacgtcaacatcggcaccatcggccacgtcgaccacggcaagaccaccctcaccgccgcgctcaccatggtgctcgcctccgtcgggggcagcgcgcccaagaagtacgacgagatcgacgccgcccctgaggagcgcgcccgtggtatcaccatcaacaccgccaccgtcgagtacgagacggagacgcgccactacgcgcacgtcgactgccccggtcacgccgactacgtcaagaacatgattaccggggccgcccagatggacggcgccatcctcgtcgtctccggcgccgacggccccatgccgcagaccaaggagcacatcctgctcgccaaccaggtcggtgtccccagcattgttgttttcctcaacaagaaggaccaggtcgacgacgaggagctgctcgagctcgtcgatctcgaggtccgcgagctgctcacggcctatgaatacgatggtgacaatgtgccaatcgtctccggctctgcactcagagcgctcgaggccctcatggccacccctggcctcaagcgtggggataacgagtgggtggatggcatcttctccttgattgattccgtggatacccacatccctgtcccgcagaggcagaccgacctccccttcttgctcgctgttgaggatgttttctccatcactggtcgtggtacagttgccactggccgtatcgagcgtggcaccgtcaaggttggggacccagtcgacctcgtcggcatcagggagacccgcaatgccacggtcactggtgttgagatgttccagaagaccatggatgatgccattgctggggacaatgttgggcttctgctccgtggtatgcagaaggaagacattgagagaggcatggtgttggcaaagcccggttccatcacgccacacaccaagtttgaggctgttgtgtatgtgctcaagaaggaggagggtggccggcactccccatttttccctggttaccgtccgcaattctacatgcggactactgatgtcacggggaatgtgacaaacattatgaacgacaaggatgaggaggcgaagatgtgcatgccaggtgaccgtatcaagatggttgtggagctcatccagcctgtggcttgtgagcagggaatgaggtttgccatccgtgaaggtggcaagaccgtcggtgccggtgtcatcaataatatcattcagtaatgtggatggaggatatccaccgtgagaattttcctcatttactcttttgcgaaatgctatgtagttgttattatgcgtttagggaaggctcttgtgaaattgtagtatggcacatttttcttcaagtgaaattgcatactttgtagtattcacg

SEQ ID NO: 64033 - protein, 490 aa, Triticum aestivum
  peptide (1)..(490): Ceres Seq. ID no. 13655745
  misc_feature (91)..(295): Pfam Name: Elongation factor Tu GTP binding domain Pfam Description: Elongation factor Tu GTP binding domain
  misc_feature (16)..(490): Homolog of NCBI NO: 12830555 NR Description: chloroplast translational elongation factor Tu
  misc_feature (23)..(490): Homolog of NCBI NO: 6525065 NR Description: chloroplast translational elongation factor Tu
  misc_feature (23)..(490): Homolog of NCBI NO: 17225494 NR Description: translational elongation factor Tu [Oryza sativa]
SPSPYPSHPLPRPRAPAREAASMASLAAASASTALLFPSTSSSKPRLPLSTSLGFSAPARSRRATAVAGSSGRRPGLLVVRAARGKFERNKPHVNIGTIGHVDHGKTTLTAALTMVLASVGGSAPKKYDEIDAAPEERARGITINTATVEYETETRHYAHVDCPGHADYVKNMITGAAQMDGAILVVSGADGPMPQTKEHILLANQVGVPSIVVFLNKKDQVDDEELLELVDLEVRELLTAYEYDGDNVPIVSGSALRALEALMATPGLKRGDNEWVDGIFSLIDSVDTHIPVPQRQTDLPFLLAVEDVFSITGRGTVATGRIERGTVKVGDPVDLVGIRETRNATVTGVEMFQKTMDDAIAGDNVGLLLRGMQKEDIERGMVLAKPGSITPHTKFEAVVYVLKKEEGGRHSPFFPGYRPQFYMRTTDVTGNVTNIMNDKDEEAKMCMPGDRIKMVVELIQPVACEQGMRFAIREGGKTVGAGVINNIIQ

SEQ ID NO: 64034 - protein, 468 aa, Triticum aestivum
  peptide (1)..(468): Ceres Seq. ID no. 13655746
  misc_feature (69)..(273): Pfam Name: Elongation factor Tu GTP binding domain Pfam Description: Elongation factor Tu GTP binding domain
  misc_feature (1)..(468): Homolog of NCBI NO: 12830555 NR Description: chloroplast translational elongation factor Tu
  misc_feature (1)..(468): Homolog of NCBI NO: 6525065 NR Description: chloroplast translational elongation factor Tu
  misc_feature (1)..(468): Homolog of NCBI NO: 17225494 NR Description: translational elongation factor Tu [Oryza sativa]
MASLAAASASTALLFPSTSSSKPRLPLSTSLGFSAPARSRRATAVAGSSGRRPGLLVVRAARGKFERNKPHVNIGTIGHVDHGKTTLTAALTMVLASVGGSAPKKYDEIDAAPEERARGITINTATVEYETETRHYAHVDCPGHADYVKNMITGAAQMDGAILVVSGADGPMPQTKEHILLANQVGVPSIVVFLNKKDQVDDEELLELVDLEVRELLTAYEYDGDNVPIVSGSALRALEALMATPGLKRGDNEWVDGIFSLIDSVDTHIPVPQRQTDLPFLLAVEDVFSITGRGTVATGRIERGTVKVGDPVDLVGIRETRNATVTGVEMFQKTMDDAIAGDNVGLLLRGMQKEDIERGMVLAKPGSITPHTKFEAVVYVLKKEEGGRHSPFFPGYRPQFYMRTTDVTGNVTNIMNDKDEEAKMCMPGDRIKMVVELIQPVACEQGMRFAIREGGKTVGAGVINNIIQ

SEQ ID NO: 64035 - protein, 376 aa, Triticum aestivum
  peptide (1)..(376): Ceres Seq. ID no. 13655747
  misc_feature (1)..(181): Pfam Name: Elongation factor Tu GTP binding domain Pfam Description: Elongation factor Tu GTP binding domain
  misc_feature (1)..(376): Homolog of NCBI NO: 12830555 NR Description: chloroplast translational elongation factor Tu
  misc_feature (1)..(376): Homolog of NCBI NO: 6525065 NR Description: chloroplast translational elongation factor Tu
  misc_feature (1)..(376): Homolog of NCBI NO: 17225494 NR Description: translational elongation factor Tu [Oryza sativa]
MVLASVGGSAPKKYDEIDAAPEERARGITINTATVEYETETRHYAHVDCPGHADYVKNMITGAAQMDGAILVVSGADGPMPQTKEHILLANQVGVPSIVVFLNKKDQVDDEELLELVDLEVRELLTAYEYDGDNVPIVSGSALRALEALMATPGLKRGDNEWVDGIFSLIDSVDTHIPVPQRQTDLPFLLAVEDVFSITGRGTVATGRIERGTVKVGDPVDLVGIRETRNATVTGVEMFQKTMDDAIAGDNVGLLLRGMQKEDIERGMVLAKPGSITPHTKFEAVVYVLKKEEGGRHSPFFPGYRPQFYMRTTDVTGNVTNIMNDKDEEAKMCMPGDRIKMVVELIQPVACEQGMRFAIREGGKTVGAGVINNIIQ

SEQ ID NO: 64036 - DNA, 1231 bp, Triticum aestivum
  misc_feature (1)..(1231): Ceres Seq. ID no. 12627139
cggggagaggcttgcgttgcgtgctggaggagcggaggaggcaggagccggcgtcgtgtttgagtaggagtaggataagcggattgctctctcgtctcggagatttccggcgagaaggactcgagcggatcgagtgcgcccgcccgcccgccggcctcgccgatcagccgcgatgaactgcgagacgtgccacctcaacgaactggagctggagccgctggagatcaaagacgtgctgcgatgcatcttgcataccatattctttcatcgaaccctcactcttgttcggcccaaggatgttgactgcgacctctttgagatcacatatgttcaatgtggacttgcagaactagaaaaggaggtcgatgaaaagatcaaccagttcattgcttgggctgaaaagcatccaaatcggaaaagccaggtgtgcctctctttcttcgatgagaagaacaagcacccgggctggttcagcagcaagactgagagggtttactgggaacaatggttcatcaatttgcatgtcacaagccctaaaggacaaggcaaatcacgtggctccaaagcaccggcaaatactaaaggacaagcattggaagagaccagctcaagacgtgatgcgctgagcttgctgatccaagaagtcctgttccagatcattaactacgccaatgagaaaaaagaccatattcctccaatctctgacagaatattcaatcatgagattttggtccccaggtgacaccttttccttggacgtgtgttcacagctcttctgattctgtattcgggtggaacgccgacgttcttcggagggcattgagtagtggacattcgtactcactgaactgaagatctttgttagaaactgcactaaacgaagatgttggtatcgatgtgctacctttcgcagtgatgccacattgcccctttctcacctctccattgatcgtttggttataagacgttgtcagagctgctgactcatggaagcaatgttgtgtacagaataatgtagaactgctagtgaactgactctgttatccatccaatcatgtaattcccacttgtttagctgtaaatatttctcttgacagtctgtgtccaaaaattattaccatgttattatgcagatgtgaaaaatatgtgtattctggatgttatgtgcactggtgtttattcagtgtgctgacataagggagaaacctggagtgggaagctgttttgactg

SEQ ID NO: 64037 - protein, 189 aa, Triticum aestivum
  peptide (1)..(189): Ceres Seq. ID no. 12627140
  misc_feature (1)..(131): Homolog of NCBI NO: 15810345 NR Description: unknown protein [Arabidopsis thaliana]
  misc_feature (1)..(131): Homolog of NCBI NO: 30698266 NR Description: expressed protein [Arabidopsis thaliana]
  misc_feature (12)..(189): Homolog of NCBI NO: 9758143 NR Description: gene_id:MUD21.19~pir||T38383~similar to unknown
  misc_feature (1)..(188): Homolog of NCBI NO: 30698268 NR Description: expressed protein [Arabidopsis thaliana]
MNCETCHLNELELEPLEIKDVLRCILHTIFFHRTLTLVRPKDVDCDLFEITYVQCGLAELEKEVDEKINQFIAWAEKHPNRKSQVCLSFFDEKNKHPGWFSSKTERVYWEQWFINLHVTSPKGQGKSRGSKAPANTKGQALEETSSRRDALSLLIQEVLFQIINYANEKKDHIPPISDRIFNHEILVPR

SEQ ID NO: 64038 - DNA, 1540 bp, Triticum aestivum
  misc_feature (1)..(1540): Ceres Seq. ID no. 13597427
cctggaacatcctaatcgaaaacattccagtccaggacggcagcaggaaagggaagaaccaatcaaccgattccccctccccactccaccccgcgccgcagcgagagcgaactggtgcctgccttccactgccggccgcgtcgtcgtcgtcccttccttccctcaatccctccctcccgctgcgctcccgtccgagactgtgaacatgtcagatagtgcattgcaagatctcaacgctgcccaatcagttgtgctcgagaaaagcaaagacagttctgtggaaccctgcagttctaagcccgtgttaaacgggaacaaatgtgtcaagaaggaaggaaatgctgtacctgatgtgaccaatggatgtgatgctgtagttgtagatatcgagtatattgattctgagaatctcacagatcttccagatgttgacacaagcctgagtactttgcttgcaaggttggattcaaaggattggatcaagacatgtgaagctcttaataatgttcgtcagttggcgatatatcacaagcaaaggttgcaggagctgctggagcctctagttcctcttattgtgaaatctgttaagaatccaaggagtgctctatgcaaaaccgcacttatgacctgcgctgacatctttaaggcatacggtgaacaaatggtcgacttgattgatcagctgctaatgccgctatttctgaaatcttcacaagacaagcgctttgtttgtgaagcagctgaggcagcccttatgtcaatgacaagctggatctccccctctatattgttaccaaaaatgcagccctacctcaaaaacaggaatccacgaattcgagcaaaagcatctgtttgtttcagtaagagtgtaccacgccttggtctggagggaatcaaagaatacggaatggacaagctcattcaggtcgcagcaacccagctcagcgaccagcttcctgaatcaagggaggctgctcgtaacctttcattggagcttcaagcattctatgagaagtctcaagcctctggtttaggcgaagatgacagcgcacctgctatttcaccagaagctgaaacctgggaggctttctgcctatctaagctttctgctttaagcgcccaagcaatcctccgtgtcactgtgggtgtccctgttgccccaaaagaaggcggcatctctgctgctctgaaagaaggcggcatccctgctgccctgaaagaaggtggcatctctgttgtcgttgctccaaaagaaggtggcgcccctgttgctacgaaagaaggtgctgcggccgtgggctgctagcgttgggagttggccgacacaagcgatgttgcgatttttccacatccaattcacgtttttgctgtacatgatttatgggttgctcggtcggtaaatcgaatctccttttgctggagttcttcaggcttgagggcctggggtgggtgttaatattggtgcgagatatagtcccttatagttgactgtataatcctttggttccgtcactacttatcagtttggcattgattggcc

SEQ ID NO: 64039 - protein, 434 aa, Triticum aestivum
  peptide (1)..(434): Ceres Seq. ID no. 13597428
  misc_feature (115)..(328): Homolog of NCBI NO: 34865276 NR Description: similar to KIAA0423 [Rattus norvegicus]
  misc_feature (187)..(379): Homolog of NCBI NO: 7485173 NR Description: hypothetical protein - Arabidopsis thaliana
  misc_feature (69)..(304): Homolog of NCBI NO: 9294314 NR Description: gb|AAF24615.1~gene_id:K24M9.2~similar to unknown
  misc_feature (323)..(395): Homolog of NCBI NO: 15229670 NR Description: expressed protein [Arabidopsis thaliana]
  misc_feature (69)..(293): Homolog of NCBI NO: 15229670 NR Description: expressed protein [Arabidopsis thaliana]
  misc_feature (106)..(379): Homolog of NCBI NO: 18414533 NR Description: expressed protein [Arabidopsis thaliana]
  misc_feature (106)..(379): Homolog of NCBI NO: 21593517 NR Description: unknown [Arabidopsis thaliana]
  misc_feature (69)..(395): Homolog of NCBI NO: 21537265 NR Description: unknown [Arabidopsis thaliana]
  misc_feature (69)..(395): Homolog of NCBI NO: 18395821 NR Description: expressed protein [Arabidopsis thaliana]
  misc_feature (69)..(390): Homolog of NCBI NO: 15241493 NR Description: expressed protein [Arabidopsis thaliana]
LEHPNRKHSSPGRQQEREEPINRFPLPTPPRAAARANWCLPSTAGRVVVVPSFPQSLPPAALPSETVNMSDSALQDLNAAQSVVLEKSKDSSVEPCSSKPVLNGNKCVKKEGNAVPDVTNGCDAVVVDIEYIDSENLTDLPDVDTSLSTLLARLDSKDWIKTCEALNNVRQLAIYHKQRLQELLEPLVPLIVKSVKNPRSALCKTALMTCADIFKAYGEQMVDLIDQLLMPLFLKSSQDKRFVCEAAEAALMSMTSWISPSILLPKMQPYLKNRNPRIRAKASVCFSKSVPRLGLEGIKEYGMDKLIQVAATQLSDQLPESREAARNLSLELQAFYEKSQASGLGEDDSAPAISPEAETWEAFCLSKLSALSAQAILRVTVGVPVAPKEGGISAALKEGGIPAALKEGGISVVVAPKEGGAPVATKEGAAAVGC

SEQ ID NO: 64040 - protein, 366 aa, Triticum aestivum
  peptide (1)..(366): Ceres Seq. ID no. 13597429
  misc_feature (47)..(260): Homolog of NCBI NO: 34865276 NR Description: similar to KIAA0423 [Rattus norvegicus]
  misc_feature (119)..(311): Homolog of NCBI NO: 7485173 NR Description: hypothetical protein - Arabidopsis thaliana
  misc_feature (1)..(236): Homolog of NCBI NO: 9294314 NR Description: gb|AAF24615.1~gene_id:K24M9.2~similar to unknown
  misc_feature (255)..(327): Homolog of NCBI NO: 15229670 NR Description: expressed protein [Arabidopsis thaliana]
  misc_feature (1)..(225): Homolog of NCBI NO: 15229670 NR Description: expressed protein [Arabidopsis thaliana]
  misc_feature (38)..(311): Homolog of NCBI NO: 18414533 NR Description: expressed protein [Arabidopsis thaliana]
  misc_feature (38)..(311): Homolog of NCBI NO: 21593517 NR Description: unknown [Arabidopsis thaliana]
  misc_feature (1)..(327): Homolog of NCBI NO: 21537265 NR Description: unknown [Arabidopsis thaliana]
  misc_feature (1)..(327): Homolog of NCBI NO: 18395821 NR Description: expressed protein [Arabidopsis thaliana]
  misc_feature (1)..(322): Homolog of NCBI NO: 15241493 NR Description: expressed protein [Arabidopsis thaliana]
MSDSALQDLNAAQSVVLEKSKDSSVEPCSSKPVLNGNKCVKKEGNAVPDVTNGCDAVVVDIEYIDSENLTDLPDVDTSLSTLLARLDSKDWIKTCEALNNVRQLAIYHKQRLQELLEPLVPLIVKSVKNPRSALCKTALMTCADIFKAYGEQMVDLIDQLLMPLFLKSSQDKRFVCEAAEAALMSMTSWISPSILLPKMQPYLKNRNPRIRAKASVCFSKSVPRLGLEGIKEYGMDKLIQVAATQLSDQLPESREAARNLSLELQAFYEKSQASGLGEDDSAPAISPEAETWEAFCLSKLSALSAQAILRVTVGVPVAPKEGGISAALKEGGIPAALKEGGISVVVAPKEGGAPVATKEGAAAVGC

SEQ ID NO: 64041 - protein, 227 aa, Triticum aestivum
  peptide (1)..(227): Ceres Seq. ID no. 13597430
  misc_feature (1)..(121): Homolog of NCBI NO: 34865276 NR Description: similar to KIAA0423 [Rattus norvegicus]
  misc_feature (1)..(172): Homolog of NCBI NO: 7485173 NR Description: hypothetical protein - Arabidopsis thaliana
  misc_feature (1)..(97): Homolog of NCBI NO: 9294314 NR Description: gb|AAF24615.1~gene_id:K24M9.2~similar to unknown
  misc_feature (116)..(188): Homolog of NCBI NO: 15229670 NR Description: expressed protein [Arabidopsis thaliana]
  misc_feature (1)..(86): Homolog of NCBI NO: 15229670 NR Description: expressed protein [Arabidopsis thaliana]
  misc_feature (1)..(172): Homolog of NCBI NO: 18414533 NR Description: expressed protein [Arabidopsis thaliana]
  misc_feature (1)..(172): Homolog of NCBI NO: 21593517 NR Description: unknown [Arabidopsis thaliana]
  misc_feature (1)..(188): Homolog of NCBI NO: 21537265 NR Description: unknown [Arabidopsis thaliana]
  misc_feature (1)..(188): Homolog of NCBI NO: 18395821 NR Description: expressed protein [Arabidopsis thaliana]
  misc_feature (1)..(183): Homolog of NCBI NO: 15241493 NR Description: expressed protein [Arabidopsis thaliana]
MTCADIFKAYGEQMVDLIDQLLMPLFLKSSQDKRFVCEAAEAALMSMTSWISPSILLPKMQPYLKNRNPRIRAKASVCFSKSVPRLGLEGIKEYGMDKLIQVAATQLSDQLPESREAARNLSLELQAFYEKSQASGLGEDDSAPAISPEAETWEAFCLSKLSALSAQAILRVTVGVPVAPKEGGISAALKEGGIPAALKEGGISVVVAPKEGGAPVATKEGAAAVGC

SEQ ID NO: 64042 - DNA, 1299 bp, Triticum aestivum
  misc_feature (1)..(1299): Ceres Seq. ID no. 15226458
attaacactacccgcctcaagctaggcactagctccgatgagtagctgcttcaacggtggcgccggctggccggagcccgtggtgcgcgtgcaggccgtgtcggacacctgcggcgagacaatacctgagtggtacgtcaagctgccgttggatcggccgtcggcgacgaccctccaaccggcggtctcacatgggggcggcagcctaaacatcccggtagtggacatgtcaatgccggactcgggcgagacagtccgtgccgtggacgcggcgtgccgggagtgggggttcttccaggcggtgaaccacggcgtgagccctgagctgctgcggcgggcgcgctcgtcgtggcgcggcttcttcaggcagccagccgaggtgcgcgagcggtacgccaactcgccggcgacgtacgagggctacggcagccgtctcggtaccaccaagggtgggcacctcgactggggcgactactatttcttgcacctcctcccgccgtcgatcaagagccacgacaagtggccgtcccttccgtccaccctacgggacgcgacggaggagtacggcgaggaggtggtgaagctgtgccggagggtatcaaaggtgctgtccaaggggctgggactcgacggcgggaggctgcaggcagcgttcggcggggagggcggcgagggggcatgcatgagggttaacttctacccgaggtgcccgcagccggagctgacgctgggcgtggcggcgcactccgaccccggcggcatgaccatgctgctcgtcgacgaccacgttcgggggctgcaggtgctgagcaacgcggcgtacaagagcgtggagcaccgggtgacggtgagcgcagcggaggagcggctatcgctcgccttcttctacaacccgcggagcgacgtgcccgtggcgcccatggcggagctggtggcgccgggacgcccggcgctgtacccggagatgaccttcgacgagtaccgggcccacatccggcagcgcggcctcagcggcaaggcgcagctacagtctctgcagaacgccaacaacagcgtcgcctcctgacactaggcacggccagccggccggccgggcggcctgctactcccttgtcctgtgcatgcgcaccactccattgtatgcgtggccggtgaagacgtgcatatgtatgtataatagacgtttccgctaataaatatacacggaatagtctcgtacgtatgccattcatgttaacttgatcagtttgtttaccctatatgacgtatataattaaggagactgctcattcgttatgc

SEQ ID NO: 64043 - protein, 342 aa, Triticum aestivum
  peptide (1)..(342): Ceres Seq. ID no. 15226459
  misc_feature (254)..(333): Homolog of NCBI NO: 15224472 NR Description: oxidoreductase, 2OG-Fe(II) oxygenase family
  misc_feature (11)..(276): Homolog of NCBI NO: 15224472 NR Description: oxidoreductase, 2OG-Fe(II) oxygenase family
  misc_feature (254)..(332): Homolog of NCBI NO: 21537324 NR Description: leucoanthocyanidin dioxygenase-like protein
  misc_feature (11)..(266): Homolog of NCBI NO: 21537324 NR Description: leucoanthocyanidin dioxygenase-like protein
  misc_feature (254)..(332): Homolog of NCBI NO: 15239179 NR Description: oxidoreductase, 2OG-Fe(II) oxygenase family
  misc_feature (11)..(266): Homolog of NCBI NO: 15239179 NR Description: oxidoreductase, 2OG-Fe(II) oxygenase family
  misc_feature (254)..(332): Homolog of NCBI NO: 15229694 NR Description: oxidoreductase, 2OG-Fe(II) oxygenase family
  misc_feature (8)..(256): Homolog of NCBI NO: 15229694 NR Description: oxidoreductase, 2OG-Fe(II) oxygenase family
  misc_feature (254)..(334): Homolog of NCBI NO: 34907994 NR Description: leucoanthocyanidin dioxygenase-like protein
  misc_feature (11)..(256): Homolog of NCBI NO: 34907994 NR Description: leucoanthocyanidin dioxygenase-like protein
MSSCFNGGAGWPEPVVRVQAVSDTCGETIPEWYVKLPLDRPSATTLQPAVSHGGGSLNIPVVDMSMPDSGETVRAVDAACREWGFFQAVNHGVSPELLRRARSSWRGFFRQPAEVRERYANSPATYEGYGSRLGTTKGGHLDWGDYYFLHLLPPSIKSHDKWPSLPSTLRDATEEYGEEVVKLCRRVSKVLSKGLGLDGGRLQAAFGGEGGEGACMRVNFYPRCPQPELTLGVAAHSDPGGMTMLLVDDHVRGLQVLSNAAYKSVEHRVTVSAAEERLSLAFFYNPRSDVPVAPMAELVAPGRPALYPEMTFDEYRAHIRQRGLSGKAQLQSLQNANNSVAS

SEQ ID NO: 64044 - protein, 279 aa, Triticum aestivum
  peptide (1)..(279): Ceres Seq. ID no. 15226460
  misc_feature (191)..(270): Homolog of NCBI NO: 15224472 NR Description: oxidoreductase, 2OG-Fe(II) oxygenase family
  misc_feature (1)..(213): Homolog of NCBI NO: 15224472 NR Description: oxidoreductase, 2OG-Fe(II) oxygenase family
  misc_feature (191)..(269): Homolog of NCBI NO: 21537324 NR Description: leucoanthocyanidin dioxygenase-like protein
  misc_feature (1)..(203): Homolog of NCBI NO: 21537324 NR Description: leucoanthocyanidin dioxygenase-like protein
  misc_feature (191)..(269): Homolog of NCBI NO: 15239179 NR Description: oxidoreductase, 2OG-Fe(II) oxygenase family
  misc_feature (1)..(203): Homolog of NCBI NO: 15239179 NR Description: oxidoreductase, 2OG-Fe(II) oxygenase family
  misc_feature (191)..(269): Homolog of NCBI NO: 15229694 NR Description: oxidoreductase, 2OG-Fe(II) oxygenase family
  misc_feature (1)..(193): Homolog of NCBI NO: 15229694 NR Description: oxidoreductase, 2OG-Fe(II) oxygenase family
  misc_feature (191)..(271): Homolog of NCBI NO: 34907994 NR Description: leucoanthocyanidin dioxygenase-like protein
  misc_feature (1)..(193): Homolog of NCBI NO: 34907994 NR Description: leucoanthocyanidin dioxygenase-like protein
MSMPDSGETVRAVDAACREWGFFQAVNHGVSPELLRRARSSWRGFFRQPAEVRERYANSPATYEGYGSRLGTTKGGHLDWGDYYFLHLLPPSIKSHDKWPSLPSTLRDATEEYGEEVVKLCRRVSKVLSKGLGLDGGRLQAAFGGEGGEGACMRVNFYPRCPQPELTLGVAAHSDPGGMTMLLVDDHVRGLQVLSNAAYKSVEHRVTVSAAEERLSLAFFYNPRSDVPVAPMAELVAPGRPALYPEMTFDEYRAHIRQRGLSGKAQLQSLQNANNSVAS

SEQ ID NO: 64045 - protein, 277 aa, Triticum aestivum
  peptide (1)..(277): Ceres Seq. ID no. 15226461
  misc_feature (189)..(268): Homolog of NCBI NO: 15224472 NR Description: oxidoreductase, 2OG-Fe(II) oxygenase family
  misc_feature (1)..(211): Homolog of NCBI NO: 15224472 NR Description: oxidoreductase, 2OG-Fe(II) oxygenase family
  misc_feature (189)..(267): Homolog of NCBI NO: 21537324 NR Description: leucoanthocyanidin dioxygenase-like protein
  misc_feature (1)..(201): Homolog of NCBI NO: 21537324 NR Description: leucoanthocyanidin dioxygenase-like protein
  misc_feature (189)..(267): Homolog of NCBI NO: 15239179 NR Description: oxidoreductase, 2OG-Fe(II) oxygenase family
  misc_feature (1)..(201): Homolog of NCBI NO: 15239179 NR Description: oxidoreductase, 2OG-Fe(II) oxygenase family
  misc_feature (189)..(267): Homolog of NCBI NO: 15229694 NR Description: oxidoreductase, 2OG-Fe(II) oxygenase family
  misc_feature (1)..(191): Homolog of NCBI NO: 15229694 NR Description: oxidoreductase, 2OG-Fe(II) oxygenase family
  misc_feature (189)..(269): Homolog of NCBI NO: 34907994 NR Description: leucoanthocyanidin dioxygenase-like protein
  misc_feature (1)..(191): Homolog of NCBI NO: 34907994 NR Description: leucoanthocyanidin dioxygenase-like protein
MPDSGETVRAVDAACREWGFFQAVNHGVSPELLRRARSSWRGFFRQPAEVRERYANSPATYEGYGSRLGTTKGGHLDWGDYYFLHLLPPSIKSHDKWPSLPSTLRDATEEYGEEVVKLCRRVSKVLSKGLGLDGGRLQAAFGGEGGEGACMRVNFYPRCPQPELTLGVAAHSDPGGMTMLLVDDHVRGLQVLSNAAYKSVEHRVTVSAAEERLSLAFFYNPRSDVPVAPMAELVAPGRPALYPEMTFDEYRAHIRQRGLSGKAQLQSLQNANNSVAS

SEQ ID NO: 64046 - DNA, 1016 bp, Triticum aestivum
  misc_feature (1)..(1016): Ceres Seq. ID no. 15173174
aaatgcagaaacaccacacgatctggaaaaaaaaaatcgacagaacatgtcgtcggagaaacaggagacggcggcggtgcgcgtgctgggcaggtggccgagcccgttcgtgatccgggtgctgatagttcttgggctcaagggcgtggaccacgagctcgtggaggaggccgtgggcaacaagagcgagctgctgctcgcctccaaccccgtgcacaagatgatccccgtgctcctgcaccacggcaggcccgtctccgagtccctcatcatcgtccagtacgtcgacgaggcctgggcctcccacgccccggcgctcctcccgtccgacccctacgcccgggcggccgagcggttctgggcccactacgtcgacgacaaggtaaaaggattaggcaatccagttttgattttcgctttgaacttctcagttctcagcgacaaaatgatagcctacgcagtttcccctgaacaaacgtgtgctgactgctcaatggatacgtagtttcctactgcgatccgggtcctgaggggaaggctggacggagacaaggacgaagcggcggctcaggtgtgcgctgctctgcagcgcctggaggtggccttcgtcgagtgcggccaagggaaggattacttcggcggcgacaacgtcggttacctggacattgctctggggtcgcacctcggatgggtcagggcggtagagaggatcgctgaaatcaggctgctcgacgcggccaaggttcctaagctggcggcgtgggcggatcggttctgcgcccacccagcggtggcggacgccatgcctgacgtggacaggttcgtggagttcagcctcaagaatgacggcgctctgaaggcggctagtgctaattccaagtgaacgaactgttgtggacactagacagtgctcgatggcatcacatagcggttagtgctaattctaatgatgcaaatggaataacataatatgttaccatagtagttcttaatgtataatgagtctacaaagtaac

SEQ ID NO: 64047 - protein, 167 aa, Triticum aestivum
  peptide (1)..(167): Ceres Seq. ID no. 15173175
  misc_feature (26)..(97): Pfam Name: Glutathione S-transferase, N-terminal domain Pfam Description: Glutathione S-transferase, N-terminal domain
  misc_feature (13)..(127): Homolog of NCBI NO: 6856103 NR Description: glutathione S-transferase [Gossypium hirsutum]
  misc_feature (26)..(127): Homolog of NCBI NO: 37536350 NR Description: putative glutathione S-transferase
  misc_feature (26)..(128): Homolog of NCBI NO: 11385525 NR Description: glutathione S-transferase GST 37 [Zea mays]
  misc_feature (152)..(167): Homolog of NCBI NO: 11385525 NR Description: glutathione S-transferase GST 37 [Zea mays]
  misc_feature (17)..(127): Homolog of NCBI NO: 37536248 NR Description: putative glutathione S-transferase
  misc_feature (145)..(167): Homolog of NCBI NO: 37536248 NR Description: putative glutathione S-transferase
  misc_feature (17)..(128): Homolog of NCBI NO: 37536246 NR Description: putative glutathione S-transferase
  misc_feature (24)..(128): Homolog of NCBI NO: 11385513 NR Description: glutathione S-transferase GST 31 [Zea mays]
  misc_feature (24)..(128): Homolog of NCBI NO: 11385519 NR Description: glutathione S-transferase GST 34 [Zea mays]
  misc_feature (152)..(167): Homolog of NCBI NO: 11385519 NR Description: glutathione S-transferase GST 34 [Zea mays]
NAETPHDLEKKNRQNMSSEKQETAAVRVLGRWPSPFVIRVLIVLGLKGVDHELVEEAVGNKSELLLASNPVHKMIPVLLHHGRPVSESLIIVQYVDEAWASHAPALLPSDPYARAAERFWAHYVDDKVKGLGNPVLIFALNFSVLSDKMIAYAVSPEQTCADCSMDT

SEQ ID NO: 64048 - protein, 156 aa, Triticum aestivum
  peptide (1)..(156): Ceres Seq. ID no. 15173176
KCRNTTRSGKKKSTEHVVGETGDGGGARAGQVAEPVRDPGADSSWAQGRGPRARGGGRGQQERAAARLQPRAQDDPRAPAPRQARLRVPHHRPVRRRGLGLPRPGAPPVRPLRPGGRAVLGPLRRRQGKRIRQSSFDFRFELLSSQRQNDSLRSFP

SEQ ID NO: 64049 - protein, 152 aa, Triticum aestivum
  peptide (1)..(152): Ceres Seq. ID no. 15173177
  misc_feature (11)..(82): Pfam Name: Glutathione S-transferase, N-terminal domain Pfam Description: Glutathione S-transferase, N-terminal domain
  misc_feature (1)..(112): Homolog of NCBI NO: 6856103 NR Description: glutathione S-transferase [Gossypium hirsutum]
  misc_feature (11)..(112): Homolog of NCBI NO: 37536350 NR Description: putative glutathione S-transferase
  misc_feature (11)..(113): Homolog of NCBI NO: 11385525 NR Description: glutathione S-transferase GST 37 [Zea mays]
  misc_feature (137)..(152): Homolog of NCBI NO: 11385525 NR Description: glutathione S-transferase GST 37 [Zea mays]
  misc_feature (2)..(112): Homolog of NCBI NO: 37536248 NR Description: putative glutathione S-transferase
  misc_feature (130)..(152): Homolog of NCBI NO: 37536248 NR Description: putative glutathione S-transferase
  misc_feature (2)..(113): Homolog of NCBI NO: 37536246 NR Description: putative glutathione S-transferase
  misc_feature (9)..(113): Homolog of NCBI NO: 11385513 NR Description: glutathione S-transferase GST 31 [Zea mays]
  misc_feature (9)..(113): Homolog of NCBI NO: 11385519 NR Description: glutathione S-transferase GST 34 [Zea mays]
  misc_feature (137)..(152): Homolog of NCBI NO: 11385519 NR Description: glutathione S-transferase GST 34 [Zea mays]
MSSEKQETAAVRVLGRWPSPFVIRVLIVLGLKGVDHELVEEAVGNKSELLLASNPVHKMIPVLLHHGRPVSESLIIVQYVDEAWASHAPALLPSDPYARAAERFWAHYVDDKVKGLGNPVLIFALNFSVLSDKMIAYAVSPEQTCADCSMDT

SEQ ID NO: 64050 - DNA, 1497 bp, Triticum aestivum
  misc_feature (1)..(1497): Ceres Seq. ID no. 12617368
ccccaatccccaaatcctccatggacgaacacgccggcggccgccgccgcgccgatccgcctccgtggtctcccccgcttcagcttcccccagacgacatgctcctggagatcctcctccgcctcccgccggagcccatccacctgttccgcgcctccttcgtctccaagcactggcgcggcctcgtccacgacgcccgcttccgccgccgcttccgcgagttccacggggggacgcctcccatgctcggcttcttcaacagctgcccaggggctcccatcttcgtccccacctccggcggcttcgcgctctccaccgccaacatgtccctcgattggcgggccctcgattgccgccacggccgcgccctcctgcacaactacggtaccaggacgctcctcgtctgggaccccatgaccggcgacgagcgctacctaccgttccccacgcgagcccatctggagaacgtccattacaatggcgcggttctctgcgcggctggccacacgggccacggggactgccattcctgcccgttcctcgtggcattcgtgttcagcagctacagatattgcatcacctctgcctgcgtctactcgtccgtgaccggcgtctggggtgagatcacttcgattcatacaccagattcattagttgatgcaaagccgacagctctggttggaaacacactctactgcctgttgagtaatgaggatagcatcattgagtttaatttggataagaatagcttggatttaattgaggttccatacggcggaaattttatcatcacactggcacaggatggtcccctaggtttcgccagtgttgatcgattcagcctacatttgtggtcaagggtagctagcatcgatggggtggcatcatgggaacatatcagggtcattgatctggagaagctttttgcgccacaagtattggcagcgtgtatggatcgaatgtggcctgttggctatgctgaagatgcgaatgtgatcttcattcatgtgtatcctcgcacctacatgatccatctcaagtccatgcagattgaggggattttagaggaagcaactggctggtccatttttccttatgcaagtttctacactccaggaccaggaatcaccactggtggtggagatgatcaagttgaactgttaaatggcacttgagatgattgggctttcacatcttctgtcatgcttttttggcctaagaggtacctaggattattggttgccgtgatcctgcaactacatgcagaaacaatttactcatgctggttcttcagtattttgtaaacgtcgacagctcaatgtggctgtaaagaaattcgtacaagttgccgaatgtggtgctaatcttacaaaatgtgctgaattttgaatgttatctttgccaattactatatgtggtaacaaaccggcagcacttggtaaaaattatttcatacttctgaatattgctgttgagaatatgacatttgtttggccc

SEQ ID NO: 64051 - protein, 390 aa, Triticum aestivum
  peptide (1)..(390): Ceres Seq. ID no. 12617369
  misc_feature (23)..(72): Pfam Name: F-box domain Pfam Description: F-box domain
  misc_feature (31)..(370): Homolog of NCBI NO: 34915424 NR Description: hypothetical protein~similar to Oryza sativa
  misc_feature (31)..(370): Homolog of NCBI NO: 33146558 NR Description: unknown protein [Oryza sativa (japonica
  misc_feature (23)..(385): Homolog of NCBI NO: 34394503 NR Description: unknown protein [Oryza sativa (japonica
  misc_feature (31)..(372): Homolog of NCBI NO: 34394504 NR Description: unknown protein [Oryza sativa (japonica
  misc_feature (323)..(370): Homolog of NCBI NO: 34915428 NR Description: hypothetical protein~similar to Oryza sativa
  misc_feature (31)..(274): Homolog of NCBI NO: 34915428 NR Description: hypothetical protein~similar to Oryza sativa
  misc_feature (218)..(374): Homolog of NCBI NO: 34395380 NR Description: unknown protein [Oryza sativa (japonica
  misc_feature (28)..(205): Homolog of NCBI NO: 34395380 NR Description: unknown protein [Oryza sativa (japonica
  misc_feature (30)..(371): Homolog of NCBI NO: 37531026 NR Description: hypothetical protein [Oryza sativa (japonica
  misc_feature (31)..(370): Homolog of NCBI NO: 34915420 NR Description: contains EST C98814(E3124)~similar to Oryza
PIPKSSMDEHAGGRRRADPPPWSPPLQLPPDDMLLEILLRLPPEPIHLFRASFVSKHWRGLVHDARFRRRFREFHGGTPPMLGFFNSCPGAPIFVPTSGGFALSTANMSLDWRALDCRHGRALLHNYGTRTLLVWDPMTGDERYLPFPTRAHLENVHYNGAVLCAAGHTGHGDCHSCPFLVAFVFSSYRYCITSACVYSSVTGVWGEITSIHTPDSLVDAKPTALVGNTLYCLLSNEDSIIEFNLDKNSLDLIEVPYGGNFIITLAQDGPLGFASVDRFSLHLWSRVASIDGVASWEHIRVIDLEKLFAPQVLAACMDRMWPVGYAEDANVIFIHVYPRTYMIHLKSMQIEGILEEATGWSIFPYASFYTPGPGITTGGGDDQVELLNGT

SEQ ID NO: 64052 - protein, 384 aa, Triticum aestivum
  peptide (1)..(384): Ceres Seq. ID no. 12617370
  misc_feature (17)..(66): Pfam Name: F-box domain Pfam Description: F-box domain
  misc_feature (25)..(364): Homolog of NCBI NO: 34915424 NR Description: hypothetical protein~similar to Oryza sativa
  misc_feature (25)..(364): Homolog of NCBI NO: 33146558 NR Description: unknown protein [Oryza sativa (japonica
  misc_feature (17)..(379): Homolog of NCBI NO: 34394503 NR Description: unknown protein [Oryza sativa (japonica
  misc_feature (25)..(366): Homolog of NCBI NO: 34394504 NR Description: unknown protein [Oryza sativa (japonica
  misc_feature (317)..(364): Homolog of NCBI NO: 34915428 NR Description: hypothetical protein~similar to Oryza sativa
  misc_feature (25)..(268): Homolog of NCBI NO: 34915428 NR Description: hypothetical protein~similar to Oryza sativa
  misc_feature (212)..(368): Homolog of NCBI NO: 34395380 NR Description: unknown protein [Oryza sativa (japonica
  misc_feature (22)..(199): Homolog of NCBI NO: 34395380 NR Description: unknown protein [Oryza sativa (japonica
  misc_feature (24)..(365): Homolog of NCBI NO: 37531026 NR Description: hypothetical protein [Oryza sativa (japonica
  misc_feature (25)..(364): Homolog of NCBI NO: 34915420 NR Description: contains EST C98814(E3124)~similar to Oryza
MDEHAGGRRRADPPPWSPPLQLPPDDMLLEILLRLPPEPIHLFRASFVSKHWRGLVHDARFRRRFREFHGGTPPMLGFFNSCPGAPIFVPTSGGFALSTANMSLDWRALDCRHGRALLHNYGTRTLLVWDPMTGDERYLPFPTRAHLENVHYNGAVLCAAGHTGHGDCHSCPFLVAFVFSSYRYCITSACVYSSVTGVWGEITSIHTPDSLVDAKPTALVGNTLYCLLSNEDSIIEFNLDKNSLDLIEVPYGGNFIITLAQDGPLGFASVDRFSLHLWSRVASIDGVASWEHIRVIDLEKLFAPQVLAACMDRMWPVGYAEDANVIFIHVYPRTYMIHLKSMQIEGILEEATGWSIFPYASFYTPGPGITTGGGDDQVELLNGT

SEQ ID NO: 64053 - protein, 358 aa, Triticum aestivum
  peptide (1)..(358): Ceres Seq. ID no. 12617371
  misc_feature (1)..(40): Pfam Name: F-box domain Pfam Description: F-box domain
  misc_feature (1)..(338): Homolog of NCBI NO: 34915424 NR Description: hypothetical protein~similar to Oryza sativa
  misc_feature (1)..(338): Homolog of NCBI NO: 33146558 NR Description: unknown protein [Oryza sativa (japonica
  misc_feature (1)..(353): Homolog of NCBI NO: 34394503 NR Description: unknown protein [Oryza sativa (japonica
  misc_feature (1)..(340): Homolog of NCBI NO: 34394504 NR Description: unknown protein [Oryza sativa (japonica
  misc_feature (291)..(338): Homolog of NCBI NO: 34915428 NR Description: hypothetical protein~similar to Oryza sativa
  misc_feature (1)..(242): Homolog of NCBI NO: 34915428 NR Description: hypothetical protein~similar to Oryza sativa
  misc_feature (186)..(342): Homolog of NCBI NO: 34395380 NR Description: unknown protein [Oryza sativa (japonica
  misc_feature (1)..(173): Homolog of NCBI NO: 34395380 NR Description: unknown protein [Oryza sativa (japonica
  misc_feature (1)..(339): Homolog of NCBI NO: 37531026 NR Description: hypothetical protein [Oryza sativa (japonica
  misc_feature (1)..(338): Homolog of NCBI NO: 34915420 NR Description: contains EST C98814(E3124)~similar to Oryza
MLLEILLRLPPEPIHLFRASFVSKHWRGLVHDARFRRRFREFHGGTPPMLGFFNSCPGAPIFVPTSGGFALSTANMSLDWRALDCRHGRALLHNYGTRTLLVWDPMTGDERYLPFPTRAHLENVHYNGAVLCAAGHTGHGDCHSCPFLVAFVFSSYRYCITSACVYSSVTGVWGEITSIHTPDSLVDAKPTALVGNTLYCLLSNEDSIIEFNLDKNSLDLIEVPYGGNFIITLAQDGPLGFASVDRFSLHLWSRVASIDGVASWEHIRVIDLEKLFAPQVLAACMDRMWPVGYAEDANVIFIHVYPRTYMIHLKSMQIEGILEEATGWSIFPYASFYTPGPGITTGGGDDQVELLNGT

SEQ ID NO: 64054 - DNA, 1430 bp, Triticum aestivum
  misc_feature (1)..(1430): Ceres Seq. ID no. 13597380
agatcgtgcgcttctcctcacaagataatcacagactcgatcaagagcttgtcttggttctgcaatgggggtgaggtgcctgctgctcctggctgtgctcctcttggctggggatcatggcggggaggcgcagccgctcgtgcccggggtcttcacgttcggcgactcgtcggtggatataggtaacaacgactacctccacaccctcatcaaggcggacttccctccctacggcagggacttccccaaccgcgtggccaccgggaggttttgcaacggcaagctggccaccgacatcactgctgatacactggggttcacgagctacccgcccgcgtatctcagcccgcaggcgtcagggaagaaccttctgatcggcgtcaacttcgcatctgctggatcaggctactacgatcacaccgcgcttatgtatcatgccgtccctttctcccaacaactggagtacttcagggagtaccaatccaagctgacggcgttcgctgggagcagccaggccaagtccatcatcagtggctcattgtacatcgtcagcttcggtgcaagtgactttgtgcagaactactacatcaaccctctgctcttcaagacccagaccgtcgaccagttctcggaccggctcgtcagcatcttcgtcaacagcgcgacgcaactttacggcatgggagcgcggcgcatcgcggtgaccacgctgccgcccctgggctgcctccccgcggcgatcacgctgttcgggcacgggagtaccggttgcgtgtcgaggctcaacagcgactcccagcggttcaacgggaagatgagcgcggccgtcagctcgctgtcgaagcggtaccacgacctcaagatcgccgtctttgacatctacacgccgctcttcagcctcgtcacctctcctggagatcaagggttcacggaggcgaagcggggatgctgcgggacgggaaaggtggagttcacggtgttcctctgcaaccccaagtcggtggggacgtgctcgaacgcgtcaacctacgtgttctgggacgccgtccacccgtcggaggcggccaaccaagtgatcgccgacgccctcctcgtcactggcatcgacctcgtcacataatgaaccacgcactggtcggctaacgtcgtcggtcggaggacgacgatggcacacgcttttcaggcgtcctgaagggaaaataatgtgtgcccagagctcccgtgccaagcgtgtcgttgtggcgggaggggttactttctcgggctgtgccactcaccatatcgccagcgtttgtagctagggactgggacacatggaaacatggtttatacgtacgaaaagctcgaagttatgggtgcaagcactggatcttttcttcttttttctttcattcatgtccttcaaatttgatgataactgtgtttttttc

SEQ ID NO: 64055 - protein, 351 aa, Triticum aestivum
  peptide (1)..(351): Ceres Seq. ID no. 13597381
  misc_feature (29)..(342): Pfam Name: GDSL-like Lipase/Acylhydrolase Pfam Description: GDSL-like Lipase/Acylhydrolase
  misc_feature (2)..(288): Homolog of NCBI NO: 11280580 NR Description: hypothetical protein T4D2.30 - Arabidopsis
  misc_feature (2)..(350): Homolog of NCBI NO: 30693763 NR Description: GDSL-motif lipase/hydrolase protein [Arabidopsis
  misc_feature (33)..(351): Homolog of NCBI NO: 15237528 NR Description: GDSL-motif lipase/hydrolase protein [Arabidopsis
  misc_feature (5)..(351): Homolog of NCBI NO: 9758010 NR Description: proline-rich protein APG-like [Arabidopsis
  misc_feature (20)..(351): Homolog of NCBI NO: 15237531 NR Description: GDSL-motif lipase/hydrolase protein [Arabidopsis
  misc_feature (21)..(351): Homolog of NCBI NO: 15237137 NR Description: lipase, putative [Arabidopsis thaliana]
  misc_feature (1)..(351): Homolog of NCBI NO: 13174242 NR Description: putative proline-rich protein [Oryza sativa]
  misc_feature (6)..(350): Homolog of NCBI NO: 10638955 NR Description: putative proline-rich protein APG isolog [Cicer
  misc_feature (31)..(350): Homolog of NCBI NO: 2062167 NR Description: Proline-rich protein APG isolog [Arabidopsis
  misc_feature (6)..(350): Homolog of NCBI NO: 15228189 NR Description: GDSL-motif lipase/hydrolase protein [Arabidopsis
MGVRCLLLLAVLLLAGDHGGEAQPLVPGVFTFGDSSVDIGNNDYLHTLIKADFPPYGRDFPNRVATGRFCNGKLATDITADTLGFTSYPPAYLSPQASGKNLLIGVNFASAGSGYYDHTALMYHAVPFSQQLEYFREYQSKLTAFAGSSQAKSIISGSLYIVSFGASDFVQNYYINPLLFKTQTVDQFSDRLVSIFVNSATQLYGMGARRIAVTTLPPLGCLPAAITLFGHGSTGCVSRLNSDSQRFNGKMSAAVSSLSKRYHDLKIAVFDIYTPLFSLVTSPGDQGFTEAKRGCCGTGKVEFTVFLCNPKSVGTCSNASTYVFWDAVHPSEAANQVIADALLVTGIDLVT

SEQ ID NO: 64056 - protein, 230 aa, Triticum aestivum
  peptide (1)..(230): Ceres Seq. ID no. 13597382
  misc_feature (1)..(221): Pfam Name: GDSL-like Lipase/Acylhydrolase Pfam Description: GDSL-like Lipase/Acylhydrolase
  misc_feature (1)..(167): Homolog of NCBI NO: 11280580 NR Description: hypothetical protein T4D2.30 - Arabidopsis
  misc_feature (1)..(229): Homolog of NCBI NO: 30693763 NR Description: GDSL-motif lipase/hydrolase protein [Arabidopsis
  misc_feature (1)..(230): Homolog of NCBI NO: 15237528 NR Description: GDSL-motif lipase/hydrolase protein [Arabidopsis
  misc_feature (1)..(230): Homolog of NCBI NO: 9758010 NR Description: proline-rich protein APG-like [Arabidopsis
  misc_feature (1)..(230): Homolog of NCBI NO: 15237531 NR Description: GDSL-motif lipase/hydrolase protein [Arabidopsis
  misc_feature (1)..(230): Homolog of NCBI NO: 15237137 NR Description: lipase, putative [Arabidopsis thaliana]
  misc_feature (1)..(230): Homolog of NCBI NO: 13174242 NR Description: putative proline-rich protein [Oryza sativa]
  misc_feature (1)..(229): Homolog of NCBI NO: 10638955 NR Description: putative proline-rich protein APG isolog [Cicer
  misc_feature (1)..(229): Homolog of NCBI NO: 2062167 NR Description: Proline-rich protein APG isolog [Arabidopsis
  misc_feature (1)..(229): Homolog of NCBI NO: 15228189 NR Description: GDSL-motif lipase/hydrolase protein [Arabidopsis
MYHAVPFSQQLEYFREYQSKLTAFAGSSQAKSIISGSLYIVSFGASDFVQNYYINPLLFKTQTVDQFSDRLVSIFVNSATQLYGMGARRIAVTTLPPLGCLPAAITLFGHGSTGCVSRLNSDSQRFNGKMSAAVSSLSKRYHDLKIAVFDIYTPLFSLVTSPGDQGFTEAKRGCCGTGKVEFTVFLCNPKSVGTCSNASTYVFWDAVHPSEAANQVIADALLVTGIDLVT

SEQ ID NO: 64057 - DNA, 1302 bp, Triticum aestivum
  misc_feature (1)..(1302): Ceres Seq. ID no. 12616772
acaacagccaacaatggcggactctccctccttccgccgccacccgctccccttctcgatcgacatcgtccgctggctcccgtcctccgcctcctccggccgccacctcgcggcggccgtccacgacccctccgtgcccgcctcctcgcgcctcagcctcctaccgctccacgaccccgcctccccgctcgcctccctcccgctcccctcccggcccacggccctccgctgctccccttccgtcctcgccgccgccacctcctccggctccctccacctcctcccctcctccttcgacaccgactcggcggtgtccgtccccggcggcgcggggttccatgtggggcccgtgcgcgggctcgactgcggcggcgaggggtgggtgacggcgggggaggacgggagggtgcacgtggtgtcggacggcgacggcagggtggtggccaggagggtgtgggatgggaagggcatgtcagggtacggggcggcgagatgggcctcgtcggcggagttcgccaccggcggcgccggctgcggcgtgcagtggtgggaccgcaggaaaggggacgccgtggtggcgcagtgcaagggcgtctggggtcatggtgtcgccaccggcatggtgcactccattgatatacatccatcaagaaagcatgtctgtgtggtgggaggctcctcaggaacaatatttgcttgggacctacgctgggcacagcagccaataccactctctggtgtaggccttgacgaaacggcacaacccgtgtgcgagagtgaggtctgggaggttctttttgacaactacacacagtcttctgatattatctcgtctgtctcaacaagaatattacctgtgatgctgtgctcagaggatggaatccttgcaatcgtcgaacaagatgagaggcctcttgaattgcttgccgagccctgtgctatcaactcctttgatatcgatcctcagaacccttctgatgtcgtctgtgccctggaatgggaatcgattggtgtgcttacacgtggaagagatgcaatggcagaggaatgaatgcattcactccccaacaattctattgaatttccatgcataactttctgtgatggcccgtggcgtgactactcacgctgtccttttgttgctcatcagctatcaatgatggaagaggcgtgctcggcgtgtatcatttgcggttttgtgtgaaatcacggatcgtgtaaaacttactgtaactctggatcatacttagctgtgaattggtgttcagcataggtgaaatcggaagcttacttttactgttc

SEQ ID NO: 64058 - protein, 349 aa, Triticum aestivum
  peptide (1)..(349): Ceres Seq. ID no. 12616773
  misc_feature (107)..(266): Homolog of NCBI NO: 30851621 NR Description: 2610529I12Rik protein [Mus musculus]
  misc_feature (224)..(324): Homolog of NCBI NO: 25372649 NR Description: hypothetical protein AT4g30840 [imported] -
  misc_feature (81)..(222): Homolog of NCBI NO: 25372649 NR Description: hypothetical protein AT4g30840 [imported] -
  misc_feature (81)..(341): Homolog of NCBI NO: 21554881 NR Description: unknown [Arabidopsis thaliana]
  misc_feature (81)..(341): Homolog of NCBI NO: 18417678 NR Description: expressed protein
QQPTMADSPSFRRHPLPFSIDIVRWLPSSASSGRHLAAAVHDPSVPASSRLSLLPLHDPASPLASLPLPSRPTALRCSPSVLAAATSSGSLHLLPSSFDTDSAVSVPGGAGFHVGPVRGLDCGGEGWVTAGEDGRVHVVSDGDGRVVARRVWDGKGMSGYGAARWASSAEFATGGAGCGVQWWDRRKGDAVVAQCKGVWGHGVATGMVHSIDIHPSRKHVCVVGGSSGTIFAWDLRWAQQPIPLSGVGLDETAQPVCESEVWEVLFDNYTQSSDIISSVSTRILPVMLCSEDGILAIVEQDERPLELLAEPCAINSFDIDPQNPSDVVCALEWESIGVLTRGRDAMAEE

SEQ ID NO: 64059 - protein, 345 aa, Triticum aestivum
  peptide (1)..(345): Ceres Seq. ID no. 12616774
  misc_feature (103)..(262): Homolog of NCBI NO: 30851621 NR Description: 2610529I12Rik protein [Mus musculus]
  misc_feature (220)..(320): Homolog of NCBI NO: 25372649 NR Description: hypothetical protein AT4g30840 [imported] -
  misc_feature (77)..(218): Homolog of NCBI NO: 25372649 NR Description: hypothetical protein AT4g30840 [imported] -
  misc_feature (77)..(337): Homolog of NCBI NO: 21554881 NR Description: unknown [Arabidopsis thaliana]
  misc_feature (77)..(337): Homolog of NCBI NO: 18417678 NR Description: expressed protein
MADSPSFRRHPLPFSIDIVRWLPSSASSGRHLAAAVHDPSVPASSRLSLLPLHDPASPLASLPLPSRPTALRCSPSVLAAATSSGSLHLLPSSFDTDSAVSVPGGAGFHVGPVRGLDCGGEGWVTAGEDGRVHVVSDGDGRVVARRVWDGKGMSGYGAARWASSAEFATGGAGCGVQWWDRRKGDAVVAQCKGVWGHGVATGMVHSIDIHPSRKHVCVVGGSSGTIFAWDLRWAQQPIPLSGVGLDETAQPVCESEVWEVLFDNYTQSSDIISSVSTRILPVMLCSEDGILAIVEQDERPLELLAEPCAINSFDIDPQNPSDVVCALEWESIGVLTRGRDAMAEE

SEQ ID NO: 64060 - protein, 211 aa, Triticum aestivum
  peptide (1)..(211): Ceres Seq. ID no. 12616775
TTANNGGLSLLPPPPAPLLDRHRPLAPVLRLLRPPPRGGRPRPLRARLLAPQPPTAPRPRLPARLPPAPLPAHGPPLLPFRPRRRHLLRLPPPPPLLLRHRLGGVRPRRRGVPCGARARARLRRRGVGDGGGGREGARGVGRRRQGGGQEGVGWEGHVRVRGGEMGLVGGVRHRRRRLRRAVVGPQERGRRGGAVQGRLGSWCRHRHGALH

SEQ ID NO: 64061 - DNA, 1194 bp, Triticum aestivum
  misc_feature (1)..(1194): Ceres Seq. ID no. 15224924
cccgttccgttcccgaccccttccccgccacggacaaaaacccagcgagccgcgagccgcgcgcctccggaccctcctcgccggcatggcctgcacccacctcgccgccgcctcgtcaccggcgaccaccgccgccgcgctgcgtgcacgggcgacggcccccgccgccggtttcgcgcgccttcctgccaccctccatcctgagaacggtgggctggccctcaggggtaggagggcggtcacgcccgtggtcctcgccgccgggccggccgccgcggcgccggtggccgaccgtgacggaacaccggccgcggtgaagcagcccatcatcgtcatcgacaactatgatagctttacctacaacctgtgccagtatatgggggagcttggattaaattttgaggtgtaccgtaatgatgaacttaccatagaggaggtaaagaggatgaaaccacgaggaatacttatttcaccagggcctggtgaaccgcaagattcaggtatatcattgcagactgttctggaacttgggccaaccatcccaatattcggagtttgcatgggtctgcagtgcattggagaggcatttggagggaagattatccgcgttccttctggtgtgatgcatggaaaaagctctccagtttactatgacgaagttctaggaaagtccatattcgagggcttgtcaaacccttttaccgccgcaagatatcatagcttggtcatcgaggaggaaaccttcccgcacgatgaactggaagtcacggcatggactgaagatggacttgtcatggctgctcgccacaagaagtacacgcatatccagggtgttcagttccacccagagagcatcatcacccctgaaggcaagaaaatcatcctcaactttgcgagatatgtcgaggagtttgagaagcagacctccgaggggaagtagaggattcaggaagcagagcagttagaggaagtagagactattgttgagagatcaggcaggcaggaaggggcctaaaagccaagcagatttaggggaaatgaataagggaaaaagagcttttccattgccattcgtttggttcattgtaatatatcattgtggatctagatcccgtatgaacttcattcggtcaattatgttcgtcgtggtgctctttctcaaataataaatcggtggaagcagaagctgttagc

SEQ ID NO: 64062 - protein, 312 aa, Triticum aestivum
  peptide (1)..(312): Ceres Seq. ID no. 15224925
  misc_feature (110)..(299): Pfam Name: Glutamine amidotransferase class-I Pfam Description: Glutamine amidotransferase class-I
  misc_feature (109)..(297): Homolog of NCBI NO: 37520452 NR Description: anthranilate synthase component II [Gloeobacter
  misc_feature (109)..(297): Homolog of NCBI NO: 11467408 NR Description: anthranilate synthase component II [Cyanophora
  misc_feature (108)..(307): Homolog of NCBI NO: 15221810 NR Description: anthranilate synthase, beta subunit (ASB),
  misc_feature (43)..(305): Homolog of NCBI NO: 28301926 NR Description: putative anthranilate synthase beta subunit
  misc_feature (95)..(307): Homolog of NCBI NO: 15221840 NR Description: anthranilate synthase, beta subunit (ASB)
  misc_feature (91)..(307): Homolog of NCBI NO: 25403004 NR Description: probable anthranilate synthase beta subunit
  misc_feature (108)..(307): Homolog of NCBI NO: 21594026 NR Description: anthranilate synthase beta chain [Arabidopsis
  misc_feature (108)..(307): Homolog of NCBI NO: 15242893 NR Description: anthranilate synthase, beta subunit (ASB),
  misc_feature (91)..(307): Homolog of NCBI NO: 15222532 NR Description: anthranilate synthase, beta subunit (ASB)
  misc_feature (29)..(312): Homolog of NCBI NO: 21741992 NR Description: OSJNBa0060P14.1 [Oryza sativa (japonica
PFRSRPLPRHGQKPSEPRAARLRTLLAGMACTHLAAASSPATTAAALRARATAPAAGFARLPATLHPENGGLALRGRRAVTPVVLAAGPAAAAPVADRDGTPAAVKQPIIVIDNYDSFTYNLCQYMGELGLNFEVYRNDELTIEEVKRMKPRGILISPGPGEPQDSGISLQTVLELGPTIPIFGVCMGLQCIGEAFGGKIIRVPSGVMHGKSSPVYYDEVLGKSIFEGLSNPFTAARYHSLVIEEETFPHDELEVTAWTEDGLVMAARHKKYTHIQGVQFHPESIITPEGKKIILNFARYVEEFEKQTSEGK

SEQ ID NO: 64063 - protein, 284 aa, Triticum aestivum
  peptide (1)..(284): Ceres Seq. ID no. 15224926
  misc_feature (82)..(271): Pfam Name: Glutamine amidotransferase class-I Pfam Description: Glutamine amidotransferase class-I
  misc_feature (81)..(269): Homolog of NCBI NO: 37520452 NR Description: anthranilate synthase component II [Gloeobacter
  misc_feature (81)..(269): Homolog of NCBI NO: 11467408 NR Description: anthranilate synthase component II [Cyanophora
  misc_feature (80)..(279): Homolog of NCBI NO: 15221810 NR Description: anthranilate synthase, beta subunit (ASB),
  misc_feature (15)..(277): Homolog of NCBI NO: 28301926 NR Description: putative anthranilate synthase beta subunit
  misc_feature (67)..(279): Homolog of NCBI NO: 15221840 NR Description: anthranilate synthase, beta subunit (ASB)
  misc_feature (63)..(279): Homolog of NCBI NO: 25403004 NR Description: probable anthranilate synthase beta subunit
  misc_feature (80)..(279): Homolog of NCBI NO: 21594026 NR Description: anthranilate synthase beta chain [Arabidopsis
  misc_feature (80)..(279): Homolog of NCBI NO: 15242893 NR Description: anthranilate synthase, beta subunit (ASB),
  misc_feature (63)..(279): Homolog of NCBI NO: 15222532 NR Description: anthranilate synthase, beta subunit (ASB)
  misc_feature (1)..(284): Homolog of NCBI NO: 21741992 NR Description: OSJNBa0060P14.1 [Oryza sativa (japonica
MACTHLAAASSPATTAAALRARATAPAAGFARLPATLHPENGGLALRGRRAVTPVVLAAGPAAAAPVADRDGTPAAVKQPIIVIDNYDSFTYNLCQYMGELGLNFEVYRNDELTIEEVKRMKPRGILISPGPGEPQDSGISLQTVLELGPTIPIFGVCMGLQCIGEAFGGKIIRVPSGVMHGKSSPVYYDEVLGKSIFEGLSNPFTAARYHSLVIEEETFPHDELEVTAWTEDGLVMAARHKKYTHIQGVQFHPESIITPEGKKIILNFARYVEEFEKQTSEGK

SEQ ID NO: 64064 - protein, 187 aa, Triticum aestivum
  peptide (1)..(187): Ceres Seq. ID no. 15224927
  misc_feature (1)..(174): Pfam Name: Glutamine amidotransferase class-I Pfam Description: Glutamine amidotransferase class-I
  misc_feature (1)..(172): Homolog of NCBI NO: 37520452 NR Description: anthranilate synthase component II [Gloeobacter
  misc_feature (1)..(172): Homolog of NCBI NO: 11467408 NR Description: anthranilate synthase component II [Cyanophora
  misc_feature (1)..(182): Homolog of NCBI NO: 15221810 NR Description: anthranilate synthase, beta subunit (ASB),
  misc_feature (1)..(180): Homolog of NCBI NO: 28301926 NR Description: putative anthranilate synthase beta subunit
  misc_feature (1)..(182): Homolog of NCBI NO: 15221840 NR Description: anthranilate synthase, beta subunit (ASB)
  misc_feature (1)..(182): Homolog of NCBI NO: 25403004 NR Description: probable anthranilate synthase beta subunit
  misc_feature (1)..(182): Homolog of NCBI NO: 21594026 NR Description: anthranilate synthase beta chain [Arabidopsis
  misc_feature (1)..(182): Homolog of NCBI NO: 15242893 NR Description: anthranilate synthase, beta subunit (ASB),
  misc_feature (1)..(182): Homolog of NCBI NO: 15222532 NR Description: anthranilate synthase, beta subunit (ASB)
  misc_feature (1)..(187): Homolog of NCBI NO: 21741992 NR Description: OSJNBa0060P14.1 [Oryza sativa (japonica
MGELGLNFEVYRNDELTIEEVKRMKPRGILISPGPGEPQDSGISLQTVLELGPTIPIFGVCMGLQCIGEAFGGKIIRVPSGVMHGKSSPVYYDEVLGKSIFEGLSNPFTAARYHSLVIEEETFPHDELEVTAWTEDGLVMAARHKKYTHIQGVQFHPESIITPEGKKIILNFARYVEEFEKQTSEGK

SEQ ID NO: 64065 - DNA, 1392 bp, Triticum aestivum
  misc_feature (1)..(1392): Ceres Seq. ID no. 12617253
aagcaaagcagcgccacctcgcgagcgccatgctgtccccggcgaccaccgccacggccgccgccttcctctccgcggcgcctgcctcctcatcctctacccaccgcaggcgtagccgtcgcgctgctatctccgcctccctctcgtccgaagaaccgctgctcatacgtgcggcgaggggcgaggatgggctgcctaggccgccggcgtggatgatgcggcaggctgggcggtacatggcgtcgtaccaggcgctgtccaagcgccacccttcgttccgggagcggtcggagaccaccgacctcatcgtcgaaatcacgctacagccgtggcacgccttcgcacccgacggcgtcatcctattctcggacatactcacgccgctgccggccatcggggtgccattcgatatctcggaatccaaggggccggtgatccagtcgcccgtgcggactgaggaacaggtcagggagctcgttcccatagatctcgataagctccagttcgttggggagtcgctcaagattctgcgcaacgagattgatggaaaagctgctttgctaggattcgtgggggccccatggacaattgcaacttacgttgttgaaggagggatgaccaacacttacacaaatataaagcgcatgtgccacacagcaccaaatgtcttgaggggccttctctctcacctcgcagaagctatatctgactatatcatttaccaagtaaactctggtgctcagtgtatacagatatttgattcatggggtgggcaacttccacctcatgtgtgggagcaatggtcaaaaccatatatcagacaaattgtggctaagattaagacagaatgccctcacataccacttgtgctgtatataaatggaaatggaggcttgctcgagcgcatgaaggacataggagttgatgttattggacttgactggacagtggatatggcagatggaaggaggcgcgttggtgatggaattagtgtacaagggaatgtggacccagcatatctattttccccattaccagtattgactgatgaaattcatagggttgtgaaagcagctggtccgaaaggtcatatacttaacttgggccatggtgttcttcaaaaaacaccagaagaagctgtagcacatttctttgatgtcacaaggagcttgagatatgacacccttttccagggtcatcttactgaagaattgcaacctgttgcttgatgatggccagtagccttgccatattttttttggtcttactgttctcagctcaacaccttctacattattagagttcattcccttttgctggagctgttccttgtagagacaccatggctaaatcaattcaattttgttcattatgcatctgtgtatttcagtc

SEQ ID NO: 64066 - protein, 408 aa, Triticum aestivum
  peptide (1)..(408): Ceres Seq. ID no. 12617254
  misc_feature (49)..(390): Pfam Name: Uroporphyrinogen decarboxylase (URO-D) Pfam Description: Uroporphyrinogen decarboxylase (URO-D)
  misc_feature (13)..(392): Homolog of NCBI NO: 6014938 NR Description: Uroporphyrinogen decarboxylase, chloroplast
  misc_feature (49)..(390): Homolog of NCBI NO: 23041382 NR Description: hypothetical protein [Trichodesmium erythraeum
  misc_feature (46)..(392): Homolog of NCBI NO: 16975230 NR Description: Chain A, Crystal Structure And Substrate Binding Of The Uroporphyrinogen-Iii Decarboxylase From Nicotiana Tabacum:
  misc_feature (46)..(392): Homolog of NCBI NO: 2501647 NR Description: Uroporphyrinogen decarboxylase, chloroplast
  misc_feature (9)..(392): Homolog of NCBI NO: 14334768 NR Description: putative uroporphyrinogen decarboxylase
  misc_feature (9)..(392): Homolog of NCBI NO: 15226690 NR Description: putative uroporphyrinogen decarboxylase
  misc_feature (71)..(406): Homolog of NCBI NO: 8777476 NR Description: uroporphyrinogen decarboxylase [Arabidopsis
  misc_feature (38)..(406): Homolog of NCBI NO: 18400577 NR Description: uroporphyrinogen decarboxylase, putative
  misc_feature (38)..(406): Homolog of NCBI NO: 16323119 NR Description: AT3g14930/K15M2_7 [Arabidopsis thaliana]
  misc_feature (14)..(408): Homolog of NCBI NO: 34912796 NR Description: putative uroporphyrinogen decarboxylase
AKQRHLASAMLSPATTATAAAFLSAAPASSSSTHRRRSRRAAISASLSSEEPLLIRAARGEDGLPRPPAWMMRQAGRYMASYQALSKRHPSFRERSETTDLIVEITLQPWHAFAPDGVILFSDILTPLPAIGVPFDISESKGPVIQSPVRTEEQVRELVPIDLDKLQFVGESLKILRNEIDGKAALLGFVGAPWTIATYVVEGGMTNTYTNIKRMCHTAPNVLRGLLSHLAEAISDYIIYQVNSGAQCIQIFDSWGGQLPPHVWEQWSKPYIRQIVAKIKTECPHIPLVLYINGNGGLLERMKDIGVDVIGLDWTVDMADGRRRVGDGISVQGNVDPAYLFSPLPVLTDEIHRVVKAAGPKGHILNLGHGVLQKTPEEAVAHFFDVTRSLRYDTLFQGHLTEELQPVA

SEQ ID NO: 64067 - protein, 399 aa, Triticum aestivum
  peptide (1)..(399): Ceres Seq. ID no. 12617255
  misc_feature (40)..(381): Pfam Name: Uroporphyrinogen decarboxylase (URO-D) Pfam Description: Uroporphyrinogen decarboxylase (URO-D)
  misc_feature (4)..(383): Homolog of NCBI NO: 6014938 NR Description: Uroporphyrinogen decarboxylase, chloroplast
  misc_feature (40)..(381): Homolog of NCBI NO: 23041382 NR Description: hypothetical protein [Trichodesmium erythraeum
  misc_feature (37)..(383): Homolog of NCBI NO: 16975230 NR Description: Chain A, Crystal Structure And Substrate Binding Of The Uroporphyrinogen-Iii Decarboxylase From Nicotiana Tabacum:
  misc_feature (37)..(383): Homolog of NCBI NO: 2501647 NR Description: Uroporphyrinogen decarboxylase, chloroplast
  misc_feature (1)..(383): Homolog of NCBI NO: 14334768 NR Description: putative uroporphyrinogen decarboxylase
  misc_feature (1)..(383): Homolog of NCBI NO: 15226690 NR Description: putative uroporphyrinogen decarboxylase
  misc_feature (62)..(397): Homolog of NCBI NO: 8777476 NR Description: uroporphyrinogen decarboxylase [Arabidopsis
  misc_feature (29)..(397): Homolog of NCBI NO: 18400577 NR Description: uroporphyrinogen decarboxylase, putative
  misc_feature (29)..(397): Homolog of NCBI NO: 16323119 NR Description: AT3g14930/K15M2_7 [Arabidopsis thaliana]
  misc_feature (5)..(399): Homolog of NCBI NO: 34912796 NR Description: putative uroporphyrinogen decarboxylase
MLSPATTATAAAFLSAAPASSSSTHRRRSRRAAISASLSSEEPLLIRAARGEDGLPRPPAWMMRQAGRYMASYQALSKRHPSFRERSETTDLIVEITLQPWHAFAPDGVILFSDILTPLPAIGVPFDISESKGPVIQSPVRTEEQVRELVPIDLDKLQFVGESLKILRNEIDGKAALLGFVGAPWTIATYVVEGGMTNTYTNIKRMCHTAPNVLRGLLSHLAEAISDYIIYQVNSGAQCIQIFDSWGGQLPPHVWEQWSKPYIRQIVAKIKTECPHIPLVLYINGNGGLLERMKDIGVDVIGLDWTVDMADGRRRVGDGISVQGNVDPAYLFSPLPVLTDEIHRVVKAAGPKGHILNLGHGVLQKTPEEAVAHFFDVTRSLRYDTLFQGHLTEELQPVA

SEQ ID NO: 64068 - protein, 338 aa, Triticum aestivum
  peptide (1)..(338): Ceres Seq. ID no. 12617256
  misc_feature (1)..(320): Pfam Name: Uroporphyrinogen decarboxylase (URO-D) Pfam Description: Uroporphyrinogen decarboxylase (URO-D)
  misc_feature (1)..(322): Homolog of NCBI NO: 6014938 NR Description: Uroporphyrinogen decarboxylase, chloroplast
  misc_feature (1)..(320): Homolog of NCBI NO: 23041382 NR Description: hypothetical protein [Trichodesmium erythraeum
  misc_feature (1)..(322): Homolog of NCBI NO: 16975230 NR Description: Chain A, Crystal Structure And Substrate Binding Of The Uroporphyrinogen-Iii Decarboxylase From Nicotiana Tabacum:
  misc_feature (1)..(322): Homolog of NCBI NO: 2501647 NR Description: Uroporphyrinogen decarboxylase, chloroplast
  misc_feature (1)..(322): Homolog of NCBI NO: 14334768 NR Description: putative uroporphyrinogen decarboxylase
  misc_feature (1)..(322): Homolog of NCBI NO: 15226690 NR Description: putative uroporphyrinogen decarboxylase
  misc_feature (1)..(336): Homolog of NCBI NO: 8777476 NR Description: uroporphyrinogen decarboxylase [Arabidopsis
  misc_feature (1)..(336): Homolog of NCBI NO: 18400577 NR Description: uroporphyrinogen decarboxylase, putative
  misc_feature (1)..(336): Homolog of NCBI NO: 16323119 NR Description: AT3g14930/K15M2_7 [Arabidopsis thaliana]
  misc_feature (1)..(338): Homolog of NCBI NO: 34912796 NR Description: putative uroporphyrinogen decarboxylase
MMRQAGRYMASYQALSKRHPSFRERSETTDLIVEITLQPWHAFAPDGVILFSDILTPLPAIGVPFDISESKGPVIQSPVRTEEQVRELVPIDLDKLQFVGESLKILRNEIDGKAALLGFVGAPWTIATYVVEGGMTNTYTNIKRMCHTAPNVLRGLLSHLAEAISDYIIYQVNSGAQCIQIFDSWGGQLPPHVWEQWSKPYIRQIVAKIKTECPHIPLVLYINGNGGLLERMKDIGVDVIGLDWTVDMADGRRRVGDGISVQGNVDPAYLFSPLPVLTDEIHRVVKAAGPKGHILNLGHGVLQKTPEEAVAHFFDVTRSLRYDTLFQGHLTEELQPVA

SEQ ID NO: 64069 - DNA, 1231 bp, Triticum aestivum
  misc_feature (1)..(1231): Ceres Seq. ID no. 13539874
agatcccgcaacccgcgaaacaaaccaccagccaagccggcaagcaatccgcgcgcccccattgttctcctctccctctctctctcagcatccgctccgagtcagctccgacggcatggacgcgcccgcacctgccaagaggagacgcggcggcggtggcggaagcggggagaagaaggatctgttccacgtcgtccacaaggtgcccgccggcgacagcccctacgtccgggccaagcacctccagctcgtggagaaggacgcggaggcgtcgatcgtgtggttctggaaggcgatcaactccggggacagggtagacagcgcgctcaaggacatggccgtggtgatgaagcagcaggaccgcgccgaggaggcgatagaggccatcagatccttcaggcacctctgctccaggcaggcccaggagtccctcgacaacctgctcatcgacctctacaagaaatgcggaaaagtcgacgagcagatagagctgctgaaacagaagctcaagatgatatgcctcggcgaggccttcaacgggaagatcaccaagacggcgcgatcccacggcaagaagttccaggtctcgatccagcaggagatgtcacgcattctgggtaaccttggctgggcttacatgcagcagaacaactatgaagccgctgaattggtttatcgaaaggcccagactatcgtacctgatgccaacagggcgtgcaacctcgggctgtgcctcattaagcagagcagacatgaggaggcagtgcaagtgcttgaggatgtcctacttcgcagaatctccgggttggatgacgacaaggcggttgcccgagctgagcagctcctccgtgagctcggtccgacaacacacatttcatcgccctttgatattggcttgagtttcaccgaagagatcatggagagactagaccttgtgatgaatgattggacaccgttcaggtcgaggcggctgcccgtatttgaggagttagatgcattcagggaccaaatggcttgttgattcattacttcgttggtttttaaactttaacgtgcatttgcgtgtggtaaatagaagttgatgtgcatgtatgtaggaggttttgtggatgttacaggtgtgaatgagagatttgataggttgtagatatcataagcagctagggttgatgcaaagcgttcccttgcggaataatgtggtttcagttttgaatgcagttggtctttgccc

SEQ ID NO: 64070 - protein, 339 aa, Triticum aestivum
  peptide (1)..(339): Ceres Seq. ID no. 13539875
  misc_feature (202)..(235): Pfam Name: TPR Domain Pfam Description: TPR Domain
  misc_feature (72)..(290): Homolog of NCBI NO: 29467532 NR Description: P0582D05.25 [Oryza sativa (japonica
  misc_feature (17)..(261): Homolog of NCBI NO: 15233432 NR Description: male sterility MS5/pollenless 3 [Arabidopsis
  misc_feature (17)..(309): Homolog of NCBI NO: 4028970 NR Description: pollenless3 [Arabidopsis thaliana]
  misc_feature (17)..(309): Homolog of NCBI NO: 3859112 NR Description: male sterility MS5 [Arabidopsis thaliana]
  misc_feature (53)..(286): Homolog of NCBI NO: 15230439 NR Description: male sterility MS5, putative [Arabidopsis
  misc_feature (60)..(339): Homolog of NCBI NO: 30695554 NR Description: male sterility MS5 family [Arabidopsis thaliana]
  misc_feature (60)..(339): Homolog of NCBI NO: 9758884 NR Description: gb|AAC72543.1~gene_id:K24G6.19~similar to unknown
  misc_feature (48)..(339): Homolog of NCBI NO: 30678993 NR Description: male sterility MS5 family [Arabidopsis thaliana]
  misc_feature (48)..(339): Homolog of NCBI NO: 25406811 NR Description: hypothetical protein [imported] - Arabidopsis
  misc_feature (45)..(339): Homolog of NCBI NO: 3859116 NR Description: unknown [Oryza sativa]
DPATRETNHQPSRQAIRAPPLFSSPSLSQHPLRVSSDGMDAPAPAKRRRGGGGGSGEKKDLFHVVHKVPAGDSPYVRAKHLQLVEKDAEASIVWFWKAINSGDRVDSALKDMAVVMKQQDRAEEAIEAIRSFRHLCSRQAQESLDNLLIDLYKKCGKVDEQIELLKQKLKMICLGEAFNGKITKTARSHGKKFQVSIQQEMSRILGNLGWAYMQQNNYEAAELVYRKAQTIVPDANRACNLGLCLIKQSRHEEAVQVLEDVLLRRISGLDDDKAVARAEQLLRELGPTTHISSPFDIGLSFTEEIMERLDLVMNDWTPFRSRRLPVFEELDAFRDQMAC

SEQ ID NO: 64071 - protein, 301 aa, Triticum aestivum
  peptide (1)..(301): Ceres Seq. ID no. 13539876
  misc_feature (164)..(197): Pfam Name: TPR Domain Pfam Description: TPR Domain
  misc_feature (34)..(252): Homolog of NCBI NO: 29467532 NR Description: P0582D05.25 [Oryza sativa (japonica
  misc_feature (1)..(223): Homolog of NCBI NO: 15233432 NR Description: male sterility MS5/pollenless 3 [Arabidopsis
  misc_feature (1)..(271): Homolog of NCBI NO: 4028970 NR Description: pollenless3 [Arabidopsis thaliana]
  misc_feature (1)..(271): Homolog of NCBI NO: 3859112 NR Description: male sterility MS5 [Arabidopsis thaliana]
  misc_feature (15)..(248): Homolog of NCBI NO: 15230439 NR Description: male sterility MS5, putative [Arabidopsis
  misc_feature (22)..(301): Homolog of NCBI NO: 30695554 NR Description: male sterility MS5 family [Arabidopsis thaliana]
  misc_feature (22)..(301): Homolog of NCBI NO: 9758884 NR Description: gb|AAC72543.1~gene_id:K24G6.19~similar to unknown
  misc_feature (10)..(301): Homolog of NCBI NO: 30678993 NR Description: male sterility MS5 family [Arabidopsis thaliana]
  misc_feature (10)..(301): Homolog of NCBI NO: 25406811 NR Description: hypothetical protein [imported] - Arabidopsis
  misc_feature (7)..(301): Homolog of NCBI NO: 3859116 NR Description: unknown [Oryza sativa]
MDAPAPAKRRRGGGGGSGEKKDLFHVVHKVPAGDSPYVRAKHLQLVEKDAEASIVWFWKAINSGDRVDSALKDMAVVMKQQDRAEEAIEAIRSFRHLCSRQAQESLDNLLIDLYKKCGKVDEQIELLKQKLKMICLGEAFNGKITKTARSHGKKFQVSIQQEMSRILGNLGWAYMQQNNYEAAELVYRKAQTIVPDANRACNLGLCLIKQSRHEEAVQVLEDVLLRRISGLDDDKAVARAEQLLRELGPTTHISSPFDIGLSFTEEIMERLDLVMNDWTPFRSRRLPVFEELDAFRDQMAC

SEQ ID NO: 64072 - protein, 228 aa, Triticum aestivum
  peptide (1)..(228): Ceres Seq. ID no. 13539877
  misc_feature (91)..(124): Pfam Name: TPR Domain Pfam Description: TPR Domain
  misc_feature (1)..(179): Homolog of NCBI NO: 29467532 NR Description: P0582D05.25 [Oryza sativa (japonica
  misc_feature (1)..(150): Homolog of NCBI NO: 15233432 NR Description: male sterility MS5/pollenless 3 [Arabidopsis
  misc_feature (1)..(198): Homolog of NCBI NO: 4028970 NR Description: pollenless3 [Arabidopsis thaliana]
  misc_feature (1)..(198): Homolog of NCBI NO: 3859112 NR Description: male sterility MS5 [Arabidopsis thaliana]
  misc_feature (1)..(175): Homolog of NCBI NO: 15230439 NR Description: male sterility MS5, putative [Arabidopsis
  misc_feature (1)..(228): Homolog of NCBI NO: 30695554 NR Description: male sterility MS5 family [Arabidopsis thaliana]
  misc_feature (1)..(228): Homolog of NCBI NO: 9758884 NR Description: gb|AAC72543.1~gene_id:K24G6.19~similar to unknown
  misc_feature (1)..(228): Homolog of NCBI NO: 30678993 NR Description: male sterility MS5 family [Arabidopsis thaliana]
  misc_feature (1)..(228): Homolog of NCBI NO: 25406811 NR Description: hypothetical protein [imported] - Arabidopsis
  misc_feature (1)..(228): Homolog of NCBI NO: 3859116 NR Description: unknown [Oryza sativa]
MAVVMKQQDRAEEAIEAIRSFRHLCSRQAQESLDNLLIDLYKKCGKVDEQIELLKQKLKMICLGEAFNGKITKTARSHGKKFQVSIQQEMSRILGNLGWAYMQQNNYEAAELVYRKAQTIVPDANRACNLGLCLIKQSRHEEAVQVLEDVLLRRISGLDDDKAVARAEQLLRELGPTTHISSPFDIGLSFTEEIMERLDLVMNDWTPFRSRRLPVFEELDAFRDQMAC

SEQ ID NO: 64073 - DNA, 1165 bp, Triticum aestivum
  misc_feature (1)..(1165): Ceres Seq. ID no. 13597435
actctagtacttgtcatcttcttccccgaagcttctcgtcctctcccctccccctcgcaccgccggagggaggcgccggccgcgccgtctcctcgccccgtccgtccggccgccgctcgtcgtgggtggttggttccgagcgagcgacgcccagccagcatggcggcaaatgtgggggagtccacgagcggcagcagcagcgtggccggcgacggcgggggcagcttcgagtgcaacatatgctttgagctgccgcaggagcccatcgtcacgctctgcggccacctcttctgctggccctgcctctacaagtggctgcacatccactcgcactcgcccgagtgccccgtctgcaaggccgtcgtcgaggaggacaagctcgtcccgctctacggccgcggcaaggaccgcgtcgaccccaggtccaagggggtgccggccggggccgagatccccaaccggccgaccgggcagcggcccgccaccgccccgcaggccgaccccaacaaccacttccccaacgcaaccctaacccctggttcatggggggagggggcgtccctttggccaacgcgcggtggggaaactacaccttctcggccgcgtttggcggcctgttcccgctgctgagcttccaggtgcatggattcccggacgcgaccgcgtacgggcagcctgccgggtttccctatggctacgggcatggccatggccatgggcatgctttccatggcgggcacgcccacgccgctgccccccggcacgcgccgcccgggcagcagcagcagcaggcggacgtgtacctcaaggcgctcctcatcctggttggctttctcgtgatcgcgagcctcatcacattctaggttcgtcaccattgtcatttgtcaccgtcataataagagaaacgattgtcatgatacttctcagatgttgtgtgcattaccttgcccccccgtacgaaagccccggtctaaatctgagtggtgcgttttgagcgaaagtgttcatagaactcatgtatatatgtgctatttagacgcggtctgaatggggggtgcctgtgtaccgtagtagtttcacactgattcgtgaatgatttggaaacctctgtttggagtggatgtaccagaccaattatatcatgtgtaattttgtttcgactgcc

SEQ ID NO: 64074 - protein, 209 aa, Triticum aestivum
  peptide (1)..(209): Ceres Seq. ID no. 13597436
  misc_feature (78)..(118): Pfam Name: Zinc finger, C3HC4 type (RING finger) Pfam Description: Zinc finger, C3HC4 type (RING finger)
  misc_feature (64)..(161): Homolog of NCBI NO: 5902054 NR Description: ring finger protein 5 [Homo sapiens]
  misc_feature (47)..(160): Homolog of NCBI NO: 37590321 NR Description: Unknown (protein for MGC:73070) [Danio rerio]
  misc_feature (60)..(156): Homolog of NCBI NO: 22795037 NR Description: putative RING protein [Populus x canescens]
  misc_feature (48)..(174): Homolog of NCBI NO: 21912604 NR Description: putative ubiquitin ligase [Taenia solium]
  misc_feature (71)..(171): Homolog of NCBI NO: 15222064 NR Description: zinc finger (C3HC4-type RING finger) protein
  misc_feature (56)..(199): Homolog of NCBI NO: 18394721 NR Description: zinc finger (C3HC4-type RING finger) protein
  misc_feature (56)..(174): Homolog of NCBI NO: 21553849 NR Description: putative RING zinc finger protein [Arabidopsis
  misc_feature (56)..(174): Homolog of NCBI NO: 15224062 NR Description: zinc finger (C3HC4-type RING finger) protein
  misc_feature (21)..(194): Homolog of NCBI NO: 34909840 NR Description: P0403C05.28 [Oryza sativa (japonica
  misc_feature (54)..(194): Homolog of NCBI NO: 29150403 NR Description: unknown protein [Oryza sativa (japonica
TLVLVIFFPEASRPLPSPSHRRREAPAAPSPRPVRPAAARRGWLVPSERRPASMAANVGESTSGSSSVAGDGGGSFECNICFELPQEPIVTLCGHLFCWPCLYKWLHIHSHSPECPVCKAVVEEDKLVPLYGRGKDRVDPRSKGVPAGAEIPNRPTGQRPATAPQADPNNHFPNATLTPGSWGEGASLWPTRGGETTPSRPRLAACSRC

SEQ ID NO: 64075 - protein, 156 aa, Triticum aestivum
  peptide (1)..(156): Ceres Seq. ID no. 13597437
  misc_feature (25)..(65): Pfam Name: Zinc finger, C3HC4 type (RING finger) Pfam Description: Zinc finger, C3HC4 type (RING finger)
  misc_feature (11)..(108): Homolog of NCBI NO: 5902054 NR Description: ring finger protein 5 [Homo sapiens]
  misc_feature (1)..(107): Homolog of NCBI NO: 37590321 NR Description: Unknown (protein for MGC:73070) [Danio rerio]
  misc_feature (7)..(103): Homolog of NCBI NO: 22795037 NR Description: putative RING protein [Populus x canescens]
  misc_feature (1)..(121): Homolog of NCBI NO: 21912604 NR Description: putative ubiquitin ligase [Taenia solium]
  misc_feature (18)..(118): Homolog of NCBI NO: 15222064 NR Description: zinc finger (C3HC4-type RING finger) protein
  misc_feature (3)..(146): Homolog of NCBI NO: 18394721 NR Description: zinc finger (C3HC4-type RING finger) protein
  misc_feature (3)..(121): Homolog of NCBI NO: 21553849 NR Description: putative RING zinc finger protein [Arabidopsis
  misc_feature (3)..(121): Homolog of NCBI NO: 15224062 NR Description: zinc finger (C3HC4-type RING finger) protein
  misc_feature (1)..(141): Homolog of NCBI NO: 34909840 NR Description: P0403C05.28 [Oryza sativa (japonica
  misc_feature (1)..(141): Homolog of NCBI NO: 29150403 NR Description: unknown protein [Oryza sativa (japonica
MAANVGESTSGSSSVAGDGGGSFECNICFELPQEPIVTLCGHLFCWPCLYKWLHIHSHSPECPVCKAVVEEDKLVPLYGRGKDRVDPRSKGVPAGAEIPNRPTGQRPATAPQADPNNHFPNATLTPGSWGEGASLWPTRGGETTPSRPRLAACSRC

SEQ ID NO: 64076 - protein, 120 aa, Triticum aestivum
  peptide (1)..(120): Ceres Seq. ID no. 13597438
  misc_feature (7)..(120): Pfam Name: Glycoprotein GG/GX Pfam Description: Glycoprotein GG/GX
  misc_feature (1)..(120): Homolog of NCBI NO: 22549323 NR Description: LppS protein [Mycoplasma conjunctivae]
MWGSPRAAAAAWPATAGAASSATYALSCRRSPSSRSAATSSAGPASTSGCTSTRTRPSAPSARPSSRRTSSSRSTAAARTASTPGPRGCRPGPRSPTGRPGSGPPPPRRPTPTTTSPTQP

SEQ ID NO: 64077 - DNA, 1114 bp, Triticum aestivum
  misc_feature (1)..(1114): Ceres Seq. ID no. 13655598
aatccgctaaggagtgtgtaacaacaccacacaattcaacactgctagctacacagcacacgaaccgatccatccatccagaaaaaaaagaaagagtgcccgtcgaaaatgccggtgagcaggatcgccatcggcgccccgggggagctgtcccacccggacaccttccgcgccggcgtcgccgagttcatctccatgctcatcttcgtcttcgccggctcaggctccggcatggccttcggcaagctgactgacggcggcgcgacgacgccggcggggcttatcgcggcggcgctggcgcacgcgttcgcgctcttcgtggccgtctccgtgggcgccaacatctccggcgggcacgtgaacccggccgtcacattcggcgccttcgtgggcggcaacatcagcctgctcaaggccgtggtgtactgggtggcgcagctgctcggctccgtcgtggcctgcctcctcctcaagatcgccaccggcggcgaggccgtgggcgccttctcgctctccgccggcgtcggcgtctggaacgccgtggtgttcgagatcgtcatgaccttcgggctcgtctacacggtgtacgccaccgcggtcgaccccaagcgcggcgacctcggggtgatcgcgcccatcgccatcggcttcatcgtcggcgccaacatcctcgccggcggcgccttcgacggcgcctccatgaaccccgccgtctccttcggccccgctgtcgtcagcggcgtctgggagaaccactgggtctactggctcggccccttcgccggcgccgccatcgccgccctcgtctacgacatctgcttcatcggccagcgcccccacgagcagctccccaccgccgactactgaaaacctcaatctcatctcgtccatccgtcatcgccatgagagattgaaatcgcttcaaaaattccagcaagtgtacgtcgtcgcgtcatcatcagtaagccagtttagtttcattgcgctatcttgtccttgagaaattcagggtaaacagtgtgtgcgagtcagtcagtcaggaataatctcatccttctcttatcttggtgtatgtatgtacgtcctcaattatgaatgcttctattccatggcc

SEQ ID NO: 64078 - protein, 252 aa, Triticum aestivum
  peptide (1)..(252): Ceres Seq. ID no. 13655599
  misc_feature (13)..(234): Pfam Name: Major intrinsic protein Pfam Description: Major intrinsic protein
  misc_feature (1)..(252): Homolog of NCBI NO: 15228041 NR Description: major intrinsic protein (MIP) family [Arabidopsis
  misc_feature (1)..(252): Homolog of NCBI NO: 475048 NR Description: tonoplast intrinsic protein gamma (gamma-TIP)
  misc_feature (1)..(252): Homolog of NCBI NO: 21593151 NR Description: putative aquaporin (tonoplast intrinsic protein
  misc_feature (1)..(252): Homolog of NCBI NO: 21284370 NR Description: tonoplast intrinsic protein bobTIP26-1
  misc_feature (1)..(252): Homolog of NCBI NO: 9988412 NR Description: gamma tonoplast intrinsic protein [Pyrus communis]
  misc_feature (1)..(251): Homolog of NCBI NO: 541951 NR Description: SPCP2 protein - soybean
  misc_feature (1)..(252): Homolog of NCBI NO: 15234189 NR Description: major intrinsic protein (MIP) family [Arabidopsis
  misc_feature (1)..(252): Homolog of NCBI NO: 8699604 NR Description: putative aquaporin TIP3 [Vitis berlandieri x
  misc_feature (1)..(252): Homolog of NCBI NO: 13447819 NR Description: tonoplast membrane integral protein ZmTIP1-2 [Zea
  misc_feature (1)..(252): Homolog of NCBI NO: 34906078 NR Description: putative tonoplast membrane integral protein
MPVSRIAIGAPGELSHPDTFRAGVAEFISMLIFVFAGSGSGMAFGKLTDGGATTPAGLIAAALAHAFALFVAVSVGANISGGHVNPAVTFGAFVGGNISLLKAVVYWVAQLLGSVVACLLLKIATGGEAVGAFSLSAGVGVWNAVVFEIVMTFGLVYTVYATAVDPKRGDLGVIAPIAIGFIVGANILAGGAFDGASMNPAVSFGPAVVSGVWENHWVYWLGPFAGAAIAALVYDICFIGQRPHEQLPTADY

SEQ ID NO: 64079 - protein, 223 aa, Triticum aestivum
  peptide (1)..(223): Ceres Seq. ID no. 13655600
  misc_feature (1)..(205): Pfam Name: Major intrinsic protein Pfam Description: Major intrinsic protein
  misc_feature (1)..(223): Homolog of NCBI NO: 15228041 NR Description: major intrinsic protein (MIP) family [Arabidopsis
  misc_feature (1)..(223): Homolog of NCBI NO: 475048 NR Description: tonoplast intrinsic protein gamma (gamma-TIP)
  misc_feature (1)..(223): Homolog of NCBI NO: 21593151 NR Description: putative aquaporin (tonoplast intrinsic protein
  misc_feature (1)..(223): Homolog of NCBI NO: 21284370 NR Description: tonoplast intrinsic protein bobTIP26-1
  misc_feature (1)..(223): Homolog of NCBI NO: 9988412 NR Description: gamma tonoplast intrinsic protein [Pyrus communis]
  misc_feature (1)..(222): Homolog of NCBI NO: 541951 NR Description: SPCP2 protein - soybean
  misc_feature (1)..(223): Homolog of NCBI NO: 15234189 NR Description: major intrinsic protein (MIP) family [Arabidopsis
  misc_feature (1)..(223): Homolog of NCBI NO: 8699604 NR Description: putative aquaporin TIP3 [Vitis berlandieri x
  misc_feature (1)..(223): Homolog of NCBI NO: 13447819 NR Description: tonoplast membrane integral protein ZmTIP1-2 [Zea
  misc_feature (1)..(223): Homolog of NCBI NO: 34906078 NR Description: putative tonoplast membrane integral protein
MLIFVFAGSGSGMAFGKLTDGGATTPAGLIAAALAHAFALFVAVSVGANISGGHVNPAVTFGAFVGGNISLLKAVVYWVAQLLGSVVACLLLKIATGGEAVGAFSLSAGVGVWNAVVFEIVMTFGLVYTVYATAVDPKRGDLGVIAPIAIGFIVGANILAGGAFDGASMNPAVSFGPAVVSGVWENHWVYWLGPFAGAAIAALVYDICFIGQRPHEQLPTADY

SEQ ID NO: 64080 - protein, 211 aa, Triticum aestivum
  peptide (1)..(211): Ceres Seq. ID no. 13655601
  misc_feature (1)..(193): Pfam Name: Major intrinsic protein Pfam Description: Major intrinsic protein
  misc_feature (1)..(211): Homolog of NCBI NO: 15228041 NR Description: major intrinsic protein (MIP) family [Arabidopsis
  misc_feature (1)..(211): Homolog of NCBI NO: 475048 NR Description: tonoplast intrinsic protein gamma (gamma-TIP)
  misc_feature (1)..(211): Homolog of NCBI NO: 21593151 NR Description: putative aquaporin (tonoplast intrinsic protein
  misc_feature (1)..(211): Homolog of NCBI NO: 21284370 NR Description: tonoplast intrinsic protein bobTIP26-1
  misc_feature (1)..(211): Homolog of NCBI NO: 9988412 NR Description: gamma tonoplast intrinsic protein [Pyrus communis]
  misc_feature (1)..(210): Homolog of NCBI NO: 541951 NR Description: SPCP2 protein - soybean
  misc_feature (1)..(211): Homolog of NCBI NO: 15234189 NR Description: major intrinsic protein (MIP) family [Arabidopsis
  misc_feature (1)..(211): Homolog of NCBI NO: 8699604 NR Description: putative aquaporin TIP3 [Vitis berlandieri x
  misc_feature (1)..(211): Homolog of NCBI NO: 13447819 NR Description: tonoplast membrane integral protein ZmTIP1-2 [Zea
  misc_feature (1)..(211): Homolog of NCBI NO: 34906078 NR Description: putative tonoplast membrane integral protein
MAFGKLTDGGATTPAGLIAAALAHAFALFVAVSVGANISGGHVNPAVTFGAFVGGNISLLKAVVYWVAQLLGSVVACLLLKIATGGEAVGAFSLSAGVGVWNAVVFEIVMTFGLVYTVYATAVDPKRGDLGVIAPIAIGFIVGANILAGGAFDGASMNPAVSFGPAVVSGVWENHWVYWLGPFAGAAIAALVYDICFIGQRPHEQLPTADY

SEQ ID NO: 64081 - DNA, 1284 bp, Triticum aestivum
  misc_feature (1)..(1284): Ceres Seq. ID no. 13597439
gaggccagccgagttatcgtcgtcacatcgaacgaacgctactcaaagaccagtccaaccacggaaggtcgtgcaagcgcaaactatggagagcacaggggtagcgagacggacgtcgacggtgcaggagctcgccagcgccctcggcaaaccagacgtgccggcccagtacgtctcacgcggacaccacgaaaacgaccagcagcccgccgcggtgccggtccctgtcatcgacatcggccgccttttcaaccaggacggcgccgccgcagctgacgacgaggcggcgaagctccggcaggcgctcgagtcgtggggcctcttcctggtgactaaccacggcgtggacacctcggtgatggacggcatgatggtcgcgtcgagggagttcttccggcagccacccgaagagaagcagagatacaccaacctcatcggcggcgagcggttccagctcgaggggtatgggaccgaccgggtgaactcatcggaacagatcctggactggtcagaccgcctctacctcaaggtggagcccgaagacgagcgcagcctcgccctctggccagcccatccccaaaccttcaggaatcttctgcacgagttcaccacgaaatgtagggtggtgaaggacggactggtccgggcaatggcgaggctgctcgagctcgacaacgactatatcattgaacagtttggggagaaggctgacacttacgctagattcagctactacccggagtgcccaaggccagagctcgtgttcggcctcaagccccactccgatgggagcgttcttaccgtgctcatggtcgatgacaccgttggtgggctgcagattttgagagacggtgtttggttcgatgtaccgatagttcctcacaccctgctgatcaacataggagaccaaactgagataatgagcaatgggatcttcaaaagccccgtgcatagagttgtgacaaatgctgagaaagaaaggctatcgctggctctattctactcgcttgatcccgagagagaaattgagccagcgactcagctggtagatgggaagagaccggcgttgtacagaaaggtcaaggtgaaggactacattgctggactctttgaacatgtgtcgcaaggaacgatggttattgatacagtgaagatataaacaagtgtggtatcatgctggtaatgcaaaacgtgtaatcgttctaggaacaatttatctccatgtattgttgcatgctaactttattaagtactccctttgttcagcatcacatatcgttttgg

SEQ ID NO: 64082 - protein, 385 aa, Triticum aestivum
  peptide (1)..(385): Ceres Seq. ID no. 13597440
  misc_feature (238)..(334): Pfam Name: 2OG-Fe(II) oxygenase superfamily Pfam Description: 2OG-Fe(II) oxygenase superfamily
  misc_feature (41)..(154): Homolog of NCBI NO: 24413983 NR Description: ethylene-forming-enzyme-like dioxygenase-like
  misc_feature (197)..(385): Homolog of NCBI NO: 24413983 NR Description: ethylene-forming-enzyme-like dioxygenase-like
  misc_feature (41)..(385): Homolog of NCBI NO: 34898472 NR Description: Similar to Prunus armeniaca
  misc_feature (36)..(359): Homolog of NCBI NO: 34898470 NR Description: ESTs D47168(S12332),D46350(S10967) correspond to region of the predicted gene.~Similar to Prunus armeniaca
  misc_feature (36)..(385): Homolog of NCBI NO: 24413982 NR Description: ethylene-forming-enzyme-like dioxygenase-like
  misc_feature (36)..(385): Homolog of NCBI NO: 24413984 NR Description: ethylene-forming-enzyme-like dioxygenase-like
  misc_feature (41)..(385): Homolog of NCBI NO: 33115140 NR Description: iron/ascorbate-dependent oxidoreductase [Hordeum
  misc_feature (306)..(385): Homolog of NCBI NO: 24413981 NR Description: contains EST
  misc_feature (36)..(285): Homolog of NCBI NO: 24413981 NR Description: contains EST
  misc_feature (36)..(385): Homolog of NCBI NO: 34898468 NR Description: Similar to Prunus armeniaca
RPAELSSSHRTNATQRPVQPRKVVQAQTMESTGVARRTSTVQELASALGKPDVPAQYVSRGHHENDQQPAAVPVPVIDIGRLFNQDGAAAADDEAAKLRQALESWGLFLVTNHGVDTSVMDGMMVASREFFRQPPEEKQRYTNLIGGERFQLEGYGTDRVNSSEQILDWSDRLYLKVEPEDERSLALWPAHPQTFRNLLHEFTTKCRVVKDGLVRAMARLLELDNDYIIEQFGEKADTYARFSYYPECPRPELVFGLKPHSDGSVLTVLMVDDTVGGLQILRDGVWFDVPIVPHTLLINIGDQTEIMSNGIFKSPVHRVVTNAEKERLSLALFYSLDPEREIEPATQLVDGKRPALYRKVKVKDYIAGLFEHVSQGTMVIDTVKI

SEQ ID NO: 64083 - protein, 357 aa, Triticum aestivum
  peptide (1)..(357): Ceres Seq. ID no. 13597441
  misc_feature (210)..(306): Pfam Name: 2OG-Fe(II) oxygenase superfamily Pfam Description: 2OG-Fe(II) oxygenase superfamily
  misc_feature (13)..(126): Homolog of NCBI NO: 24413983 NR Description: ethylene-forming-enzyme-like dioxygenase-like
  misc_feature (169)..(357): Homolog of NCBI NO: 24413983 NR Description: ethylene-forming-enzyme-like dioxygenase-like
  misc_feature (13)..(357): Homolog of NCBI NO: 34898472 NR Description: Similar to Prunus armeniaca
  misc_feature (8)..(331): Homolog of NCBI NO: 34898470 NR Description: ESTs D47168(S12332),D46350(S10967) correspond to region of the predicted gene.~Similar to Prunus armeniaca
  misc_feature (8)..(357): Homolog of NCBI NO: 24413982 NR Description: ethylene-forming-enzyme-like dioxygenase-like
  misc_feature (8)..(357): Homolog of NCBI NO: 24413984 NR Description: ethylene-forming-enzyme-like dioxygenase-like
  misc_feature (13)..(357): Homolog of NCBI NO: 33115140 NR Description: iron/ascorbate-dependent oxidoreductase [Hordeum
  misc_feature (278)..(357): Homolog of NCBI NO: 24413981 NR Description: contains EST
  misc_feature (8)..(257): Homolog of NCBI NO: 24413981 NR Description: contains EST
  misc_feature (8)..(357): Homolog of NCBI NO: 34898468 NR Description: Similar to Prunus armeniaca
MESTGVARRTSTVQELASALGKPDVPAQYVSRGHHENDQQPAAVPVPVIDIGRLFNQDGAAAADDEAAKLRQALESWGLFLVTNHGVDTSVMDGMMVASREFFRQPPEEKQRYTNLIGGERFQLEGYGTDRVNSSEQILDWSDRLYLKVEPEDERSLALWPAHPQTFRNLLHEFTTKCRVVKDGLVRAMARLLELDNDYIIEQFGEKADTYARFSYYPECPRPELVFGLKPHSDGSVLTVLMVDDTVGGLQILRDGVWFDVPIVPHTLLINIGDQTEIMSNGIFKSPVHRVVTNAEKERLSLALFYSLDPEREIEPATQLVDGKRPALYRKVKVKDYIAGLFEHVSQGTMVIDTVKI

SEQ ID NO: 64084 - protein, 266 aa, Triticum aestivum
  peptide (1)..(266): Ceres Seq. ID no. 13597442
  misc_feature (119)..(215): Pfam Name: 2OG-Fe(II) oxygenase superfamily Pfam Description: 2OG-Fe(II) oxygenase superfamily
  misc_feature (1)..(35): Homolog of NCBI NO: 24413983 NR Description: ethylene-forming-enzyme-like dioxygenase-like
  misc_feature (78)..(266): Homolog of NCBI NO: 24413983 NR Description: ethylene-forming-enzyme-like dioxygenase-like
  misc_feature (1)..(266): Homolog of NCBI NO: 34898472 NR Description: Similar to Prunus armeniaca
  misc_feature (1)..(240): Homolog of NCBI NO: 34898470 NR Description: ESTs D47168(S12332),D46350(S10967) correspond to region of the predicted gene.~Similar to Prunus armeniaca
  misc_feature (1)..(266): Homolog of NCBI NO: 24413982 NR Description: ethylene-forming-enzyme-like dioxygenase-like
  misc_feature (1)..(266): Homolog of NCBI NO: 24413984 NR Description: ethylene-forming-enzyme-like dioxygenase-like
  misc_feature (1)..(266): Homolog of NCBI NO: 33115140 NR Description: iron/ascorbate-dependent oxidoreductase [Hordeum
  misc_feature (187)..(266): Homolog of NCBI NO: 24413981 NR Description: contains EST
  misc_feature (1)..(166): Homolog of NCBI NO: 24413981 NR Description: contains EST
  misc_feature (1)..(266): Homolog of NCBI NO: 34898468 NR Description: Similar to Prunus armeniaca
MDGMMVASREFFRQPPEEKQRYTNLIGGERFQLEGYGTDRVNSSEQILDWSDRLYLKVEPEDERSLALWPAHPQTFRNLLHEFTTKCRVVKDGLVRAMARLLELDNDYIIEQFGEKADTYARFSYYPECPRPELVFGLKPHSDGSVLTVLMVDDTVGGLQILRDGVWFDVPIVPHTLLINIGDQTEIMSNGIFKSPVHRVVTNAEKERLSLALFYSLDPEREIEPATQLVDGKRPALYRKVKVKDYIAGLFEHVSQGTMVIDTVKI

SEQ ID NO: 64085 - DNA, 1459 bp, Triticum aestivum
  misc_feature (1)..(1459): Ceres Seq. ID no. 13597403
cgaaaaaaattccattcaaaatccatttgagcttcacaacagctagtgtgtccgtgagcttctctcttcaatgtgcgtgtgtgtgtaagcagcactagtgagtgtgtgtgctttgctagtgtgctgagcgcaggcagtagtagcacttggctcttccgccggtcgtgtatcagtgtactcgagtgctagcaagtagttctgggctaacagaaggcagccgatcaccggctcccacgtcctctagatccacggctacaagcagatcaagaagatggtccccaacggcaaggcagtcgagtcagccccgttcgacgtcgccggccgcgcctgccgaatcaggtgctatccgaacggcagcggcaagaaacactacggctacacgtccctcttcctcaccagccactgcgacgacggcacggtaaggctagagctcagcgtgctcgatcgggacgggaatccgtctcgcactcgagccacggaaaagcggcgcttctggatcggcgacagctggggctggggctttaaggatttcgtgaagaacgacgatctggtcgagggagagcacctcgtggacgactgcctcatcgtcctctgcgacgtcaccgtccacgacccttccttgcacgccgaggaggttgccgcgccggttgtggcgcctccgttcgacctaagtggggagctcggggaggccatgtggaacgagacggacgtgacgatccacgtcggcgacgagacgttcccggcgcaccggtcggtgctggaggctgcgtccgccgtcttcaaggcggacctcgagaacaacggcaccggcgaggtacgcgtcgacgacatggacgcccaggtgttcaagaccctgctgcagttcatgtacacgagcgtgctgcctgacaagaaccagctcgaggcagacgccgcgacggcggagcggctgctcgtggcggcggacaggtacgggctggagaagataaaggtcgtctgcgaggaggcgctgtgcccgcgcgtcaacatgggctccgtgggcaccatgctggcgttggcggagcggcacggaggtgccgtcctgaagaaggcgtgcatggagttcctctcgatccccggtaacctattatcattcatggcgaccgagggttttgaggagctcaagagaacccagcttgggtgctggagcttcacgtgaacctgatggatacgtgcagcttgcttcctagctagttaaattagctattctcgctaagtcagataagttaattaggtactcttgcatatttttatatcaatcttgttaagtctcagtcgactgatcagactttaaatctcagtcgatgctatatccgtaagatcttacattggtatacatgtattttttttcagttttctcttttacatgtaatgtcatttgaccaaaaaaaaaaaaaaaaaagcttatcgataccgycracctcgaggcgrgkgcccgrta

SEQ ID NO: 64086 - protein, 301 aa, Triticum aestivum
  peptide (1)..(301): Ceres Seq. ID no. 15222094
  misc_feature (146)..(244): Pfam Name: BTB/POZ domain Pfam Description: BTB/POZ domain
  misc_feature (1)..(293): Homolog of NCBI NO: 37534588 NR Description: putative speckle-type protein
  misc_feature (1)..(293): Homolog of NCBI NO: 37534558 NR Description: putative speckle-type protein
  misc_feature (1)..(84): Homolog of NCBI NO: 37534476 NR Description: hypothetical protein [Oryza sativa (japonica
  misc_feature (87)..(293): Homolog of NCBI NO: 37534476 NR Description: hypothetical protein [Oryza sativa (japonica
  misc_feature (1)..(112): Homolog of NCBI NO: 37534534 NR Description: putative speckle-type protein
  misc_feature (126)..(293): Homolog of NCBI NO: 37534534 NR Description: putative speckle-type protein
  misc_feature (1)..(292): Homolog of NCBI NO: 37534574 NR Description: putative speckle-type protein
  misc_feature (1)..(290): Homolog of NCBI NO: 37534522 NR Description: putative speckle-type protein
  misc_feature (1)..(50): Homolog of NCBI NO: 37534590 NR Description: putative speckle-type protein
  misc_feature (85)..(293): Homolog of NCBI NO: 37534590 NR Description: putative speckle-type protein
MVPNGKAVESAPFDVAGRACRIRCYPNGSGKKHYGYTSLFLTSHCDDGTVRLELSVLDRDGNPSRTRATEKRRFWIGDSWGWGFKDFVKNDDLVEGEHLVDDCLIVLCDVTVHDPSLHAEEVAAPVVAPPFDLSGELGEAMWNETDVTIHVGDETFPAHRSVLEAASAVFKADLENNGTGEVRVDDMDAQVFKTLLQFMYTSVLPDKNQLEADAATAERLLVAADRYGLEKIKVVCEEALCPRVNMGSVGTMLALAERHGGAVLKKACMEFLSIPGNLLSFMATEGFEELKRTQLGCWSFT

SEQ ID NO: 64087 - protein, 161 aa, Triticum aestivum
  peptide (1)..(161): Ceres Seq. ID no. 15222095
  misc_feature (6)..(104): Pfam Name: BTB/POZ domain Pfam Description: BTB/POZ domain
  misc_feature (1)..(153): Homolog of NCBI NO: 4680501 NR Description: hypothetical protein [Oryza sativa]
  misc_feature (1)..(153): Homolog of NCBI NO: 37534570 NR Description: putative speckle-type protein
  misc_feature (1)..(150): Homolog of NCBI NO: 37534478 NR Description: hypothetical protein [Oryza sativa (japonica
  misc_feature (1)..(153): Homolog of NCBI NO: 37534588 NR Description: putative speckle-type protein
  misc_feature (1)..(153): Homolog of NCBI NO: 37534558 NR Description: putative speckle-type protein
  misc_feature (1)..(153): Homolog of NCBI NO: 37534476 NR Description: hypothetical protein [Oryza sativa (japonica
  misc_feature (1)..(153): Homolog of NCBI NO: 37534534 NR Description: putative speckle-type protein
  misc_feature (1)..(152): Homolog of NCBI NO: 37534574 NR Description: putative speckle-type protein
  misc_feature (1)..(150): Homolog of NCBI NO: 37534522 NR Description: putative speckle-type protein
  misc_feature (1)..(153): Homolog of NCBI NO: 37534590 NR Description: putative speckle-type protein
MWNETDVTIHVGDETFPAHRSVLEAASAVFKADLENNGTGEVRVDDMDAQVFKTLLQFMYTSVLPDKNQLEADAATAERLLVAADRYGLEKIKVVCEEALCPRVNMGSVGTMLALAERHGGAVLKKACMEFLSIPGNLLSFMATEGFEELKRTQLGCWSFT

SEQ ID NO: 64088 - DNA, 1400 bp, Triticum aestivum
  misc_feature (1)..(1400): Ceres Seq. ID no. 13598511
gttgccactcgctccagaagctgctcctgcccgggccagccgccgccactgagagtgagctcggctaccccagctcttccactctcgaagctaccctgctctctgtagcttcgctccctttctccttctttcgatggcgtcaggggaagcagagccgctgcagtacacgaccaccgtgctgcgggtgtccatccactgcgagggctgcaagaagaaggtcaagaaggtgctccacagcatcgaaggtgtgtacaaggtgacgatcgacgcgacgcagcacaaggtgacggtcaccggcagcgtggccgccgacgcactcgtcagacggctgctcaagtccggcaagcacgccgcgctctggccgatgccgccggcgccgcccgccacagaggccaagaagcccggggaggccccgtctgccgggaagggcgggaagggcgcggagaaggtggacgccaagcccaaaaaggtggccgacgaggcagagtcggagggctcggagaagccagccaaggacgaaggttcagagaagaaaccagagaaagcagcggcgaagaaacccaaggacgaggccaaggaggagggagaggttcctgagaagaaggagaagggctcgccggagccgccagccaaagaagctgcggtcggcgacgaggccccggaagcgggcggagaggagacggggggcaagaaggggaagaagaagaagaacaagcagcagaaggaargccggcgacggggacgccgctacggagaagccgccgccgccgccgccgcagcagcagcagcagcagcagccaaagacgaagcagccacagccacagcaggcgatgccgcccgtgccagcgccggggacggggccagagcgcgcgcacggccacggcggcccgttcccgtactacgcgccgcaaccggtgatgagctacaacatggcgcagccgagcgcgagcgtgtcgtactacgcgcccacgccggtggcgtccatgcagccaatgccgcctccgccgccgtacggcgggtactcgccttacccgccgatgatgatgccgccgccgccgccggagtacatgtacggcccgccaggcatgcggtcgtccccgccgcaggaaccgtacaacagcatgttcaacgaggagaaccccagttcctgtagcgtcatgtgacgccgccgccgcgccgccgccggcacgggatcgagtctgtagttaaaagtgggggtggggtgggagaggaggcttcgtaatagaagctttgtctaggctgagtggagtacgtaccctcttaattaggtggtcaaagctcttattgaccacactttttttctcttcaaattttcgacttgattagcttgtcatgtagtgacatgagtattttatttcactaatatggttatttttgcc

SEQ ID NO: 64089 - protein, 339 aa, Triticum aestivum
  peptide (1)..(339): Ceres Seq. ID no. 15222354
  misc_feature (81)..(309): Pfam Name: MARCKS family Pfam Description: MARCKS family
  misc_feature (7)..(77): Homolog of NCBI NO: 15241025 NR Description: heavy-metal-associated domain-containing protein
  misc_feature (7)..(102): Homolog of NCBI NO: 15239643 NR Description: heavy-metal-associated domain-containing protein
  misc_feature (7)..(102): Homolog of NCBI NO: 30687142 NR Description: heavy-metal-associated domain-containing protein
  misc_feature (9)..(215): Homolog of NCBI NO: 15219992 NR Description: heavy-metal-associated domain-containing protein
  misc_feature (7)..(79): Homolog of NCBI NO: 18397481 NR Description: heavy-metal-associated domain-containing protein
  misc_feature (1)..(178): Homolog of NCBI NO: 33146848 NR Description: copper chaperone (CCH)-related protein-like
  misc_feature (1)..(180): Homolog of NCBI NO: 12083536 NR Description: hypothetical protein [Oryza sativa]
  misc_feature (8)..(196): Homolog of NCBI NO: 27754505 NR Description: putative copper chaperone (CCH) protein
  misc_feature (8)..(196): Homolog of NCBI NO: 21536659 NR Description: unknown [Arabidopsis thaliana]
  misc_feature (8)..(196): Homolog of NCBI NO: 18405728 NR Description: copper chaperone (CCH)-related [Arabidopsis
  misc_feature (199)..(199): Xaa is any aa, unknown or other
MASGEAEPLQYTTTVLRVSIHCEGCKKKVKKVLHSIEGVYKVTIDATQHKVTVTGSVAADALVRRLLKSGKHAALWPMPPAPPATEAKKPGEAPSAGKGGKGAEKVDAKPKKVADEAESEGSEKPAKDEGSEKKPEKAAAKKPKDEAKEEGEVPEKKEKGSPEPPAKEAAVGDEAPEAGGEETGGKKGKKKKNKQQKEXRRRGRRYGEAAAAAAAAAAAAAAKDEAATATAGDAARASAGDGARARARPRRPVPVLRAATGDELQHGAAERERVVLRAHAGGVHAANAASAAVRRVLALPADDDAAAAAGVHVRPARHAVVPAAGTVQQHVQRGEPQFL

SEQ ID NO: 64090 - protein, 262 aa, Triticum aestivum
  peptide (1)..(262): Ceres Seq. ID no. 15222355
  misc_feature (4)..(232): Pfam Name: MARCKS family Pfam Description: MARCKS family
  misc_feature (1)..(100): Homolog of NCBI NO: 30685162 NR Description: leucine-rich repeat extensin family [Arabidopsis
  misc_feature (1)..(100): Homolog of NCBI NO: 30685162 NR Description: leucine-rich repeat extensin family [Arabidopsis
  misc_feature (1)..(25): Homolog of NCBI NO: 15239643 NR Description: heavy-metal-associated domain-containing protein
  misc_feature (1)..(25): Homolog of NCBI NO: 30687142 NR Description: heavy-metal-associated domain-containing protein
  misc_feature (1)..(138): Homolog of NCBI NO: 15219992 NR Description: heavy-metal-associated domain-containing protein
  misc_feature (1)..(101): Homolog of NCBI NO: 33146848 NR Description: copper chaperone (CCH)-related protein-like
  misc_feature (1)..(103): Homolog of NCBI NO: 12083536 NR Description: hypothetical protein [Oryza sativa]
  misc_feature (1)..(119): Homolog of NCBI NO: 27754505 NR Description: putative copper chaperone (CCH) protein
  misc_feature (1)..(119): Homolog of NCBI NO: 21536659 NR Description: unknown [Arabidopsis thaliana]
  misc_feature (1)..(119): Homolog of NCBI NO: 18405728 NR Description: copper chaperone (CCH)-related [Arabidopsis
  misc_feature (122)..(122): Xaa is any aa, unknown or other
MPPAPPATEAKKPGEAPSAGKGGKGAEKVDAKPKKVADEAESEGSEKPAKDEGSEKKPEKAAAKKPKDEAKEEGEVPEKKEKGSPEPPAKEAAVGDEAPEAGGEETGGKKGKKKKNKQQKEXRRRGRRYGEAAAAAAAAAAAAAAKDEAATATAGDAARASAGDGARARARPRRPVPVLRAATGDELQHGAAERERVVLRAHAGGVHAANAASAAVRRVLALPADDDAAAAAGVHVRPARHAVVPAAGTVQQHVQRGEPQFL

SEQ ID NO: 64091 - DNA, 521 bp, Triticum aestivum
  misc_feature (1)..(521): Ceres Seq. ID no. 13597443
atccagtatcttggccagcccatcttgacacgagaaaggaccaaacgagcctctctccgccggcggtgagaaaggagaggatggagcggcggcgcaagcctcttccgcgccggccgacgtactgcgctccttttaggtcaggtcgtccaccagccaagaagaggaagagattgggctccgagggagagattgaaccttcggccggggcggcaggagtcgaccggatcagcgccctccccgacgaactcctcggcgagatcatctccctcctccccatcaaggacggcgcccgcacccagatcctcgcgtcccggtggcgccacctctggctctccgcccctctcaacctcgactgccgtggcttcgccaccgccgccgatctcgcggtcgtcagataccgcagggtctacaacaacgtcccctctgctgtagcgcacattcttgaccgccaccaaggccccggccgccgcctccgtgtcaaggggtaccgtctccccgtcgccgccgcagccgccgccgcc

SEQ ID NO: 64092 - protein, 173 aa, Triticum aestivum
  peptide (1)..(173): Ceres Seq. ID no. 13597444
  misc_feature (75)..(120): Pfam Name: F-box domain Pfam Description: F-box domain
  misc_feature (68)..(153): Homolog of NCBI NO: 34913044 NR Description: putative ribosomal RNA apurinic site specific
  misc_feature (18)..(159): Homolog of NCBI NO: 34393661 NR Description: putative RNA apurinic site specific lyase
  misc_feature (7)..(159): Homolog of NCBI NO: 34897702 NR Description: putative ribosomal RNA apurinic site specific
  misc_feature (48)..(119): Homolog of NCBI NO: 34900708 NR Description: similar toribosomal RNA apurinic site specific
  misc_feature (66)..(164): Homolog of NCBI NO: 34912334 NR Description: putative ribosomal RNA apurinic site specific
  misc_feature (58)..(172): Homolog of NCBI NO: 34912330 NR Description: putative ribosomal RNA apurinic site specific
  misc_feature (59)..(155): Homolog of NCBI NO: 20521319 NR Description: putative ribosomal RNA apurinic site specific
  misc_feature (51)..(164): Homolog of NCBI NO: 34897688 NR Description: putative ribosomal RNA apurinic site specific
  misc_feature (49)..(164): Homolog of NCBI NO: 34897676 NR Description: putative ribosomal RNA apurinic site specific
  misc_feature (49)..(164): Homolog of NCBI NO: 34897696 NR Description: putative ribosomal RNA apurinic site specific
PVSWPAHLDTRKDQTSLSPPAVRKERMERRRKPLPRRPTYCAPFRSGRPPAKKRKRLGSEGEIEPSAGAAGVDRISALPDELLGEIISLLPIKDGARTQILASRWRHLWLSAPLNLDCRGFATAADLAVVRYRRVYNNVPSAVAHILDRHQGPGRRLRVKGYRLPVAAAAAAA

SEQ ID NO: 64093 - protein, 147 aa, Triticum aestivum
  peptide (1)..(147): Ceres Seq. ID no. 13597445
  misc_feature (49)..(94): Pfam Name: F-box domain Pfam Description: F-box domain
  misc_feature (42)..(127): Homolog of NCBI NO: 34913044 NR Description: putative ribosomal RNA apurinic site specific
  misc_feature (1)..(133): Homolog of NCBI NO: 34393661 NR Description: putative RNA apurinic site specific lyase
  misc_feature (1)..(133): Homolog of NCBI NO: 34897702 NR Description: putative ribosomal RNA apurinic site specific
  misc_feature (22)..(93): Homolog of NCBI NO: 34900708 NR Description: similar toribosomal RNA apurinic site specific
  misc_feature (40)..(138): Homolog of NCBI NO: 34912334 NR Description: putative ribosomal RNA apurinic site specific
  misc_feature (32)..(146): Homolog of NCBI NO: 34912330 NR Description: putative ribosomal RNA apurinic site specific
  misc_feature (33)..(129): Homolog of NCBI NO: 20521319 NR Description: putative ribosomal RNA apurinic site specific
  misc_feature (25)..(138): Homolog of NCBI NO: 34897688 NR Description: putative ribosomal RNA apurinic site specific
  misc_feature (23)..(138): Homolog of NCBI NO: 34897676 NR Description: putative ribosomal RNA apurinic site specific
  misc_feature (23)..(138): Homolog of NCBI NO: 34897696 NR Description: putative ribosomal RNA apurinic site specific
MERRRKPLPRRPTYCAPFRSGRPPAKKRKRLGSEGEIEPSAGAAGVDRISALPDELLGEIISLLPIKDGARTQILASRWRHLWLSAPLNLDCRGFATAADLAVVRYRRVYNNVPSAVAHILDRHQGPGRRLRVKGYRLPVAAAAAAA

SEQ ID NO: 64094 - DNA, 1851 bp, Triticum aestivum
  misc_feature (1)..(1851): Ceres Seq. ID no. 13598512
aaaattaggatcgacagtaggagtaggatttagggggaaagtagagggggaccctgcagatcgaagaaagcacagccgccgccgatgagcgcaacggagaagagcacggagggggagggggagggggaggggtcccagcgcgtggaggcgttcctcgacatcctcggccgcgtcccgatgggggaggtggagggggcgctgacctcctgcggcgtcggcccgacggcggaggccgcggagcaggtgctcaagtccgaaacctgctactcccgccccaaatcggccgtccgcttcttccgctgggcgaaggcgtccgtgcagctcacccccttggcctggaacctcctcgtcgacatcctcggtaaggccgccatgttcgatcccatgtgggacgccgtcctctccatgagccaggagggcggcctcctctccgtcgccacattcgcctccatgttcgcctcctactgcgcgcgcggcaacttcaaggaagccgccakggccttcgacgtcatggagcgccacggcgtgacgccggacgccgttgccctcaactccctcctcgccgccatgtgccgccgggatggcggcgggcaggccgcgtgggagcttttcgaacgctacaagaccacggtcgcgcccgacgccgacaccttcgcgatactgctcgaggcgtgggagaaggaggggaacgtccagcgcgccaagagcaccttcggcgagatggtcgtccgcgtcgggtgggacgccagcaacatgcctgcctacgatgctttcctctccacgctcgtgcgaggggaccagttcaacgaggcactcaagttcctccaggtgatgcggaccaagggctgcctcccggggctcaagttctttgccaacgcgatcgaccttgtcgtccgcaagggagaccatgccaatgctattgctatctggcaaattatggtctcggatgcaggactggttcccaatctcccaatgtacaacgccgtaattggcctctgctctagtgtcggtaacaccgactacgccttccagatgctcgatgaaatgcccttaaatggggtctttgcagattctgatacatataattccatacttgaggggctcatcaagcagcgcaaggctcgtgagactgaaggtttcctcgcggagatgagcaagaacgagcagctgccctccgcctccaactgtgctgctgctatcagcttattttgtcaggagtttaacccatctgccgcagttgacgtttggcactgcatcgtggagcaccaaattactccggctgaggaatcagccaaagagttaatagctgggcttctcgactttagcaggttcgccgaggtgaagaaatataccgatcagatgcttgacatgggaattgagttgccccagtccaccattgaaaaaatgaagcgagcattttacaaggctgagaggcaccacacatatgaccaacttgcacgaaggttgaagcggcggtaacaacacattgatggtataattcattagaaacgagcgagaccgagaagctgtaggatgaggtttcatgctgccagagcaagctgcggtatgtattcaaagtggaaagtggatggaagtctttggtgcagcgggtacaggttctggatgttgttttgcgccactggttgtatggaagatgtttcctggaagtatagcattgtactgttgtacttggcatggaagagcagtttctgagatagctgtaatgctgtacttttgcgttaactggagtagcctgttgccttttaaaaaaaaaaaaaaaaaagcttatcgataccgtcgacctcgagggggggcccgkttaaacmcaataaagttggaactggagggggg

SEQ ID NO: 64095 - protein, 464 aa, Triticum aestivum
  peptide (1)..(464): Ceres Seq. ID no. 15222356
  misc_feature (34)..(434): Homolog of NCBI NO: 15219461 NR Description: pentatricopeptide (PPR) repeat-containing protein
  misc_feature (5)..(441): Homolog of NCBI NO: 15228825 NR Description: pentatricopeptide (PPR) repeat-containing protein
  misc_feature (1)..(457): Homolog of NCBI NO: 21686921 NR Description: putative reverse transcriptase
  misc_feature (29)..(463): Homolog of NCBI NO: 15219049 NR Description: hypothetical protein [Arabidopsis thaliana]
  misc_feature (1)..(464): Homolog of NCBI NO: 15241508 NR Description: pentatricopeptide (PPR) repeat-containing protein
  misc_feature (1)..(464): Homolog of NCBI NO: 15228788 NR Description: pentatricopeptide (PPR) repeat-containing protein
  misc_feature (1)..(462): Homolog of NCBI NO: 15228767 NR Description: pentatricopeptide (PPR) repeat-containing protein
  misc_feature (15)..(463): Homolog of NCBI NO: 15223927 NR Description: pentatricopeptide (PPR) repeat-containing protein
  misc_feature (26)..(450): Homolog of NCBI NO: 15223926 NR Description: pentatricopeptide (PPR) repeat-containing protein
  misc_feature (35)..(461): Homolog of NCBI NO: 14488357 NR Description: unknown protein [Oryza sativa (japonica
  misc_feature (138)..(138): Xaa is any aa, unknown or other
MSATEKSTEGEGEGEGSQRVEAFLDILGRVPMGEVEGALTSCGVGPTAEAAEQVLKSETCYSRPKSAVRFFRWAKASVQLTPLAWNLLVDILGKAAMFDPMWDAVLSMSQEGGLLSVATFASMFASYCARGNFKEAAXAFDVMERHGVTPDAVALNSLLAAMCRRDGGGQAAWELFERYKTTVAPDADTFAILLEAWEKEGNVQRAKSTFGEMVVRVGWDASNMPAYDAFLSTLVRGDQFNEALKFLQVMRTKGCLPGLKFFANAIDLVVRKGDHANAIAIWQIMVSDAGLVPNLPMYNAVIGLCSSVGNTDYAFQMLDEMPLNGVFADSDTYNSILEGLIKQRKARETEGFLAEMSKNEQLPSASNCAAAISLFCQEFNPSAAVDVWHCIVEHQITPAEESAKELIAGLLDFSRFAEVKKYTDQMLDMGIELPQSTIEKMKRAFYKAERHHTYDQLARRLKRR

SEQ ID NO: 64096 - protein, 433 aa, Triticum aestivum
  peptide (1)..(433): Ceres Seq. ID no. 15222357
  misc_feature (3)..(403): Homolog of NCBI NO: 15219461 NR Description: pentatricopeptide (PPR) repeat-containing protein
  misc_feature (1)..(410): Homolog of NCBI NO: 15228825 NR Description: pentatricopeptide (PPR) repeat-containing protein
  misc_feature (1)..(426): Homolog of NCBI NO: 21686921 NR Description: putative reverse transcriptase
  misc_feature (1)..(432): Homolog of NCBI NO: 15219049 NR Description: hypothetical protein [Arabidopsis thaliana]
  misc_feature (1)..(433): Homolog of NCBI NO: 15241508 NR Description: pentatricopeptide (PPR) repeat-containing protein
  misc_feature (1)..(433): Homolog of NCBI NO: 15228788 NR Description: pentatricopeptide (PPR) repeat-containing protein
  misc_feature (1)..(431): Homolog of NCBI NO: 15228767 NR Description: pentatricopeptide (PPR) repeat-containing protein
  misc_feature (1)..(432): Homolog of NCBI NO: 15223927 NR Description: pentatricopeptide (PPR) repeat-containing protein
  misc_feature (1)..(419): Homolog of NCBI NO: 15223926 NR Description: pentatricopeptide (PPR) repeat-containing protein
  misc_feature (4)..(430): Homolog of NCBI NO: 14488357 NR Description: unknown protein [Oryza sativa (japonica
  misc_feature (107)..(107): Xaa is any aa, unknown or other
MGEVEGALTSCGVGPTAEAAEQVLKSETCYSRPKSAVRFFRWAKASVQLTPLAWNLLVDILGKAAMFDPMWDAVLSMSQEGGLLSVATFASMFASYCARGNFKEAAXAFDVMERHGVTPDAVALNSLLAAMCRRDGGGQAAWELFERYKTTVAPDADTFAILLEAWEKEGNVQRAKSTFGEMVVRVGWDASNMPAYDAFLSTLVRGDQFNEALKFLQVMRTKGCLPGLKFFANAIDLVVRKGDHANAIAIWQIMVSDAGLVPNLPMYNAVIGLCSSVGNTDYAFQMLDEMPLNGVFADSDTYNSILEGLIKQRKARETEGFLAEMSKNEQLPSASNCAAAISLFCQEFNPSAAVDVWHCIVEHQITPAEESAKELIAGLLDFSRFAEVKKYTDQMLDMGIELPQSTIEKMKRAFYKAERHHTYDQLARRLKRR

SEQ ID NO: 64097 - protein, 368 aa, Triticum aestivum
  peptide (1)..(368): Ceres Seq. ID no. 15222358
  misc_feature (1)..(338): Homolog of NCBI NO: 15219461 NR Description: pentatricopeptide (PPR) repeat-containing protein
  misc_feature (1)..(345): Homolog of NCBI NO: 15228825 NR Description: pentatricopeptide (PPR) repeat-containing protein
  misc_feature (1)..(361): Homolog of NCBI NO: 21686921 NR Description: putative reverse transcriptase
  misc_feature (1)..(367): Homolog of NCBI NO: 15219049 NR Description: hypothetical protein [Arabidopsis thaliana]
  misc_feature (1)..(368): Homolog of NCBI NO: 15241508 NR Description: pentatricopeptide (PPR) repeat-containing protein
  misc_feature (1)..(368): Homolog of NCBI NO: 15228788 NR Description: pentatricopeptide (PPR) repeat-containing protein
  misc_feature (1)..(366): Homolog of NCBI NO: 15228767 NR Description: pentatricopeptide (PPR) repeat-containing protein
  misc_feature (1)..(367): Homolog of NCBI NO: 15223927 NR Description: pentatricopeptide (PPR) repeat-containing protein
  misc_feature (1)..(354): Homolog of NCBI NO: 15223926 NR Description: pentatricopeptide (PPR) repeat-containing protein
  misc_feature (1)..(365): Homolog of NCBI NO: 14488357 NR Description: unknown protein [Oryza sativa (japonica
  misc_feature (42)..(42): Xaa is any aa, unknown or other
MFDPMWDAVLSMSQEGGLLSVATFASMFASYCARGNFKEAAXAFDVMERHGVTPDAVALNSLLAAMCRRDGGGQAAWELFERYKTTVAPDADTFAILLEAWEKEGNVQRAKSTFGEMVVRVGWDASNMPAYDAFLSTLVRGDQFNEALKFLQVMRTKGCLPGLKFFANAIDLVVRKGDHANAIAIWQIMVSDAGLVPNLPMYNAVIGLCSSVGNTDYAFQMLDEMPLNGVFADSDTYNSILEGLIKQRKARETEGFLAEMSKNEQLPSASNCAAAISLFCQEFNPSAAVDVWHCIVEHQITPAEESAKELIAGLLDFSRFAEVKKYTDQMLDMGIELPQSTIEKMKRAFYKAERHHTYDQLARRLKRR

SEQ ID NO: 64098 - DNA, 1662 bp, Triticum aestivum
  misc_feature (1)..(1662): Ceres Seq. ID no. 13597446
aaacgaaaaaggtggcgagagggagagggagaggaaggtgccggccctagcaatggcggggtggtacgaggaggcggcgggtctgctgctgcgccggtcggcgttggcggagatggcggtagatgtgctgctgtgcgccgtgccgatctgggcggcggtcatgatctgcctcttcatagggtgggcatggcggccgcgctggaccgggctgatcttcctcggtttccgcagccgtctccggctcctctacgtgcctcccgggctcggcgcgcgccgcctatggctcgcctgcaccgcgctctccgccttctccgtcgcgccgcagctgctctcctccgccttccgccgccatgggaagtaccagcgcaaggattcctcgaacgacgacacggacgcctgcggggattctggcgcttgcgctaacggcaggtcaatttttgaggtcaagcatggtattgtcactgagaaggacctagatcacctcgtgcagcttttagataataaggagagtgggcatacaacatggcagcatttgatggagcgtaccacttccaacatgacgtacaaggcctggaggcatgagcccgaggtgggacctataatgcattgtagccagaccattttcgaggatgctactcctgaactggttagagatttcttctgggatgatgattttcgtctaaagtgggaccccatgcttgtgtgcttcaaaattttggatgagttccctctgaatggaaccacaattattcactggattaaaaagttccctttcttctgcagtgaccgtgaatacatttttgggcggcgtatctgggagtcggggaaggcttactattgtgttacgaagggaattccttatccatctttgcccaagaaggaaaaaccgaggcgtgtggaattgtacttctcgagttggcgtattagacctgttcaatcgcccaaaaaagatggccagcaacacatggcatgtgaagtaacactgtttcactacgaggatatgggcatacccaaggatgttgctaaagttggtgtccgccacggcatgtggggtgctgttaaaaagctgcagtccggctttagagcatatcagctaatgagaaaatcagaaaacatcctgtcacgcagtgccatcatggctcgggtgaccaccaagacatgcattgctggttctgatggctccttggatcaagggcccttcagcacagaacaagccagtacagaggacgacaactccagggcagtccaacatggtttcgactggaagtgggtggtggtcggtggcgcggtggctgccgtttgcgtgcttaacaccggaattgtagggaaggccctcttacttggagctgcaagaaggcaggcaaagaagtgatgagcatctaccagcatccacaaagtgagcttcacgaccatcagggcctgtctctgtctagaaagtcgcaatcgagaccgaggataaaggaatgaaatccataccatactacaggatgcagataattcgggtgcctaattttggattgtgccttttaagcagtatatcgcaaatgtgtcttgctataaccgattatgtggtatcaggaatcgttagatgacgatgtatctcaagatgtgagttctgttaacaacatttgctaacttccaagttccaagagtgcacttttc

SEQ ID NO: 64099 - protein, 456 aa, Triticum aestivum
  peptide (1)..(456): Ceres Seq. ID no. 13597447
  misc_feature (204)..(281): Pfam Name: START domain Pfam Description: START domain
  misc_feature (41)..(70): Homolog of NCBI NO: 22135902 NR Description: membrane related protein CP5, putative
  misc_feature (149)..(455): Homolog of NCBI NO: 22135902 NR Description: membrane related protein CP5, putative
  misc_feature (31)..(394): Homolog of NCBI NO: 7485064 NR Description: hypothetical protein - Arabidopsis thaliana
  misc_feature (29)..(74): Homolog of NCBI NO: 38344869 NR Description: OSJNBa0020P07.12 [Oryza sativa (japonica
  misc_feature (147)..(454): Homolog of NCBI NO: 38344869 NR Description: OSJNBa0020P07.12 [Oryza sativa (japonica
  misc_feature (32)..(456): Homolog of NCBI NO: 15810257 NR Description: unknown protein [Arabidopsis thaliana]
  misc_feature (32)..(456): Homolog of NCBI NO: 18403635 NR Description: expressed protein [Arabidopsis thaliana]
  misc_feature (31)..(456): Homolog of NCBI NO: 18414239 NR Description: expressed protein [Arabidopsis thaliana]
  misc_feature (18)..(60): Homolog of NCBI NO: 34393225 NR Description: putative membrane related protein CP5
  misc_feature (109)..(456): Homolog of NCBI NO: 34393225 NR Description: putative membrane related protein CP5
NEKGGERERERKVPALAMAGWYEEAAGLLLRRSALAEMAVDVLLCAVPIWAAVMICLFIGWAWRPRWTGLIFLGFRSRLRLLYVPPGLGARRLWLACTALSAFSVAPQLLSSAFRRHGKYQRKDSSNDDTDACGDSGACANGRSIFEVKHGIVTEKDLDHLVQLLDNKESGHTTWQHLMERTTSNMTYKAWRHEPEVGPIMHCSQTIFEDATPELVRDFFWDDDFRLKWDPMLVCFKILDEFPLNGTTIIHWIKKFPFFCSDREYIFGRRIWESGKAYYCVTKGIPYPSLPKKEKPRRVELYFSSWRIRPVQSPKKDGQQHMACEVTLFHYEDMGIPKDVAKVGVRHGMWGAVKKLQSGFRAYQLMRKSENILSRSAIMARVTTKTCIAGSDGSLDQGPFSTEQASTEDDNSRAVQHGFDWKWVVVGGAVAAVCVLNTGIVGKALLLGAARRQAKK

SEQ ID NO: 64100 - protein, 439 aa, Triticum aestivum
  peptide (1)..(439): Ceres Seq. ID no. 13597448
  misc_feature (187)..(264): Pfam Name: START domain Pfam Description: START domain
  misc_feature (24)..(53): Homolog of NCBI NO: 22135902 NR Description: membrane related protein CP5, putative
  misc_feature (132)..(438): Homolog of NCBI NO: 22135902 NR Description: membrane related protein CP5, putative
  misc_feature (14)..(377): Homolog of NCBI NO: 7485064 NR Description: hypothetical protein - Arabidopsis thaliana
  misc_feature (12)..(57): Homolog of NCBI NO: 38344869 NR Description: OSJNBa0020P07.12 [Oryza sativa (japonica
  misc_feature (130)..(437): Homolog of NCBI NO: 38344869 NR Description: OSJNBa0020P07.12 [Oryza sativa (japonica
  misc_feature (15)..(439): Homolog of NCBI NO: 15810257 NR Description: unknown protein [Arabidopsis thaliana]
  misc_feature (15)..(439): Homolog of NCBI NO: 18403635 NR Description: expressed protein [Arabidopsis thaliana]
  misc_feature (14)..(439): Homolog of NCBI NO: 18414239 NR Description: expressed protein [Arabidopsis thaliana]
  misc_feature (1)..(43): Homolog of NCBI NO: 34393225 NR Description: putative membrane related protein CP5
  misc_feature (92)..(439): Homolog of NCBI NO: 34393225 NR Description: putative membrane related protein CP5
MAGWYEEAAGLLLRRSALAEMAVDVLLCAVPIWAAVMICLFIGWAWRPRWTGLIFLGFRSRLRLLYVPPGLGARRLWLACTALSAFSVAPQLLSSAFRRHGKYQRKDSSNDDTDACGDSGACANGRSIFEVKHGIVTEKDLDHLVQLLDNKESGHTTWQHLMERTTSNMTYKAWRHEPEVGPIMHCSQTIFEDATPELVRDFFWDDDFRLKWDPMLVCFKILDEFPLNGTTIIHWIKKFPFFCSDREYIFGRRIWESGKAYYCVTKGIPYPSLPKKEKPRRVELYFSSWRIRPVQSPKKDGQQHMACEVTLFHYEDMGIPKDVAKVGVRHGMWGAVKKLQSGFRAYQLMRKSENILSRSAIMARVTTKTCIAGSDGSLDQGPFSTEQASTEDDNSRAVQHGFDWKWVVVGGAVAAVCVLNTGIVGKALLLGAARRQAKK

SEQ ID NO: 64101 - protein, 419 aa, Triticum aestivum
  peptide (1)..(419): Ceres Seq. ID no. 13597449
  misc_feature (167)..(244): Pfam Name: START domain Pfam Description: START domain
  misc_feature (4)..(33): Homolog of NCBI NO: 22135902 NR Description: membrane related protein CP5, putative
  misc_feature (112)..(418): Homolog of NCBI NO: 22135902 NR Description: membrane related protein CP5, putative
  misc_feature (1)..(357): Homolog of NCBI NO: 7485064 NR Description: hypothetical protein - Arabidopsis thaliana
  misc_feature (1)..(37): Homolog of NCBI NO: 38344869 NR Description: OSJNBa0020P07.12 [Oryza sativa (japonica
  misc_feature (110)..(417): Homolog of NCBI NO: 38344869 NR Description: OSJNBa0020P07.12 [Oryza sativa (japonica
  misc_feature (1)..(419): Homolog of NCBI NO: 15810257 NR Description: unknown protein [Arabidopsis thaliana]
  misc_feature (1)..(419): Homolog of NCBI NO: 18403635 NR Description: expressed protein [Arabidopsis thaliana]
  misc_feature (1)..(419): Homolog of NCBI NO: 18414239 NR Description: expressed protein [Arabidopsis thaliana]
  misc_feature (1)..(23): Homolog of NCBI NO: 34393225 NR Description: putative membrane related protein CP5
  misc_feature (72)..(419): Homolog of NCBI NO: 34393225 NR Description: putative membrane related protein CP5
MAVDVLLCAVPIWAAVMICLFIGWAWRPRWTGLIFLGFRSRLRLLYVPPGLGARRLWLACTALSAFSVAPQLLSSAFRRHGKYQRKDSSNDDTDACGDSGACANGRSIFEVKHGIVTEKDLDHLVQLLDNKESGHTTWQHLMERTTSNMTYKAWRHEPEVGPIMHCSQTIFEDATPELVRDFFWDDDFRLKWDPMLVCFKILDEFPLNGTTIIHWIKKFPFFCSDREYIFGRRIWESGKAYYCVTKGIPYPSLPKKEKPRRVELYFSSWRIRPVQSPKKDGQQHMACEVTLFHYEDMGIPKDVAKVGVRHGMWGAVKKLQSGFRAYQLMRKSENILSRSAIMARVTTKTCIAGSDGSLDQGPFSTEQASTEDDNSRAVQHGFDWKWVVVGGAVAAVCVLNTGIVGKALLLGAARRQAKK

SEQ ID NO: 64102 - DNA, 1412 bp, Triticum aestivum
  misc_feature (1)..(1412): Ceres Seq. ID no. 13598513
atgtacctaaccttgcaacaaagttcagttgaaaaccaccactagtctgtgcccatggcgaccttctccaacgaggagcttctgcaggcgcacaccgagctctgggacctcaccttcggctacctcaaatccatggcgctcgagtgcgccatcaagctcggcctcccaaacgccatccaccgccgcggcggcgacgccacgctgccggacttgctcgacgcagtttccgtcccggagagcaagaaggcgcacctgcctcgcctcatgaggtttctcggcgcgttcggcatcttcaccgccgacgcacccgctgcaggggagcgcgcgaatggggaggaggcgggcgccgtctacggcctcacgccggtgtcccgcctcctcgtggacgactccggcgccaacgggtcgtgcgggagcctctcgccgttcgtgctctcccagacgaccaagtaccacgtgaaggcggccatgcacctgccggagtggttcacgagcgacgacggcgcggccgcggcggagatgccgttccggacggcgcacggcgcagacctgtggggcgtcatggaccgcgaccccaagatgaaccaggtcttcaacgccggcatggggtccgacacccagctcgcgatggacttcgtcatcggcaactacggcgacgtgttcgacggggtgacctcgctggtcgacgtcggcggcgggacaggctccgcggcgagggccatagccaaggccttcccgcacgtcaagtgctccgtgctcgacctccccaacgtggtcaattccgtcccgcccgacggcgtggtcgagtacatctcaggcgacatgatgagctccattccggcgaccgatgcggtcttcctcaagtacatcatgcatgactggaacgacgaggactgcgtgaagatcctgaagcagtgcaagaaggcgatccccgaatcaggcgggaaagtgataatcgtggacatagtggtgggatctcctttgaaagccatgctggaagcccaggtctcgtttgatctgctgatgatggtgatcacgggaggcaaggagcgcgacgagcatgagtggcgcaagattttcatggacgcggggttcagccatcacaagacaagacctgttttgggatttatggccatcaccgagctgtatgcttagccctgcatgcctgattgcagcagatatctgctgtaacgtgtgtgtaagcgttggtcctgcgatgttcgtcgtggttgtgcagccccaaagtgtctttctgcagcaacgatttgttcctacgcctttaaaggctcccatatttgtatgatctgttgctagggtatatgcacttaataaactagatgacaccccgcccgttgctgcgggaattgtagcaattaaaaaattggaaattggacaaatgaaaagataattcg

SEQ ID NO: 64103 - protein, 366 aa, Triticum aestivum
  peptide (1)..(366): Ceres Seq. ID no. 13598514
  misc_feature (99)..(342): Pfam Name: O-methyltransferase Pfam Description: O-methyltransferase
  misc_feature (94)..(365): Homolog of NCBI NO: 26891694 NR Description: O-methyltransferase [Catharanthus roseus]
  misc_feature (11)..(365): Homolog of NCBI NO: 27777630 NR Description: O-methyltransferase [Secale cereale]
  misc_feature (5)..(365): Homolog of NCBI NO: 1353193 NR Description: O-METHYLTRANSFERASE ZRP4 (OMT)
  misc_feature (5)..(365): Homolog of NCBI NO: 37530606 NR Description: putative o-methyltransferase ZRP4
  misc_feature (5)..(365): Homolog of NCBI NO: 37530600 NR Description: putative o-methyltransferase ZRP4
  misc_feature (7)..(365): Homolog of NCBI NO: 34909608 NR Description: putative o-methyltransferase
  misc_feature (6)..(365): Homolog of NCBI NO: 22093735 NR Description: putative o-methyltransferase
  misc_feature (1)..(364): Homolog of NCBI NO: 453244 NR Description: flavonoid 7-O-methyltransferase [Hordeum vulgare
  misc_feature (1)..(364): Homolog of NCBI NO: 2130032 NR Description: catechol O-methyltransferase (EC 2.1.1.6) - barley
  misc_feature (1)..(365): Homolog of NCBI NO: 38175602 NR Description: putative catechol O-methyltransferase
MATFSNEELLQAHTELWDLTFGYLKSMALECAIKLGLPNAIHRRGGDATLPDLLDAVSVPESKKAHLPRLMRFLGAFGIFTADAPAAGERANGEEAGAVYGLTPVSRLLVDDSGANGSCGSLSPFVLSQTTKYHVKAAMHLPEWFTSDDGAAAAEMPFRTAHGADLWGVMDRDPKMNQVFNAGMGSDTQLAMDFVIGNYGDVFDGVTSLVDVGGGTGSAARAIAKAFPHVKCSVLDLPNVVNSVPPDGVVEYISGDMMSSIPATDAVFLKYIMHDWNDEDCVKILKQCKKAIPESGGKVIIVDIVVGSPLKAMLEAQVSFDLLMMVITGGKERDEHEWRKIFMDAGFSHHKTRPVLGFMAITELYA

SEQ ID NO: 64104 - protein, 340 aa, Triticum aestivum
  peptide (1)..(340): Ceres Seq. ID no. 13598515
  misc_feature (73)..(316): Pfam Name: O-methyltransferase Pfam Description: O-methyltransferase
  misc_feature (68)..(339): Homolog of NCBI NO: 26891694 NR Description: O-methyltransferase [Catharanthus roseus]
  misc_feature (1)..(339): Homolog of NCBI NO: 27777630 NR Description: O-methyltransferase [Secale cereale]
  misc_feature (1)..(339): Homolog of NCBI NO: 1353193 NR Description: O-METHYLTRANSFERASE ZRP4 (OMT)
  misc_feature (1)..(339): Homolog of NCBI NO: 37530606 NR Description: putative o-methyltransferase ZRP4
  misc_feature (1)..(339): Homolog of NCBI NO: 37530600 NR Description: putative o-methyltransferase ZRP4
  misc_feature (1)..(339): Homolog of NCBI NO: 34909608 NR Description: putative o-methyltransferase
  misc_feature (1)..(339): Homolog of NCBI NO: 22093735 NR Description: putative o-methyltransferase
  misc_feature (1)..(338): Homolog of NCBI NO: 453244 NR Description: flavonoid 7-O-methyltransferase [Hordeum vulgare
  misc_feature (1)..(338): Homolog of NCBI NO: 2130032 NR Description: catechol O-methyltransferase (EC 2.1.1.6) - barley
  misc_feature (1)..(339): Homolog of NCBI NO: 38175602 NR Description: putative catechol O-methyltransferase
MALECAIKLGLPNAIHRRGGDATLPDLLDAVSVPESKKAHLPRLMRFLGAFGIFTADAPAAGERANGEEAGAVYGLTPVSRLLVDDSGANGSCGSLSPFVLSQTTKYHVKAAMHLPEWFTSDDGAAAAEMPFRTAHGADLWGVMDRDPKMNQVFNAGMGSDTQLAMDFVIGNYGDVFDGVTSLVDVGGGTGSAARAIAKAFPHVKCSVLDLPNVVNSVPPDGVVEYISGDMMSSIPATDAVFLKYIMHDWNDEDCVKILKQCKKAIPESGGKVIIVDIVVGSPLKAMLEAQVSFDLLMMVITGGKERDEHEWRKIFMDAGFSHHKTRPVLGFMAITELYA

SEQ ID NO: 64105 - protein, 296 aa, Triticum aestivum
  peptide (1)..(296): Ceres Seq. ID no. 13598516
  misc_feature (29)..(272): Pfam Name: O-methyltransferase Pfam Description: O-methyltransferase
  misc_feature (24)..(295): Homolog of NCBI NO: 26891694 NR Description: O-methyltransferase [Catharanthus roseus]
  misc_feature (1)..(295): Homolog of NCBI NO: 27777630 NR Description: O-methyltransferase [Secale cereale]
  misc_feature (1)..(295): Homolog of NCBI NO: 1353193 NR Description: O-METHYLTRANSFERASE ZRP4 (OMT)
  misc_feature (1)..(295): Homolog of NCBI NO: 37530606 NR Description: putative o-methyltransferase ZRP4
  misc_feature (1)..(295): Homolog of NCBI NO: 37530600 NR Description: putative o-methyltransferase ZRP4
  misc_feature (1)..(295): Homolog of NCBI NO: 34909608 NR Description: putative o-methyltransferase
  misc_feature (1)..(295): Homolog of NCBI NO: 22093735 NR Description: putative o-methyltransferase
  misc_feature (1)..(294): Homolog of NCBI NO: 453244 NR Description: flavonoid 7-O-methyltransferase [Hordeum vulgare
  misc_feature (1)..(294): Homolog of NCBI NO: 2130032 NR Description: catechol O-methyltransferase (EC 2.1.1.6) - barley
  misc_feature (1)..(295): Homolog of NCBI NO: 38175602 NR Description: putative catechol O-methyltransferase
MRFLGAFGIFTADAPAAGERANGEEAGAVYGLTPVSRLLVDDSGANGSCGSLSPFVLSQTTKYHVKAAMHLPEWFTSDDGAAAAEMPFRTAHGADLWGVMDRDPKMNQVFNAGMGSDTQLAMDFVIGNYGDVFDGVTSLVDVGGGTGSAARAIAKAFPHVKCSVLDLPNVVNSVPPDGVVEYISGDMMSSIPATDAVFLKYIMHDWNDEDCVKILKQCKKAIPESGGKVIIVDIVVGSPLKAMLEAQVSFDLLMMVITGGKERDEHEWRKIFMDAGFSHHKTRPVLGFMAITELYA

SEQ ID NO: 64106 - DNA, 1594 bp, Triticum aestivum
  misc_feature (1)..(1594): Ceres Seq. ID no. 13597407
accaagacgacgcgagcgccatggcgcacgatggagcttcccatggagcgaccaccgccccgctgctcgcgtcgacggagaagccaccgcggaacatgtacgccttcggctgcgccacgctggcctccatgaccacgatcctcatgggttacaatctcgcgctgatgagcggcgcgcagctcttcatccgggaggacctggggcttaccgacgagcaggtggaggtactggctgggtccatgaacgtgtacatgctcgtgtccatcctcgccgccggctgggcggccgacctcctgggccgccgcggcacgctcgtgctcgccaacggcttcctcatggccggcgcgctcgccatgtcgcttggcggcagctacgcggcgctcatggccgcgcgcttcatcaccagcatcggcgttggcttctccctcgtcgtcgcgccggtctacaacgccgagatctcgccggcctccgcgcgtggcgtgctttcctcgttactcgatatatttgtcaacgtcggcatcctgctcagttacgtgtcgaactacgccttggctggcctgccggtgcacctcagttggcgcgtcatgtacgccatcggcgtgctcccaccggtgctcctcgccgccggggtgctcgccatgccggagtccccgcggtggctcgccatgcgcgggcgcgaggacgacgcgcgcgcagtgctcgtgcgcacctccgataccgccgccgaggccgagctccggtttgaggagatcaagcgggtcgtcgaggcgccgcgagaagccgatagcggcgtgtggcgggagctgatctttcgaccgtcagcgatggtccggcggatccttgtcttcgtggtcgggctcaacttcctccagcaagcgttgggcgtcgacgccatcctgctgtacagcccgctcatgttcaagaaggcaggcatgtcgtcgaatagcgccatcttgggcgccaccgtggccatcggtgtcgtcaagacgtgcttcatactcgtggtctcgctcttttccgaccgcttcggccggcggccgctcctgctggccagcgccggcggcgtggccgcctcgctgaccggcctggctctcacactctgcatcggcgagacgtcgccagcgagcacggctgcctgcgtggcgttcacgctggccacggtcgcggcgttttcggtcgggtgggggtcgctcccgtccacgtacacggcagagatcacgccgctgcggctgcgtgcgcagggctcgagcctgggcatggcggtgaaccggctgacttgcggggtggtaagcatgtcgttcatatcgctagcgggctggatcaccatgcccgggtgcttctttctgtacgccagtatggcggccacggcgtacgtgttcgtcttcctgcgcctgccagagacgaagggccggaccctagaggagatggacgtgctcttttccaaatgattatgtcatctgtaggttttcggccacagttcaatgcacgctgttgcggcccgcagcacgtttggtagaaacctttgaaaaaaaaatgtgtgaactcttttgtgattgcatcatcgatagggatcaataaaaggcttctactcctc

SEQ ID NO: 64107 - protein, 481 aa, Triticum aestivum
  peptide (1)..(481): Ceres Seq. ID no. 13597408
  misc_feature (37)..(479): Pfam Name: Sugar (and other) transporter Pfam Description: Sugar (and other) transporter
  misc_feature (43)..(481): Homolog of NCBI NO: 29691878 NR Description: sorbitol transporter [Malus x domestica]
  misc_feature (27)..(481): Homolog of NCBI NO: 30025133 NR Description: putative sorbitol transporter [Prunus cerasus]
  misc_feature (8)..(481): Homolog of NCBI NO: 28316433 NR Description: sorbitol transporter [Prunus cerasus]
QDDASAMAHDGASHGATTAPLLASTEKPPRNMYAFGCATLASMTTILMGYNLALMSGAQLFIREDLGLTDEQVEVLAGSMNVYMLVSILAAGWAADLLGRRGTLVLANGFLMAGALAMSLGGSYAALMAARFITSIGVGFSLVVAPVYNAEISPASARGVLSSLLDIFVNVGILLSYVSNYALAGLPVHLSWRVMYAIGVLPPVLLAAGVLAMPESPRWLAMRGREDDARAVLVRTSDTAAEAELRFEEIKRVVEAPREADSGVWRELIFRPSAMVRRILVFVVGLNFLQQALGVDAILLYSPLMFKKAGMSSNSAILGATVAIGVVKTCFILVVSLFSDRFGRRPLLLASAGGVAASLTGLALTLCIGETSPASTAACVAFTLATVAAFSVGWGSLPSTYTAEITPLRLRAQGSSLGMAVNRLTCGVVSMSFISLAGWITMPGCFFLYASMAATAYVFVFLRLPETKGRTLEEMDVLFSK

SEQ ID NO: 64108 - protein, 475 aa, Triticum aestivum
  peptide (1)..(475): Ceres Seq. ID no. 13597409
  misc_feature (31)..(473): Pfam Name: Sugar (and other) transporter Pfam Description: Sugar (and other) transporter
  misc_feature (37)..(475): Homolog of NCBI NO: 29691878 NR Description: sorbitol transporter [Malus x domestica]
  misc_feature (21)..(475): Homolog of NCBI NO: 30025133 NR Description: putative sorbitol transporter [Prunus cerasus]
  misc_feature (2)..(475): Homolog of NCBI NO: 28316433 NR Description: sorbitol transporter [Prunus cerasus]
MAHDGASHGATTAPLLASTEKPPRNMYAFGCATLASMTTILMGYNLALMSGAQLFIREDLGLTDEQVEVLAGSMNVYMLVSILAAGWAADLLGRRGTLVLANGFLMAGALAMSLGGSYAALMAARFITSIGVGFSLVVAPVYNAEISPASARGVLSSLLDIFVNVGILLSYVSNYALAGLPVHLSWRVMYAIGVLPPVLLAAGVLAMPESPRWLAMRGREDDARAVLVRTSDTAAEAELRFEEIKRVVEAPREADSGVWRELIFRPSAMVRRILVFVVGLNFLQQALGVDAILLYSPLMFKKAGMSSNSAILGATVAIGVVKTCFILVVSLFSDRFGRRPLLLASAGGVAASLTGLALTLCIGETSPASTAACVAFTLATVAAFSVGWGSLPSTYTAEITPLRLRAQGSSLGMAVNRLTCGVVSMSFISLAGWITMPGCFFLYASMAATAYVFVFLRLPETKGRTLEEMDVLFSK

SEQ ID NO: 64109 - protein, 450 aa, Triticum aestivum
  peptide (1)..(450): Ceres Seq. ID no. 13597410
  misc_feature (6)..(448): Pfam Name: Sugar (and other) transporter Pfam Description: Sugar (and other) transporter
  misc_feature (12)..(450): Homolog of NCBI NO: 29691878 NR Description: sorbitol transporter [Malus x domestica]
  misc_feature (1)..(450): Homolog of NCBI NO: 30025133 NR Description: putative sorbitol transporter [Prunus cerasus]
  misc_feature (1)..(450): Homolog of NCBI NO: 28316433 NR Description: sorbitol transporter [Prunus cerasus]
MYAFGCATLASMTTILMGYNLALMSGAQLFIREDLGLTDEQVEVLAGSMNVYMLVSILAAGWAADLLGRRGTLVLANGFLMAGALAMSLGGSYAALMAARFITSIGVGFSLVVAPVYNAEISPASARGVLSSLLDIFVNVGILLSYVSNYALAGLPVHLSWRVMYAIGVLPPVLLAAGVLAMPESPRWLAMRGREDDARAVLVRTSDTAAEAELRFEEIKRVVEAPREADSGVWRELIFRPSAMVRRILVFVVGLNFLQQALGVDAILLYSPLMFKKAGMSSNSAILGATVAIGVVKTCFILVVSLFSDRFGRRPLLLASAGGVAASLTGLALTLCIGETSPASTAACVAFTLATVAAFSVGWGSLPSTYTAEITPLRLRAQGSSLGMAVNRLTCGVVSMSFISLAGWITMPGCFFLYASMAATAYVFVFLRLPETKGRTLEEMDVLFSK

SEQ ID NO: 64110 - DNA, 1115 bp, Triticum aestivum
  misc_feature (1)..(1115): Ceres Seq. ID no. 13584234
agggtaaagcggcctggcgatggccacagcgcgactactgctccgaagcgcctccctgctccccctccgccgctcgcccctgcactcatccggcttccagccccgagccgccatggcctccgatgccgccagccagttccagaagatccagatccagcgcgaggacacgacctttgatgtctatgttgttggcaaagaaaatgctcctggagtcgtagtgttgcaagagtggtggggtgttgactatgaggtcaagaatcatgccatccatatttcccaaatcggcgatggatacagagcacttattccagatttgtaccgtgggaaggttgctttggaggtagctgaggcacaacatctgatggaaggactagactggcagggtgcaatcaaggatattcaggcttcagttaaatggctgaaggaaaatggatcgcccaaggttggtgttactggttattgcatgggaggtgctttggcggtcgcaagtggagttttggtcccagaggttgatgctgttgttgctttctacgggacgccatcttcggagcttgctgatgcttccaaggctcaggctccaatccaggctcattttggggagcttgacagttttgttgggtttgcggatgttaccgcggccaagtcattggaggagaagctcaaggcttctggagtggcacatgaagtccacatatactctggatgctcccatgccttcatgaacgcatcgcctgaggccctcaagaggaggaagggcatgggtttgactgatgagaatcagggggccattgacctggcatggtcccgcttctccacttggatgggtcgtttcctggggtctgcatgagccattaccatatccatatggtctctgaatgatgtatatggagtctgtcggctcagaagaataaaatgtttgggtgcaatatgtagccagtgcccaatctagacaagcagtgtgttttgtgttagtactactatatgttccaactcgtcatggttttgccagaacatctcggggtacttgattggaggggaaatgaaacacttacgacgctgtcatacgagtttgttttgtgttttaataggcttcagccgagtgctttctggatttt

SEQ ID NO: 64111 - protein, 275 aa, Triticum aestivum
  peptide (1)..(275): Ceres Seq. ID no. 13584235
  misc_feature (52)..(272): Pfam Name: Dienelactone hydrolase family Pfam Description: Dienelactone hydrolase family
  misc_feature (63)..(272): Homolog of NCBI NO: 23105000 NR Description: hypothetical protein [Azotobacter vinelandii]
  misc_feature (63)..(272): Homolog of NCBI NO: 23472687 NR Description: hypothetical protein [Pseudomonas syringae pv.
  misc_feature (63)..(272): Homolog of NCBI NO: 28869992 NR Description: dienelactone hydrolase family protein
  misc_feature (62)..(272): Homolog of NCBI NO: 22963172 NR Description: hypothetical protein [Rhodopseudomonas palustris]
  misc_feature (61)..(273): Homolog of NCBI NO: 27377598 NR Description: blr2487 [Bradyrhizobium japonicum]
  misc_feature (37)..(272): Homolog of NCBI NO: 17549527 NR Description: PUTATIVE TRANSMEMBRANE PROTEIN [Ralstonia
  misc_feature (60)..(272): Homolog of NCBI NO: 22988407 NR Description: hypothetical protein [Burkholderia fungorum]
  misc_feature (36)..(272): Homolog of NCBI NO: 21554208 NR Description: putative carboxymethylenebutenolidase
  misc_feature (36)..(272): Homolog of NCBI NO: 15225693 NR Description: carboxymethylenebutenolidase -related
  misc_feature (1)..(275): Homolog of NCBI NO: 34913460 NR Description: putative carboxymethylenebutenolidase
MATARLLLRSASLLPLRRSPLHSSGFQPRAAMASDAASQFQKIQIQREDTTFDVYVVGKENAPGVVVLQEWWGVDYEVKNHAIHISQIGDGYRALIPDLYRGKVALEVAEAQHLMEGLDWQGAIKDIQASVKWLKENGSPKVGVTGYCMGGALAVASGVLVPEVDAVVAFYGTPSSELADASKAQAPIQAHFGELDSFVGFADVTAAKSLEEKLKASGVAHEVHIYSGCSHAFMNASPEALKRRKGMGLTDENQGAIDLAWSRFSTWMGRFLGSA

SEQ ID NO: 64112 - protein, 244 aa, Triticum aestivum
  peptide (1)..(244): Ceres Seq. ID no. 13584236
  misc_feature (21)..(241): Pfam Name: Dienelactone hydrolase family Pfam Description: Dienelactone hydrolase family
  misc_feature (32)..(241): Homolog of NCBI NO: 23105000 NR Description: hypothetical protein [Azotobacter vinelandii]
  misc_feature (32)..(241): Homolog of NCBI NO: 23472687 NR Description: hypothetical protein [Pseudomonas syringae pv.
  misc_feature (32)..(241): Homolog of NCBI NO: 28869992 NR Description: dienelactone hydrolase family protein
  misc_feature (31)..(241): Homolog of NCBI NO: 22963172 NR Description: hypothetical protein [Rhodopseudomonas palustris]
  misc_feature (30)..(242): Homolog of NCBI NO: 27377598 NR Description: blr2487 [Bradyrhizobium japonicum]
  misc_feature (6)..(241): Homolog of NCBI NO: 17549527 NR Description: PUTATIVE TRANSMEMBRANE PROTEIN [Ralstonia
  misc_feature (29)..(241): Homolog of NCBI NO: 22988407 NR Description: hypothetical protein [Burkholderia fungorum]
  misc_feature (5)..(241): Homolog of NCBI NO: 21554208 NR Description: putative carboxymethylenebutenolidase
  misc_feature (5)..(241): Homolog of NCBI NO: 15225693 NR Description: carboxymethylenebutenolidase -related
  misc_feature (1)..(244): Homolog of NCBI NO: 34913460 NR Description: putative carboxymethylenebutenolidase
MASDAASQFQKIQIQREDTTFDVYVVGKENAPGVVVLQEWWGVDYEVKNHAIHISQIGDGYRALIPDLYRGKVALEVAEAQHLMEGLDWQGAIKDIQASVKWLKENGSPKVGVTGYCMGGALAVASGVLVPEVDAVVAFYGTPSSELADASKAQAPIQAHFGELDSFVGFADVTAAKSLEEKLKASGVAHEVHIYSGCSHAFMNASPEALKRRKGMGLTDENQGAIDLAWSRFSTWMGRFLGSA

SEQ ID NO: 64113 - protein, 161 aa, Triticum aestivum
  peptide (1)..(161): Ceres Seq. ID no. 13584237
  misc_feature (1)..(158): Pfam Name: Dienelactone hydrolase family Pfam Description: Dienelactone hydrolase family
  misc_feature (1)..(158): Homolog of NCBI NO: 23105000 NR Description: hypothetical protein [Azotobacter vinelandii]
  misc_feature (1)..(158): Homolog of NCBI NO: 23472687 NR Description: hypothetical protein [Pseudomonas syringae pv.
  misc_feature (1)..(158): Homolog of NCBI NO: 28869992 NR Description: dienelactone hydrolase family protein
  misc_feature (1)..(158): Homolog of NCBI NO: 22963172 NR Description: hypothetical protein [Rhodopseudomonas palustris]
  misc_feature (1)..(159): Homolog of NCBI NO: 27377598 NR Description: blr2487 [Bradyrhizobium japonicum]
  misc_feature (1)..(158): Homolog of NCBI NO: 17549527 NR Description: PUTATIVE TRANSMEMBRANE PROTEIN [Ralstonia
  misc_feature (1)..(158): Homolog of NCBI NO: 22988407 NR Description: hypothetical protein [Burkholderia fungorum]
  misc_feature (1)..(158): Homolog of NCBI NO: 21554208 NR Description: putative carboxymethylenebutenolidase
  misc_feature (1)..(158): Homolog of NCBI NO: 15225693 NR Description: carboxymethylenebutenolidase -related
  misc_feature (1)..(161): Homolog of NCBI NO: 34913460 NR Description: putative carboxymethylenebutenolidase
MEGLDWQGAIKDIQASVKWLKENGSPKVGVTGYCMGGALAVASGVLVPEVDAVVAFYGTPSSELADASKAQAPIQAHFGELDSFVGFADVTAAKSLEEKLKASGVAHEVHIYSGCSHAFMNASPEALKRRKGMGLTDENQGAIDLAWSRFSTWMGRFLGSA

SEQ ID NO: 64114 - DNA, 1083 bp, Triticum aestivum
  misc_feature (1)..(1083): Ceres Seq. ID no. 12617391
acacactagagaaactcaccagctccacgggcagaggagccgacacccaacccagcccaacgcaggcacgccaagaccaggagagagacaacatgcgtccatcacgggatcttcgcctcgccgtgcttctcctcttctccgcagccgtcctcctctcggcagtcccggcggccagagcccagcaggaaaccgaggaggaggaggagttcagctactcgctggacgcggagaatgggccggcgcactggggcgacatcaaggaggagtggtccgcgtgcggcaagggcaacatgcagtcgcccatcgaccttgccagcccgcgtgtctccctcgtgcgcggcctcggctacctcaaccactcctactcccccgccaacgccaccatcatcaaccgcggccacgacatcatgctcaagttcgagggcgacgccgggagcgtctccatcggcggtacgccctacttcctccggcagctgcactggcactcgcccactgagcatagcgtcaacggccgtcggtacgacatggagctccacatgttccacgagagcgctcagggcaaagcagccgtcatcggcgtcttctacgagatcggcgcccacgacgccttcctacacaagctggagccatacctggagatgatagcggatcgcaaggacagggaggagaagatgggcatgatggatcccaggggcgccagaggcaaggccagcgtctactaccgctacgtgggctccctcaccaccccaccctgctcagaaggggtcatctggaccatcatcaagagggtccgcactgtgtcgaggcaccagctggagcttctacgggaggccgttcacgacgacatggagaagaacgcgaggccccgtcaggaggtgaacagcagagatatcagcatgtcccggccttttgaccaaaatagacattcatcattagctagggtcgattctctacttaattagtttgttgttacagttattgtatatgcacatggttataccattttttgtagttttttcttcccatattagatgccttgtatccagtcattgaataataaaggaccacgtccagtatatttcc

SEQ ID NO: 64115 - protein, 319 aa, Triticum aestivum
  peptide (1)..(319): Ceres Seq. ID no. 12617392
  misc_feature (78)..(299): Pfam Name: Eukaryotic-type carbonic anhydrase Pfam Description: Eukaryotic-type carbonic anhydrase
  misc_feature (43)..(297): Homolog of NCBI NO: 1364059 NR Description: dioscorin class A precursor - Dioscorea
  misc_feature (64)..(265): Homolog of NCBI NO: 30683808 NR Description: carbonic anhydrase -related [Arabidopsis thaliana]
  misc_feature (49)..(297): Homolog of NCBI NO: 15233471 NR Description: carbonic anhydrase -like protein; protein id:
  misc_feature (37)..(298): Homolog of NCBI NO: 29468280 NR Description: nectarin III [Nicotiana langsdorffii x Nicotiana
  misc_feature (60)..(302): Homolog of NCBI NO: 15223097 NR Description: carbonic anhydrase, putative; protein id:
  misc_feature (44)..(302): Homolog of NCBI NO: 25407021 NR Description: protein T6D22.16 [imported] - Arabidopsis
  misc_feature (64)..(302): Homolog of NCBI NO: 25291473 NR Description: probable carbonic anhydrase [imported] -
  misc_feature (41)..(302): Homolog of NCBI NO: 34904986 NR Description: putative carbonic anhydrase precursor
  misc_feature (38)..(302): Homolog of NCBI NO: 37806288 NR Description: putative dioscorin [Oryza sativa (japonica
  misc_feature (44)..(302): Homolog of NCBI NO: 15223122 NR Description: storage protein, putative; protein id:
TLEKLTSSTGRGADTQPSPTQARQDQERDNMRPSRDLRLAVLLLFSAAVLLSAVPAARAQQETEEEEEFSYSLDAENGPAHWGDIKEEWSACGKGNMQSPIDLASPRVSLVRGLGYLNHSYSPANATIINRGHDIMLKFEGDAGSVSIGGTPYFLRQLHWHSPTEHSVNGRRYDMELHMFHESAQGKAAVIGVFYEIGAHDAFLHKLEPYLEMIADRKDREEKMGMMDPRGARGKASVYYRYVGSLTTPPCSEGVIWTIIKRVRTVSRHQLELLREAVHDDMEKNARPRQEVNSRDISMSRPFDQNRHSSLARVDSLLN

SEQ ID NO: 64116 - protein, 289 aa, Triticum aestivum
  peptide (1)..(289): Ceres Seq. ID no. 12617393
  misc_feature (48)..(269): Pfam Name: Eukaryotic-type carbonic anhydrase Pfam Description: Eukaryotic-type carbonic anhydrase
  misc_feature (13)..(267): Homolog of NCBI NO: 1364059 NR Description: dioscorin class A precursor - Dioscorea
  misc_feature (34)..(235): Homolog of NCBI NO: 30683808 NR Description: carbonic anhydrase -related [Arabidopsis thaliana]
  misc_feature (19)..(267): Homolog of NCBI NO: 15233471 NR Description: carbonic anhydrase -like protein; protein id:
  misc_feature (7)..(268): Homolog of NCBI NO: 29468280 NR Description: nectarin III [Nicotiana langsdorffii x Nicotiana
  misc_feature (30)..(272): Homolog of NCBI NO: 15223097 NR Description: carbonic anhydrase, putative; protein id:
  misc_feature (14)..(272): Homolog of NCBI NO: 25407021 NR Description: protein T6D22.16 [imported] - Arabidopsis
  misc_feature (34)..(272): Homolog of NCBI NO: 25291473 NR Description: probable carbonic anhydrase [imported] -
  misc_feature (11)..(272): Homolog of NCBI NO: 34904986 NR Description: putative carbonic anhydrase precursor
  misc_feature (8)..(272): Homolog of NCBI NO: 37806288 NR Description: putative dioscorin [Oryza sativa (japonica
  misc_feature (14)..(272): Homolog of NCBI NO: 15223122 NR Description: storage protein, putative; protein id:
MRPSRDLRLAVLLLFSAAVLLSAVPAARAQQETEEEEEFSYSLDAENGPAHWGDIKEEWSACGKGNMQSPIDLASPRVSLVRGLGYLNHSYSPANATIINRGHDIMLKFEGDAGSVSIGGTPYFLRQLHWHSPTEHSVNGRRYDMELHMFHESAQGKAAVIGVFYEIGAHDAFLHKLEPYLEMIADRKDREEKMGMMDPRGARGKASVYYRYVGSLTTPPCSEGVIWTIIKRVRTVSRHQLELLREAVHDDMEKNARPRQEVNSRDISMSRPFDQNRHSSLARVDSLLN

SEQ ID NO: 64117 - protein, 223 aa, Triticum aestivum
  peptide (1)..(223): Ceres Seq. ID no. 12617394
  misc_feature (1)..(203): Pfam Name: Eukaryotic-type carbonic anhydrase Pfam Description: Eukaryotic-type carbonic anhydrase
  misc_feature (1)..(201): Homolog of NCBI NO: 1364059 NR Description: dioscorin class A precursor - Dioscorea
  misc_feature (1)..(169): Homolog of NCBI NO: 30683808 NR Description: carbonic anhydrase -related [Arabidopsis thaliana]
  misc_feature (1)..(201): Homolog of NCBI NO: 15233471 NR Description: carbonic anhydrase -like protein; protein id:
  misc_feature (1)..(202): Homolog of NCBI NO: 29468280 NR Description: nectarin III [Nicotiana langsdorffii x Nicotiana
  misc_feature (1)..(206): Homolog of NCBI NO: 15223097 NR Description: carbonic anhydrase, putative; protein id:
  misc_feature (1)..(206): Homolog of NCBI NO: 25407021 NR Description: protein T6D22.16 [imported] - Arabidopsis
  misc_feature (1)..(206): Homolog of NCBI NO: 25291473 NR Description: probable carbonic anhydrase [imported] -
  misc_feature (1)..(206): Homolog of NCBI NO: 34904986 NR Description: putative carbonic anhydrase precursor
  misc_feature (1)..(206): Homolog of NCBI NO: 37806288 NR Description: putative dioscorin [Oryza sativa (japonica
  misc_feature (1)..(206): Homolog of NCBI NO: 15223122 NR Description: storage protein, putative; protein id:
MQSPIDLASPRVSLVRGLGYLNHSYSPANATIINRGHDIMLKFEGDAGSVSIGGTPYFLRQLHWHSPTEHSVNGRRYDMELHMFHESAQGKAAVIGVFYEIGAHDAFLHKLEPYLEMIADRKDREEKMGMMDPRGARGKASVYYRYVGSLTTPPCSEGVIWTIIKRVRTVSRHQLELLREAVHDDMEKNARPRQEVNSRDISMSRPFDQNRHSSLARVDSLLN

SEQ ID NO: 64118 - DNA, 1208 bp, Triticum aestivum
  misc_feature (1)..(1208): Ceres Seq. ID no. 13597234
gccgaaaacacaccgtcaaaacgttttgtattcgatttcgtgcccctttcgcgtgcgtacgagcgagaccttctcccccttccccttccctgccggtggcagcgaccgaggcagccgtcggagcggacggggcgcgcgtcagcgagtttgcccggatcccccgaagcgcgcgtggttccggcgggccatgggcacgccggagttccctgacctggggcggcactgcagcgtcggcgactgccaccagatcgatttcctccccttcacctgcgaccgatgcgacttcgtcttttgccttcagcaccgaagttatacatcacataaatgtccaaaggctaataacaaggatgtcactgtcgtcatctgcccattatgtgctaaaggagttcgcctgaatccaaatgaagatgcaaacatcacctgggagtctcatgttaatactgattgcgatccatcaaattaccagagagcaacaaagaaaaagaaatgcccagttcctgggtgcagagaacagctgacattttcaaacacaatcatgtgcaaagattgtagcaaagagcactgcctcaagcacagatttggtcctgatcacaagtgcccgggcccaagaaaaccagagcctaccttcccctttgccaacatgctaagaagaagtcagaaagttgagccacgcgcaaacagcagtggcagtggttcttcctggtggagctccagccttttgaatgcagcatcaagtttcagatcatcggcagaagcaggaatgcagaaactgagcattgccaccagcgaagccgtccagaaggctaaggatggggtcaccccgagcagcagtggtggtggcctcgtggagcaatgtgttcagtgtccagcaaggttttccactgtgggggccctaatcgagcacgccgagaaatcccatgggaacaactcgcgaccgagccgtggcaaagtgacgattgatgcttgccccaaatgtagcaagggatttcaagatccggtgttactagtggagcatgttgagagggaacatggaggaacttcaaaagcataaacctgcccgtgagtcatttctcatgagtatgtctatgttatatgcctgattgctgtgtaatttattcctcatttactcgatttgattgtactctagtgagctctgggctcgaattgtgcacatgaaagaaagtcttatctcaagcctgtttaaacac

SEQ ID NO: 64119 - protein, 349 aa, Triticum aestivum
  peptide (1)..(349): Ceres Seq. ID no. 13597235
  misc_feature (163)..(206): Pfam Name: AN1-like Zinc finger Pfam Description: AN1-like Zinc finger
  misc_feature (67)..(268): Homolog of NCBI NO: 15079311 NR Description: RIKEN cDNA 1110060O18 [Mus musculus]
  misc_feature (67)..(268): Homolog of NCBI NO: 21312112 NR Description: RIKEN cDNA 1110060O18 [Mus musculus]
  misc_feature (67)..(268): Homolog of NCBI NO: 34876869 NR Description: similar to RIKEN cDNA 1110060O18 [Rattus
  misc_feature (67)..(221): Homolog of NCBI NO: 21749694 NR Description: unnamed protein product [Homo sapiens]
  misc_feature (67)..(268): Homolog of NCBI NO: 20270357 NR Description: hypothetical protein BC018415 [Homo sapiens]
  misc_feature (67)..(349): Homolog of NCBI NO: 33416395 NR Description: Unknown (protein for MGC:66295) [Danio rerio]
  misc_feature (64)..(199): Homolog of NCBI NO: 15232930 NR Description: zinc finger protein (PMZ) -related [Arabidopsis
  misc_feature (63)..(311): Homolog of NCBI NO: 15230311 NR Description: expressed protein [Arabidopsis thaliana]
  misc_feature (63)..(349): Homolog of NCBI NO: 30688811 NR Description: zinc finger protein (PMZ) -related [Arabidopsis
  misc_feature (63)..(349): Homolog of NCBI NO: 33146779 NR Description: putative arsenite inducible RNA associated
PKTHRQNVLYSISCPFRVRTSETFSPFPFPAGGSDRGSRRSGRGARQRVCPDPPKRAWFRRAMGTPEFPDLGRHCSVGDCHQIDFLPFTCDRCDFVFCLQHRSYTSHKCPKANNKDVTVVICPLCAKGVRLNPNEDANITWESHVNTDCDPSNYQRATKKKKCPVPGCREQLTFSNTIMCKDCSKEHCLKHRFGPDHKCPGPRKPEPTFPFANMLRRSQKVEPRANSSGSGSSWWSSSLLNAASSFRSSAEAGMQKLSIATSEAVQKAKDGVTPSSSGGGLVEQCVQCPARFSTVGALIEHAEKSHGNNSRPSRGKVTIDACPKCSKGFQDPVLLVEHVEREHGGTSKA

SEQ ID NO: 64120 - protein, 287 aa, Triticum aestivum
  peptide (1)..(287): Ceres Seq. ID no. 13597236
  misc_feature (101)..(144): Pfam Name: AN1-like Zinc finger Pfam Description: AN1-like Zinc finger
  misc_feature (5)..(206): Homolog of NCBI NO: 15079311 NR Description: RIKEN cDNA 1110060O18 [Mus musculus]
  misc_feature (5)..(206): Homolog of NCBI NO: 21312112 NR Description: RIKEN cDNA 1110060O18 [Mus musculus]
  misc_feature (5)..(206): Homolog of NCBI NO: 34876869 NR Description: similar to RIKEN cDNA 1110060O18 [Rattus
  misc_feature (5)..(159): Homolog of NCBI NO: 21749694 NR Description: unnamed protein product [Homo sapiens]
  misc_feature (5)..(206): Homolog of NCBI NO: 20270357 NR Description: hypothetical protein BC018415 [Homo sapiens]
  misc_feature (5)..(287): Homolog of NCBI NO: 33416395 NR Description: Unknown (protein for MGC:66295) [Danio rerio]
  misc_feature (2)..(137): Homolog of NCBI NO: 15232930 NR Description: zinc finger protein (PMZ) -related [Arabidopsis
  misc_feature (1)..(249): Homolog of NCBI NO: 15230311 NR Description: expressed protein [Arabidopsis thaliana]
  misc_feature (1)..(287): Homolog of NCBI NO: 30688811 NR Description: zinc finger protein (PMZ) -related [Arabidopsis
  misc_feature (1)..(287): Homolog of NCBI NO: 33146779 NR Description: putative arsenite inducible RNA associated
MGTPEFPDLGRHCSVGDCHQIDFLPFTCDRCDFVFCLQHRSYTSHKCPKANNKDVTVVICPLCAKGVRLNPNEDANITWESHVNTDCDPSNYQRATKKKKCPVPGCREQLTFSNTIMCKDCSKEHCLKHRFGPDHKCPGPRKPEPTFPFANMLRRSQKVEPRANSSGSGSSWWSSSLLNAASSFRSSAEAGMQKLSIATSEAVQKAKDGVTPSSSGGGLVEQCVQCPARFSTVGALIEHAEKSHGNNSRPSRGKVTIDACPKCSKGFQDPVLLVEHVEREHGGTSKA

SEQ ID NO: 64121 - DNA, 1577 bp, Triticum aestivum
  misc_feature (1)..(1577): Ceres Seq. ID no. 13597454
acaaaaagcaagctctatatccagctgactagccacaagtacgacacacatactgcagtgttagcgctacacacacgggcaccagagttatggggaggcaggtcgccgccctgtgcgggcttctcgtcgtgctgctccggctcacgtccggcgtcaatgcacagacggagatcttgttccaggggttcaactgggactcgtggagcaagcaggggggctggtacaacatgctcaaggcccaggttggcgacatcgccggcgccggggtcactcacgtctggctgcccccacctacacactccgtttcatctcaaggatacatgccgggccggctctacgacctggacgcgtccaagtacggcacggcggtggagctcaggtcgctcatcgcggccttcggtgccaagggcatcaagtgcgtcgccgacatcgtcatcaaccaccgctgcgccgaggacaaggacgggcgcggcatctactgcatcttcaagggcggaggacccgagggcctcctggactggggtccgggcatgatctgcagcgacgacaccaagttctccgacggcacgggctaccgtgataccggcgcggacttcgccgccgcgcccgacatcgaccacctcaacccgcgcgtccagaaggagctctccgactggctcaactggctcaagtccgacctcggcttcgacggctggcgcctcgacttcgccaagggctactcggccgacgtcgccaggacgtacgtgcagaacacgagccccggcttcgtcgtcgcggaaatatggaactccctgagctacgacggcgacgggaagcccgccgtcaaccaggacggggagcggcaggagctggtgaactgggcgaaggcggtcggcggccctgccatggcgttcgacttcacgaccaagggcatcctgcagtcggcggtgcagggcgagctgtggaggatgcgggacaaggagggcaacgctcccgggatgatcggcctgttgccggagaaggcggtcacgttcgtggacaaccacgacacgggctcgtcgcagaagaaatggccgttcccggccgacaaggtcatgatgggctacgcctacatcctcacccaccctggagtcccatgcatcttctacgatcacgtgttcgactggaacctgaagcaagagatcaacgcgctggcggcggtgaggaaccgcaacgggatcaacgccgggagcaagctgcgcatcctggcggcggagagcgacatgtacgtggcgacggttgacgagaaagttatcgtcaagctcggaccgaggttcgacgctggcagcgtcatcccgtcggacttccacgtcgtggctcacggcaataactactgcgtctgggagaagagcggccttagggtgccggccgggcggcgctagctacctagtagacgttagcaacttcgcaccggcggccagaccgttgtactcctacaagaaatgtttgttccagttcgtcgtagactaggcaataaagtttgtaccaccaccgctctccttccaaccttgcggaaggagcgtgagctatcaaatatattattaattttacgcgtttgt

SEQ ID NO: 64122 - protein, 436 aa, Triticum aestivum
  peptide (1)..(436): Ceres Seq. ID no. 13597455
  misc_feature (12)..(426): Homolog of NCBI NO: 27413645 NR Description: alpha-amylase precursor [Musa acuminata]
  misc_feature (1)..(436): Homolog of NCBI NO: 11263719 NR Description: alpha-amylase (EC 3.2.1.1) isozyme III - rice
  misc_feature (1)..(436): Homolog of NCBI NO: 113683 NR Description: ALPHA-AMYLASE ISOZYME 3E PRECURSOR
  misc_feature (3)..(435): Homolog of NCBI NO: 169755 NR Description: alpha-amylase (EC 3.2.1.1)
  misc_feature (9)..(436): Homolog of NCBI NO: 113681 NR Description: ALPHA-AMYLASE ISOZYME 3C PRECURSOR
  misc_feature (3)..(435): Homolog of NCBI NO: 11263717 NR Description: alpha-amylase (EC 3.2.1.1) isozyme I - rice
  misc_feature (3)..(435): Homolog of NCBI NO: 113682 NR Description: ALPHA-AMYLASE ISOZYME 3D PRECURSOR
  misc_feature (1)..(435): Homolog of NCBI NO: 7435329 NR Description: alpha-amylase (EC 3.2.1.1) - maize
  misc_feature (1)..(435): Homolog of NCBI NO: 113680 NR Description: ALPHA-AMYLASE ISOZYME 3B PRECURSOR
  misc_feature (1)..(436): Homolog of NCBI NO: 113679 NR Description: ALPHA-AMYLASE ISOZYME 3A PRECURSOR
MGRQVAALCGLLVVLLRLTSGVNAQTEILFQGFNWDSWSKQGGWYNMLKAQVGDIAGAGVTHVWLPPPTHSVSSQGYMPGRLYDLDASKYGTAVELRSLIAAFGAKGIKCVADIVINHRCAEDKDGRGIYCIFKGGGPEGLLDWGPGMICSDDTKFSDGTGYRDTGADFAAAPDIDHLNPRVQKELSDWLNWLKSDLGFDGWRLDFAKGYSADVARTYVQNTSPGFVVAEIWNSLSYDGDGKPAVNQDGERQELVNWAKAVGGPAMAFDFTTKGILQSAVQGELWRMRDKEGNAPGMIGLLPEKAVTFVDNHDTGSSQKKWPFPADKVMMGYAYILTHPGVPCIFYDHVFDWNLKQEINALAAVRNRNGINAGSKLRILAAESDMYVATVDEKVIVKLGPRFDAGSVIPSDFHVVAHGNNYCVWEKSGLRVPAGRR

SEQ ID NO: 64123 - protein, 390 aa, Triticum aestivum
  peptide (1)..(390): Ceres Seq. ID no. 13597456
  misc_feature (1)..(380): Homolog of NCBI NO: 27413645 NR Description: alpha-amylase precursor [Musa acuminata]
  misc_feature (1)..(390): Homolog of NCBI NO: 11263719 NR Description: alpha-amylase (EC 3.2.1.1) isozyme III - rice
  misc_feature (1)..(390): Homolog of NCBI NO: 113683 NR Description: ALPHA-AMYLASE ISOZYME 3E PRECURSOR
  misc_feature (1)..(389): Homolog of NCBI NO: 169755 NR Description: alpha-amylase (EC 3.2.1.1)
  misc_feature (1)..(390): Homolog of NCBI NO: 113681 NR Description: ALPHA-AMYLASE ISOZYME 3C PRECURSOR
  misc_feature (1)..(389): Homolog of NCBI NO: 11263717 NR Description: alpha-amylase (EC 3.2.1.1) isozyme I - rice
  misc_feature (1)..(389): Homolog of NCBI NO: 113682 NR Description: ALPHA-AMYLASE ISOZYME 3D PRECURSOR
  misc_feature (1)..(389): Homolog of NCBI NO: 7435329 NR Description: alpha-amylase (EC 3.2.1.1) - maize
  misc_feature (1)..(389): Homolog of NCBI NO: 113680 NR Description: ALPHA-AMYLASE ISOZYME 3B PRECURSOR
  misc_feature (1)..(390): Homolog of NCBI NO: 113679 NR Description: ALPHA-AMYLASE ISOZYME 3A PRECURSOR
MLKAQVGDIAGAGVTHVWLPPPTHSVSSQGYMPGRLYDLDASKYGTAVELRSLIAAFGAKGIKCVADIVINHRCAEDKDGRGIYCIFKGGGPEGLLDWGPGMICSDDTKFSDGTGYRDTGADFAAAPDIDHLNPRVQKELSDWLNWLKSDLGFDGWRLDFAKGYSADVARTYVQNTSPGFVVAEIWNSLSYDGDGKPAVNQDGERQELVNWAKAVGGPAMAFDFTTKGILQSAVQGELWRMRDKEGNAPGMIGLLPEKAVTFVDNHDTGSSQKKWPFPADKVMMGYAYILTHPGVPCIFYDHVFDWNLKQEINALAAVRNRNGINAGSKLRILAAESDMYVATVDEKVIVKLGPRFDAGSVIPSDFHVVAHGNNYCVWEKSGLRVPAGRR

SEQ ID NO: 64124 - protein, 359 aa, Triticum aestivum
  peptide (1)..(359): Ceres Seq. ID no. 13597457
  misc_feature (1)..(349): Homolog of NCBI NO: 27413645 NR Description: alpha-amylase precursor [Musa acuminata]
  misc_feature (1)..(359): Homolog of NCBI NO: 11263719 NR Description: alpha-amylase (EC 3.2.1.1) isozyme III - rice
  misc_feature (1)..(359): Homolog of NCBI NO: 113683 NR Description: ALPHA-AMYLASE ISOZYME 3E PRECURSOR
  misc_feature (1)..(358): Homolog of NCBI NO: 169755 NR Description: alpha-amylase (EC 3.2.1.1)
  misc_feature (1)..(359): Homolog of NCBI NO: 113681 NR Description: ALPHA-AMYLASE ISOZYME 3C PRECURSOR
  misc_feature (1)..(358): Homolog of NCBI NO: 11263717 NR Description: alpha-amylase (EC 3.2.1.1) isozyme I - rice
  misc_feature (1)..(358): Homolog of NCBI NO: 113682 NR Description: ALPHA-AMYLASE ISOZYME 3D PRECURSOR
  misc_feature (1)..(358): Homolog of NCBI NO: 7435329 NR Description: alpha-amylase (EC 3.2.1.1) - maize
  misc_feature (1)..(358): Homolog of NCBI NO: 113680 NR Description: ALPHA-AMYLASE ISOZYME 3B PRECURSOR
  misc_feature (1)..(359): Homolog of NCBI NO: 113679 NR Description: ALPHA-AMYLASE ISOZYME 3A PRECURSOR
MPGRLYDLDASKYGTAVELRSLIAAFGAKGIKCVADIVINHRCAEDKDGRGIYCIFKGGGPEGLLDWGPGMICSDDTKFSDGTGYRDTGADFAAAPDIDHLNPRVQKELSDWLNWLKSDLGFDGWRLDFAKGYSADVARTYVQNTSPGFVVAEIWNSLSYDGDGKPAVNQDGERQELVNWAKAVGGPAMAFDFTTKGILQSAVQGELWRMRDKEGNAPGMIGLLPEKAVTFVDNHDTGSSQKKWPFPADKVMMGYAYILTHPGVPCIFYDHVFDWNLKQEINALAAVRNRNGINAGSKLRILAAESDMYVATVDEKVIVKLGPRFDAGSVIPSDFHVVAHGNNYCVWEKSGLRVPAGRR

SEQ ID NO: 64125 - DNA, 1696 bp, Triticum aestivum
  misc_feature (1)..(1696): Ceres Seq. ID no. 13597411
aaaagacaattcttttcttcctcttctgttccggcaggggcggcggggatggcgatggcgtcgcgcgcgcggacgcggtggtcggcgctggcggcgagcacgctgatccagtgcttcgcgggcggcagctactgcttcggcgtctactcgccggcgctcaaggcgtcgcagggctacgaccagtccgcgctcgacgccgtcgccttcttcaaggacgtcggcgctaacgtcggggtcctctccggcctcctcgccgcgtgggctccctctgggggccggaggcgaccctggctcgtcctcctcaccggcgccgcgctctgcgccgccgggtacctccccatgtggctcgccgtcgccggggtcgtccccgccccgctcccgctcgtctgcctctacatgctgctcgccgcgcaggcgcagaccttcatgaacacggccgatgtcgtcaccgccgtagagaacttccccgaccgccgcggcaccgtcatcggcatcatgaaggggtttctaggcttgagtggggcgatactggtccaagtacagcggactctccgtattgatcccggcagtttcatacttatgctggcaatactacccacagccatcgcgttgctgctcatgtactttgtcgacgtccacagcgctcatgagcggtacaacaagaagttcctcgatgctttctctctcatggccgttactgttgctgggttcctgatggttgtcataatctgcgaccaagtattcgtgataagttcagccgggcagagcgtttgctttgggatactccttctattgatcctgtctcccgcagctattgttgtaagggttcagaggacggaaccgaagcagcaagaagaaccaacgccggaagaacaaactggtttacttcttcatgaggagactgcgcagcaggattcggagaacgccagctctagcatggcgctcgtgggatctaacagtcaggacatgtcgtcggacaaagcagagaacctgaacgtggtgcaggccatgtgcaaacttgacttctggctgctcttcgttgcgatggcctgcgggatggggtcggggctggccaccgtgaacaacatcagccagatcgggggctcccttggctacacgagcagggagaccagcactctggtgtcgctatggagcatctggaacttctcagggaggttcggcgcaggctacgtctctgatcacttcctccggtcgcgaggagtcggcaggcctttcttcatagccgcgacgcttctggtcatgggcgtaggccatgccatcatctcctccggtttccacgcgtcgctctacgtcggctccgtccttgtaggactgtgctacgggtctcagtgggctttgatgccgagcataacttcagagatcttcgggctaaaccatttcggcaccatattcaacacggtggccgtcgcgagccctgttggctcttacatcctctcggtgtgcgtggtcgggttcatctatgacaaggagtcaccgcaaggtgagcttgcctgcgccggtaagcactgctttgcgctctccttcatgatcatggcatgtgtctgcgtcttcgggtctgctgttgcttttgtattgtttgtcagaacaaggaagttttataggcgggttatatacgcccgactgctctcttttgtagataaatgaagaaatgcatatatgcaaacgattctcagtc

SEQ ID NO: 64126 - protein, 554 aa, Triticum aestivum
  peptide (1)..(554): Ceres Seq. ID no. 13597412
  misc_feature (93)..(209): Pfam Name: Sugar (and other) transporter Pfam Description: Sugar (and other) transporter
  misc_feature (26)..(293): Homolog of NCBI NO: 34897160 NR Description: putative nodule-specific protein
  misc_feature (26)..(547): Homolog of NCBI NO: 15225053 NR Description: nodulin-related protein [Arabidopsis thaliana]
  misc_feature (26)..(547): Homolog of NCBI NO: 34394606 NR Description: putative nodule-specific protein
  misc_feature (22)..(554): Homolog of NCBI NO: 7485467 NR Description: nodulin-like protein [imported] - Arabidopsis
  misc_feature (22)..(550): Homolog of NCBI NO: 30686022 NR Description: 68409.m03800 nodulin-related protein [Arabidopsis
  misc_feature (23)..(549): Homolog of NCBI NO: 7485467 NR Description: nodulin-like protein [imported] - Arabidopsis
  misc_feature (23)..(549): Homolog of NCBI NO: 30686019 NR Description: nodulin-related protein [Arabidopsis thaliana]
  misc_feature (24)..(549): Homolog of NCBI NO: 15221898 NR Description: hypothetical protein [Arabidopsis thaliana]
  misc_feature (24)..(548): Homolog of NCBI NO: 29824365 NR Description: unknown protein [Arabidopsis thaliana]
  misc_feature (24)..(548): Homolog of NCBI NO: 15221382 NR Description: expressed protein [Arabidopsis thaliana]
KRQFFSSSSVPAGAAGMAMASRARTRWSALAASTLIQCFAGGSYCFGVYSPALKASQGYDQSALDAVAFFKDVGANVGVLSGLLAAWAPSGGRRRPWLVLLTGAALCAAGYLPMWLAVAGVVPAPLPLVCLYMLLAAQAQTFMNTADVVTAVENFPDRRGTVIGIMKGFLGLSGAILVQVQRTLRIDPGSFILMLAILPTAIALLLMYFVDVHSAHERYNKKFLDAFSLMAVTVAGFLMVVIICDQVFVISSAGQSVCFGILLLLILSPAAIVVRVQRTEPKQQEEPTPEEQTGLLLHEETAQQDSENASSSMALVGSNSQDMSSDKAENLNVVQAMCKLDFWLLFVAMACGMGSGLATVNNISQIGGSLGYTSRETSTLVSLWSIWNFSGRFGAGYVSDHFLRSRGVGRPFFIAATLLVMGVGHAIISSGFHASLYVGSVLVGLCYGSQWALMPSITSEIFGLNHFGTIFNTVAVASPVGSYILSVCVVGFIYDKESPQGELACAGKHCFALSFMIMACVCVFGSAVAFVLFVRTRKFYRRVIYARLLSFVDK

SEQ ID NO: 64127 - protein, 538 aa, Triticum aestivum
  peptide (1)..(538): Ceres Seq. ID no. 13597413
  misc_feature (77)..(193): Pfam Name: Sugar (and other) transporter Pfam Description: Sugar (and other) transporter
  misc_feature (10)..(277): Homolog of NCBI NO: 34897160 NR Description: putative nodule-specific protein
  misc_feature (10)..(531): Homolog of NCBI NO: 15225053 NR Description: nodulin-related protein [Arabidopsis thaliana]
  misc_feature (10)..(531): Homolog of NCBI NO: 34394606 NR Description: putative nodule-specific protein
  misc_feature (6)..(538): Homolog of NCBI NO: 7485467 NR Description: nodulin-like protein [imported] - Arabidopsis
  misc_feature (6)..(534): Homolog of NCBI NO: 30686022 NR Description: 68409.m03800 nodulin-related protein [Arabidopsis
  misc_feature (7)..(533): Homolog of NCBI NO: 7485467 NR Description: nodulin-like protein [imported] - Arabidopsis
  misc_feature (7)..(533): Homolog of NCBI NO: 30686019 NR Description: nodulin-related protein [Arabidopsis thaliana]
  misc_feature (8)..(533): Homolog of NCBI NO: 15221898 NR Description: hypothetical protein [Arabidopsis thaliana]
  misc_feature (8)..(532): Homolog of NCBI NO: 29824365 NR Description: unknown protein [Arabidopsis thaliana]
  misc_feature (8)..(532): Homolog of NCBI NO: 15221382 NR Description: expressed protein [Arabidopsis thaliana]
MAMASRARTRWSALAASTLIQCFAGGSYCFGVYSPALKASQGYDQSALDAVAFFKDVGANVGVLSGLLAAWAPSGGRRRPWLVLLTGAALCAAGYLPMWLAVAGVVPAPLPLVCLYMLLAAQAQTFMNTADVVTAVENFPDRRGTVIGIMKGFLGLSGAILVQVQRTLRIDPGSFILMLAILPTAIALLLMYFVDVHSAHERYNKKFLDAFSLMAVTVAGFLMVVIICDQVFVISSAGQSVCFGILLLLILSPAAIVVRVQRTEPKQQEEPTPEEQTGLLLHEETAQQDSENASSSMALVGSNSQDMSSDKAENLNVVQAMCKLDFWLLFVAMACGMGSGLATVNNISQIGGSLGYTSRETSTLVSLWSIWNFSGRFGAGYVSDHFLRSRGVGRPFFIAATLLVMGVGHAIISSGFHASLYVGSVLVGLCYGSQWALMPSITSEIFGLNHFGTIFNTVAVASPVGSYILSVCVVGFIYDKESPQGELACAGKHCFALSFMIMACVCVFGSAVAFVLFVRTRKFYRRVIYARLLSFVDK

SEQ ID NO: 64128 - protein, 536 aa, Triticum aestivum
  peptide (1)..(536): Ceres Seq. ID no. 13597414
  misc_feature (75)..(191): Pfam Name: Sugar (and other) transporter Pfam Description: Sugar (and other) transporter
  misc_feature (8)..(275): Homolog of NCBI NO: 34897160 NR Description: putative nodule-specific protein
  misc_feature (8)..(529): Homolog of NCBI NO: 15225053 NR Description: nodulin-related protein [Arabidopsis thaliana]
  misc_feature (8)..(529): Homolog of NCBI NO: 34394606 NR Description: putative nodule-specific protein
  misc_feature (4)..(536): Homolog of NCBI NO: 7485467 NR Description: nodulin-like protein [imported] - Arabidopsis
  misc_feature (4)..(532): Homolog of NCBI NO: 30686022 NR Description: 68409.m03800 nodulin-related protein [Arabidopsis
  misc_feature (5)..(531): Homolog of NCBI NO: 7485467 NR Description: nodulin-like protein [imported] - Arabidopsis
  misc_feature (5)..(531): Homolog of NCBI NO: 30686019 NR Description: nodulin-related protein [Arabidopsis thaliana]
  misc_feature (6)..(531): Homolog of NCBI NO: 15221898 NR Description: hypothetical protein [Arabidopsis thaliana]
  misc_feature (6)..(530): Homolog of NCBI NO: 29824365 NR Description: unknown protein [Arabidopsis thaliana]
  misc_feature (6)..(530): Homolog of NCBI NO: 15221382 NR Description: expressed protein [Arabidopsis thaliana]
MASRARTRWSALAASTLIQCFAGGSYCFGVYSPALKASQGYDQSALDAVAFFKDVGANVGVLSGLLAAWAPSGGRRRPWLVLLTGAALCAAGYLPMWLAVAGVVPAPLPLVCLYMLLAAQAQTFMNTADVVTAVENFPDRRGTVIGIMKGFLGLSGAILVQVQRTLRIDPGSFILMLAILPTAIALLLMYFVDVHSAHERYNKKFLDAFSLMAVTVAGFLMVVIICDQVFVISSAGQSVCFGILLLLILSPAAIVVRVQRTEPKQQEEPTPEEQTGLLLHEETAQQDSENASSSMALVGSNSQDMSSDKAENLNVVQAMCKLDFWLLFVAMACGMGSGLATVNNISQIGGSLGYTSRETSTLVSLWSIWNFSGRFGAGYVSDHFLRSRGVGRPFFIAATLLVMGVGHAIISSGFHASLYVGSVLVGLCYGSQWALMPSITSEIFGLNHFGTIFNTVAVASPVGSYILSVCVVGFIYDKESPQGELACAGKHCFALSFMIMACVCVFGSAVAFVLFVRTRKFYRRVIYARLLSFVDK

SEQ ID NO: 64129 - DNA, 1403 bp, Triticum aestivum
  misc_feature (1)..(1403): Ceres Seq. ID no. 12617323
tagaacatcctaattgaaaacccaaatcaccgttctccccccaaatcacatcccactctcagatctcggaatggccgactcctccgcgccgcactccaacggcggcgccggcgccgaggcggaggcggtgccccgttccctggcgccgccgcggagggtggcgctggtgacgggcatcacggggcaggacgggagctacctgactgagctgctcctgtccaaggggtacgaggtgcacggcctcatccgccgctcctccaacttcaacacccagcgcctcgaccacatctaccacgacccgcacgcgacgccctccgccgcgcgcccgccgatgcgcctccactacgccgacctctccgactcgtcctccctccgccgcgcgctcgaccacgtgctccccgacgaggtctacaacctcgccgcccagtcccacgtcgccgtctccttcgaggtgcccgactacaccgccgacgtcaccgccacgggcgcgctccgcctgctcgaggccgtccgcctctcctcgaagcccatgcgctactaccaggcggggtcctcggagatgttcggctccacgccgccgccgcagagcgaggccacccccttccacccgcgctccccctacgccgccgccaaggtcgccgcgcactggtacaccgtcaactaccgcgaggcgtacggcctcttcgcctgcaacggcgtgctcttcaaccacgagtccccccggcgcggcgagaacttcgtcacccgcaagatcacccgcgccatcggccgcatcaaggtcgggctccagaccaaggtcttcctcggcaacctctccgccgccagggattggggcttcgccggggattatgttgaggccatgtggctcatgctccagcaggacaagcctgatgattatgttgtcgccactgaagagtgccacaccgtggaggagttcttgcaggctgcttttgggtatgccggcctcaactggaaggatcatgtggtcattgacaagaagtactttcgcccttcggaggtggactgcctgcagggagattcatccaagtcaaggagagtgcttgggtggaagcccaaggttggcttccagcagctagttgagatgatggttgataacgacatcgagcttgccaagaaggagaaggtccttgtggatgctgggtaccgcgaccccaagcagcagccatagagttggaatcaatagtttggttaaaatggagcttggtttggatttcccacccttagaagctgatacagtgtggccattgcagtagaggttggctgaagttattgttgtttgtctcagggtagaaataaggaggtttaaagtttgatcctacaagactgttgattaagttactatgtcatgtgcttttctcatatgaatgaatcagacaatttat

SEQ ID NO: 64130 - protein, 372 aa, Triticum aestivum
  peptide (1)..(372): Ceres Seq. ID no. 12617324
  misc_feature (31)..(354): Pfam Name: NAD dependent epimerase/dehydratase family Pfam Description: NAD dependent epimerase/dehydratase family
  misc_feature (29)..(351): Homolog of NCBI NO: 16329177 NR Description: GDP-D-mannose dehydratase [Synechocystis sp. PCC
  misc_feature (31)..(352): Homolog of NCBI NO: 23128163 NR Description: hypothetical protein [Nostoc punctiforme]
  misc_feature (31)..(352): Homolog of NCBI NO: 4097914 NR Description: putative GDP-D-mannose dehydratase [Anabaena sp.
  misc_feature (28)..(351): Homolog of NCBI NO: 22298176 NR Description: GDP-mannose 4,6-dehydratase [Thermosynechococcus
  misc_feature (10)..(372): Homolog of NCBI NO: 15230418 NR Description: GDP-D-mannose-4,6-dehydratase (MUR1)
  misc_feature (24)..(372): Homolog of NCBI NO: 15239334 NR Description: GDP-D-mannose 4,6-dehydratase
  misc_feature (10)..(372): Homolog of NCBI NO: 21536808 NR Description: GDP-D-mannose-4,6-dehydratase MUR1 [Arabidopsis
  misc_feature (10)..(372): Homolog of NCBI NO: 28373938 NR Description: Chain A, Crystal Structure Of The Gdp-Mannose
  misc_feature (10)..(372): Homolog of NCBI NO: 1764100 NR Description: GDP-D-mannose-4,6-dehydratase [Arabidopsis
  misc_feature (2)..(372): Homolog of NCBI NO: 7939611 NR Description: root cap-specific protein [Zea mays]
MADSSAPHSNGGAGAEAEAVPRSLAPPRRVALVTGITGQDGSYLTELLLSKGYEVHGLIRRSSNFNTQRLDHIYHDPHATPSAARPPMRLHYADLSDSSSLRRALDHVLPDEVYNLAAQSHVAVSFEVPDYTADVTATGALRLLEAVRLSSKPMRYYQAGSSEMFGSTPPPQSEATPFHPRSPYAAAKVAAHWYTVNYREAYGLFACNGVLFNHESPRRGENFVTRKITRAIGRIKVGLQTKVFLGNLSAARDWGFAGDYVEAMWLMLQQDKPDDYVVATEECHTVEEFLQAAFGYAGLNWKDHVVIDKKYFRPSEVDCLQGDSSKSRRVLGWKPKVGFQQLVEMMVDNDIELAKKEKVLVDAGYRDPKQQP

SEQ ID NO: 64131 - protein, 285 aa, Triticum aestivum
  peptide (1)..(285): Ceres Seq. ID no. 12617325
  misc_feature (1)..(267): Pfam Name: NAD dependent epimerase/dehydratase family Pfam Description: NAD dependent epimerase/dehydratase family
  misc_feature (1)..(264): Homolog of NCBI NO: 16329177 NR Description: GDP-D-mannose dehydratase [Synechocystis sp. PCC
  misc_feature (1)..(265): Homolog of NCBI NO: 23128163 NR Description: hypothetical protein [Nostoc punctiforme]
  misc_feature (1)..(265): Homolog of NCBI NO: 4097914 NR Description: putative GDP-D-mannose dehydratase [Anabaena sp.
  misc_feature (1)..(264): Homolog of NCBI NO: 22298176 NR Description: GDP-mannose 4,6-dehydratase [Thermosynechococcus
  misc_feature (1)..(285): Homolog of NCBI NO: 15230418 NR Description: GDP-D-mannose-4,6-dehydratase (MUR1)
  misc_feature (1)..(285): Homolog of NCBI NO: 15239334 NR Description: GDP-D-mannose 4,6-dehydratase
  misc_feature (1)..(285): Homolog of NCBI NO: 21536808 NR Description: GDP-D-mannose-4,6-dehydratase MUR1 [Arabidopsis
  misc_feature (1)..(285): Homolog of NCBI NO: 28373938 NR Description: Chain A, Crystal Structure Of The Gdp-Mannose
  misc_feature (1)..(285): Homolog of NCBI NO: 1764100 NR Description: GDP-D-mannose-4,6-dehydratase [Arabidopsis
  misc_feature (1)..(285): Homolog of NCBI NO: 7939611 NR Description: root cap-specific protein [Zea mays]
MRLHYADLSDSSSLRRALDHVLPDEVYNLAAQSHVAVSFEVPDYTADVTATGALRLLEAVRLSSKPMRYYQAGSSEMFGSTPPPQSEATPFHPRSPYAAAKVAAHWYTVNYREAYGLFACNGVLFNHESPRRGENFVTRKITRAIGRIKVGLQTKVFLGNLSAARDWGFAGDYVEAMWLMLQQDKPDDYVVATEECHTVEEFLQAAFGYAGLNWKDHVVIDKKYFRPSEVDCLQGDSSKSRRVLGWKPKVGFQQLVEMMVDNDIELAKKEKVLVDAGYRDPKQQP

SEQ ID NO: 64132 - protein, 219 aa, Triticum aestivum
  peptide (1)..(219): Ceres Seq. ID no. 12617326
  misc_feature (1)..(201): Pfam Name: NAD dependent epimerase/dehydratase family Pfam Description: NAD dependent epimerase/dehydratase family
  misc_feature (1)..(198): Homolog of NCBI NO: 16329177 NR Description: GDP-D-mannose dehydratase [Synechocystis sp. PCC
  misc_feature (1)..(199): Homolog of NCBI NO: 23128163 NR Description: hypothetical protein [Nostoc punctiforme]
  misc_feature (1)..(199): Homolog of NCBI NO: 4097914 NR Description: putative GDP-D-mannose dehydratase [Anabaena sp.
  misc_feature (1)..(198): Homolog of NCBI NO: 22298176 NR Description: GDP-mannose 4,6-dehydratase [Thermosynechococcus
  misc_feature (1)..(219): Homolog of NCBI NO: 15230418 NR Description: GDP-D-mannose-4,6-dehydratase (MUR1)
  misc_feature (1)..(219): Homolog of NCBI NO: 15239334 NR Description: GDP-D-mannose 4,6-dehydratase
  misc_feature (1)..(219): Homolog of NCBI NO: 21536808 NR Description: GDP-D-mannose-4,6-dehydratase MUR1 [Arabidopsis
  misc_feature (1)..(219): Homolog of NCBI NO: 28373938 NR Description: Chain A, Crystal Structure Of The Gdp-Mannose
  misc_feature (1)..(219): Homolog of NCBI NO: 1764100 NR Description: GDP-D-mannose-4,6-dehydratase [Arabidopsis
  misc_feature (1)..(219): Homolog of NCBI NO: 7939611 NR Description: root cap-specific protein [Zea mays]
MRYYQAGSSEMFGSTPPPQSEATPFHPRSPYAAAKVAAHWYTVNYREAYGLFACNGVLFNHESPRRGENFVTRKITRAIGRIKVGLQTKVFLGNLSAARDWGFAGDYVEAMWLMLQQDKPDDYVVATEECHTVEEFLQAAFGYAGLNWKDHVVIDKKYFRPSEVDCLQGDSSKSRRVLGWKPKVGFQQLVEMMVDNDIELAKKEKVLVDAGYRDPKQQP

SEQ ID NO: 64133 - DNA, 907 bp, Triticum aestivum
  misc_feature (1)..(907): Ceres Seq. ID no. 15178576
gaggtgtgaacgatgggctctctgtcggactcgcaggcgaatggcgaccgtcagccgccgccggcggaggcggaggatgctggggcgcaagtcgaggagggagatactggcgagaagatggagggcgtcgcgtccatagcgctgctgccctctggcgccatctccggccacttcatccgccttccggactccgcctgctacggcctccagggcaccccgataccatgcgagagggaatgtagccgaggagatgattaccgccttataaagctctccatcattaattttaagaggaagacagagaaggtggttgtggtggaatgcagggggcatgatgctgctcgattacaaaacattgaccatttgcatggatgggaagatgacgttgttggattggttcaaaagaaacatgggaataagaaagtcttggtctctttcgaatgcgagacgctgaaggccgataaagccgctgaagaacatattagcaagtatatgccaaatctttgcggactggacgcagttgtaaacacagggaagatgagcatctctggcatcaacctcgacgaggacgatgaaccaagcggtaacagctgagagcggaaacactgtgtcagtgtgttagctgcgagccgtcaatgccgtcgacaaaggaggaccacgtgtcgctgttacaacggcatgagttttatgcgacaaatcagcgcttctgtttctgcacttgaaacggtgcgctttgtagcagttctgtttctgcacttgaaacggtgcgctttgtagcaagtctcttaacggaatgtgtgtttgctgttgcttcatctggcatgatcctgatgagggaattatacacccttggtcttggacttgggggtttggtgggccagtcggcggcacaaaaaaaaaaaaaaaa

SEQ ID NO: 64134 - protein, 193 aa, Triticum aestivum
  peptide (1)..(193): Ceres Seq. ID no. 15178577
  misc_feature (57)..(170): Homolog of NCBI NO: 11994768 NR Description: gene_id:MMF24.3~unknown protein [Arabidopsis
  misc_feature (28)..(188): Homolog of NCBI NO: 15228659 NR Description: hypothetical protein [Arabidopsis thaliana]
MGSLSDSQANGDRQPPPAEAEDAGAQVEEGDTGEKMEGVASIALLPSGAISGHFIRLPDSACYGLQGTPIPCERECSRGDDYRLIKLSIINFKRKTEKVVVVECRGHDAARLQNIDHLHGWEDDVVGLVQKKHGNKKVLVSFECETLKADKAAEEHISKYMPNLCGLDAVVNTGKMSISGINLDEDDEPSGNS

SEQ ID NO: 64135 - protein, 158 aa, Triticum aestivum
  peptide (1)..(158): Ceres Seq. ID no. 15178578
  misc_feature (22)..(135): Homolog of NCBI NO: 11994768 NR Description: gene_id:MMF24.3~unknown protein [Arabidopsis
  misc_feature (1)..(153): Homolog of NCBI NO: 15228659 NR Description: hypothetical protein [Arabidopsis thaliana]
MEGVASIALLPSGAISGHFIRLPDSACYGLQGTPIPCERECSRGDDYRLIKLSIINFKRKTEKVVVVECRGHDAARLQNIDHLHGWEDDVVGLVQKKHGNKKVLVSFECETLKADKAAEEHISKYMPNLCGLDAVVNTGKMSISGINLDEDDEPSGNS

SEQ ID NO: 64136 - DNA, 1286 bp, Triticum aestivum
  misc_feature (1)..(1286): Ceres Seq. ID no. 13597237
acacaaactcctctcctcatcgcctctcctcgccccctctgcccttcctcatcttcctcccgttcggttgtggctccgtcttccctcacgattggtgcccgggcgccgccgccatcgccatggacggcctgcacggcgccgacgcctgcttctcccccgggagggccatgtcgccgcaggtccggccccccgccggcccgccggacgtaggcagccactacttggcggagctgttgcaggagcaccagaagctcgtcccgttcacgcaggtgctaccaatctgcagcaagctgttgagcaacgagataatgcgggtgacctgcctgcttaagcaccagcatggcggggactttgagaggctgccgccgatggcgagtccaaaccagatgcatcatcatccgtcgcccccaatgcctaatttctgcggaaatggttttggcccgtggaaccacggggcgcatccagagagggtaggttttcctcaaggacctgtgggttggcaaggagcaccacaaagcccctcttcatacattgtcaagaagattttgcggttggagataccaacagatacttaccctaatttcaattttattggccgtcttcttgggccaagaggaaactcgttgaagaggattgaagcctctacgggttgtcgtgtttttatcagagggaagggctcaattaaagatcctgggaaggaggaactgctgaagggaagacctggttacgaacacttggatgatcccctgcatatcttgattgaagcagagttacctgccaatgtcattgatgcaagactctcaaaagcacaagagatcctagaagagttgttgaaaccagtggatgaatcacaagactactacaagaggcagcaactccgtgagcttgccatgctgaactcaccgctccgagaggagagccctcgtctaagcccgcatccaagtccgcacccaagcccgcatcaaggcggcgcttcacccttcagtaacggtgggatgaaacgaagcaaacaatgactgcagaggcctgctcctcccaactttgacccttccagaaacctgctctcaatcggtgccctcacaacctaatttttcatgagcaagctttcatgatggtgttggcatccgtgcgaaacctgtgttactagtagaattttgatgagtctcccttgtgacattagcctgtgatgactgactgagaatgatctatgatagcgaatcctccgcctttataattagaacatttgatttatttgttgttggtaatcatcagatatggcactgtgc

SEQ ID NO: 64137 - protein, 337 aa, Triticum aestivum
  peptide (1)..(337): Ceres Seq. ID no. 13597238
  misc_feature (183)..(238): Pfam Name: KH domain Pfam Description: KH domain
  misc_feature (73)..(336): Homolog of NCBI NO: 20268733 NR Description: unknown protein [Arabidopsis thaliana]
  misc_feature (73)..(336): Homolog of NCBI NO: 15236738 NR Description: KH domain protein [Arabidopsis thaliana]
  misc_feature (34)..(336): Homolog of NCBI NO: 22329449 NR Description: KH domain quaking protein, putative [Arabidopsis
  misc_feature (34)..(336): Homolog of NCBI NO: 16930473 NR Description: At1g09660/F21M12_5 [Arabidopsis thaliana]
  misc_feature (40)..(336): Homolog of NCBI NO: 40645104 NR Description: hypothetical protein [Nicotiana tabacum]
  misc_feature (40)..(336): Homolog of NCBI NO: 15224909 NR Description: KH domain protein [Arabidopsis thaliana]
  misc_feature (40)..(336): Homolog of NCBI NO: 30680583 NR Description: KH domain protein [Arabidopsis thaliana]
  misc_feature (40)..(336): Homolog of NCBI NO: 12322716 NR Description: unknown protein; 28504-31237 [Arabidopsis
  misc_feature (42)..(336): Homolog of NCBI NO: 34900448 NR Description: contains EST C27129(C51039)~similar to
  misc_feature (40)..(337): Homolog of NCBI NO: 34909270 NR Description: P0454H12.18 [Oryza sativa (japonica
TNSSPHRLSSPPLPFLIFLPFGCGSVFPHDWCPGAAAIAMDGLHGADACFSPGRAMSPQVRPPAGPPDVGSHYLAELLQEHQKLVPFTQVLPICSKLLSNEIMRVTCLLKHQHGGDFERLPPMASPNQMHHHPSPPMPNFCGNGFGPWNHGAHPERVGFPQGPVGWQGAPQSPSSYIVKKILRLEIPTDTYPNFNFIGRLLGPRGNSLKRIEASTGCRVFIRGKGSIKDPGKEELLKGRPGYEHLDDPLHILIEAELPANVIDARLSKAQEILEELLKPVDESQDYYKRQQLRELAMLNSPLREESPRLSPHPSPHPSPHQGGASPFSNGGMKRSKQ

SEQ ID NO: 64138 - protein, 298 aa, Triticum aestivum
  peptide (1)..(298): Ceres Seq. ID no. 13597239
  misc_feature (144)..(199): Pfam Name: KH domain Pfam Description: KH domain
  misc_feature (34)..(297): Homolog of NCBI NO: 20268733 NR Description: unknown protein [Arabidopsis thaliana]
  misc_feature (34)..(297): Homolog of NCBI NO: 15236738 NR Description: KH domain protein [Arabidopsis thaliana]
  misc_feature (1)..(297): Homolog of NCBI NO: 22329449 NR Description: KH domain quaking protein, putative [Arabidopsis
  misc_feature (1)..(297): Homolog of NCBI NO: 16930473 NR Description: At1g09660/F21M12_5 [Arabidopsis thaliana]
  misc_feature (1)..(297): Homolog of NCBI NO: 40645104 NR Description: hypothetical protein [Nicotiana tabacum]
  misc_feature (1)..(297): Homolog of NCBI NO: 15224909 NR Description: KH domain protein [Arabidopsis thaliana]
  misc_feature (1)..(297): Homolog of NCBI NO: 30680583 NR Description: KH domain protein [Arabidopsis thaliana]
  misc_feature (1)..(297): Homolog of NCBI NO: 12322716 NR Description: unknown protein; 28504-31237 [Arabidopsis
  misc_feature (3)..(297): Homolog of NCBI NO: 34900448 NR Description: contains EST C27129(C51039)~similar to
  misc_feature (1)..(298): Homolog of NCBI NO: 34909270 NR Description: P0454H12.18 [Oryza sativa (japonica
MDGLHGADACFSPGRAMSPQVRPPAGPPDVGSHYLAELLQEHQKLVPFTQVLPICSKLLSNEIMRVTCLLKHQHGGDFERLPPMASPNQMHHHPSPPMPNFCGNGFGPWNHGAHPERVGFPQGPVGWQGAPQSPSSYIVKKILRLEIPTDTYPNFNFIGRLLGPRGNSLKRIEASTGCRVFIRGKGSIKDPGKEELLKGRPGYEHLDDPLHILIEAELPANVIDARLSKAQEILEELLKPVDESQDYYKRQQLRELAMLNSPLREESPRLSPHPSPHPSPHQGGASPFSNGGMKRSKQ

SEQ ID NO: 64139 - protein, 282 aa, Triticum aestivum
  peptide (1)..(282): Ceres Seq. ID no. 13597240
  misc_feature (128)..(183): Pfam Name: KH domain Pfam Description: KH domain
  misc_feature (18)..(281): Homolog of NCBI NO: 20268733 NR Description: unknown protein [Arabidopsis thaliana]
  misc_feature (18)..(281): Homolog of NCBI NO: 15236738 NR Description: KH domain protein [Arabidopsis thaliana]
  misc_feature (1)..(281): Homolog of NCBI NO: 22329449 NR Description: KH domain quaking protein, putative [Arabidopsis
  misc_feature (1)..(281): Homolog of NCBI NO: 16930473 NR Description: At1g09660/F21M12_5 [Arabidopsis thaliana]
  misc_feature (1)..(281): Homolog of NCBI NO: 40645104 NR Description: hypothetical protein [Nicotiana tabacum]
  misc_feature (1)..(281): Homolog of NCBI NO: 15224909 NR Description: KH domain protein [Arabidopsis thaliana]
  misc_feature (1)..(281): Homolog of NCBI NO: 30680583 NR Description: KH domain protein [Arabidopsis thaliana]
  misc_feature (1)..(281): Homolog of NCBI NO: 12322716 NR Description: unknown protein; 28504-31237 [Arabidopsis
  misc_feature (1)..(281): Homolog of NCBI NO: 34900448 NR Description: contains EST C27129(C51039)~similar to
  misc_feature (1)..(282): Homolog of NCBI NO: 34909270 NR Description: P0454H12.18 [Oryza sativa (japonica
MSPQVRPPAGPPDVGSHYLAELLQEHQKLVPFTQVLPICSKLLSNEIMRVTCLLKHQHGGDFERLPPMASPNQMHHHPSPPMPNFCGNGFGPWNHGAHPERVGFPQGPVGWQGAPQSPSSYIVKKILRLEIPTDTYPNFNFIGRLLGPRGNSLKRIEASTGCRVFIRGKGSIKDPGKEELLKGRPGYEHLDDPLHILIEAELPANVIDARLSKAQEILEELLKPVDESQDYYKRQQLRELAMLNSPLREESPRLSPHPSPHPSPHQGGASPFSNGGMKRSKQ

SEQ ID NO: 64140 - DNA, 1488 bp, Triticum aestivum
  misc_feature (1)..(1488): Ceres Seq. ID no. 13591224
cagtcgcgagcccccgcttccattctaatccgccccctcccgagacgccaaagccccaaacccctcgccctcccaaaccctaactctaaaacctccgccctcccgccgccgccgccgcccgattcccctccccaggccccgcatcccccgtccggcttgaacgatgtcgtccgacgaggaggtcagggaggagaaggagctcgacctctcctccaacgaggtcgtcaccaagtacaagaccgccgccgagatcatcaacaaggctctgaagttggtattgttggagtgcaagccgaaagccaagattgttgacatttgtgagaagggtgacaatttcataacagagcaaactgggaatgtctacaagaacgcgaagaggaagattgaaaggggcattgctttcccgacatgtgtatctgtgaacaacacagtctgtcatttctccccactggcaactgacgattctgtactcgaagaaaatgacatggtgaagatcgatatggcttgccatattgatggttttattgctgtggtggctcatacacatgtcatcaaaggtgggccggttactggaagagcagctaatgttcttgctgctgcaaacacagcagcagaagttgcaatgaggcttgttagacctggcaagaagaataaggatgtcactgaagcaattcagaaagttgctgctgcttatgattgtaaaattgttgaaggagttcttagccatcagctgaaacaattcgtcatcgatggtaacaaagtggtacttagtgtttcaaatgctgatacaaaggtggatgatgctgaatttgaagaaaatgaagtgtatgcaattgatattgtcaccagcactggcgagggaaagccgaagctattggatgagaagcagaccactatttacaagagagctgtagacaagaactatcacttgaagatgaaggcatcaaggttcatcttcagtgagattagccagaagttcccaatcatgccattcactgctagggcgctggaggagaagcgtgcacgcttaggtttggtagaatgcatgaatcatgagctgttgcagccataccctgttctacatgagaagcaaggtgacctggttgcccacatcaagttcaccgtgttgttgatgccaaatgggtctgacaagataacttcacatccactacagcaattggagccctcaaaatccatcgagggcgatgctgagatcaaggcttggctggctttgggcacaaagtcaaagaagaagggtggtggcaagaaaaagaaaggcaagaaaggagatgcagcagaagtagcagagcccatggaggtttctaaggacgcaccaagccaggaataattctcattttttttgaattgcttccgttacgtttgtacctgctcctttgctgcatctgattgttttatattacattcagctgtggggatttgagtacctttttttgaagtgtctaatgaaaatggttgatcctggcgcac

SEQ ID NO: 64141 - protein, 394 aa, Triticum aestivum
  peptide (1)..(394): Ceres Seq. ID no. 13591225
  misc_feature (9)..(385): Homolog of NCBI NO: 6755100 NR Description: proliferation-associated 2G4
  misc_feature (9)..(385): Homolog of NCBI NO: 13632817 NR Description: Proliferation-associated protein 2G4 (Cell cycle
  misc_feature (9)..(385): Homolog of NCBI NO: 26788026 NR Description: SI:dZ150I12.2 (novel protein similar to human
  misc_feature (9)..(385): Homolog of NCBI NO: 34862215 NR Description: similar to proliferation-associated protein 1
  misc_feature (1)..(390): Homolog of NCBI NO: 34193902 NR Description: Proliferation-associated protein 1 [Danio rerio]
  misc_feature (1)..(390): Homolog of NCBI NO: 30693537 NR Description: nuclear DNA-binding protein G2p -related
  misc_feature (1)..(390): Homolog of NCBI NO: 13430628 NR Description: putative nuclear DNA-binding protein G2p
  misc_feature (1)..(390): Homolog of NCBI NO: 15231039 NR Description: nuclear DNA-binding protein G2p -related
  misc_feature (1)..(393): Homolog of NCBI NO: 9652218 NR Description: putative DNA binding protein [Atriplex hortensis]
  misc_feature (1)..(390): Homolog of NCBI NO: 7447216 NR Description: probable DNA-binding protein GBP16 - rice
MSSDEEVREEKELDLSSNEVVTKYKTAAEIINKALKLVLLECKPKAKIVDICEKGDNFITEQTGNVYKNAKRKIERGIAFPTCVSVNNTVCHFSPLATDDSVLEENDMVKIDMACHIDGFIAVVAHTHVIKGGPVTGRAANVLAAANTAAEVAMRLVRPGKKNKDVTEAIQKVAAAYDCKIVEGVLSHQLKQFVIDGNKVVLSVSNADTKVDDAEFEENEVYAIDIVTSTGEGKPKLLDEKQTTIYKRAVDKNYHLKMKASRFIFSEISQKFPIMPFTARALEEKRARLGLVECMNHELLQPYPVLHEKQGDLVAHIKFTVLLMPNGSDKITSHPLQQLEPSKSIEGDAEIKAWLALGTKSKKKGGGKKKKGKKGDAAEVAEPMEVSKDAPSQE

SEQ ID NO: 64142 - protein, 287 aa, Triticum aestivum
  peptide (1)..(287): Ceres Seq. ID no. 13591226
  misc_feature (1)..(278): Homolog of NCBI NO: 6755100 NR Description: proliferation-associated 2G4
  misc_feature (1)..(278): Homolog of NCBI NO: 13632817 NR Description: Proliferation-associated protein 2G4 (Cell cycle
  misc_feature (1)..(278): Homolog of NCBI NO: 26788026 NR Description: SI:dZ150I12.2 (novel protein similar to human
  misc_feature (1)..(278): Homolog of NCBI NO: 34862215 NR Description: similar to proliferation-associated protein 1
  misc_feature (1)..(283): Homolog of NCBI NO: 34193902 NR Description: Proliferation-associated protein 1 [Danio rerio]
  misc_feature (1)..(283): Homolog of NCBI NO: 30693537 NR Description: nuclear DNA-binding protein G2p -related
  misc_feature (1)..(283): Homolog of NCBI NO: 13430628 NR Description: putative nuclear DNA-binding protein G2p
  misc_feature (1)..(283): Homolog of NCBI NO: 15231039 NR Description: nuclear DNA-binding protein G2p -related
  misc_feature (1)..(286): Homolog of NCBI NO: 9652218 NR Description: putative DNA binding protein [Atriplex hortensis]
  misc_feature (1)..(283): Homolog of NCBI NO: 7447216 NR Description: probable DNA-binding protein GBP16 - rice
MVKIDMACHIDGFIAVVAHTHVIKGGPVTGRAANVLAAANTAAEVAMRLVRPGKKNKDVTEAIQKVAAAYDCKIVEGVLSHQLKQFVIDGNKVVLSVSNADTKVDDAEFEENEVYAIDIVTSTGEGKPKLLDEKQTTIYKRAVDKNYHLKMKASRFIFSEISQKFPIMPFTARALEEKRARLGLVECMNHELLQPYPVLHEKQGDLVAHIKFTVLLMPNGSDKITSHPLQQLEPSKSIEGDAEIKAWLALGTKSKKKGGGKKKKGKKGDAAEVAEPMEVSKDAPSQE

SEQ ID NO: 64143 - protein, 282 aa, Triticum aestivum
  peptide (1)..(282): Ceres Seq. ID no. 13591227
  misc_feature (1)..(273): Homolog of NCBI NO: 6755100 NR Description: proliferation-associated 2G4
  misc_feature (1)..(273): Homolog of NCBI NO: 13632817 NR Description: Proliferation-associated protein 2G4 (Cell cycle
  misc_feature (1)..(273): Homolog of NCBI NO: 26788026 NR Description: SI:dZ150I12.2 (novel protein similar to human
  misc_feature (1)..(273): Homolog of NCBI NO: 34862215 NR Description: similar to proliferation-associated protein 1
  misc_feature (1)..(278): Homolog of NCBI NO: 34193902 NR Description: Proliferation-associated protein 1 [Danio rerio]
  misc_feature (1)..(278): Homolog of NCBI NO: 30693537 NR Description: nuclear DNA-binding protein G2p -related
  misc_feature (1)..(278): Homolog of NCBI NO: 13430628 NR Description: putative nuclear DNA-binding protein G2p
  misc_feature (1)..(278): Homolog of NCBI NO: 15231039 NR Description: nuclear DNA-binding protein G2p -related
  misc_feature (1)..(281): Homolog of NCBI NO: 9652218 NR Description: putative DNA binding protein [Atriplex hortensis]
  misc_feature (1)..(278): Homolog of NCBI NO: 7447216 NR Description: probable DNA-binding protein GBP16 - rice
MACHIDGFIAVVAHTHVIKGGPVTGRAANVLAAANTAAEVAMRLVRPGKKNKDVTEAIQKVAAAYDCKIVEGVLSHQLKQFVIDGNKVVLSVSNADTKVDDAEFEENEVYAIDIVTSTGEGKPKLLDEKQTTIYKRAVDKNYHLKMKASRFIFSEISQKFPIMPFTARALEEKRARLGLVECMNHELLQPYPVLHEKQGDLVAHIKFTVLLMPNGSDKITSHPLQQLEPSKSIEGDAEIKAWLALGTKSKKKGGGKKKKGKKGDAAEVAEPMEVSKDAPSQE

SEQ ID NO: 64144 - DNA, 1209 bp, Triticum aestivum
  misc_feature (1)..(1209): Ceres Seq. ID no. 12625706
accctcgtccacactcttctcttgaaggccatcaatggcggccaagactaaggcaccagctggtactccggtcggccccgtccctttcgcggacgtcgagaccgacccaggcttggtctccccagtgccggagcagctcccggaagagcacgccgccctgccgagcgcgtccgcgttcaacggccggatgaacatccgttgctaccagggcttctggctgccggattacttcgccgccgcggccgtcgccctgcagcgccgcttcgagccctgccgcaacgacgtaatcgtcgcaagctttcccaagtccggcaccacgtggcttaacgccctggcgttcgccaccatggcacggcgggcttatccggccgccgacgccgggcatccgctgctacgcctcaacccgcaccagtgcatccctttcctggagaacctcttccggagccgcgcggaggccgccaagctcgaggcgctgccgtccccgcgcctaatgaacacgcacatgccgctcggcatgataatgccgggcgccggcgggtgcaaggtcgtctacgtgtgcagggagcccaaggacatggtcgtctcgttgtggcacttcctccagcatgtgcatccagacctggcgctggccgacgtcctcgactccgtgtgcagcggcgcggtgccgtatggacccgtctgggaccacatcctcggctactggcgcgccagcatcgcgaggccagacgccgtgctcttcttgcggtacgaggagctgctgcgcgaccccgccgggaacgtcagggatctggcgcggttcgtcgggctgccgttctccgacgaggaggaggacgccggcgtcgtccaggacatcgtcaagctctgcagcttcggtcacctcaagcccttggaagccaattcgacgggccagctggatcccctcgtcccggtgccgcgcgaggcgctgttcaggaagggcgtggccggcgactgggcgaaccacatgacgccggagatggcgcgacgcctcgacgaaatcgtcgccgacaagttccatgcgaccggcctcacttttcagtgattcgagacgactcccgtcccccatacactatcatgatttctcatgatcaagtaatgtttgtactttcgtaatcactaagcatgaataattagtggagggagtagtagactctgggcgtggctaaaaatcagtaaatttcgtttgaggtc

SEQ ID NO: 64145 - protein, 341 aa, Triticum aestivum
  peptide (1)..(341): Ceres Seq. ID no. 12625707
  misc_feature (83)..(337): Pfam Name: Sulfotransferase domain Pfam Description: Sulfotransferase domain
  misc_feature (169)..(340): Homolog of NCBI NO: 30683286 NR Description: sulfotransferase family [Arabidopsis thaliana]
  misc_feature (11)..(338): Homolog of NCBI NO: 38344441 NR Description: OSJNBa0038O10.13 [Oryza sativa (japonica
  misc_feature (57)..(339): Homolog of NCBI NO: 34905060 NR Description: putative flavonol 4'-sulfotransferase
  misc_feature (27)..(340): Homolog of NCBI NO: 37531912 NR Description: putative flavonol 3-sulfotransferase
  misc_feature (57)..(338): Homolog of NCBI NO: 38346451 NR Description: OSJNBa0018J19.12 [Oryza sativa (japonica
  misc_feature (14)..(338): Homolog of NCBI NO: 35215145 NR Description: putative flavonol 3'-sulfotransferase
  misc_feature (9)..(339): Homolog of NCBI NO: 40253317 NR Description: putative flavonol 3-sulfotransferase
  misc_feature (14)..(324): Homolog of NCBI NO: 34393650 NR Description: putative flavonol 3-sulfotransferase
  misc_feature (14)..(339): Homolog of NCBI NO: 40253319 NR Description: putative flavonol 3-sulfotransferase
  misc_feature (53)..(276): Homolog of NCBI NO: 30349136 NR Description: STF-1 [Triticum monococcum]
MAAKTKAPAGTPVGPVPFADVETDPGLVSPVPEQLPEEHAALPSASAFNGRMNIRCYQGFWLPDYFAAAAVALQRRFEPCRNDVIVASFPKSGTTWLNALAFATMARRAYPAADAGHPLLRLNPHQCIPFLENLFRSRAEAAKLEALPSPRLMNTHMPLGMIMPGAGGCKVVYVCREPKDMVVSLWHFLQHVHPDLALADVLDSVCSGAVPYGPVWDHILGYWRASIARPDAVLFLRYEELLRDPAGNVRDLARFVGLPFSDEEEDAGVVQDIVKLCSFGHLKPLEANSTGQLDPLVPVPREALFRKGVAGDWANHMTPEMARRLDEIVADKFHATGLTFQ

SEQ ID NO: 64146 - protein, 290 aa, Triticum aestivum
  peptide (1)..(290): Ceres Seq. ID no. 12625708
  misc_feature (32)..(286): Pfam Name: Sulfotransferase domain Pfam Description: Sulfotransferase domain
  misc_feature (118)..(289): Homolog of NCBI NO: 30683286 NR Description: sulfotransferase family [Arabidopsis thaliana]
  misc_feature (1)..(287): Homolog of NCBI NO: 38344441 NR Description: OSJNBa0038O10.13 [Oryza sativa (japonica
  misc_feature (6)..(288): Homolog of NCBI NO: 34905060 NR Description: putative flavonol 4'-sulfotransferase
  misc_feature (1)..(289): Homolog of NCBI NO: 37531912 NR Description: putative flavonol 3-sulfotransferase
  misc_feature (6)..(287): Homolog of NCBI NO: 38346451 NR Description: OSJNBa0018J19.12 [Oryza sativa (japonica
  misc_feature (1)..(287): Homolog of NCBI NO: 35215145 NR Description: putative flavonol 3'-sulfotransferase
  misc_feature (1)..(288): Homolog of NCBI NO: 40253317 NR Description: putative flavonol 3-sulfotransferase
  misc_feature (1)..(273): Homolog of NCBI NO: 34393650 NR Description: putative flavonol 3-sulfotransferase
  misc_feature (1)..(288): Homolog of NCBI NO: 40253319 NR Description: putative flavonol 3-sulfotransferase
  misc_feature (2)..(225): Homolog of NCBI NO: 30349136 NR Description: STF-1 [Triticum monococcum]
MNIRCYQGFWLPDYFAAAAVALQRRFEPCRNDVIVASFPKSGTTWLNALAFATMARRAYPAADAGHPLLRLNPHQCIPFLENLFRSRAEAAKLEALPSPRLMNTHMPLGMIMPGAGGCKVVYVCREPKDMVVSLWHFLQHVHPDLALADVLDSVCSGAVPYGPVWDHILGYWRASIARPDAVLFLRYEELLRDPAGNVRDLARFVGLPFSDEEEDAGVVQDIVKLCSFGHLKPLEANSTGQLDPLVPVPREALFRKGVAGDWANHMTPEMARRLDEIVADKFHATGLTFQ

SEQ ID NO: 64147 - protein, 237 aa, Triticum aestivum
  peptide (1)..(237): Ceres Seq. ID no. 12625709
  misc_feature (1)..(233): Pfam Name: Sulfotransferase domain Pfam Description: Sulfotransferase domain
  misc_feature (65)..(236): Homolog of NCBI NO: 30683286 NR Description: sulfotransferase family [Arabidopsis thaliana]
  misc_feature (1)..(234): Homolog of NCBI NO: 38344441 NR Description: OSJNBa0038O10.13 [Oryza sativa (japonica
  misc_feature (1)..(235): Homolog of NCBI NO: 34905060 NR Description: putative flavonol 4'-sulfotransferase
  misc_feature (1)..(236): Homolog of NCBI NO: 37531912 NR Description: putative flavonol 3-sulfotransferase
  misc_feature (1)..(234): Homolog of NCBI NO: 38346451 NR Description: OSJNBa0018J19.12 [Oryza sativa (japonica
  misc_feature (1)..(234): Homolog of NCBI NO: 35215145 NR Description: putative flavonol 3'-sulfotransferase
  misc_feature (1)..(235): Homolog of NCBI NO: 40253317 NR Description: putative flavonol 3-sulfotransferase
  misc_feature (1)..(220): Homolog of NCBI NO: 34393650 NR Description: putative flavonol 3-sulfotransferase
  misc_feature (1)..(235): Homolog of NCBI NO: 40253319 NR Description: putative flavonol 3-sulfotransferase
  misc_feature (1)..(172): Homolog of NCBI NO: 30349136 NR Description: STF-1 [Triticum monococcum]
MARRAYPAADAGHPLLRLNPHQCIPFLENLFRSRAEAAKLEALPSPRLMNTHMPLGMIMPGAGGCKVVYVCREPKDMVVSLWHFLQHVHPDLALADVLDSVCSGAVPYGPVWDHILGYWRASIARPDAVLFLRYEELLRDPAGNVRDLARFVGLPFSDEEEDAGVVQDIVKLCSFGHLKPLEANSTGQLDPLVPVPREALFRKGVAGDWANHMTPEMARRLDEIVADKFHATGLTFQ

SEQ ID NO: 64148 - DNA, 953 bp, Triticum aestivum
  misc_feature (1)..(953): Ceres Seq. ID no. 13655610
catataagcatgcgacgaaaccccatcgtccattcttccctgccgccgcctcctcccttcttcagccgaagcgcccgcacgcctcgacccaagggatctcaatggcgccgacctccaagatggcgctgggcatcaagcgcgcgtcgcggtcgcacacctaccaccgccgcgggctgtgggccatcaaggccaagcacggcggagccttccccaaggccgagaagccagccgccgtcgccgagcccaagttctaccccgccgacgacgtcaagccccgcaccgccagcacccgcaagcctaagcccaccaagctcaggtcgaccatcacgcccggtacggtgctgatcctgctcgctgggaggtacatggggaagcgcgtggtgttcctcaagcagctcaagtctggcctgctcctcatctctgggcctttcaagatcaatggtgtgccagttcgccgggtgaaccaggcttatgtcattgccacatccacaaaggttgacatctctggtgttaacgtggagaagtttgatgacaagtacttcgccagggacaagaagaccagggcaaagaagactgaaggggagctgtttgagactgagaaggagaccaccaagaatctgccagaatttaaaaaagatgatcagaaggccatcgatgctgagttgatcaaagctattgaggctgtccctgaccttaagaactatcttggtgctcggttctctctcagggatggtgacaagccccatgagatgaccttctaagttgctacaagttcctgagttttggatgtgttttgcctagattgttgctgaaatttgtaccctgttagttgacttcctatgtcagttgaagtgaccgtaagatattatgagaagatcaagagaatccttatctgctttggtggttctttttttacttatgcttaatggaacagtttgtcgtgtgttatttgt

SEQ ID NO: 64149 - protein, 252 aa, Triticum aestivum
  peptide (1)..(252): Ceres Seq. ID no. 13655611
  misc_feature (145)..(252): Pfam Name: Ribosomal protein L6e Pfam Description: Ribosomal protein L6e
  misc_feature (76)..(252): Homolog of NCBI NO: 6323567 NR Description: Homology to rat L6 and human L6; Rpl6ap
  misc_feature (81)..(252): Homolog of NCBI NO: 7271018 NR Description: ribosomal protein L16 [Candida albicans]
  misc_feature (81)..(252): Homolog of NCBI NO: 6012952 NR Description: 60S ribosomal protein L6 (YL 16 like) [Cyanophora
  misc_feature (25)..(252): Homolog of NCBI NO: 7208784 NR Description: 60S ribosomal protein L6 [Cicer arietinum]
  misc_feature (43)..(252): Homolog of NCBI NO: 15221127 NR Description: 60S ribosomal protein L6 (RPL6B) [Arabidopsis
  misc_feature (43)..(252): Homolog of NCBI NO: 21593910 NR Description: 60S ribosomal protein L6, putative [Arabidopsis
  misc_feature (43)..(252): Homolog of NCBI NO: 15221798 NR Description: 60S ribosomal protein L6 (RPL6A) [Arabidopsis
  misc_feature (43)..(252): Homolog of NCBI NO: 15221126 NR Description: 60S ribosomal protein L6 (RPL6C) [Arabidopsis
  misc_feature (23)..(252): Homolog of NCBI NO: 464621 NR Description: 60S RIBOSOMAL PROTEIN L6 (YL16-LIKE)
  misc_feature (34)..(252): Homolog of NCBI NO: 38344818 NR Description: OSJNBb0022F23.11 [Oryza sativa (japonica
YKHATKPHRPFFPAAASSLLQPKRPHASTQGISMAPTSKMALGIKRASRSHTYHRRGLWAIKAKHGGAFPKAEKPAAVAEPKFYPADDVKPRTASTRKPKPTKLRSTITPGTVLILLAGRYMGKRVVFLKQLKSGLLLISGPFKINGVPVRRVNQAYVIATSTKVDISGVNVEKFDDKYFARDKKTRAKKTEGELFETEKETTKNLPEFKKDDQKAIDAELIKAIEAVPDLKNYLGARFSLRDGDKPHEMTF

SEQ ID NO: 64150 - protein, 219 aa, Triticum aestivum
  peptide (1)..(219): Ceres Seq. ID no. 13655612
  misc_feature (112)..(219): Pfam Name: Ribosomal protein L6e Pfam Description: Ribosomal protein L6e
  misc_feature (43)..(219): Homolog of NCBI NO: 6323567 NR Description: Homology to rat L6 and human L6; Rpl6ap
  misc_feature (48)..(219): Homolog of NCBI NO: 7271018 NR Description: ribosomal protein L16 [Candida albicans]
  misc_feature (48)..(219): Homolog of NCBI NO: 6012952 NR Description: 60S ribosomal protein L6 (YL 16 like) [Cyanophora
  misc_feature (1)..(219): Homolog of NCBI NO: 7208784 NR Description: 60S ribosomal protein L6 [Cicer arietinum]
  misc_feature (10)..(219): Homolog of NCBI NO: 15221127 NR Description: 60S ribosomal protein L6 (RPL6B) [Arabidopsis
  misc_feature (10)..(219): Homolog of NCBI NO: 21593910 NR Description: 60S ribosomal protein L6, putative [Arabidopsis
  misc_feature (10)..(219): Homolog of NCBI NO: 15221798 NR Description: 60S ribosomal protein L6 (RPL6A) [Arabidopsis
  misc_feature (10)..(219): Homolog of NCBI NO: 15221126 NR Description: 60S ribosomal protein L6 (RPL6C) [Arabidopsis
  misc_feature (1)..(219): Homolog of NCBI NO: 464621 NR Description: 60S RIBOSOMAL PROTEIN L6 (YL16-LIKE)
  misc_feature (1)..(219): Homolog of NCBI NO: 38344818 NR Description: OSJNBb0022F23.11 [Oryza sativa (japonica
MAPTSKMALGIKRASRSHTYHRRGLWAIKAKHGGAFPKAEKPAAVAEPKFYPADDVKPRTASTRKPKPTKLRSTITPGTVLILLAGRYMGKRVVFLKQLKSGLLLISGPFKINGVPVRRVNQAYVIATSTKVDISGVNVEKFDDKYFARDKKTRAKKTEGELFETEKETTKNLPEFKKDDQKAIDAELIKAIEAVPDLKNYLGARFSLRDGDKPHEMTF

SEQ ID NO: 64151 - protein, 213 aa, Triticum aestivum
  peptide (1)..(213): Ceres Seq. ID no. 13655613
  misc_feature (106)..(213): Pfam Name: Ribosomal protein L6e Pfam Description: Ribosomal protein L6e
  misc_feature (37)..(213): Homolog of NCBI NO: 6323567 NR Description: Homology to rat L6 and human L6; Rpl6ap
  misc_feature (42)..(213): Homolog of NCBI NO: 7271018 NR Description: ribosomal protein L16 [Candida albicans]
  misc_feature (42)..(213): Homolog of NCBI NO: 6012952 NR Description: 60S ribosomal protein L6 (YL 16 like) [Cyanophora
  misc_feature (1)..(213): Homolog of NCBI NO: 7208784 NR Description: 60S ribosomal protein L6 [Cicer arietinum]
  misc_feature (4)..(213): Homolog of NCBI NO: 15221127 NR Description: 60S ribosomal protein L6 (RPL6B) [Arabidopsis
  misc_feature (4)..(213): Homolog of NCBI NO: 21593910 NR Description: 60S ribosomal protein L6, putative [Arabidopsis
  misc_feature (4)..(213): Homolog of NCBI NO: 15221798 NR Description: 60S ribosomal protein L6 (RPL6A) [Arabidopsis
  misc_feature (4)..(213): Homolog of NCBI NO: 15221126 NR Description: 60S ribosomal protein L6 (RPL6C) [Arabidopsis
  misc_feature (1)..(213): Homolog of NCBI NO: 464621 NR Description: 60S RIBOSOMAL PROTEIN L6 (YL16-LIKE)
  misc_feature (1)..(213): Homolog of NCBI NO: 38344818 NR Description: OSJNBb0022F23.11 [Oryza sativa (japonica
MALGIKRASRSHTYHRRGLWAIKAKHGGAFPKAEKPAAVAEPKFYPADDVKPRTASTRKPKPTKLRSTITPGTVLILLAGRYMGKRVVFLKQLKSGLLLISGPFKINGVPVRRVNQAYVIATSTKVDISGVNVEKFDDKYFARDKKTRAKKTEGELFETEKETTKNLPEFKKDDQKAIDAELIKAIEAVPDLKNYLGARFSLRDGDKPHEMTF

SEQ ID NO: 64152 - DNA, 1498 bp, Triticum aestivum
  misc_feature (1)..(1498): Ceres Seq. ID no. 15169659
cggtttcttctagccccaaagtcaagcagaggaattcctaaaaaaaaaaagtcaagcagaggaggaggagcactgaggcttctagaaacttgaggcagggaggttcggcaggaggcatgtgggggcggcactactggggcgcccggcggccgagcgacggcgccgcgggtgcggaggccggcggcggcgtggtggtgatgttcgcgtggctgtcgagtcaggagcggcacgtgcgcgcgtacgtggacctgtacgcggcccttgggtgggcgtgcctcgtctgccactccgacttcatcaccctgtttatgccggagaaggctgctgtgcttgctgaccgggtgctcacggagctcgttaaggaactgaatattagaccagtacctgttgtgtttgcatccttttcgggaggaccaaaaggttgcacatacaaggttcttcagctgatccagagaaggtgcaaagggcagctgagtttggatgactatcaacttgtacgggactgcgtatgtggacaaatatatgactcgagtcctgtagattttgtgagtgatttaggcacccgctttcttcttcacccaagtgtcctgaagatgcctgaacctccacgtgtcttatcatggatgactagaggcattgcctcgggtctagacactcttttcattggcaagtttgaagcacagcgcaaagaatattgggagacactatactcatcagtgcatgttggcccaatactcatattctgttcagaggatgatgaacttgctccatgttcggccgttcaaaattttggacggcgtctgctggagctgggtggtgatgtgaatttagttaaatggcacagttctccacatgtaggacattacaagcatcacactgaggaataccgagctgcagtgactgagctgctcatgaaggcttcagcgctttacacaagcagaaaacgactcaatgactacagtgtcggcacgagtgaggacagtgacacaccttattcgtctcgcaatctacataagactgctgtaagctccagtgataggctagggagggtttcagttgatccagccaatcatttcttcttaccgagttccatggagtaccatgaaagcaggagtgaagtgctaaaacccgagttgttcaacatgccgagtgttgaaagcgcgaagaaccctgatggcgtgttggggacgatgctctatgatgcatgtgtcccaaagaacgtggaaggctgggacttcaagcttgcatcaatagatggacagcgtatgcattttactgcccgtcagcatggtacttccaatccaacaaaatgtatacgccgctcaagattgtaatgattttgactcaacatctaagtgcattccagcagactgctctatactgccagagtatacttgtttcaggagaatgttattgtgttgaccttttctggaaattttagagtatactgccagagtatactaatgcttttttaaagaaaaaaaaaaaaaaaaaaaag

SEQ ID NO: 64153 - protein, 405 aa, Triticum aestivum
  peptide (1)..(405): Ceres Seq. ID no. 15169660
  misc_feature (98)..(372): Pfam Name: Eukaryotic protein of unknown function (DUF829) Pfam Description: Eukaryotic protein of unknown function (DUF829)
  misc_feature (22)..(257): Homolog of NCBI NO: 19922796 NR Description: CG3082-PC [Drosophila melanogaster]
  misc_feature (22)..(257): Homolog of NCBI NO: 27374257 NR Description: l(2)k09913-PA [Drosophila erecta]
  misc_feature (22)..(257): Homolog of NCBI NO: 24659033 NR Description: CG3082-PD [Drosophila melanogaster]
  misc_feature (1)..(382): Homolog of NCBI NO: 25411656 NR Description: hypothetical protein At2g15690 [imported] -
  misc_feature (1)..(405): Homolog of NCBI NO: 18397898 NR Description: expressed protein [Arabidopsis thaliana]
  misc_feature (1)..(405): Homolog of NCBI NO: 15241450 NR Description: expressed protein [Arabidopsis thaliana]
MWGRHYWGARRPSDGAAGAEAGGGVVVMFAWLSSQERHVRAYVDLYAALGWACLVCHSDFITLFMPEKAAVLADRVLTELVKELNIRPVPVVFASFSGGPKGCTYKVLQLIQRRCKGQLSLDDYQLVRDCVCGQIYDSSPVDFVSDLGTRFLLHPSVLKMPEPPRVLSWMTRGIASGLDTLFIGKFEAQRKEYWETLYSSVHVGPILIFCSEDDELAPCSAVQNFGRRLLELGGDVNLVKWHSSPHVGHYKHHTEEYRAAVTELLMKASALYTSRKRLNDYSVGTSEDSDTPYSSRNLHKTAVSSSDRLGRVSVDPANHFFLPSSMEYHESRSEVLKPELFNMPSVESAKNPDGVLGTMLYDACVPKNVEGWDFKLASIDGQRMHFTARQHGTSNPTKCIRRSRL

SEQ ID NO: 64154 - protein, 378 aa, Triticum aestivum
  peptide (1)..(378): Ceres Seq. ID no. 15169661
  misc_feature (71)..(345): Pfam Name: Eukaryotic protein of unknown function (DUF829) Pfam Description: Eukaryotic protein of unknown function (DUF829)
  misc_feature (1)..(230): Homolog of NCBI NO: 19922796 NR Description: CG3082-PC [Drosophila melanogaster]
  misc_feature (1)..(230): Homolog of NCBI NO: 27374257 NR Description: l(2)k09913-PA [Drosophila erecta]
  misc_feature (1)..(230): Homolog of NCBI NO: 24659033 NR Description: CG3082-PD [Drosophila melanogaster]
  misc_feature (1)..(355): Homolog of NCBI NO: 25411656 NR Description: hypothetical protein At2g15690 [imported] -
  misc_feature (1)..(378): Homolog of NCBI NO: 18397898 NR Description: expressed protein [Arabidopsis thaliana]
  misc_feature (1)..(378): Homolog of NCBI NO: 15241450 NR Description: expressed protein [Arabidopsis thaliana]
MFAWLSSQERHVRAYVDLYAALGWACLVCHSDFITLFMPEKAAVLADRVLTELVKELNIRPVPVVFASFSGGPKGCTYKVLQLIQRRCKGQLSLDDYQLVRDCVCGQIYDSSPVDFVSDLGTRFLLHPSVLKMPEPPRVLSWMTRGIASGLDTLFIGKFEAQRKEYWETLYSSVHVGPILIFCSEDDELAPCSAVQNFGRRLLELGGDVNLVKWHSSPHVGHYKHHTEEYRAAVTELLMKASALYTSRKRLNDYSVGTSEDSDTPYSSRNLHKTAVSSSDRLGRVSVDPANHFFLPSSMEYHESRSEVLKPELFNMPSVESAKNPDGVLGTMLYDACVPKNVEGWDFKLASIDGQRMHFTARQHGTSNPTKCIRRSRL

SEQ ID NO: 64155 - protein, 341 aa, Triticum aestivum; identical to SEQ ID NO: 64017
  peptide (1)..(341): Ceres Seq. ID no. 15169662
  misc_feature (34)..(308): Pfam Name: Eukaryotic protein of unknown function (DUF829) Pfam Description: Eukaryotic protein of unknown function (DUF829)
  misc_feature (1)..(193): Homolog of NCBI NO: 19922796 NR Description: CG3082-PC [Drosophila melanogaster]
  misc_feature (1)..(193): Homolog of NCBI NO: 27374257 NR Description: l(2)k09913-PA [Drosophila erecta]
  misc_feature (1)..(193): Homolog of NCBI NO: 24659033 NR Description: CG3082-PD [Drosophila melanogaster]
  misc_feature (1)..(318): Homolog of NCBI NO: 25411656 NR Description: hypothetical protein At2g15690 [imported] -
  misc_feature (1)..(341): Homolog of NCBI NO: 18397898 NR Description: expressed protein [Arabidopsis thaliana]
  misc_feature (1)..(341): Homolog of NCBI NO: 15241450 NR Description: expressed protein [Arabidopsis thaliana]

SEQ ID NO: 64156 - DNA, 1588 bp, Triticum aestivum
  misc_feature (1)..(1588): Ceres Seq. ID no. 15169651
accgaaacggctcactgggaaaaggggagaaaaaacagagctcaataacttcgaggaggaggagaggcgtggcgggggaaggaagggagggagggagctcgtcgtcgtcggcggcggatggcggtggagtaccgctgctgcgggggccccttcttcgagcacatcgccatcatcgtggtgctggtgctcttcgcggggctcatgtccgggctcaccctcggcctcatgtccctcagcctcgtcgacctcgaggtcctcgccaagtccggcaccgacaaggaccgcaagtacgcagctaagatattgcccgtcgtgaaaaaccagcaccttctgctatgcactcttctgatctgcaacgctgcagctatggaggcactgccaatcttccttgatagcctggtgactgcttggggtgctgttttgatctctgtgacattgatcctgctgttcggcgagatcataccacaatctatctgctcacggtatgggctggcaattggtgcctcggttgctccgttagtccgtgttcttgtttggatttgtttccctgttgcatatccaatcgccaagctgctggaccatgtgcttggtcacggtaaagcggcacttttccgcagagctgagctaaaaacacttgtgacactgcatggaaatgaggctggtaaaggtggagagttaacccatgatgaaacaactataatagctggagctcttgagctcagtgaaaagaaagctaaagatgctatgacacctctttgtgatacatttgtgattgatataaatgcaaagctcgacaggaaactaatgcaagaggtcattgagaaaggtcatagcagagtgccagtttattatgaaaaggatacaaacattattggattgatattggtgaagaatttattatccattaaccctgatgatgaaattcccataaagagtgtaactatccgcaaaattcctcgcgtttcagaagacatgcccctgtatgacatcctaaatgaattccagaagggccacagccacatggcggttgtcataaggcaaaacattccaaactacccagctaagcagcccagcatcgatggtggatctcttgaggtcgccatcgccattgatgacaagcagggtgagaaggttgcgaagagtctcactccgctgtggaggtggaagagctaccccaacacccagaactccaacacggggagcaggagggggaaatggtccaaagaccagtcggacgtcctccaagtgcacgaagagccgttgcccacgctgagcgaggatgaagaagccgtcggcatcataaccatggaggatgtcattgaagaactgctgcaggaggagatctacgacgaaaccgacgtacatgttgaggagcaataacacattgcttgctagggtttacgcacatggtaaacttgccgttttggctggagccggaagcaaagttgcgtgccatgccagtttcttttctttctttgtgccgaggggaagaagaaacaatatatgtatgtatgataacgtaacgttgtactgctacgtgtgaatagacagagaccgcaaatattagttcgtctgaagtgttgatacc

SEQ ID NO: 64157 - protein, 420 aa, Triticum aestivum
  peptide (1)..(420): Ceres Seq. ID no. 15169652
  misc_feature (14)..(191): Pfam Name: Domain of unknown function DUF21 Pfam Description: Domain of unknown function DUF21
  misc_feature (7)..(322): Homolog of NCBI NO: 15237264 NR Description: hypothetical protein [Arabidopsis thaliana]
  misc_feature (374)..(417): Homolog of NCBI NO: 22330087 NR Description: expressed protein [Arabidopsis thaliana]
  misc_feature (1)..(307): Homolog of NCBI NO: 22330087 NR Description: expressed protein [Arabidopsis thaliana]
  misc_feature (1)..(257): Homolog of NCBI NO: 12039276 NR Description: putative ancient conserved domain protein [Oryza
  misc_feature (1)..(151): Homolog of NCBI NO: 25411569 NR Description: hypothetical protein At2g14520 [imported] -
  misc_feature (180)..(406): Homolog of NCBI NO: 25411569 NR Description: hypothetical protein At2g14520 [imported] -
  misc_feature (29)..(419): Homolog of NCBI NO: 7487085 NR Description: hypothetical protein T16L1.190 - Arabidopsis
  misc_feature (1)..(419): Homolog of NCBI NO: 22329131 NR Description: CBS domain containing protein [Arabidopsis
  misc_feature (1)..(419): Homolog of NCBI NO: 30679136 NR Description: CBS domain containing protein [Arabidopsis
  misc_feature (1)..(420): Homolog of NCBI NO: 40538933 NR Description: expressed protein [Oryza sativa (japonica
MAVEYRCCGGPFFEHIAIIVVLVLFAGLMSGLTLGLMSLSLVDLEVLAKSGTDKDRKYAAKILPVVKNQHLLLCTLLICNAAAMEALPIFLDSLVTAWGAVLISVTLILLFGEIIPQSICSRYGLAIGASVAPLVRVLVWICFPVAYPIAKLLDHVLGHGKAALFRRAELKTLVTLHGNEAGKGGELTHDETTIIAGALELSEKKAKDAMTPLCDTFVIDINAKLDRKLMQEVIEKGHSRVPVYYEKDTNIIGLILVKNLLSINPDDEIPIKSVTIRKIPRVSEDMPLYDILNEFQKGHSHMAVVIRQNIPNYPAKQPSIDGGSLEVAIAIDDKQGEKVAKSLTPLWRWKSYPNTQNSNTGSRRGKWSKDQSDVLQVHEEPLPTLSEDEEAVGIITMEDVIEELLQEEIYDETDVHVEEQ

SEQ ID NO: 64158 - protein, 392 aa, Triticum aestivum
  peptide (1)..(392): Ceres Seq. ID no. 15169653
  misc_feature (1)..(163): Pfam Name: Domain of unknown function DUF21 Pfam Description: Domain of unknown function DUF21
  misc_feature (1)..(294): Homolog of NCBI NO: 15237264 NR Description: hypothetical protein [Arabidopsis thaliana]
  misc_feature (346)..(389): Homolog of NCBI NO: 22330087 NR Description: expressed protein [Arabidopsis thaliana]
  misc_feature (1)..(279): Homolog of NCBI NO: 22330087 NR Description: expressed protein [Arabidopsis thaliana]
  misc_feature (1)..(229): Homolog of NCBI NO: 12039276 NR Description: putative ancient conserved domain protein [Oryza
  misc_feature (1)..(123): Homolog of NCBI NO: 25411569 NR Description: hypothetical protein At2g14520 [imported] -
  misc_feature (152)..(378): Homolog of NCBI NO: 25411569 NR Description: hypothetical protein At2g14520 [imported] -
  misc_feature (1)..(391): Homolog of NCBI NO: 7487085 NR Description: hypothetical protein T16L1.190 - Arabidopsis
  misc_feature (1)..(391): Homolog of NCBI NO: 22329131 NR Description: CBS domain containing protein [Arabidopsis
  misc_feature (1)..(391): Homolog of NCBI NO: 30679136 NR Description: CBS domain containing protein [Arabidopsis
  misc_feature (1)..(392): Homolog of NCBI NO: 40538933 NR Description: expressed protein [Oryza sativa (japonica
MSGLTLGLMSLSLVDLEVLAKSGTDKDRKYAAKILPVVKNQHLLLCTLLICNAAAMEALPIFLDSLVTAWGAVLISVTLILLFGEIIPQSICSRYGLAIGASVAPLVRVLVWICFPVAYPIAKLLDHVLGHGKAALFRRAELKTLVTLHGNEAGKGGELTHDETTIIAGALELSEKKAKDAMTPLCDTFVIDINAKLDRKLMQEVIEKGHSRVPVYYEKDTNIIGLILVKNLLSINPDDEIPIKSVTIRKIPRVSEDMPLYDILNEFQKGHSHMAVVIRQNIPNYPAKQPSIDGGSLEVAIAIDDKQGEKVAKSLTPLWRWKSYPNTQNSNTGSRRGKWSKDQSDVLQVHEEPLPTLSEDEEAVGIITMEDVIEELLQEEIYDETDVHVEEQ

SEQ ID NO: 64159 - protein, 384 aa, Triticum aestivum
  peptide (1)..(384): Ceres Seq. ID no. 15169654
  misc_feature (1)..(155): Pfam Name: Domain of unknown function DUF21 Pfam Description: Domain of unknown function DUF21
  misc_feature (1)..(286): Homolog of NCBI NO: 15237264 NR Description: hypothetical protein [Arabidopsis thaliana]
  misc_feature (338)..(381): Homolog of NCBI NO: 22330087 NR Description: expressed protein [Arabidopsis thaliana]
  misc_feature (1)..(271): Homolog of NCBI NO: 22330087 NR Description: expressed protein [Arabidopsis thaliana]
  misc_feature (1)..(221): Homolog of NCBI NO: 12039276 NR Description: putative ancient conserved domain protein [Oryza
  misc_feature (1)..(115): Homolog of NCBI NO: 25411569 NR Description: hypothetical protein At2g14520 [imported] -
  misc_feature (144)..(370): Homolog of NCBI NO: 25411569 NR Description: hypothetical protein At2g14520 [imported] -
  misc_feature (1)..(383): Homolog of NCBI NO: 7487085 NR Description: hypothetical protein T16L1.190 - Arabidopsis
  misc_feature (1)..(383): Homolog of NCBI NO: 22329131 NR Description: CBS domain containing protein [Arabidopsis
  misc_feature (1)..(383): Homolog of NCBI NO: 30679136 NR Description: CBS domain containing protein [Arabidopsis
  misc_feature (1)..(384): Homolog of NCBI NO: 40538933 NR Description: expressed protein [Oryza sativa (japonica
MSLSLVDLEVLAKSGTDKDRKYAAKILPVVKNQHLLLCTLLICNAAAMEALPIFLDSLVTAWGAVLISVTLILLFGEIIPQSICSRYGLAIGASVAPLVRVLVWICFPVAYPIAKLLDHVLGHGKAALFRRAELKTLVTLHGNEAGKGGELTHDETTIIAGALELSEKKAKDAMTPLCDTFVIDINAKLDRKLMQEVIEKGHSRVPVYYEKDTNIIGLILVKNLLSINPDDEIPIKSVTIRKIPRVSEDMPLYDILNEFQKGHSHMAVVIRQNIPNYPAKQPSIDGGSLEVAIAIDDKQGEKVAKSLTPLWRWKSYPNTQNSNTGSRRGKWSKDQSDVLQVHEEPLPTLSEDEEAVGIITMEDVIEELLQEEIYDETDVHVEEQ

SEQ ID NO: 64160 - DNA, 1060 bp, Triticum aestivum
  misc_feature (1)..(1060): Ceres Seq. ID no. 12625713
atttcaggtctcctcctcaactcaagagatctgagctgagagatggctcttcttcctcctctgcttctgtcctgcatcttggtgctggctctcccagggccggcggtggtgacggtagggggcgtcacgttccacgtaactaacaagtgcccgttcccggtgtggccggcggtcgcgccaaacgccggccaccccgtgctcgccgcgggcggcttcttcctccctccgggacagtcgaagcgcgtcggggcaccggccacctggaacggccgcctctggggccgcaccggctgcaccttcgcgggcaccgacgccaacgccgccagctgcctcaccggcgactgcgacggacgcctcacctgcaacgggtccgtcggcgcccctcccgccaccctcgtcgaggtgaacctgcacgcggaccagagcaaggggagctcctacgacgtgagcgtggtggacgggtacaacctcccggtggccgtgtggaccaggccggcgaaccgcagcggcgactgcttcatcgccgggtgcgccaagaacgtgaacgcggtgtgcccgccggagctgcaggtcacgacgagcggcggcgcgggcaagaaggcgacggtggtggcgtgcaggagcgcgtgcctggccttcggcctggacgccttctgctgccgcggcgcgtacggcaccgcggagacgtgccggggcagcgtctactcgcggctcttcagggacgcctgcccggcctactacagctacgcctacgacgtggccgccgccacggcgcgctgctacgcgcaggagtacgtggtcaccttctgcccgtccagatggggagatcgtgtggcccagggttgagcagtgggcagcccaggactgtgctacgtatgtatttatatgtacttttagacaccgtatgtattttatacatgaggtgtgtaatattttgtgttgacataacacatgtactatttccatgcaaaaaaatacatgtactatttatcctgcaaaaaagtaaataatacatgtactattttcccgcaaaaaaataatacatgtactatttggcggg

SEQ ID NO: 64161 - protein, 267 aa, Triticum aestivum
  peptide (1)..(267): Ceres Seq. ID no. 12625714
  misc_feature (34)..(257): Pfam Name: Thaumatin family Pfam Description: Thaumatin family
  misc_feature (1)..(258): Homolog of NCBI NO: 15222875 NR Description: thaumatin, putative
  misc_feature (34)..(257): Homolog of NCBI NO: 15221033 NR Description: pathogenesis-related group 5 protein, putative
  misc_feature (34)..(257): Homolog of NCBI NO: 2129751 NR Description: thaumatin-like protein - Arabidopsis thaliana
  misc_feature (1)..(258): Homolog of NCBI NO: 4105697 NR Description: thaumatin-like protein [Arabidopsis thaliana]
  misc_feature (29)..(258): Homolog of NCBI NO: 37531042 NR Description: putative thaumatin-like protein
  misc_feature (14)..(258): Homolog of NCBI NO: 6273383 NR Description: SCUTL1 [Vitis vinifera]
  misc_feature (12)..(256): Homolog of NCBI NO: 34905146 NR Description: putative pathogenesis-related protein
  misc_feature (29)..(260): Homolog of NCBI NO: 15238593 NR Description: thaumatin-like protein; protein id: At5g24620.1
  misc_feature (23)..(261): Homolog of NCBI NO: 15242552 NR Description: thaumatin-like protein; protein id: At5g40020.1
  misc_feature (9)..(266): Homolog of NCBI NO: 37534308 NR Description: hypothetical protein [Oryza sativa (japonica
MALLPPLLLSCILVLALPGPAVVTVGGVTFHVTNKCPFPVWPAVAPNAGHPVLAAGGFFLPPGQSKRVGAPATWNGRLWGRTGCTFAGTDANAASCLTGDCDGRLTCNGSVGAPPATLVEVNLHADQSKGSSYDVSVVDGYNLPVAVWTRPANRSGDCFIAGCAKNVNAVCPPELQVTTSGGAGKKATVVACRSACLAFGLDAFCCRGAYGTAETCRGSVYSRLFRDACPAYYSYAYDVAAATARCYAQEYVVTFCPSRWGDRVAQG

SEQ ID NO: 64162 - DNA, 1350 bp, Triticum aestivum
  misc_feature (1)..(1350): Ceres Seq. ID no. 14302240
gcaacccacacgcccctcccatcccctcttgtactactaggtacaagaagaagctgagctacagcaatggcgcccagagcagctgcggccgtggccgtcgtggccttggtctgcgcagtgcagtcgtccctctcaggggcagccgtcccgggtctgtcccctggcttctacaagacgacctgcccagggctggagcaaatcgtgaacgcccaagtgacggcgaccttcaacaaagaccaaggtgtcgctcccgccctcctgcgcgtcctcttccacgactgctttacgcagggctgcgacgcgtcggtgctcatcaaaggccgcggcaccgagcagatccccggcggagccaacgggactctccgccgcgtggctctggacctcatcgatcgcatccaccgcgaggcccaagctgcctgcggtcgggtggtctcatgcgccgacgttaccgtgctcgctacccgcgacgcgctgttcaaggccggcggtccccgtttcaacgtcgacctgggccggcttgactcgttcgccccggcgccagatagggttaaggacctgccctcgcccttcgacggcgcggacaggcacatcgaggccttcaaggcccgcaaactcagcgccgatgacctggtttccctctccggcgcgcacaccttcggtgtggcccactgcggggtcatcccaccccggggcacccattccatggatccccagctcgccaagcagctacaggagaaatgcaccaaacccacggcaacaaccacgcaagacctcgacgtcctcacgccgcacgtcttcgacaacaagtactacgtgggcctgacccagaagaaggggatgttcctgtccgaccagtcgctcatcgaccacccgctcaccaagaacctcgccctcgccttctccaagaaccagacagccttcttcatcgagttcggcaagtcgatgaccaagatgaccgagatgggtgtgatcaccagcaagctgcagggcgaggtccgggccgactgcaccgtcgcagggaagcccccccgcatcgaggccgccaccgccgccgaccaggggttcacggccgacatgtaagacatgttccatgcaacgtagcgttcctcagctaaccgtgtccgtgcgtatacgcacgcgaacgcgcggtggcttatgttggtgtgtgcgtcttgtgcttgtgctgcctagctagtactactcctagttagttaataatgagcggtcggttcacttgcttcctagcataggattgatcgaggttcctagttttgggacacccttgtaagatcttcgtcatgtctttttcagatttccaacatccgtaatgtcatattttcatttcaaggt

SEQ ID NO: 64163 - protein, 337 aa, Triticum aestivum
  peptide (1)..(337): Ceres Seq. ID no. 14302241
  misc_feature (46)..(281): Pfam Name: Peroxidase Pfam Description: Peroxidase
  misc_feature (16)..(336): Homolog of NCBI NO: 5777629 NR Description: CAA303717.1 protein [Oryza sativa]
  misc_feature (9)..(336): Homolog of NCBI NO: 7433075 NR Description: probable peroxidase (EC 1.11.1.-) 1 precursor,
  misc_feature (16)..(319): Homolog of NCBI NO: 7433070 NR Description: probable peroxidase (EC 1.11.1.7), cationic -
  misc_feature (16)..(336): Homolog of NCBI NO: 38345506 NR Description: OSJNBa0039K24.4 [Oryza sativa (japonica
  misc_feature (1)..(337): Homolog of NCBI NO: 7433077 NR Description: probable peroxidase (EC 1.11.1.7) precursor -
MAPRAAAAVAVVALVCAVQSSLSGAAVPGLSPGFYKTTCPGLEQIVNAQVTATFNKDQGVAPALLRVLFHDCFTQGCDASVLIKGRGTEQIPGGANGTLRRVALDLIDRIHREAQAACGRVVSCADVTVLATRDALFKAGGPRFNVDLGRLDSFAPAPDRVKDLPSPFDGADRHIEAFKARKLSADDLVSLSGAHTFGVAHCGVIPPRGTHSMDPQLAKQLQEKCTKPTATTTQDLDVLTPHVFDNKYYVGLTQKKGMFLSDQSLIDHPLTKNLALAFSKNQTAFFIEFGKSMTKMTEMGVITSKLQGEVRADCTVAGKPPRIEAATAADQGFTADM

SEQ ID NO: 64164 - protein, 172 aa, Triticum aestivum
  peptide (1)..(172): Ceres Seq. ID no. 14302242
NPHAPPIPSCTTRYKKKLSYSNGAQSSCGRGRRGLGLRSAVVPLRGSRPGSVPWLLQDDLPRAGANRERPSDGDLQQRPRCRSRPPARPLPRLLYAGLRRVGAHQRPRHRADPRRSQRDSPPRGSGPHRSHPPRGPSCLRSGGLMRRRYRARYPRRAVQGRRSPFQRRPGPA

SEQ ID NO: 64165 - DNA, 1239 bp, Triticum aestivum
  misc_feature (1)..(1239): Ceres Seq. ID no. 13597120
cattacctagaacatcctaatcgaaaaaaaatttacagttttcaccaagatgaaattgcacaaggcatctatatcccctcctcactctcctccgctggccgccaacgccgccgcataaccaagtcaatcttcccccacccaaccccccgcgcagcctcgccgtcggcatgggcgaggagaggacggaggcgtggtggggccggcgcgcgtgggcgctgctgtcggccgtccgcgcgcgggcgccgctggtgcagtgcatcaccaaccccgcctcccaattccggatggaggcctgcctcgagctcctcgcgctcccccccgccgtcgtcagggggaacgcgtccgagatcctcgccctcgccgcccgctcagacagctcccccaccttcaagggtgtggacagttcacatgactcaggggaggtcctgcaagccgcgaaagcattggcacggtccagcggcacagttgtcgcagtatctggagctgttgatttcatcacggatggcgagcaggtcatcagtgctagcaatggtgtggcaatgatgcagaagatcacagcgacagggtgtgctgtgactgctcttatagcggcatttgtcggggcggatccttccgatgctctggctgcagcagcatgtgcgctcgccatctttggactcgctggagagatagggatggagtcagcaaaaggacctgcctctctcaggatgcatctcattgatgctctctacggtctcgacgagcagaccgtcacatctggagtaaaaattgcgctgctgccgtaatgcatgtgtgccgtggctatcagtgctgtaggagatacagagtctggagtaatctgcaggatcattttgcctccttggtgcttggaaaaccgtgaagcagatcgtgtcagattggctgtcagatcactcatcaataatccggtgaccatcccggctgtagtaagtacgtacatagttgtgaattgtgatgtcacacagagaatgatgttcataaaataagccagtcgaaataaggtgtttgtgcttcaatggccttgagatgatcgaacggctattctgttcaaacactttgatccccctatgcctattatcacgggcggcgctaggggtattcttgggtcttcatgtgaatacccatgatttttacaaaacagtgttgattttggcaaaacagtgacaattttcaaaaaacaacaataattttggcaaaatgaatacacatgaatacccggtt

SEQ ID NO: 64166 - protein, 205 aa, Triticum aestivum
  peptide (1)..(205): Ceres Seq. ID no. 13597121
  misc_feature (1)..(193): Pfam Name: Hydroxyethylthiazole kinase family Pfam Description: Hydroxyethylthiazole kinase family
  misc_feature (16)..(193): Homolog of NCBI NO: 26248479 NR Description: Hydroxyethylthiazole kinase [Escherichia coli
  misc_feature (13)..(193): Homolog of NCBI NO: 16130042 NR Description: hydoxyethylthiazole kinase [Escherichia coli K12]
  misc_feature (16)..(197): Homolog of NCBI NO: 16765476 NR Description: hydoxyethylthiazole kinase (THZ kinase)
  misc_feature (19)..(187): Homolog of NCBI NO: 24216064 NR Description: hydroxyethylthiazole kinase
  misc_feature (19)..(187): Homolog of NCBI NO: 6683572 NR Description: OrfG [Leptospira interrogans serovar
  misc_feature (13)..(193): Homolog of NCBI NO: 24113480 NR Description: hydoxyethylthiazole kinase [Shigella flexneri 2a
  misc_feature (16)..(197): Homolog of NCBI NO: 16761089 NR Description: hydroxyethylthiazole kinase
  misc_feature (1)..(201): Homolog of NCBI NO: 28899986 NR Description: putative hydroxyethylthiazole kinase
  misc_feature (1)..(204): Homolog of NCBI NO: 15229565 NR Description: hydoxyethylthiazole kinase -related [Arabidopsis
  misc_feature (1)..(203): Homolog of NCBI NO: 34915114 NR Description: putative hydoxyethylthiazole kinase
MGEERTEAWWGRRAWALLSAVRARAPLVQCITNPASQFRMEACLELLALPPAVVRGNASEILALAARSDSSPTFKGVDSSHDSGEVLQAAKALARSSGTVVAVSGAVDFITDGEQVISASNGVAMMQKITATGCAVTALIAAFVGADPSDALAAAACALAIFGLAGEIGMESAKGPASLRMHLIDALYGLDEQTVTSGVKIALLP

SEQ ID NO: 64167 - protein, 180 aa, Triticum aestivum
  peptide (1)..(180): Ceres Seq. ID no. 13597122
HYLEHPNRKKIYSFHQDEIAQGIYIPSSLSSAGRQRRRITKSIFPHPTPRAASPSAWARRGRRRGGAGARGRCCRPSARGRRWCSASPTPPPNSGWRPASSSSRSPPPSSGGTRPRSSPSPPAQTAPPPSRVWTVHMTQGRSCKPRKHWHGPAAQLSQYLELLISSRMASRSSVLAMVWQ

SEQ ID NO: 64168 - protein, 166 aa, Triticum aestivum
  peptide (1)..(166): Ceres Seq. ID no. 13597123
  misc_feature (1)..(154): Pfam Name: Hydroxyethylthiazole kinase family Pfam Description: Hydroxyethylthiazole kinase family
  misc_feature (1)..(154): Homolog of NCBI NO: 26248479 NR Description: Hydroxyethylthiazole kinase [Escherichia coli
  misc_feature (1)..(154): Homolog of NCBI NO: 16130042 NR Description: hydoxyethylthiazole kinase [Escherichia coli K12]
  misc_feature (1)..(158): Homolog of NCBI NO: 16765476 NR Description: hydoxyethylthiazole kinase (THZ kinase)
  misc_feature (1)..(148): Homolog of NCBI NO: 24216064 NR Description: hydroxyethylthiazole kinase
  misc_feature (1)..(148): Homolog of NCBI NO: 6683572 NR Description: OrfG [Leptospira interrogans serovar
  misc_feature (1)..(154): Homolog of NCBI NO: 24113480 NR Description: hydoxyethylthiazole kinase [Shigella flexneri 2a
  misc_feature (1)..(158): Homolog of NCBI NO: 16761089 NR Description: hydroxyethylthiazole kinase
  misc_feature (1)..(162): Homolog of NCBI NO: 28899986 NR Description: putative hydroxyethylthiazole kinase
  misc_feature (1)..(165): Homolog of NCBI NO: 15229565 NR Description: hydoxyethylthiazole kinase -related [Arabidopsis
  misc_feature (1)..(164): Homolog of NCBI NO: 34915114 NR Description: putative hydoxyethylthiazole kinase
MEACLELLALPPAVVRGNASEILALAARSDSSPTFKGVDSSHDSGEVLQAAKALARSSGTVVAVSGAVDFITDGEQVISASNGVAMMQKITATGCAVTALIAAFVGADPSDALAAAACALAIFGLAGEIGMESAKGPASLRMHLIDALYGLDEQTVTSGVKIALLP

SEQ ID NO: 64169 - DNA, 1520 bp, Triticum aestivum
  misc_feature (1)..(1520): Ceres Seq. ID no. 12625474
cggtcgatcacacatttcctccgcccacctacccatcccgtccgccggccggcctcgaaccttccaagttaagcagctagctagctagctagcacggcggcgaggaatggagcgtgtctcgccgtggctgctgctgctggtacttctggtggccgcgtcagggccgggtgcacgcgccgatccgcaggtgccgtgctacttcgtgttcggggactcgctggtggacaacgggaacaacaacgacatcgcgtcgctggcgcgggccaactacccgccctacggcatcgacttccccggcggagccaccgggcgcttcagcaacggcctcaccaccgtcgacgccatctctcggcttctgggcttcgacgactacatcccagcgtacgcgggcgcaaacaatgatcaactcctctccggcgtcaacttcgcctcagctgcggccggaatcagagacgagaccggccagcaactgggccagcgcataagcttcggcgggcagctccagaactaccaggcggcggtgcagcagctggtgagcatcctgggggacgaggactccgcggcgaaccacctgagccagtgcatcttcacggtgggcatgggcagcaacgactacctcaacaactacttcatgcccgccgtctacgccaccagccggcagtacaccccggagcagtacgccgacgtgctcgtcagccagtacacgcagcagctcaggatcctgtacaacaacggggcgaggaaggtggcgctgatgggggtggggcaggtggggtgcagcccgaacgagctggcgcagcagagctccgacggggtcacctgcgtggcgcggatcaacggcgccatcgagatcttcaaccagaagctggtagagctggtggaccagttcaacacgctgccgggggcgcacttcacctacatcaacgcctacgggatcttccaggacatcatcaggtcgccgggagccaacggcctgacggtgctggacaaggggtgctgcggggtggggaggaacaacgggcaggtgacgtgcctgcccttccagacgccgtgcgccaacaggaacgagtacctcttctgggacgccttccacccaacggaggccgccaacattctcgtcgggaggcgggcctacagcgccgcccagccctccgacgtccaccccgtcgacctgcagacgcttgcgcgcctctagttatgcaacaacctgcttttccaaagagaaaaagaagttatacaggtcgcatgcatcatcagcatcagaaccatatgtgatggctatattttgttggggtgtgtggagtggtccgtgggaatgaaaggtgagtgttttgttacttcagtgcactgcatacgacaagcaagatgtatgtatgtgtgcatctgaacaacgtacgtacttggaaggaggagtatatgctatagttacattttttcggttttgttattgtgaagattcatccatcattgtgcttcgttgtgaaacagcacagttccaagaaaactatcattgtttttgc

SEQ ID NO: 64170 - protein, 362 aa, Triticum aestivum
  peptide (1)..(362): Ceres Seq. ID no. 12625475
  misc_feature (31)..(342): Pfam Name: GDSL-like Lipase/Acylhydrolase Pfam Description: GDSL-like Lipase/Acylhydrolase
  misc_feature (4)..(362): Homolog of NCBI NO: 21592417 NR Description: lipase/hydrolase, putative [Arabidopsis thaliana]
  misc_feature (4)..(362): Homolog of NCBI NO: 21594055 NR Description: lipase/hydrolase, putative [Arabidopsis thaliana]
  misc_feature (4)..(362): Homolog of NCBI NO: 15220512 NR Description: lipase/hydrolase, putative
  misc_feature (1)..(362): Homolog of NCBI NO: 21618199 NR Description: GDSL-motif lipase/hydrolase-like protein
  misc_feature (1)..(362): Homolog of NCBI NO: 18415211 NR Description: Expressed protein
  misc_feature (1)..(362): Homolog of NCBI NO: 7485419 NR Description: hypothetical protein F13C5.140 - Arabidopsis
  misc_feature (1)..(362): Homolog of NCBI NO: 21553940 NR Description: GDSL-motif lipase/hydrolase-like protein
  misc_feature (1)..(362): Homolog of NCBI NO: 15242458 NR Description: GDSL-motif lipase/hydrolase-like protein
  misc_feature (9)..(360): Homolog of NCBI NO: 34910808 NR Description: GDSL-motif lipase/hydrolase-like protein
  misc_feature (1)..(362): Homolog of NCBI NO: 34909504 NR Description: putative GDSL-motif lipase/hydrolase-like protein
MERVSPWLLLLVLLVAASGPGARADPQVPCYFVFGDSLVDNGNNNDIASLARANYPPYGIDFPGGATGRFSNGLTTVDAISRLLGFDDYIPAYAGANNDQLLSGVNFASAAAGIRDETGQQLGQRISFGGQLQNYQAAVQQLVSILGDEDSAANHLSQCIFTVGMGSNDYLNNYFMPAVYATSRQYTPEQYADVLVSQYTQQLRILYNNGARKVALMGVGQVGCSPNELAQQSSDGVTCVARINGAIEIFNQKLVELVDQFNTLPGAHFTYINAYGIFQDIIRSPGANGLTVLDKGCCGVGRNNGQVTCLPFQTPCANRNEYLFWDAFHPTEAANILVGRRAYSAAQPSDVHPVDLQTLARL

SEQ ID NO: 64171 - protein, 198 aa, Triticum aestivum
  peptide (1)..(198): Ceres Seq. ID no. 12625476
  misc_feature (1)..(178): Pfam Name: GDSL-like Lipase/Acylhydrolase Pfam Description: GDSL-like Lipase/Acylhydrolase
  misc_feature (1)..(198): Homolog of NCBI NO: 21592417 NR Description: lipase/hydrolase, putative [Arabidopsis thaliana]
  misc_feature (1)..(198): Homolog of NCBI NO: 21594055 NR Description: lipase/hydrolase, putative [Arabidopsis thaliana]
  misc_feature (1)..(198): Homolog of NCBI NO: 15220512 NR Description: lipase/hydrolase, putative
  misc_feature (1)..(198): Homolog of NCBI NO: 21618199 NR Description: GDSL-motif lipase/hydrolase-like protein
  misc_feature (1)..(198): Homolog of NCBI NO: 18415211 NR Description: Expressed protein
  misc_feature (1)..(198): Homolog of NCBI NO: 7485419 NR Description: hypothetical protein F13C5.140 - Arabidopsis
  misc_feature (1)..(198): Homolog of NCBI NO: 21553940 NR Description: GDSL-motif lipase/hydrolase-like protein
  misc_feature (1)..(198): Homolog of NCBI NO: 15242458 NR Description: GDSL-motif lipase/hydrolase-like protein
  misc_feature (1)..(196): Homolog of NCBI NO: 34910808 NR Description: GDSL-motif lipase/hydrolase-like protein
  misc_feature (1)..(198): Homolog of NCBI NO: 34909504 NR Description: putative GDSL-motif lipase/hydrolase-like protein
MGSNDYLNNYFMPAVYATSRQYTPEQYADVLVSQYTQQLRILYNNGARKVALMGVGQVGCSPNELAQQSSDGVTCVARINGAIEIFNQKLVELVDQFNTLPGAHFTYINAYGIFQDIIRSPGANGLTVLDKGCCGVGRNNGQVTCLPFQTPCANRNEYLFWDAFHPTEAANILVGRRAYSAAQPSDVHPVDLQTLARL

SEQ ID NO: 64172 - protein, 187 aa, Triticum aestivum
  peptide (1)..(187): Ceres Seq. ID no. 12625477
  misc_feature (1)..(167): Pfam Name: GDSL-like Lipase/Acylhydrolase Pfam Description: GDSL-like Lipase/Acylhydrolase
  misc_feature (1)..(187): Homolog of NCBI NO: 21592417 NR Description: lipase/hydrolase, putative [Arabidopsis thaliana]
  misc_feature (1)..(187): Homolog of NCBI NO: 21594055 NR Description: lipase/hydrolase, putative [Arabidopsis thaliana]
  misc_feature (1)..(187): Homolog of NCBI NO: 15220512 NR Description: lipase/hydrolase, putative
  misc_feature (1)..(187): Homolog of NCBI NO: 21618199 NR Description: GDSL-motif lipase/hydrolase-like protein
  misc_feature (1)..(187): Homolog of NCBI NO: 18415211 NR Description: Expressed protein
  misc_feature (1)..(187): Homolog of NCBI NO: 7485419 NR Description: hypothetical protein F13C5.140 - Arabidopsis
  misc_feature (1)..(187): Homolog of NCBI NO: 21553940 NR Description: GDSL-motif lipase/hydrolase-like protein
  misc_feature (1)..(187): Homolog of NCBI NO: 15242458 NR Description: GDSL-motif lipase/hydrolase-like protein
  misc_feature (1)..(185): Homolog of NCBI NO: 34910808 NR Description: GDSL-motif lipase/hydrolase-like protein
  misc_feature (1)..(187): Homolog of NCBI NO: 34909504 NR Description: putative GDSL-motif lipase/hydrolase-like protein
MPAVYATSRQYTPEQYADVLVSQYTQQLRILYNNGARKVALMGVGQVGCSPNELAQQSSDGVTCVARINGAIEIFNQKLVELVDQFNTLPGAHFTYINAYGIFQDIIRSPGANGLTVLDKGCCGVGRNNGQVTCLPFQTPCANRNEYLFWDAFHPTEAANILVGRRAYSAAQPSDVHPVDLQTLARL

SEQ ID NO: 64173 - DNA, 1344 bp, Triticum aestivum
  misc_feature (1)..(1344): Ceres Seq. ID no. 13597124
aacccaacccaacccgacccggcgcggatctaaaatctctctctgccagccaccacgcgcctgccctacagccgccaccgacgccccgtccccgccccctcccacggtcgccgccgccgtcgccgtcgccgttcatctccgccccgtccgcggtctttccccccattggggttcgaggacctgaggtgcttctagctgggaaggatgagcaaaggcccggttccgttccctagctttgggaagaaagcaaaagatctcttgtacaaggactacaattttgaccaaaagttttcatggtcaacaactagcgaatctggtttgggtatcacagcctctggtgtgaagttcgatgaactcttcattggtgacatacgggtacaacataaaagtggtagaaatactgttgatgtcacaatcgattgcgattccaaagtgtcaaccgcggtcacttttgatgaagtagtccctggtttgaagacttctttcggcttcaaggttcctgatcaaaagtcagggaagctcgatttgcaataccttcatgatcgcttcacactgaattcaaccattggcttgacttcggcacctgtgatcgagctggcaacaactattggcacaaacgaacttgctgtcggtgccgaggttggatttgacagcacttcagcttctgttaccaagtacaactcaggggtcagctataccaaggatgatttttctgccgccttacaaatggctgacaaaggcgagacactgaaagcttcctacatccacctgttcagcccgaccagcgcagtggcggccgaggtaacgcacaggttgaaaacaaaggagaactacttcaccatcgggagctcccacgcgctcgacccgtccacgacgctcaagacgaggttcagcaacagcgggaaggccgggctcctctgccggcacgagtggaggcccaagtcgtacgtgacgctctcggccgagtacgaccccaaggtggtgagctcgccgtcaaggttcggcgtggccgtggccctcagcccctgatcacccgcctgcccgcccgcatctcctccctgtacaacagcgccagcgttaagcacgccgctccgctcgtatatgtccgagccatactcgccgatgattctttttggtctctctctctttttgggttacaacagtattggtattggcccacggaaaccttgtctaggagttgggctcatttttgcgggattcctccgattagcctgcctgccggccggcgaagtaaggggccgggaactggaaatatacagaggttttgtactattaggcatacgctttggccactccaggcgatgaaattgctgacttgctgtc

SEQ ID NO: 64174 - protein, 274 aa, Triticum aestivum
  peptide (1)..(274): Ceres Seq. ID no. 13597125
  misc_feature (5)..(267): Pfam Name: Eukaryotic porin Pfam Description: Eukaryotic porin
  misc_feature (1)..(274): Homolog of NCBI NO: 1172556 NR Description: 36 kDa outer mitochondrial membrane protein porin
  misc_feature (1)..(274): Homolog of NCBI NO: 629728 NR Description: porin I, 36K - potato
  misc_feature (1)..(274): Homolog of NCBI NO: 1172555 NR Description: 34 kDa outer mitochondrial membrane protein porin
  misc_feature (4)..(274): Homolog of NCBI NO: 7339529 NR Description: voltage-dependent anion channel [Oryza sativa]
  misc_feature (1)..(274): Homolog of NCBI NO: 1172558 NR Description: Outer plastidial membrane protein porin
  misc_feature (1)..(274): Homolog of NCBI NO: 7442953 NR Description: porin - common ice plant
  misc_feature (1)..(274): Homolog of NCBI NO: 36957183 NR Description: VDAC1.2 [Lotus corniculatus var. japonicus]
  misc_feature (1)..(274): Homolog of NCBI NO: 15242146 NR Description: porin-related protein [Arabidopsis thaliana]
  misc_feature (1)..(274): Homolog of NCBI NO: 36957170 NR Description: VDAC1.1 [Lotus corniculatus var. japonicus]
  misc_feature (1)..(274): Homolog of NCBI NO: 36957233 NR Description: VDAC3.1 [Lotus corniculatus var. japonicus]
MSKGPVPFPSFGKKAKDLLYKDYNFDQKFSWSTTSESGLGITASGVKFDELFIGDIRVQHKSGRNTVDVTIDCDSKVSTAVTFDEVVPGLKTSFGFKVPDQKSGKLDLQYLHDRFTLNSTIGLTSAPVIELATTIGTNELAVGAEVGFDSTSASVTKYNSGVSYTKDDFSAALQMADKGETLKASYIHLFSPTSAVAAEVTHRLKTKENYFTIGSSHALDPSTTLKTRFSNSGKAGLLCRHEWRPKSYVTLSAEYDPKVVSSPSRFGVAVALSP

SEQ ID NO: 64175 - DNA, 1369 bp, Triticum aestivum
  misc_feature (1)..(1369): Ceres Seq. ID no. 13597129
ctagaacatcctaatcgagaagtctctgactctctctctctcactacccccaaagcagcagaagcagcagcaagcaccaagcgagcagcgaagccgattccccaaaccgcctcccacatgcaattcctcgcctgaagaaaccctaccgtactccgccgccgctgtcgccgccatgtcgttgccaccggtggacccgccggagtggctgcgcacactacccgtggcgccggagtaccgccccaccctcgccgagttcgctgaccccatcgcctatatcctcaagatcgagccagaggcctctcgctacggcatctgcaagatcgtccccccgctcccctcgccgccccgcgaggccaccgttcagctcctcaaggcctcgttcgcctccaatgcgtccgcttccggcgacgctggccccaccttcccgacgcggctccagcaggtgggcctctccacaaagaaccgtcgcggcgcgaaccgtcgcgtctgggagagcggcgagcgctacaccctggaggccttccgcaccaaggcccgcgacttcgaactcccgaggcacgcgatacccccgaagcacgcgacgcccctccagctcgaggcgctcttctggggtgcttgcgctgcgaggccattcaatgtcgagtacggcaacgacatgccggggtctggcttcgtcaaacgggaggtgctagacctggacactgacagtccggtaggggcgcccagggacgtcggcgagacggagtggaacatgagggtggctccgcgcgctcggggctcgctactgcgggcgatgagccgggacgtggctggcgtcacaacgccgatgctatatgtggcgatgctctacagttggttcgcgtggcacgtggaggaccatgagctgcatagcctcaactacctccacttcggcaagcccaagacttggtacggcgtgccccgagatgccatgcttgccttcgaggatgctgtccgtgtccatgggtacgcggacgacctcaatgccatcagtgcgacagacgagccagacggttgggactggcaccaggcgtagggggctctggtacatggaccaggaggtgcagccggacttggtgtgtgctgcgaccatggaggataaggagaagcaggcgatgatccatcattgtaggatggggcatgtatcttttgataagatgagtagaatatttccggatgttatgtgtggaataggcaaaggcaagctgacatgtgatgcttgtgaatatgcaaaacacacacgggccttatatgtgagtaaggggctcaggagcatatctccttttatgcttattcattcggatgtatggactagcccagtggtgtcaatgaatgggaagaagtattttgc

SEQ ID NO: 64176 - protein, 293 aa, Triticum aestivum
  peptide (1)..(293): Ceres Seq. ID no. 15222034
  misc_feature (219)..(279): Pfam Name: jmjC domain Pfam Description: jmjC domain
  misc_feature (18)..(104): Homolog of NCBI NO: 17064818 NR Description: similar to Human XE169 protein [Arabidopsis
  misc_feature (94)..(270): Homolog of NCBI NO: 17064818 NR Description: similar to Human XE169 protein [Arabidopsis
  misc_feature (18)..(104): Homolog of NCBI NO: 22329874 NR Description: expressed protein [Arabidopsis thaliana]
  misc_feature (94)..(270): Homolog of NCBI NO: 22329874 NR Description: expressed protein [Arabidopsis thaliana]
  misc_feature (79)..(171): Homolog of NCBI NO: 15237652 NR Description: zinc finger protein - like [Arabidopsis thaliana]
  misc_feature (6)..(100): Homolog of NCBI NO: 15237652 NR Description: zinc finger protein - like [Arabidopsis thaliana]
  misc_feature (169)..(281): Homolog of NCBI NO: 15237652 NR Description: zinc finger protein - like [Arabidopsis thaliana]
  misc_feature (4)..(279): Homolog of NCBI NO: 20804883 NR Description: putative zinc finger protein
  misc_feature (1)..(279): Homolog of NCBI NO: 22331694 NR Description: zinc finger protein -related [Arabidopsis
  misc_feature (1)..(279): Homolog of NCBI NO: 7488434 NR Description: zinc finger protein T29H11.50 - Arabidopsis
MSLPPVDPPEWLRTLPVAPEYRPTLAEFADPIAYILKIEPEASRYGICKIVPPLPSPPREATVQLLKASFASNASASGDAGPTFPTRLQQVGLSTKNRRGANRRVWESGERYTLEAFRTKARDFELPRHAIPPKHATPLQLEALFWGACAARPFNVEYGNDMPGSGFVKREVLDLDTDSPVGAPRDVGETEWNMRVAPRARGSLLRAMSRDVAGVTTPMLYVAMLYSWFAWHVEDHELHSLNYLHFGKPKTWYGVPRDAMLAFEDAVRVHGYADDLNAISATDEPDGWDWHQA

SEQ ID NO: 64177 - protein, 178 aa, Triticum aestivum
  peptide (1)..(178): Ceres Seq. ID no. 15222035
  misc_feature (115)..(177): Homolog of NCBI NO: 37535486 NR Description: putative copia-like polyprotein
  misc_feature (11)..(177): Homolog of NCBI NO: 34914532 NR Description: polyprotein [Oryza sativa (japonica
  misc_feature (59)..(177): Homolog of NCBI NO: 38567889 NR Description: OSJNBa0060N03.9 [Oryza sativa (japonica
  misc_feature (61)..(177): Homolog of NCBI NO: 18378607 NR Description: polyprotein [Oryza sativa (japonica
MWRCSTVGSRGTWRTMSCIASTTSTSASPRLGTACPEMPCLPSRMLSVSMGTRTTSMPSVRQTSQTVGTGTRRRGLWYMDQEVQPDLVCAATMEDKEKQAMIHHCRMGHVSFDKMSRIFPDVMCGIGKGKLTCDACEYAKHTRALYVSKGLRSISPFMLIHSDVWTSPVVSMNGKKYF

SEQ ID NO: 64178 - protein, 163 aa, Triticum aestivum
  peptide (1)..(163): Ceres Seq. ID no. 15222036
  misc_feature (100)..(162): Homolog of NCBI NO: 37535486 NR Description: putative copia-like polyprotein
  misc_feature (1)..(162): Homolog of NCBI NO: 34914532 NR Description: polyprotein [Oryza sativa (japonica
  misc_feature (44)..(162): Homolog of NCBI NO: 38567889 NR Description: OSJNBa0060N03.9 [Oryza sativa (japonica
  misc_feature (46)..(162): Homolog of NCBI NO: 18378607 NR Description: polyprotein [Oryza sativa (japonica
MSCIASTTSTSASPRLGTACPEMPCLPSRMLSVSMGTRTTSMPSVRQTSQTVGTGTRRRGLWYMDQEVQPDLVCAATMEDKEKQAMIHHCRMGHVSFDKMSRIFPDVMCGIGKGKLTCDACEYAKHTRALYVSKGLRSISPFMLIHSDVWTSPVVSMNGKKYF

SEQ ID NO: 64179 - DNA, 680 bp, Triticum aestivum
  misc_feature (1)..(680): Ceres Seq. ID no. 12585856
aaaatcaggaaacaaagtggcagacatagacaagcagagcagctcgcggatcgatccatggagttcgacaagcgcacggggacgccttctccccttctcccccggagcgcctccaccgtcacctactgctgcgggcggtgcgggtacgacctgaagctgagctcgtcggcgcgggacacggcgggcatcgtgggggccggcgcgggcggggcgaggcggcggggctggcggagcgcggcggtggtggtgttcgacgccatcgacgacgcgcgcttcggccacctcgacgagttccgctgcctcgacctgcgcgcgcgccgcctcttcgcgcgccgcacgcgcctgctctgccgcaagtgcggcgcccacgtcggcttcggctacgacgacaacaccaccgccaccaggccgccgcggtaccacatcaagatccgcgccctccaccccgcctcctccgacgacgccttctccggcgccgccacgccgccgccgccgtcccacgcgccggcggatccgcgatcttgatctccattgcctgacatgcccgtgcgcacattccgtccctttttttgtgtttccattttctttcttcctttctctgtcgacgcaaacgggaattgccgttcgcgctcgctagtgtacaaactgatttgattgattggaaattggaatcaaatcgc

SEQ ID NO: 64180 - protein, 174 aa, Triticum aestivum
  peptide (1)..(174): Ceres Seq. ID no. 12585857
  misc_feature (40)..(152): Homolog of NCBI NO: 15236464 NR Description: putative protein; protein id: At4g08330.1
  misc_feature (43)..(134): Homolog of NCBI NO: 34908010 NR Description: P0460C04.15 [Oryza sativa (japonica
KIRKQSGRHRQAEQLADRSMEFDKRTGTPSPLLPRSASTVTYCCGRCGYDLKLSSSARDTAGIVGAGAGGARRRGWRSAAVVVFDAIDDARFGHLDEFRCLDLRARRLFARRTRLLCRKCGAHVGFGYDDNTTATRPPRYHIKIRALHPASSDDAFSGAATPPPPSHAPADPRS

SEQ ID NO: 64181 - protein, 155 aa, Triticum aestivum
  peptide (1)..(155): Ceres Seq. ID no. 12585858
  misc_feature (21)..(133): Homolog of NCBI NO: 15236464 NR Description: putative protein; protein id: At4g08330.1
  misc_feature (24)..(115): Homolog of NCBI NO: 34908010 NR Description: P0460C04.15 [Oryza sativa (japonica
MEFDKRTGTPSPLLPRSASTVTYCCGRCGYDLKLSSSARDTAGIVGAGAGGARRRGWRSAAVVVFDAIDDARFGHLDEFRCLDLRARRLFARRTRLLCRKCGAHVGFGYDDNTTATRPPRYHIKIRALHPASSDDAFSGAATPPPPSHAPADPRS

SEQ ID NO: 64182 - DNA, 1306 bp, Triticum aestivum
  misc_feature (1)..(1306): Ceres Seq. ID no. 13597804
atcgaaaaaagataagccagacatcgagtagtccctctcgggtcgcagtacagagtacggacagaggagcgatatggacccggccggcgcggggaaggcgacggcggcggcggcggctgtgtgcgtgacgggcgcgggaggcttcatcgcctcgtggctcgtggagcgccttctcgccggaggagactacgcggtgcatggcaccgtccgtgatcccagcgaccccaagaataaacacctgagggcgctggacggcgccggcgagcggctgcgcctgttcaaggccgacgtgctggactacgcgagcgtggcgtccaccgtggccggctgtgccggcgtcttccacgtcgccagcccctgccccgccgcccaacccacgaaccccgaggtggagctgcttgccccggcggtggccggcacgctgaacgtgctccgggcctgccgggaggccggcgtccgccgcgtcgtggtggtgtcgtcggtcggcgcggtcttcatgaaccccaacccccccgagggccccaccatggacgaacactgctggtcgaacgaggagtactgcagagccaccgagaactggtactgcctctccaagacgctggtcgagcgcgaggcctgggcttacgcagagaaggccgggctggacgtggtgaccgtgtgcccgccgctggtgttcgggcctctgctgcagcccacggtgaacaccagcagcctgttcctcatcagatacctgaaatgcgacggcgtgaacgccatggacgacagggtgaggaacatggtggacgtcagggacgtcgccgacgcccttgtgctggcgtacgagagcccggaggcggccggccggtacatctgcagtgcgcacgccaggaaggtgtccgaaatggtttccgtcgtcaggagcctgcatccgagcctgaactgcgcaaacaagttcgttcagctggtgggagatgagaaagtgttcagcaccgagaagctgcagaggctggggtggaagttcaggacgctggaggagacgctcaaggacagcgtcgagtcctacatgtctgcaggcatactcagctgagcagggcccaaggttgcgcgcggatcggagccaggtgggcattttgtatcctaacgagcactgcggatgtgccgctagtttcagttcaaggatagcacggtagctaatgcgatgatcaaacggtggtgtgaaattgtattgatcaaactagtgtcacaaatactgcaattgctatatgtaaattgactgaatttgtaatttgggtaagtcggttttatgggagaaggagctattgaaggg

SEQ ID NO: 64183 - protein, 330 aa, Triticum aestivum
  peptide (1)..(330): Ceres Seq. ID no. 15222197
  misc_feature (16)..(274): Pfam Name: 3-beta hydroxysteroid dehydrogenase/isomerase family Pfam Description: 3-beta hydroxysteroid dehydrogenase/isomerase
  misc_feature (3)..(329): Homolog of NCBI NO: 2960364 NR Description: cinnamoyl CoA reductase [Populus balsamifera
  misc_feature (16)..(329): Homolog of NCBI NO: 9964087 NR Description: cinnamoyl CoA reductase [Lolium perenne]
  misc_feature (3)..(329): Homolog of NCBI NO: 40233135 NR Description: cinnamoyl CoA reductase [Populus tomentosa]
  misc_feature (3)..(329): Homolog of NCBI NO: 9998901 NR Description: cinnamoyl-CoA reductase [Populus balsamifera
  misc_feature (2)..(330): Homolog of NCBI NO: 3341511 NR Description: cinnamoyl-CoA reductase [Saccharum officinarum]
  misc_feature (6)..(330): Homolog of NCBI NO: 17978649 NR Description: cinnamoyl-CoA reductase [Pinus taeda]
  misc_feature (11)..(329): Homolog of NCBI NO: 6554472 NR Description: putative cinnamoyl-CoA reductase; 14056-15506
  misc_feature (11)..(329): Homolog of NCBI NO: 15223068 NR Description: cinnamoyl-CoA reductase family [Arabidopsis
  misc_feature (9)..(329): Homolog of NCBI NO: 15226135 NR Description: cinnamoyl-CoA reductase family [Arabidopsis
  misc_feature (16)..(329): Homolog of NCBI NO: 15226134 NR Description: cinnamoyl-CoA reductase family [Arabidopsis
MDPAGAGKATAAAAAVCVTGAGGFIASWLVERLLAGGDYAVHGTVRDPSDPKNKHLRALDGAGERLRLFKADVLDYASVASTVAGCAGVFHVASPCPAAQPTNPEVELLAPAVAGTLNVLRACREAGVRRVVVVSSVGAVFMNPNPPEGPTMDEHCWSNEEYCRATENWYCLSKTLVEREAWAYAEKAGLDVVTVCPPLVFGPLLQPTVNTSSLFLIRYLKCDGVNAMDDRVRNMVDVRDVADALVLAYESPEAAGRYICSAHARKVSEMVSVVRSLHPSLNCANKFVQLVGDEKVFSTEKLQRLGWKFRTLEETLKDSVESYMSAGILS

SEQ ID NO: 64184 - protein, 189 aa, Triticum aestivum
  peptide (1)..(189): Ceres Seq. ID no. 15222198
  misc_feature (1)..(133): Pfam Name: 3-beta hydroxysteroid dehydrogenase/isomerase family Pfam Description: 3-beta hydroxysteroid dehydrogenase/isomerase
  misc_feature (1)..(188): Homolog of NCBI NO: 2960364 NR Description: cinnamoyl CoA reductase [Populus balsamifera
  misc_feature (1)..(188): Homolog of NCBI NO: 9964087 NR Description: cinnamoyl CoA reductase [Lolium perenne]
  misc_feature (1)..(188): Homolog of NCBI NO: 40233135 NR Description: cinnamoyl CoA reductase [Populus tomentosa]
  misc_feature (1)..(188): Homolog of NCBI NO: 9998901 NR Description: cinnamoyl-CoA reductase [Populus balsamifera
  misc_feature (1)..(189): Homolog of NCBI NO: 3341511 NR Description: cinnamoyl-CoA reductase [Saccharum officinarum]
  misc_feature (1)..(189): Homolog of NCBI NO: 17978649 NR Description: cinnamoyl-CoA reductase [Pinus taeda]
  misc_feature (1)..(188): Homolog of NCBI NO: 6554472 NR Description: putative cinnamoyl-CoA reductase; 14056-15506
  misc_feature (1)..(188): Homolog of NCBI NO: 15223068 NR Description: cinnamoyl-CoA reductase family [Arabidopsis
  misc_feature (1)..(188): Homolog of NCBI NO: 15226135 NR Description: cinnamoyl-CoA reductase family [Arabidopsis
  misc_feature (1)..(188): Homolog of NCBI NO: 15226134 NR Description: cinnamoyl-CoA reductase family [Arabidopsis
MNPNPPEGPTMDEHCWSNEEYCRATENWYCLSKTLVEREAWAYAEKAGLDVVTVCPPLVFGPLLQPTVNTSSLFLIRYLKCDGVNAMDDRVRNMVDVRDVADALVLAYESPEAAGRYICSAHARKVSEMVSVVRSLHPSLNCANKFVQLVGDEKVFSTEKLQRLGWKFRTLEETLKDSVESYMSAGILS

SEQ ID NO: 64185 - protein, 179 aa, Triticum aestivum
  peptide (1)..(179): Ceres Seq. ID no. 15222199
  misc_feature (1)..(123): Pfam Name: 3-beta hydroxysteroid dehydrogenase/isomerase family Pfam Description: 3-beta hydroxysteroid dehydrogenase/isomerase
  misc_feature (1)..(178): Homolog of NCBI NO: 2960364 NR Description: cinnamoyl CoA reductase [Populus balsamifera
  misc_feature (1)..(178): Homolog of NCBI NO: 9964087 NR Description: cinnamoyl CoA reductase [Lolium perenne]
  misc_feature (1)..(178): Homolog of NCBI NO: 40233135 NR Description: cinnamoyl CoA reductase [Populus tomentosa]
  misc_feature (1)..(178): Homolog of NCBI NO: 9998901 NR Description: cinnamoyl-CoA reductase [Populus balsamifera
  misc_feature (1)..(179): Homolog of NCBI NO: 3341511 NR Description: cinnamoyl-CoA reductase [Saccharum officinarum]
  misc_feature (1)..(179): Homolog of NCBI NO: 17978649 NR Description: cinnamoyl-CoA reductase [Pinus taeda]
  misc_feature (1)..(178): Homolog of NCBI NO: 6554472 NR Description: putative cinnamoyl-CoA reductase; 14056-15506
  misc_feature (1)..(178): Homolog of NCBI NO: 15223068 NR Description: cinnamoyl-CoA reductase family [Arabidopsis
  misc_feature (1)..(178): Homolog of NCBI NO: 15226135 NR Description: cinnamoyl-CoA reductase family [Arabidopsis
  misc_feature (1)..(178): Homolog of NCBI NO: 15226134 NR Description: cinnamoyl-CoA reductase family [Arabidopsis
MDEHCWSNEEYCRATENWYCLSKTLVEREAWAYAEKAGLDVVTVCPPLVFGPLLQPTVNTSSLFLIRYLKCDGVNAMDDRVRNMVDVRDVADALVLAYESPEAAGRYICSAHARKVSEMVSVVRSLHPSLNCANKFVQLVGDEKVFSTEKLQRLGWKFRTLEETLKDSVESYMSAGILS

SEQ ID NO: 64186 - DNA, 1529 bp, Triticum aestivum
  misc_feature (1)..(1529): Ceres Seq. ID no. 13597805
ctctcccccgatctctcgcccgcgacctgctccgataccctgcgaagtacggactccggcgagcttacggggctcgcgcggcgagctcgcggccgcgatggacgaggcgggcacctcgtcgtccgcaggctccgccccgcgcggagggcgcccggcgagatcgggagtattctataagttcacccagcaggatcttccagcttggaaaccggcaatgacaccaggatacgtgatagccattttcttgataattgggattatttttgtaccgcttggactaatttgtcttcaagcttcaaacagagttgcagaaatcgttcaccgttatgatattgattgtgtacctaatgcttacagaagcaataagcaggcctatatcaaagacagctcgatttcgaaggaatgcattcagaaagtgaaggtacaataccacatgaaagctccaatttatgtgtattatgaactcgacaacttctaccagaatcatcgtaggtatatcaaaagtagaagcgacaagcaactacgctatgggctgaaatacactgatagctcatgcagtccaatagaaaagagcgacggccttccaattgttccctgtggattgattgcctggagcttgttcaatgatacttatgattttacccgtggatccatgggaatagtggttgatcggaaaaatatttcatggagaagtgatcgggagcataagtatggcaaggatgtctatcctttcaactttcagaatggatctttgattggaggaggaaaacttgaccctgatataccactaagcaatcaggaagatcttatcgtgtggatgcgcgcagctgctcttccccagtttcgaaagctgtatggtgtcatcgaagaggatatacaagctgatgaaatcattaccatgcacataacaaacaattacaatacctacagctttggtggaaagaaaagcctggttcttacaacatcaacctggctaggtggcaagaatgactttcttggatatgtatatcttatcactggttccttgagcattttcttgtcgattctctttgctctgatccatgtgaaaatcccaaggccacatggtgatgctgcttacctatcttggagcaggaaaaacggcaataactaagcttctgtgcatagttttttctttgtgtaagctagcagtacagcaccctggccagaggtttccccgcggcgttccgtctgcgcaccctgtctcgagggaaatggcatagtagcagcttcaggtttcatacactcgacacttggacggagcatgaaatgcgtagcagcttcagatttcatacacatacttggagcatgaaacgcttgatgactgctgaggatatacggtaaggccatggttcaccgacatgttcgtgcaattcaggccagcgctctgacggcgccctcgaggaaaactagagccgtgtaaaaactgatatatgtgtatgtaaagcgccataccatggattccatgatgttgtatgaatgaatacatataatgtttcagtttcgtgccg

SEQ ID NO: 64187 - protein, 376 aa, Triticum aestivum
  peptide (1)..(376): Ceres Seq. ID no. 13597806
  misc_feature (96)..(363): Pfam Name: LEM3 (ligand-effect modulator 3) family / CDC50 family Pfam Description: LEM3 (ligand-effect modulator 3) family / CDC50
  misc_feature (50)..(360): Homolog of NCBI NO: 19570056 NR Description: similar to membrane protein common family
  misc_feature (77)..(374): Homolog of NCBI NO: 25347303 NR Description: protein F3O9.16 [imported] - Arabidopsis thaliana
  misc_feature (72)..(374): Homolog of NCBI NO: 15219220 NR Description: membrane protein common family [Arabidopsis
  misc_feature (60)..(374): Homolog of NCBI NO: 25347301 NR Description: T8K14.13 [imported] - Arabidopsis thaliana
  misc_feature (36)..(374): Homolog of NCBI NO: 18399730 NR Description: membrane protein common family [Arabidopsis
  misc_feature (37)..(374): Homolog of NCBI NO: 18412377 NR Description: membrane protein common family [Arabidopsis
  misc_feature (33)..(374): Homolog of NCBI NO: 18404877 NR Description: membrane protein common family [Arabidopsis
  misc_feature (33)..(359): Homolog of NCBI NO: 9757735 NR Description: gb|AAD25612.1~gene_id:MCL19.21~similar to unknown
  misc_feature (50)..(373): Homolog of NCBI NO: 21554054 NR Description: unknown [Arabidopsis thaliana]
  misc_feature (33)..(373): Homolog of NCBI NO: 18422638 NR Description: membrane protein common family [Arabidopsis
SPPISRPRPAPIPCEVRTPASLRGSRGELAAAMDEAGTSSSAGSAPRGGRPARSGVFYKFTQQDLPAWKPAMTPGYVIAIFLIIGIIFVPLGLICLQASNRVAEIVHRYDIDCVPNAYRSNKQAYIKDSSISKECIQKVKVQYHMKAPIYVYYELDNFYQNHRRYIKSRSDKQLRYGLKYTDSSCSPIEKSDGLPIVPCGLIAWSLFNDTYDFTRGSMGIVVDRKNISWRSDREHKYGKDVYPFNFQNGSLIGGGKLDPDIPLSNQEDLIVWMRAAALPQFRKLYGVIEEDIQADEIITMHITNNYNTYSFGGKKSLVLTTSTWLGGKNDFLGYVYLITGSLSIFLSILFALIHVKIPRPHGDAAYLSWSRKNGNN

SEQ ID NO: 64188 - protein, 344 aa, Triticum aestivum
  peptide (1)..(344): Ceres Seq. ID no. 13597807
  misc_feature (64)..(331): Pfam Name: LEM3 (ligand-effect modulator 3) family / CDC50 family Pfam Description: LEM3 (ligand-effect modulator 3) family / CDC50
  misc_feature (18)..(328): Homolog of NCBI NO: 19570056 NR Description: similar to membrane protein common family
  misc_feature (45)..(342): Homolog of NCBI NO: 25347303 NR Description: protein F3O9.16 [imported] - Arabidopsis thaliana
  misc_feature (40)..(342): Homolog of NCBI NO: 15219220 NR Description: membrane protein common family [Arabidopsis
  misc_feature (28)..(342): Homolog of NCBI NO: 25347301 NR Description: T8K14.13 [imported] - Arabidopsis thaliana
  misc_feature (4)..(342): Homolog of NCBI NO: 18399730 NR Description: membrane protein common family [Arabidopsis
  misc_feature (5)..(342): Homolog of NCBI NO: 18412377 NR Description: membrane protein common family [Arabidopsis
  misc_feature (1)..(342): Homolog of NCBI NO: 18404877 NR Description: membrane protein common family [Arabidopsis
  misc_feature (1)..(327): Homolog of NCBI NO: 9757735 NR Description: gb|AAD25612.1~gene_id:MCL19.21~similar to unknown
  misc_feature (18)..(341): Homolog of NCBI NO: 21554054 NR Description: unknown [Arabidopsis thaliana]
  misc_feature (1)..(341): Homolog of NCBI NO: 18422638 NR Description: membrane protein common family [Arabidopsis
MDEAGTSSSAGSAPRGGRPARSGVFYKFTQQDLPAWKPAMTPGYVIAIFLIIGIIFVPLGLICLQASNRVAEIVHRYDIDCVPNAYRSNKQAYIKDSSISKECIQKVKVQYHMKAPIYVYYELDNFYQNHRRYIKSRSDKQLRYGLKYTDSSCSPIEKSDGLPIVPCGLIAWSLFNDTYDFTRGSMGIVVDRKNISWRSDREHKYGKDVYPFNFQNGSLIGGGKLDPDIPLSNQEDLIVWMRAAALPQFRKLYGVIEEDIQADEIITMHITNNYNTYSFGGKKSLVLTTSTWLGGKNDFLGYVYLITGSLSIFLSILFALIHVKIPRPHGDAAYLSWSRKNGNN

SEQ ID NO: 64189 - protein, 305 aa, Triticum aestivum
  peptide (1)..(305): Ceres Seq. ID no. 13597808
  misc_feature (25)..(292): Pfam Name: LEM3 (ligand-effect modulator 3) family / CDC50 family Pfam Description: LEM3 (ligand-effect modulator 3) family / CDC50
  misc_feature (1)..(289): Homolog of NCBI NO: 19570056 NR Description: similar to membrane protein common family
  misc_feature (6)..(303): Homolog of NCBI NO: 25347303 NR Description: protein F3O9.16 [imported] - Arabidopsis thaliana
  misc_feature (1)..(303): Homolog of NCBI NO: 15219220 NR Description: membrane protein common family [Arabidopsis
  misc_feature (1)..(303): Homolog of NCBI NO: 25347301 NR Description: T8K14.13 [imported] - Arabidopsis thaliana
  misc_feature (1)..(303): Homolog of NCBI NO: 18399730 NR Description: membrane protein common family [Arabidopsis
  misc_feature (1)..(303): Homolog of NCBI NO: 18412377 NR Description: membrane protein common family [Arabidopsis
  misc_feature (1)..(303): Homolog of NCBI NO: 18404877 NR Description: membrane protein common family [Arabidopsis
  misc_feature (1)..(288): Homolog of NCBI NO: 9757735 NR Description: gb|AAD25612.1~gene_id:MCL19.21~similar to unknown
  misc_feature (1)..(302): Homolog of NCBI NO: 21554054 NR Description: unknown [Arabidopsis thaliana]
  misc_feature (1)..(302): Homolog of NCBI NO: 18422638 NR Description: membrane protein common family [Arabidopsis
MTPGYVIAIFLIIGIIFVPLGLICLQASNRVAEIVHRYDIDCVPNAYRSNKQAYIKDSSISKECIQKVKVQYHMKAPIYVYYELDNFYQNHRRYIKSRSDKQLRYGLKYTDSSCSPIEKSDGLPIVPCGLIAWSLFNDTYDFTRGSMGIVVDRKNISWRSDREHKYGKDVYPFNFQNGSLIGGGKLDPDIPLSNQEDLIVWMRAAALPQFRKLYGVIEEDIQADEIITMHITNNYNTYSFGGKKSLVLTTSTWLGGKNDFLGYVYLITGSLSIFLSILFALIHVKIPRPHGDAAYLSWSRKNGNN

SEQ ID NO: 64190 - DNA, 1340 bp, Triticum aestivum
  misc_feature (1)..(1340): Ceres Seq. ID no. 15226608
aaacattccactgttgcacacacccttgcccccgtcctccccccgcccgatcccccgcccctccgttttcggcgcggccgcgaggagagttcgtcggcggccgcgatgaggtcggccctgagccgcctgatccgttcctcctgctccgtctcgtcctcccgtctcagctctccagttttgttgaagaacggcaaggccttctcgagcgatgccacgcccagggattccgggcgggtcgacgagcctttcaaagtcgaggaggcagaacccgtgaaggtgccgccgccaccgccttctcctgataagctgcttgtgctaggtggaagtggcttcgttggttcacatgtttgcaaggaggctttggagaggggatttgttgtctctagtctaaatagatctggaaagccatcgacaagtgaatcttgggctgacaaagttatatggaaccaaggcaatcttcttgaacctgcttcactggaggatagtatggatggtgtctctgctgttgtatcctgtgttggaggctttgggtcaaattctcaaatgttcaaactgaatgggactgcaaacatcaatgccatcagggttgcagctgagaaaggcataaaaagatttgtgtatgtgtcagctgcagactttggtttagtgaattacttattgcaaggttattatgagggcaagagagctgctgaagctgaactgctgtcgaagtttacctatggaggagtgatactgcggcctggttttattcatggaactcgtcgagtgggtagcgtgaacataccccttggacttgtgggttcacctatgcaaatggtgctccaaaatgcaaaaccattaaccagattgccacttgtcggcccgatgctaactcctccagtgagtgctacctcggtagcgaaggtcgctgtaagagcagcgacggatccggtgttccctcctggtatcgtcgatgtgtatggcatcatgcgttacagcgagcagaagtaagcgcatgcttgtacaggacgataaggcgtgtctccacccatcttttttacctggtttttcctatttgctctaaatgtgtaagcagacatcacaaggccatgaggcctcagctacggccgcagattctctgacagttctatcctggcgtggccctgtttgcctgatctacttactaggcaaggatgctcaataaagaagcagttaacctcgagtttcctgttggaaactgtttttacatgcttgttgcttgtaagtgttccttttagttactgtagagagcaggttaagatttgtaacttcgagtttatgataaggaaaactctattcctggtcgtgtaccgattgtgggc

SEQ ID NO: 64191 - protein, 329 aa, Triticum aestivum
  peptide (1)..(329): Ceres Seq. ID no. 15226609
  misc_feature (103)..(329): Pfam Name: Isoflavone reductase Pfam Description: Isoflavone reductase
  misc_feature (102)..(259): Homolog of NCBI NO: 29375050 NR Description: conserved hypothetical protein [Enterococcus
  misc_feature (102)..(163): Homolog of NCBI NO: 8744993 NR Description: hypothetical protein P1295.07 [Leishmania major]
  misc_feature (159)..(320): Homolog of NCBI NO: 8744993 NR Description: hypothetical protein P1295.07 [Leishmania major]
  misc_feature (101)..(312): Homolog of NCBI NO: 18398333 NR Description: expressed protein [Arabidopsis thaliana]
  misc_feature (182)..(325): Homolog of NCBI NO: 11346175 NR Description: hypothetical protein F1N13_50 - Arabidopsis
  misc_feature (45)..(312): Homolog of NCBI NO: 38346147 NR Description: OSJNBb0118P14.7 [Oryza sativa (japonica
  misc_feature (101)..(325): Homolog of NCBI NO: 21592373 NR Description: unknown [Arabidopsis thaliana]
  misc_feature (101)..(325): Homolog of NCBI NO: 18417824 NR Description: dehydrogenase-related [Arabidopsis thaliana]
  misc_feature (36)..(329): Homolog of NCBI NO: 10129651 NR Description: putative protein [Arabidopsis thaliana]
  misc_feature (36)..(329): Homolog of NCBI NO: 18416362 NR Description: expressed protein [Arabidopsis thaliana]
KHSTVAHTLAPVLPPPDPPPLRFRRGREESSSAAAMRSALSRLIRSSCSVSSSRLSSPVLLKNGKAFSSDATPRDSGRVDEPFKVEEAEPVKVPPPPPSPDKLLVLGGSGFVGSHVCKEALERGFVVSSLNRSGKPSTSESWADKVIWNQGNLLEPASLEDSMDGVSAVVSCVGGFGSNSQMFKLNGTANINAIRVAAEKGIKRFVYVSAADFGLVNYLLQGYYEGKRAAEAELLSKFTYGGVILRPGFIHGTRRVGSVNIPLGLVGSPMQMVLQNAKPLTRLPLVGPMLTPPVSATSVAKVAVRAATDPVFPPGIVDVYGIMRYSEQK

SEQ ID NO: 64192 - protein, 294 aa, Triticum aestivum
  peptide (1)..(294): Ceres Seq. ID no. 15226610
  misc_feature (68)..(294): Pfam Name: Isoflavone reductase Pfam Description: Isoflavone reductase
  misc_feature (67)..(224): Homolog of NCBI NO: 29375050 NR Description: conserved hypothetical protein [Enterococcus
  misc_feature (67)..(128): Homolog of NCBI NO: 8744993 NR Description: hypothetical protein P1295.07 [Leishmania major]
  misc_feature (124)..(285): Homolog of NCBI NO: 8744993 NR Description: hypothetical protein P1295.07 [Leishmania major]
  misc_feature (66)..(277): Homolog of NCBI NO: 18398333 NR Description: expressed protein [Arabidopsis thaliana]
  misc_feature (147)..(290): Homolog of NCBI NO: 11346175 NR Description: hypothetical protein F1N13_50 - Arabidopsis
  misc_feature (10)..(277): Homolog of NCBI NO: 38346147 NR Description: OSJNBb0118P14.7 [Oryza sativa (japonica
  misc_feature (66)..(290): Homolog of NCBI NO: 21592373 NR Description: unknown [Arabidopsis thaliana]
  misc_feature (66)..(290): Homolog of NCBI NO: 18417824 NR Description: dehydrogenase-related [Arabidopsis thaliana]
  misc_feature (1)..(294): Homolog of NCBI NO: 10129651 NR Description: putative protein [Arabidopsis thaliana]
  misc_feature (1)..(294): Homolog of NCBI NO: 18416362 NR Description: expressed protein [Arabidopsis thaliana]
MRSALSRLIRSSCSVSSSRLSSPVLLKNGKAFSSDATPRDSGRVDEPFKVEEAEPVKVPPPPPSPDKLLVLGGSGFVGSHVCKEALERGFVVSSLNRSGKPSTSESWADKVIWNQGNLLEPASLEDSMDGVSAVVSCVGGFGSNSQMFKLNGTANINAIRVAAEKGIKRFVYVSAADFGLVNYLLQGYYEGKRAAEAELLSKFTYGGVILRPGFIHGTRRVGSVNIPLGLVGSPMQMVLQNAKPLTRLPLVGPMLTPPVSATSVAKVAVRAATDPVFPPGIVDVYGIMRYSEQK

SEQ ID NO: 64193 - protein, 167 aa, Triticum aestivum
  peptide (1)..(167): Ceres Seq. ID no. 15226611
  misc_feature (1)..(167): Pfam Name: Isoflavone reductase Pfam Description: Isoflavone reductase
  misc_feature (1)..(159): Homolog of NCBI NO: 37523204 NR Description: probable oxidoreductase [Gloeobacter violaceus]
  misc_feature (1)..(97): Homolog of NCBI NO: 29375050 NR Description: conserved hypothetical protein [Enterococcus
  misc_feature (1)..(158): Homolog of NCBI NO: 8744993 NR Description: hypothetical protein P1295.07 [Leishmania major]
  misc_feature (1)..(150): Homolog of NCBI NO: 18398333 NR Description: expressed protein [Arabidopsis thaliana]
  misc_feature (20)..(163): Homolog of NCBI NO: 11346175 NR Description: hypothetical protein F1N13_50 - Arabidopsis
  misc_feature (1)..(150): Homolog of NCBI NO: 38346147 NR Description: OSJNBb0118P14.7 [Oryza sativa (japonica
  misc_feature (1)..(163): Homolog of NCBI NO: 21592373 NR Description: unknown [Arabidopsis thaliana]
  misc_feature (1)..(163): Homolog of NCBI NO: 18417824 NR Description: dehydrogenase-related [Arabidopsis thaliana]
  misc_feature (1)..(167): Homolog of NCBI NO: 10129651 NR Description: putative protein [Arabidopsis thaliana]
  misc_feature (1)..(167): Homolog of NCBI NO: 18416362 NR Description: expressed protein [Arabidopsis thaliana]
MDGVSAVVSCVGGFGSNSQMFKLNGTANINAIRVAAEKGIKRFVYVSAADFGLVNYLLQGYYEGKRAAEAELLSKFTYGGVILRPGFIHGTRRVGSVNIPLGLVGSPMQMVLQNAKPLTRLPLVGPMLTPPVSATSVAKVAVRAATDPVFPPGIVDVYGIMRYSEQK

SEQ ID NO: 64194 - DNA, 1170 bp, Triticum aestivum
  misc_feature (1)..(1170): Ceres Seq. ID no. 14303294
atttccgtacctgtctgctccgtccgcctcccaagctttgcggctccagggtttagctagggttctacccacgaccaccgccgccgcccgccccgccgccgccgcagccatggccggcgccggcgccggagaggaggacgcggcgtgggagcgcgccatcagcgcggccgtcaagagcgcgccgctctcccccttctccgcccccaaaaccctaaccctcgacggcgccatcaagtcctccaccggccgcctcccctcgccggcgctcttcgaccgcttcccctcgctcgaggagctctccgtcgcgggcgcccgcctctcctcgctcgccggcctgccccgcctcccggccctccgccgcctctccctccccgacaaccgcctcgcgggggccggctccctcgccgccgtcgccgagtcctgcggcgggaccatccgccacctcgacctcggcaacaaccgcttcgccgcggtcgaggagctcgccccgctcgcaccgctcggggtcgagtcgctggacctgtaccagtgccccgtcaccaagctcaaggggtacagggagaaggtgtttgcgctggtccccagcttgaagtacctggatggcgtcgatgccgagggcaatgaccgcctggagtccgatgaggacgaggaggaggatgaggatgaggatgaggaaggggatgaagagggggcggaggacggcgaaggggaaggggacgaagaggaagaggaaggagatgaagaagaagatggcgaggaagaggagggagatgaagaggaagaggaaggcgacgaggctgaagacgaagaggatgaggctgaggacgacgaaccggagtcaggcgcggccgagaaaagcgaggtggtcaacggaaacaagtccgcaggatctgccctgccaagcaagaggaaaagggacaatgaagatggggccaacggcgacaactgaatttgatctcgatttaaggtttgttggttcgtctttgcacgcttttcagagggttccgtgcgggaggtgtagtagaagcaagcaacctttgtactagttttgtgcaaggattttctgagaggttttcaaattttattcaagacgcgcggtggatcctcggacctgctccttcatgtgaaatttctggtactataaaccgaggcgctggctcggatcatgac

SEQ ID NO: 64195 - protein, 315 aa, Triticum aestivum
  peptide (1)..(315): Ceres Seq. ID no. 14303295
  misc_feature (205)..(287): Pfam Name: Chromadorea ALT protein Pfam Description: Chromadorea ALT protein
  misc_feature (89)..(315): Homolog of NCBI NO: 40254600 NR Description: acidic (leucine-rich) nuclear phosphoprotein 32
  misc_feature (69)..(287): Homolog of NCBI NO: 40254600 NR Description: acidic (leucine-rich) nuclear phosphoprotein 32
  misc_feature (66)..(285): Homolog of NCBI NO: 5454088 NR Description: acidic (leucine-rich) nuclear phosphoprotein 32
  misc_feature (66)..(285): Homolog of NCBI NO: 1552326 NR Description: APRIL [Homo sapiens]
  misc_feature (69)..(288): Homolog of NCBI NO: 28856130 NR Description: Unknown (protein for MGC:55516) [Danio rerio]
  misc_feature (69)..(287): Homolog of NCBI NO: 26984047 NR Description: inhibitor-1 of protein phosphatase type 2A [Canis
  misc_feature (69)..(287): Homolog of NCBI NO: 5453880 NR Description: acidic (leucine-rich) nuclear phosphoprotein 32
  misc_feature (46)..(291): Homolog of NCBI NO: 34395133 NR Description: acidic nuclear phosphoprotein-like protein
  misc_feature (46)..(314): Homolog of NCBI NO: 15229830 NR Description: leucine rich repeat protein-related [Arabidopsis
  misc_feature (37)..(315): Homolog of NCBI NO: 31126736 NR Description: putative acidic nuclear phosphoprotein
FPYLSAPSASQALRLQGLARVLPTTTAAARPAAAAAMAGAGAGEEDAAWERAISAAVKSAPLSPFSAPKTLTLDGAIKSSTGRLPSPALFDRFPSLEELSVAGARLSSLAGLPRLPALRRLSLPDNRLAGAGSLAAVAESCGGTIRHLDLGNNRFAAVEELAPLAPLGVESLDLYQCPVTKLKGYREKVFALVPSLKYLDGVDAEGNDRLESDEDEEEDEDEDEEGDEEGAEDGEGEGDEEEEEGDEEEDGEEEEGDEEEEEGDEAEDEEDEAEDDEPESGAAEKSEVVNGNKSAGSALPSKRKRDNEDGANGDN

SEQ ID NO: 64196 - protein, 279 aa, Triticum aestivum
  peptide (1)..(279): Ceres Seq. ID no. 14303296
  misc_feature (169)..(251): Pfam Name: Chromadorea ALT protein Pfam Description: Chromadorea ALT protein
  misc_feature (53)..(279): Homolog of NCBI NO: 40254600 NR Description: acidic (leucine-rich) nuclear phosphoprotein 32
  misc_feature (33)..(251): Homolog of NCBI NO: 40254600 NR Description: acidic (leucine-rich) nuclear phosphoprotein 32
  misc_feature (30)..(249): Homolog of NCBI NO: 5454088 NR Description: acidic (leucine-rich) nuclear phosphoprotein 32
  misc_feature (30)..(249): Homolog of NCBI NO: 1552326 NR Description: APRIL [Homo sapiens]
  misc_feature (33)..(252): Homolog of NCBI NO: 28856130 NR Description: Unknown (protein for MGC:55516) [Danio rerio]
  misc_feature (33)..(251): Homolog of NCBI NO: 26984047 NR Description: inhibitor-1 of protein phosphatase type 2A [Canis
  misc_feature (33)..(251): Homolog of NCBI NO: 5453880 NR Description: acidic (leucine-rich) nuclear phosphoprotein 32
  misc_feature (10)..(255): Homolog of NCBI NO: 34395133 NR Description: acidic nuclear phosphoprotein-like protein
  misc_feature (10)..(278): Homolog of NCBI NO: 15229830 NR Description: leucine rich repeat protein-related [Arabidopsis
  misc_feature (1)..(279): Homolog of NCBI NO: 31126736 NR Description: putative acidic nuclear phosphoprotein
MAGAGAGEEDAAWERAISAAVKSAPLSPFSAPKTLTLDGAIKSSTGRLPSPALFDRFPSLEELSVAGARLSSLAGLPRLPALRRLSLPDNRLAGAGSLAAVAESCGGTIRHLDLGNNRFAAVEELAPLAPLGVESLDLYQCPVTKLKGYREKVFALVPSLKYLDGVDAEGNDRLESDEDEEEDEDEDEEGDEEGAEDGEGEGDEEEEEGDEEEDGEEEEGDEEEEEGDEAEDEEDEAEDDEPESGAAEKSEVVNGNKSAGSALPSKRKRDNEDGANGDN

SEQ ID NO: 64197 - DNA, 1332 bp, Triticum aestivum
  misc_feature (1)..(1332): Ceres Seq. ID no. 15169537
gattcggaatacatgcagaagatcctgatattttctctctcctcgtgtcatctcatcactctccctctttctgaaaaccctagcgccgcagcccgagagagccatccttaggtttccgcgcaaggcgtcggggaattttcggctcgattggattggagatgacggagaaggaggtgggacggatcttcgtgggcggactgtcctgggacaccacggagcgcacgctggagcgagctttcggcgagttcggcaaggtcatcgagacgcaggttgtaacagaaagagacacaggccgctcccgtgggtttgggtttgttacattctcggaacctcgggctgtggatgttgcgatccgggaaatgcacaatggagaactagatggtcggaccatttctgtgaacaaagctcaacctaggatgaacagtgatgatggtggctatggatatgggggtagtagttactcatctggtgctagaggtggatatcgtggtgcagctgacatagtacccactgcaagtgatgattgctttaagtgtggacgccctggacactgggctcgtgaatgtctttattctgatggaggcaggcctggaaggtactctcccccttccaggtatggcaatggcgctggtgggcgtggtgaccgctttggaggatcagaccgttttggtaatcgctatgttgatgatcgttatgatggtggccgctatgctgatgatcgttatggtggtggacgcgatcgctatcctccagctgctgatcgtttttctggcgatagatatggtggtggtgatcgttatgcatcaggtggctttgccagggaaagaagctatgagagagatggagggcggccaggtggaagttattaccgtgatgaacctagaggcactggtgcttatggcaggggtggtccacgtgtggcgaatggtgacagatatgggagtggtggacctgctcgccttggcgcgagttaccgagataggcctgctccctatgatcgtcccactcagggtgctcgctcatatgatgaccgctactgatggaaggtcaccttggagcagacaggagatttgatacaagattcaattcccagttgctactacctcctttatttgtgtccactatgttgatgcttcaactctcaagtatcattctttcaagcagtttgtttggttacttcagtccatatggcagtacttaattattattattattattattattattattattattatggtcaaactgtacactctaggcaatgggcagacacttgttgcttattgttatggtattgtgtaactactctgcactctaagtttgagttgtact

SEQ ID NO: 64198 - protein, 293 aa, Triticum aestivum
  peptide (1)..(293): Ceres Seq. ID no. 15169538
  misc_feature (9)..(80): Pfam Name: RNA recognition motif. (a.k.a. RRM, RBD, or RNP domain) Pfam Description: RNA recognition motif. (a.k.a. RRM, RBD, or RNP
  misc_feature (8)..(167): Homolog of NCBI NO: 15226605 NR Description: glycine-rich RNA-binding protein (AtGRP7)
  misc_feature (8)..(172): Homolog of NCBI NO: 21388660 NR Description: glycine-rich RNA-binding protein [Physcomitrella
  misc_feature (1)..(189): Homolog of NCBI NO: 12659074 NR Description: RNA-binding protein [Triticum aestivum]
  misc_feature (1)..(218): Homolog of NCBI NO: 2129944 NR Description: RNA-binding protein RZ-1 - wood tobacco
  misc_feature (1)..(205): Homolog of NCBI NO: 40714682 NR Description: putative RNA binding protein
  misc_feature (1)..(245): Homolog of NCBI NO: 15231557 NR Description: glycine-rich RNA-binding protein [Arabidopsis
  misc_feature (8)..(290): Homolog of NCBI NO: 18406831 NR Description: glycine-rich RNA-binding protein, putative
  misc_feature (1)..(289): Homolog of NCBI NO: 15237666 NR Description: glycine-rich RNA-binding protein [Arabidopsis
  misc_feature (1)..(293): Homolog of NCBI NO: 31712074 NR Description: putative RNA-binding protein
  misc_feature (1)..(293): Homolog of NCBI NO: 33146923 NR Description: glycine-rich RNA-binding protein-like
MTEKEVGRIFVGGLSWDTTERTLERAFGEFGKVIETQVVTERDTGRSRGFGFVTFSEPRAVDVAIREMHNGELDGRTISVNKAQPRMNSDDGGYGYGGSSYSSGARGGYRGAADIVPTASDDCFKCGRPGHWARECLYSDGGRPGRYSPPSRYGNGAGGRGDRFGGSDRFGNRYVDDRYDGGRYADDRYGGGRDRYPPAADRFSGDRYGGGDRYASGGFARERSYERDGGRPGGSYYRDEPRGTGAYGRGGPRVANGDRYGSGGPARLGASYRDRPAPYDRPTQGARSYDDRY

SEQ ID NO: 64199 - protein, 226 aa, Triticum aestivum
  peptide (1)..(226): Ceres Seq. ID no. 15169539
  misc_feature (1)..(100): Homolog of NCBI NO: 15226605 NR Description: glycine-rich RNA-binding protein (AtGRP7)
  misc_feature (1)..(105): Homolog of NCBI NO: 21388660 NR Description: glycine-rich RNA-binding protein [Physcomitrella
  misc_feature (1)..(122): Homolog of NCBI NO: 12659074 NR Description: RNA-binding protein [Triticum aestivum]
  misc_feature (1)..(151): Homolog of NCBI NO: 2129944 NR Description: RNA-binding protein RZ-1 - wood tobacco
  misc_feature (1)..(138): Homolog of NCBI NO: 40714682 NR Description: putative RNA binding protein
  misc_feature (1)..(178): Homolog of NCBI NO: 15231557 NR Description: glycine-rich RNA-binding protein [Arabidopsis
  misc_feature (1)..(223): Homolog of NCBI NO: 18406831 NR Description: glycine-rich RNA-binding protein, putative
  misc_feature (1)..(222): Homolog of NCBI NO: 15237666 NR Description: glycine-rich RNA-binding protein [Arabidopsis
  misc_feature (1)..(226): Homolog of NCBI NO: 31712074 NR Description: putative RNA-binding protein
  misc_feature (1)..(226): Homolog of NCBI NO: 33146923 NR Description: glycine-rich RNA-binding protein-like
MHNGELDGRTISVNKAQPRMNSDDGGYGYGGSSYSSGARGGYRGAADIVPTASDDCFKCGRPGHWARECLYSDGGRPGRYSPPSRYGNGAGGRGDRFGGSDRFGNRYVDDRYDGGRYADDRYGGGRDRYPPAADRFSGDRYGGGDRYASGGFARERSYERDGGRPGGSYYRDEPRGTGAYGRGGPRVANGDRYGSGGPARLGASYRDRPAPYDRPTQGARSYDDRY

SEQ ID NO: 64200 - protein, 207 aa, Triticum aestivum
  peptide (1)..(207): Ceres Seq. ID no. 15169540
  misc_feature (1)..(81): Homolog of NCBI NO: 15226605 NR Description: glycine-rich RNA-binding protein (AtGRP7)
  misc_feature (1)..(86): Homolog of NCBI NO: 21388660 NR Description: glycine-rich RNA-binding protein [Physcomitrella
  misc_feature (1)..(103): Homolog of NCBI NO: 12659074 NR Description: RNA-binding protein [Triticum aestivum]
  misc_feature (1)..(132): Homolog of NCBI NO: 2129944 NR Description: RNA-binding protein RZ-1 - wood tobacco
  misc_feature (1)..(119): Homolog of NCBI NO: 40714682 NR Description: putative RNA binding protein
  misc_feature (1)..(159): Homolog of NCBI NO: 15231557 NR Description: glycine-rich RNA-binding protein [Arabidopsis
  misc_feature (1)..(204): Homolog of NCBI NO: 18406831 NR Description: glycine-rich RNA-binding protein, putative
  misc_feature (1)..(203): Homolog of NCBI NO: 15237666 NR Description: glycine-rich RNA-binding protein [Arabidopsis
  misc_feature (1)..(207): Homolog of NCBI NO: 31712074 NR Description: putative RNA-binding protein
  misc_feature (1)..(207): Homolog of NCBI NO: 33146923 NR Description: glycine-rich RNA-binding protein-like
MNSDDGGYGYGGSSYSSGARGGYRGAADIVPTASDDCFKCGRPGHWARECLYSDGGRPGRYSPPSRYGNGAGGRGDRFGGSDRFGNRYVDDRYDGGRYADDRYGGGRDRYPPAADRFSGDRYGGGDRYASGGFARERSYERDGGRPGGSYYRDEPRGTGAYGRGGPRVANGDRYGSGGPARLGASYRDRPAPYDRPTQGARSYDDRY

SEQ ID NO: 64201 - DNA, 1308 bp, Triticum aestivum
  misc_feature (1)..(1308): Ceres Seq. ID no. 14301886
cccaaatcccccgaatttgacccgtttctccgccgattcgcgtcaccccccctttctgctcgggtcggtgagtggtctcaacccccggagggatggggtacctgagcaccgtcatcggccaccccacggacggatcgccggtcagcggcggcggcctcagccagaatggtaagtttagctatggttatgcgagctccctgggtaaaagggcttccatggaagacttctatgagacaagaattgaaagtgtcgatgggcagcttattggtttattcggagtttttgatggtcatggtggtgctaaagtagctgagtatgtcaaacacaacctcttcagccatcttcttaggcatccaaagttcatgagcgacacaaaagtggctatagatgattcttataaaagtaccgacagtgagttcttggaatctgacagtactcaaaaccagtgtgggtcaacagcatcaactgctgtacttgttggtaatcgtctctttgtcgcaaatgttggagactccagggctatcatatgcagggcaggaaatgctgtacctgtttcgaaagatcacaagcctgatcagacagatgagcggcaacgtattgaagaagctggaggttttgttatgtgggcaggaacatggcgtgttggtggtgtacttgctgtttctcgcgcttttggtgacaagctcttaaagcagtatgtagttgtggatccagagatccgggaggaaatcgttgacgagtccctggagtttctcatccttgcaagcgatgggctgtgggatgtggtctctaacgaggaggctgtcgatatgacccggtcaatacaagacccagaggaagctgctaagaggctcttgcaggaggcctacaagcgggagagcagtgacaacataacctgcgtcgtcgtgcgcttctttcacgggcaagggagtagtgggcctgcttaaagcaggtgcgaagagttactctcaacttctcaagtcgacgttgtactgtgatgacacgcgtacatgccttgattgattcttaaggtttaaacgaagagaaactggaagtaggaaaagtgtactctgatatgagaacaaaagtttaggaacgaagtgtgccctaggccttagatttaacaataaatttgctggtgatgaactgatgaccgttcatcgtggtttagttgtggatggtgttgggtctgatgagtgtgttgtatcttgttgtggattgccaaaccatgtgtgagtgtgatgtaagcgattattgttgtactgaaattgagcaatgacaagtataattgagttgttggatggatct

SEQ ID NO: 64202 - protein, 284 aa, Triticum aestivum
  peptide (1)..(284): Ceres Seq. ID no. 14301887
  misc_feature (43)..(267): Pfam Name: Protein phosphatase 2C Pfam Description: Protein phosphatase 2C
  misc_feature (18)..(274): Homolog of NCBI NO: 30693757 NR Description: protein phosphatase 2C (PP2C), putative
  misc_feature (1)..(281): Homolog of NCBI NO: 11358728 NR Description: protein phosphatase 2C-like protein - Arabidopsis
  misc_feature (1)..(281): Homolog of NCBI NO: 18416366 NR Description: protein phosphatase 2C (PP2C) -related
  misc_feature (1)..(284): Homolog of NCBI NO: 15238651 NR Description: protein phosphatase 2C (PP2C), putative
  misc_feature (199)..(282): Homolog of NCBI NO: 7486331 NR Description: hypothetical protein F28M20.60 - Arabidopsis
  misc_feature (23)..(210): Homolog of NCBI NO: 7486331 NR Description: hypothetical protein F28M20.60 - Arabidopsis
  misc_feature (1)..(274): Homolog of NCBI NO: 20146110 NR Description: protein phosphatase 2C [Mesembryanthemum
  misc_feature (1)..(282): Homolog of NCBI NO: 30689144 NR Description: protein phosphatase 2C (PP2C), putative
  misc_feature (42)..(284): Homolog of NCBI NO: 19387276 NR Description: putative protein phosphatase 2C
  misc_feature (1)..(284): Homolog of NCBI NO: 38345197 NR Description: OSJNBa0015K02.7 [Oryza sativa (japonica
MGYLSTVIGHPTDGSPVSGGGLSQNGKFSYGYASSLGKRASMEDFYETRIESVDGQLIGLFGVFDGHGGAKVAEYVKHNLFSHLLRHPKFMSDTKVAIDDSYKSTDSEFLESDSTQNQCGSTASTAVLVGNRLFVANVGDSRAIICRAGNAVPVSKDHKPDQTDERQRIEEAGGFVMWAGTWRVGGVLAVSRAFGDKLLKQYVVVDPEIREEIVDESLEFLILASDGLWDVVSNEEAVDMTRSIQDPEEAAKRLLQEAYKRESSDNITCVVVRFFHGQGSSGPA

SEQ ID NO: 64203 - protein, 243 aa, Triticum aestivum
  peptide (1)..(243): Ceres Seq. ID no. 14301888
  misc_feature (2)..(226): Pfam Name: Protein phosphatase 2C Pfam Description: Protein phosphatase 2C
  misc_feature (1)..(233): Homolog of NCBI NO: 30693757 NR Description: protein phosphatase 2C (PP2C), putative
  misc_feature (1)..(240): Homolog of NCBI NO: 11358728 NR Description: protein phosphatase 2C-like protein - Arabidopsis
  misc_feature (1)..(240): Homolog of NCBI NO: 18416366 NR Description: protein phosphatase 2C (PP2C) -related
  misc_feature (1)..(243): Homolog of NCBI NO: 15238651 NR Description: protein phosphatase 2C (PP2C), putative
  misc_feature (158)..(241): Homolog of NCBI NO: 7486331 NR Description: hypothetical protein F28M20.60 - Arabidopsis
  misc_feature (1)..(169): Homolog of NCBI NO: 7486331 NR Description: hypothetical protein F28M20.60 - Arabidopsis
  misc_feature (1)..(233): Homolog of NCBI NO: 20146110 NR Description: protein phosphatase 2C [Mesembryanthemum
  misc_feature (1)..(241): Homolog of NCBI NO: 30689144 NR Description: protein phosphatase 2C (PP2C), putative
  misc_feature (1)..(243): Homolog of NCBI NO: 19387276 NR Description: putative protein phosphatase 2C
  misc_feature (1)..(243): Homolog of NCBI NO: 38345197 NR Description: OSJNBa0015K02.7 [Oryza sativa (japonica
MEDFYETRIESVDGQLIGLFGVFDGHGGAKVAEYVKHNLFSHLLRHPKFMSDTKVAIDDSYKSTDSEFLESDSTQNQCGSTASTAVLVGNRLFVANVGDSRAIICRAGNAVPVSKDHKPDQTDERQRIEEAGGFVMWAGTWRVGGVLAVSRAFGDKLLKQYVVVDPEIREEIVDESLEFLILASDGLWDVVSNEEAVDMTRSIQDPEEAAKRLLQEAYKRESSDNITCVVVRFFHGQGSSGPA

SEQ ID NO: 64204 - protein, 194 aa, Triticum aestivum
  peptide (1)..(194): Ceres Seq. ID no. 14301889
  misc_feature (1)..(177): Pfam Name: Protein phosphatase 2C Pfam Description: Protein phosphatase 2C
  misc_feature (1)..(184): Homolog of NCBI NO: 30693757 NR Description: protein phosphatase 2C (PP2C), putative
  misc_feature (1)..(191): Homolog of NCBI NO: 11358728 NR Description: protein phosphatase 2C-like protein - Arabidopsis
  misc_feature (1)..(191): Homolog of NCBI NO: 18416366 NR Description: protein phosphatase 2C (PP2C) -related
  misc_feature (1)..(194): Homolog of NCBI NO: 15238651 NR Description: protein phosphatase 2C (PP2C), putative
  misc_feature (109)..(192): Homolog of NCBI NO: 7486331 NR Description: hypothetical protein F28M20.60 - Arabidopsis
  misc_feature (1)..(120): Homolog of NCBI NO: 7486331 NR Description: hypothetical protein F28M20.60 - Arabidopsis
  misc_feature (1)..(184): Homolog of NCBI NO: 20146110 NR Description: protein phosphatase 2C [Mesembryanthemum
  misc_feature (1)..(192): Homolog of NCBI NO: 30689144 NR Description: protein phosphatase 2C (PP2C), putative
  misc_feature (1)..(194): Homolog of NCBI NO: 19387276 NR Description: putative protein phosphatase 2C
  misc_feature (1)..(194): Homolog of NCBI NO: 38345197 NR Description: OSJNBa0015K02.7 [Oryza sativa (japonica
MSDTKVAIDDSYKSTDSEFLESDSTQNQCGSTASTAVLVGNRLFVANVGDSRAIICRAGNAVPVSKDHKPDQTDERQRIEEAGGFVMWAGTWRVGGVLAVSRAFGDKLLKQYVVVDPEIREEIVDESLEFLILASDGLWDVVSNEEAVDMTRSIQDPEEAAKRLLQEAYKRESSDNITCVVVRFFHGQGSSGPA

SEQ ID NO: 64205 - DNA, 2011 bp, Triticum aestivum
  misc_feature (1)..(2011): Ceres Seq. ID no. 14313636
atccctgtctcccccctccctcttaactgcaagcaagcaatgggggctcccaaatgggtggttgcgccattggcgctgctgctcctcctgcagctcgccggcgcgtcccatgacgtccgacggagccttgaggccgaggcggcgacgccgtccgtgccggcctccattcttagccccctgctccggacgggctaccacttccaaccccccatgaactggatcaacgatccgaatggtccgctctactacaagggatggtaccacctgttctaccagtacaaccccaagggcgcggtgtggggcaacatcatctgggcgcactcggtgtcgcgcgacctcatcaactggatggccctcgaccccgccatcaagcccagcattccgaccgaccagtacggcgtctggtccggctcggcgacgatcctgcccaacggcacggtggcgatgctctacaccggcatcgaccgcccgggcaccaactaccagatccagaacatcgccttccccaaggacccctccgacccgctgctccgcgagtgggtcaagcccggctacaaccccatcgccgtccccgaggccggcatcaacgccacgcagttccgcgacccgaccaccgcctggcacgccggcgatggcctctggcgcatgctcgtgggcgggctcaagcccggcacgctccgcggcatggccatcctgtaccggagcagggacttcaagcactgggtccgcgccaagcacccgctccactcggccctcaccggcatgtgggagtgccccgacttcttccccgtgcgcgagcccgggaagacggacggcctcgacacctccgagttcggcccgcgctacaagtacgtgctcaagaacagcctcgacctcacccgctacgactactacaccgtgggcacctacaacaaccgcacggagcggtacgtgcccgacaaccccaccggcgacgtctaccagcggctccagtacgactacggcaacttctacgcgtccaagaccttctacgacccggccaagaaccgccgcgtgctgctgggctgggccaacgagtccgacagcgtcgcgcacgacaacgccaagggatgggccggcatccacgcgatcccgaggaagatatggctggaccccagcggcaagcagctgctgcagtggcccgtggaggagctggaccagctgaggggcaaggctgtcagcgtgggtgacaagctcgtcaagcccggccagcactttgaggtcactggcctgcagtcctaccagtctgacgtggaggtgagcttcgaggtgtcgagcctggacaaggcggagccgttcgatccggcctacgccaacgacgcgcagaagctctgcgggatgaagaacgccgacgtcaagggcggggtggggcccttcggcctctgggtcctggcctctgacaacctggccgagaagaccgccgtgttcttcagagtcttcaaggatgggcatggcaagcctctcgtcctcatgtgcagtgaccccaccaagtcatctctcaccccgggtctatacaagccgacttttgccgggtttgtcgacaccgacatttcgtccgggaagatctctctgagaagcttgatcgaccgatcggtggttgagagcttcggcgccggagggaagacctgcatcctatcgagagtgtacccatccatggcgatcgggaaagacgcacacctttatgtgttcaacaacggggtgaccgatatcaaggtgtccaaactaacggcgtgggagatgaaaaaaccaatgatgaatggtgcctaagtagtatataccgtatatgttttctcatgagtttaagtttttgttgaatgccattcgacatcgatgcacaccacgcaactgattgctcgtcttaatgaagacctctttgagtagaagtggttagagaaatttgttgtacaattgataatttctgtcacgtgttgtacgaataaacatgatgatcccacgctgaagacaataaagaccttaatgaatttcttctttc

SEQ ID NO: 64206 - protein, 594 aa, Triticum aestivum
  peptide (1)..(594): Ceres Seq. ID no. 14313637
  misc_feature (66)..(546): Pfam Name: Glycosyl hydrolases family 32 Pfam Description: Glycosyl hydrolases family 32
  misc_feature (62)..(586): Homolog of NCBI NO: 124713 NR Description: ACID BETA-FRUCTOFURANOSIDASE PRECURSOR (ACID
  misc_feature (22)..(594): Homolog of NCBI NO: 6318661 NR Description: cell wall invertase 2 [Zea mays]
  misc_feature (22)..(594): Homolog of NCBI NO: 7435479 NR Description: beta-fructofuranosidase (EC 3.2.1.26) INCW2 -
  misc_feature (22)..(594): Homolog of NCBI NO: 4105719 NR Description: cell wall invertase Incw2; beta-fructosidase [Zea
  misc_feature (22)..(594): Homolog of NCBI NO: 6318659 NR Description: cell wall invertase 2 [Zea mays]
  misc_feature (61)..(594): Homolog of NCBI NO: 31872120 NR Description: cell wall invertase [Saccharum hybrid cultivar]
  misc_feature (16)..(594): Homolog of NCBI NO: 1352469 NR Description: BETA-FRUCTOFURANOSIDASE, CELL WALL ISOZYME
  misc_feature (16)..(594): Homolog of NCBI NO: 4105721 NR Description: cell wall invertase Incw1; beta-fructosidase [Zea
  misc_feature (14)..(594): Homolog of NCBI NO: 20196210 NR Description: cell wall invertase [Oryza sativa (japonica
  misc_feature (14)..(594): Homolog of NCBI NO: 33694262 NR Description: cell wall invertase 1 [Oryza sativa (indica
IPVSPLPLNCKQAMGAPKWVVAPLALLLLLQLAGASHDVRRSLEAEAATPSVPASILSPLLRTGYHFQPPMNWINDPNGPLYYKGWYHLFYQYNPKGAVWGNIIWAHSVSRDLINWMALDPAIKPSIPTDQYGVWSGSATILPNGTVAMLYTGIDRPGTNYQIQNIAFPKDPSDPLLREWVKPGYNPIAVPEAGINATQFRDPTTAWHAGDGLWRMLVGGLKPGTLRGMAILYRSRDFKHWVRAKHPLHSALTGMWECPDFFPVREPGKTDGLDTSEFGPRYKYVLKNSLDLTRYDYYTVGTYNNRTERYVPDNPTGDVYQRLQYDYGNFYASKTFYDPAKNRRVLLGWANESDSVAHDNAKGWAGIHAIPRKIWLDPSGKQLLQWPVEELDQLRGKAVSVGDKLVKPGQHFEVTGLQSYQSDVEVSFEVSSLDKAEPFDPAYANDAQKLCGMKNADVKGGVGPFGLWVLASDNLAEKTAVFFRVFKDGHGKPLVLMCSDPTKSSLTPGLYKPTFAGFVDTDISSGKISLRSLIDRSVVESFGAGGKTCILSRVYPSMAIGKDAHLYVFNNGVTDIKVSKLTAWEMKKPMMNGA

SEQ ID NO: 64207 - protein, 581 aa, Triticum aestivum
  peptide (1)..(581): Ceres Seq. ID no. 14313638
  misc_feature (53)..(533): Pfam Name: Glycosyl hydrolases family 32 Pfam Description: Glycosyl hydrolases family 32
  misc_feature (49)..(573): Homolog of NCBI NO: 124713 NR Description: ACID BETA-FRUCTOFURANOSIDASE PRECURSOR (ACID
  misc_feature (9)..(581): Homolog of NCBI NO: 6318661 NR Description: cell wall invertase 2 [Zea mays]
  misc_feature (9)..(581): Homolog of NCBI NO: 7435479 NR Description: beta-fructofuranosidase (EC 3.2.1.26) INCW2 -
  misc_feature (9)..(581): Homolog of NCBI NO: 4105719 NR Description: cell wall invertase Incw2; beta-fructosidase [Zea
  misc_feature (9)..(581): Homolog of NCBI NO: 6318659 NR Description: cell wall invertase 2 [Zea mays]
  misc_feature (48)..(581): Homolog of NCBI NO: 31872120 NR Description: cell wall invertase [Saccharum hybrid cultivar]
  misc_feature (3)..(581): Homolog of NCBI NO: 1352469 NR Description: BETA-FRUCTOFURANOSIDASE, CELL WALL ISOZYME
  misc_feature (3)..(581): Homolog of NCBI NO: 4105721 NR Description: cell wall invertase Incw1; beta-fructosidase [Zea
  misc_feature (1)..(581): Homolog of NCBI NO: 20196210 NR Description: cell wall invertase [Oryza sativa (japonica
  misc_feature (1)..(581): Homolog of NCBI NO: 33694262 NR Description: cell wall invertase 1 [Oryza sativa (indica
MGAPKWVVAPLALLLLLQLAGASHDVRRSLEAEAATPSVPASILSPLLRTGYHFQPPMNWINDPNGPLYYKGWYHLFYQYNPKGAVWGNIIWAHSVSRDLINWMALDPAIKPSIPTDQYGVWSGSATILPNGTVAMLYTGIDRPGTNYQIQNIAFPKDPSDPLLREWVKPGYNPIAVPEAGINATQFRDPTTAWHAGDGLWRMLVGGLKPGTLRGMAILYRSRDFKHWVRAKHPLHSALTGMWECPDFFPVREPGKTDGLDTSEFGPRYKYVLKNSLDLTRYDYYTVGTYNNRTERYVPDNPTGDVYQRLQYDYGNFYASKTFYDPAKNRRVLLGWANESDSVAHDNAKGWAGIHAIPRKIWLDPSGKQLLQWPVEELDQLRGKAVSVGDKLVKPGQHFEVTGLQSYQSDVEVSFEVSSLDKAEPFDPAYANDAQKLCGMKNADVKGGVGPFGLWVLASDNLAEKTAVFFRVFKDGHGKPLVLMCSDPTKSSLTPGLYKPTFAGFVDTDISSGKISLRSLIDRSVVESFGAGGKTCILSRVYPSMAIGKDAHLYVFNNGVTDIKVSKLTAWEMKKPMMNGA

SEQ ID NO: 64208 - protein, 524 aa, Triticum aestivum
  peptide (1)..(524): Ceres Seq. ID no. 14313639
  misc_feature (1)..(476): Pfam Name: Glycosyl hydrolases family 32 Pfam Description: Glycosyl hydrolases family 32
  misc_feature (1)..(516): Homolog of NCBI NO: 124713 NR Description: ACID BETA-FRUCTOFURANOSIDASE PRECURSOR (ACID
  misc_feature (1)..(524): Homolog of NCBI NO: 6318661 NR Description: cell wall invertase 2 [Zea mays]
  misc_feature (1)..(524): Homolog of NCBI NO: 7435479 NR Description: beta-fructofuranosidase (EC 3.2.1.26) INCW2 -
  misc_feature (1)..(524): Homolog of NCBI NO: 4105719 NR Description: cell wall invertase Incw2; beta-fructosidase [Zea
  misc_feature (1)..(524): Homolog of NCBI NO: 6318659 NR Description: cell wall invertase 2 [Zea mays]
  misc_feature (1)..(524): Homolog of NCBI NO: 31872120 NR Description: cell wall invertase [Saccharum hybrid cultivar]
  misc_feature (1)..(524): Homolog of NCBI NO: 1352469 NR Description: BETA-FRUCTOFURANOSIDASE, CELL WALL ISOZYME
  misc_feature (1)..(524): Homolog of NCBI NO: 4105721 NR Description: cell wall invertase Incw1; beta-fructosidase [Zea
  misc_feature (1)..(524): Homolog of NCBI NO: 20196210 NR Description: cell wall invertase [Oryza sativa (japonica
  misc_feature (1)..(524): Homolog of NCBI NO: 33694262 NR Description: cell wall invertase 1 [Oryza sativa (indica
MNWINDPNGPLYYKGWYHLFYQYNPKGAVWGNIIWAHSVSRDLINWMALDPAIKPSIPTDQYGVWSGSATILPNGTVAMLYTGIDRPGTNYQIQNIAFPKDPSDPLLREWVKPGYNPIAVPEAGINATQFRDPTTAWHAGDGLWRMLVGGLKPGTLRGMAILYRSRDFKHWVRAKHPLHSALTGMWECPDFFPVREPGKTDGLDTSEFGPRYKYVLKNSLDLTRYDYYTVGTYNNRTERYVPDNPTGDVYQRLQYDYGNFYASKTFYDPAKNRRVLLGWANESDSVAHDNAKGWAGIHAIPRKIWLDPSGKQLLQWPVEELDQLRGKAVSVGDKLVKPGQHFEVTGLQSYQSDVEVSFEVSSLDKAEPFDPAYANDAQKLCGMKNADVKGGVGPFGLWVLASDNLAEKTAVFFRVFKDGHGKPLVLMCSDPTKSSLTPGLYKPTFAGFVDTDISSGKISLRSLIDRSVVESFGAGGKTCILSRVYPSMAIGKDAHLYVFNNGVTDIKVSKLTAWEMKKPMMNGA

SEQ ID NO: 64209 - DNA, 1635 bp, Triticum aestivum
  misc_feature (1)..(1635): Ceres Seq. ID no. 14313463
aaacaagtgtacctctatctcgccgtcgcctccccgctccttgcttccgcccggccgtttctctagggtttaacgccatggacgtcgaggacgagctcccgaccgcccccgcgtccgcggacggcggcgaatcctcgcacgcgctggtgtccggcgaccagttcgacgtggaggcgtacgcggcgcagtactcggggcgcacgcgcgtggcgcggcttctcttcatcgcggagaagtgcgggtcggagcagatgcggctggatgcgctccggctggcctacgactgggccctcaagggagaggacacggccctccaccgcgacgtctccgccaagatcgccggccgcctcggcccccgctacgcagccgaccaggcctggtccgacgccgtcgagcgccgcgccctgctgcgcaaggataagcttgacagcgagctcaatgtctacaggaccaatctgatcaaagagagtattcggatgggctacaatgaccttggtgatttccactatgctcaaggccacctttcagacgccttcaagagctatatcaggacccgcgattactgcacgacctccaagcatgttgttcagatgtgcttgaatgtcatacttgttagcattgagctggggcaatttatgcacgtgtcaaattatgtcatcaaggcggagcagaccccagacgatatggatcctattactgccgccaagttgcgagctgctgctggattagcctacatggaaacaaacaagtacaaacttgctgcccggaagtttatagagacaggatcagagctaaggagcaactattctgaagttatagctccacaagatgttgctgtctatggtgcactatgcgcgcttgcttcttttgatcgctcagagctgaagagcaaagttattgacaactacaattttcgcaattttttggagttagtgcctgaagtaagggagctggtaaatgatttttatgcaagccgctatgggtcatgtctgggatatcttgagaagctgaagtcaaacctgctgctggatatgcatttgcatgcgcatatagaaactctgtacaaggacattcgacacaaagccatcatacagtacacattcccattcatatctgttgatctcaacttgatggctgttgccttccagacctccgtgtccctgctagagaaagagctggcagcgcttatcactgataacaaaatacaggctcgtatcgactcgcacaacaagattctatacgcaagccacgccgaccaaaggaacggaactttccagcgtgctctgcagactggcattgagtttgagagggatgtcaagtccatgcttctgagggcgaacctcctcaagcacgagtacagccagaaggcagcagaaaggaaggtgtgaaaacaagttctccttggtttggacctgaggtgcattgagagattttagtgatgatttgtgccatagtcaagtgtttcatgtcatgatcttccatattcaagctaagatactagatttaagtatgttttagagcacacaaagataatataacttctgccatgcacgtcttttgcggagactatgtggttaattttgtactacgtactggcattcattttggagttttcgtatagactcatttgaagct

SEQ ID NO: 64210 - protein, 461 aa, Triticum aestivum
  peptide (1)..(461): Ceres Seq. ID no. 14313464
  misc_feature (312)..(416): Pfam Name: PCI domain Pfam Description: PCI domain
  misc_feature (17)..(92): Homolog of NCBI NO: 4732103 NR Description: COP9 signalosome subunit 1 CSN1 [Drosophila
  misc_feature (120)..(460): Homolog of NCBI NO: 4732103 NR Description: COP9 signalosome subunit 1 CSN1 [Drosophila
  misc_feature (17)..(92): Homolog of NCBI NO: 24666528 NR Description: COP9 complex homolog subunit 1 CG3889-PA
  misc_feature (120)..(460): Homolog of NCBI NO: 24666528 NR Description: COP9 complex homolog subunit 1 CG3889-PA
  misc_feature (27)..(459): Homolog of NCBI NO: 11282867 NR Description: FUSCA PROTEIN FUS6 - Arabidopsis thaliana
  misc_feature (33)..(459): Homolog of NCBI NO: 26450149 NR Description: putative FUSCA protein FUS6 [Arabidopsis thaliana]
  misc_feature (27)..(459): Homolog of NCBI NO: 432446 NR Description: FUS6
  misc_feature (27)..(459): Homolog of NCBI NO: 18411857 NR Description: COP9 complex subunit, FUS6 [Arabidopsis thaliana]
  misc_feature (26)..(461): Homolog of NCBI NO: 10443485 NR Description: rCOP11 protein [Oryza sativa]
  misc_feature (26)..(461): Homolog of NCBI NO: 7208213 NR Description: constitutive photomorphogenic 11 [Oryza sativa
TSVPLSRRRLPAPCFRPAVSLGFNAMDVEDELPTAPASADGGESSHALVSGDQFDVEAYAAQYSGRTRVARLLFIAEKCGSEQMRLDALRLAYDWALKGEDTALHRDVSAKIAGRLGPRYAADQAWSDAVERRALLRKDKLDSELNVYRTNLIKESIRMGYNDLGDFHYAQGHLSDAFKSYIRTRDYCTTSKHVVQMCLNVILVSIELGQFMHVSNYVIKAEQTPDDMDPITAAKLRAAAGLAYMETNKYKLAARKFIETGSELRSNYSEVIAPQDVAVYGALCALASFDRSELKSKVIDNYNFRNFLELVPEVRELVNDFYASRYGSCLGYLEKLKSNLLLDMHLHAHIETLYKDIRHKAIIQYTFPFISVDLNLMAVAFQTSVSLLEKELAALITDNKIQARIDSHNKILYASHADQRNGTFQRALQTGIEFERDVKSMLLRANLLKHEYSQKAAERKV

SEQ ID NO: 64211 - protein, 436 aa, Triticum aestivum
  peptide (1)..(436): Ceres Seq. ID no. 14313465
  misc_feature (287)..(391): Pfam Name: PCI domain Pfam Description: PCI domain
  misc_feature (1)..(67): Homolog of NCBI NO: 4732103 NR Description: COP9 signalosome subunit 1 CSN1 [Drosophila
  misc_feature (95)..(435): Homolog of NCBI NO: 4732103 NR Description: COP9 signalosome subunit 1 CSN1 [Drosophila
  misc_feature (1)..(67): Homolog of NCBI NO: 24666528 NR Description: COP9 complex homolog subunit 1 CG3889-PA
  misc_feature (95)..(435): Homolog of NCBI NO: 24666528 NR Description: COP9 complex homolog subunit 1 CG3889-PA
  misc_feature (2)..(434): Homolog of NCBI NO: 11282867 NR Description: FUSCA PROTEIN FUS6 - Arabidopsis thaliana
  misc_feature (8)..(434): Homolog of NCBI NO: 26450149 NR Description: putative FUSCA protein FUS6 [Arabidopsis thaliana]
  misc_feature (2)..(434): Homolog of NCBI NO: 432446 NR Description: FUS6
  misc_feature (2)..(434): Homolog of NCBI NO: 18411857 NR Description: COP9 complex subunit, FUS6 [Arabidopsis thaliana]
  misc_feature (1)..(436): Homolog of NCBI NO: 10443485 NR Description: rCOP11 protein [Oryza sativa]
  misc_feature (1)..(436): Homolog of NCBI NO: 7208213 NR Description: constitutive photomorphogenic 11 [Oryza sativa
MDVEDELPTAPASADGGESSHALVSGDQFDVEAYAAQYSGRTRVARLLFIAEKCGSEQMRLDALRLAYDWALKGEDTALHRDVSAKIAGRLGPRYAADQAWSDAVERRALLRKDKLDSELNVYRTNLIKESIRMGYNDLGDFHYAQGHLSDAFKSYIRTRDYCTTSKHVVQMCLNVILVSIELGQFMHVSNYVIKAEQTPDDMDPITAAKLRAAAGLAYMETNKYKLAARKFIETGSELRSNYSEVIAPQDVAVYGALCALASFDRSELKSKVIDNYNFRNFLELVPEVRELVNDFYASRYGSCLGYLEKLKSNLLLDMHLHAHIETLYKDIRHKAIIQYTFPFISVDLNLMAVAFQTSVSLLEKELAALITDNKIQARIDSHNKILYASHADQRNGTFQRALQTGIEFERDVKSMLLRANLLKHEYSQKAAERKV

SEQ ID NO: 64212 - protein, 378 aa, Triticum aestivum
  peptide (1)..(378): Ceres Seq. ID no. 14313466
  misc_feature (229)..(333): Pfam Name: PCI domain Pfam Description: PCI domain
  misc_feature (40)..(377): Homolog of NCBI NO: 16758860 NR Description: G protein pathway suppressor 1 [Rattus
  misc_feature (40)..(377): Homolog of NCBI NO: 21703742 NR Description: G protein pathway suppressor 1 [Mus musculus]
  misc_feature (37)..(377): Homolog of NCBI NO: 4732103 NR Description: COP9 signalosome subunit 1 CSN1 [Drosophila
  misc_feature (37)..(377): Homolog of NCBI NO: 24666528 NR Description: COP9 complex homolog subunit 1 CG3889-PA
  misc_feature (1)..(376): Homolog of NCBI NO: 11282867 NR Description: FUSCA PROTEIN FUS6 - Arabidopsis thaliana
  misc_feature (1)..(376): Homolog of NCBI NO: 26450149 NR Description: putative FUSCA protein FUS6 [Arabidopsis thaliana]
  misc_feature (1)..(376): Homolog of NCBI NO: 432446 NR Description: FUS6
  misc_feature (1)..(376): Homolog of NCBI NO: 18411857 NR Description: COP9 complex subunit, FUS6 [Arabidopsis thaliana]
  misc_feature (1)..(378): Homolog of NCBI NO: 10443485 NR Description: rCOP11 protein [Oryza sativa]
  misc_feature (1)..(378): Homolog of NCBI NO: 7208213 NR Description: constitutive photomorphogenic 11 [Oryza sativa
MRLDALRLAYDWALKGEDTALHRDVSAKIAGRLGPRYAADQAWSDAVERRALLRKDKLDSELNVYRTNLIKESIRMGYNDLGDFHYAQGHLSDAFKSYIRTRDYCTTSKHVVQMCLNVILVSIELGQFMHVSNYVIKAEQTPDDMDPITAAKLRAAAGLAYMETNKYKLAARKFIETGSELRSNYSEVIAPQDVAVYGALCALASFDRSELKSKVIDNYNFRNFLELVPEVRELVNDFYASRYGSCLGYLEKLKSNLLLDMHLHAHIETLYKDIRHKAIIQYTFPFISVDLNLMAVAFQTSVSLLEKELAALITDNKIQARIDSHNKILYASHADQRNGTFQRALQTGIEFERDVKSMLLRANLLKHEYSQKAAERKV

SEQ ID NO: 64213 - DNA, 994 bp, Triticum aestivum
  misc_feature (1)..(994): Ceres Seq. ID no. 13655622
ccgacgagcggctgggctcggttagccaaaggagcaagccctagctcgcccaaatccccgctcccctccccctcgccgaacaaatgtccgaccgccgccgcgacagggagaggccccgcgagcgcggcggctacgaccagccgcgggagcgcgaccacgacgccgaccgccaccgcgaccgggaccgcgacgtcgaccgccaccgggaccgggaccgcggccaggacaaggagcgggaccgggaccgggactaccgccgcgcccgcaagcgctcgcgctcccgctccccctcggccgacagggaccgcgcccgccgccgccgctcccactcccactcccacccccaccggtcacgctcccccgacgccggccgccacaagcgccgccgcgaggggtcgcccgtcgccgactcgaaggaggacaggaagccggatccccccaaggccgccgaggaggcggccgccccggtgggcgacggggacgtggacgcggaggagctggagatgatgaagatgatggggatccccgtcgggttcgactccaccaagggcaagtacgtccccggcgccgacgtcagcggcgtgcgcgccgtcaccaagcgccagccgcggcagtacatgaaccgcaggggcgggttcaaccgtcccctgccgcccgaggtcaaccgctgaggaggatcatgtatcactgcagtatacctcgttgctggaatgcaaacttgcggttgattactagacttctttgctggccatagcaaggattgagcttctactgtctaccaagcatgtataaccttgatggctagttactttgccaaactttgcagactgagacatgtagttctcgttttcatcatttgctctgtcgacattccagggaaagatattggtggcgtgtttttggaaatgtggtttagaaaattacatgatgtttctgcacataatttgtatgtttttcaggcatgcaccacatggaatggaacttgtgatgatgc

SEQ ID NO: 64214 - protein, 195 aa, Triticum aestivum
  peptide (1)..(195): Ceres Seq. ID no. 13655623
  misc_feature (4)..(85): Pfam Name: SART-1 family Pfam Description: SART-1 family
  misc_feature (4)..(189): Homolog of NCBI NO: 27413622 NR Description: putative RNA-binding protein [Drosophila
  misc_feature (8)..(191): Homolog of NCBI NO: 40738944 NR Description: hypothetical protein AN6605.2 [Aspergillus
  misc_feature (1)..(134): Homolog of NCBI NO: 34873791 NR Description: similar to ATP-dependent helicase DDX8 (RNA
  misc_feature (29)..(189): Homolog of NCBI NO: 27228990 NR Description: putative nucleic acid binding protein RY-1; EST
  misc_feature (31)..(189): Homolog of NCBI NO: 24307919 NR Description: putative nucleic acid binding protein RY-1 [Homo
  misc_feature (33)..(189): Homolog of NCBI NO: 7513213 NR Description: nucleic acid binding protein - human (fragment)
  misc_feature (4)..(191): Homolog of NCBI NO: 23478750 NR Description: cyclophilin-RNA interacting protein [Plasmodium
  misc_feature (12)..(189): Homolog of NCBI NO: 34856367 NR Description: similar to putative nucleic acid binding protein
  misc_feature (1)..(195): Homolog of NCBI NO: 18423973 NR Description: expressed protein [Arabidopsis thaliana]
  misc_feature (1)..(195): Homolog of NCBI NO: 21592725 NR Description: unknown [Arabidopsis thaliana]
MSDRRRDRERPRERGGYDQPRERDHDADRHRDRDRDVDRHRDRDRGQDKERDRDRDYRRARKRSRSRSPSADRDRARRRRSHSHSHPHRSRSPDAGRHKRRREGSPVADSKEDRKPDPPKAAEEAAAPVGDGDVDAEELEMMKMMGIPVGFDSTKGKYVPGADVSGVRAVTKRQPRQYMNRRGGFNRPLPPEVNR

SEQ ID NO: 64215 - protein, 168 aa, Triticum aestivum
  peptide (1)..(168): Ceres Seq. ID no. 13655624
  misc_feature (2)..(168): Pfam Name: Equine herpesvirus glycoprotein gp2 Pfam Description: Equine herpesvirus glycoprotein gp2
  misc_feature (12)..(168): Homolog of NCBI NO: 28574039 NR Description: Salivary gland secretion 1 CG3047-PA [Drosophila
  misc_feature (1)..(168): Homolog of NCBI NO: 28574039 NR Description: Salivary gland secretion 1 CG3047-PA [Drosophila
  misc_feature (1)..(168): Homolog of NCBI NO: 28574039 NR Description: Salivary gland secretion 1 CG3047-PA [Drosophila
  misc_feature (1)..(168): Homolog of NCBI NO: 28574039 NR Description: Salivary gland secretion 1 CG3047-PA [Drosophila
  misc_feature (1)..(168): Homolog of NCBI NO: 28574039 NR Description: Salivary gland secretion 1 CG3047-PA [Drosophila
  misc_feature (1)..(168): Homolog of NCBI NO: 28574039 NR Description: Salivary gland secretion 1 CG3047-PA [Drosophila
  misc_feature (1)..(168): Homolog of NCBI NO: 28574039 NR Description: Salivary gland secretion 1 CG3047-PA [Drosophila
  misc_feature (1)..(168): Homolog of NCBI NO: 28574039 NR Description: Salivary gland secretion 1 CG3047-PA [Drosophila
  misc_feature (1)..(168): Homolog of NCBI NO: 28574039 NR Description: Salivary gland secretion 1 CG3047-PA [Drosophila
  misc_feature (1)..(168): Homolog of NCBI NO: 28574039 NR Description: Salivary gland secretion 1 CG3047-PA [Drosophila
PTSGWARLAKGASPSSPKSPLPSPSPNKCPTAAATGRGPASAAATTSRGSATTTPTATATGTATSTATGTGTAARTRSGTGTGTTAAPASARAPAPPRPTGTAPAAAAPTPTPTPTGHAPPTPAATSAAARGRPSPTRRRTGSRIPPRPPRRRPPRWATGTWTRRSWR

SEQ ID NO: 64216 - DNA, 1219 bp, Triticum aestivum
  misc_feature (1)..(1219): Ceres Seq. ID no. 13584238
atcgaaaatccatccattagcatccatctccggctagcaacacaaacgaccttctctttctcctctttcttcagggtagtcggccggagtccgggacgaagccggcggcgaagactccaaagaggatcatcatcagttcatcgcacaaatcgaccagccatgtgtaacaacagcggcggccgcggcggggcgatggcggctcggaaggggccgtggacggagaacgaggacgcccaactggtatggttcgtgcgcttgctcggcgaacgccgttgggatttcttagctcaggtctcaggtttgcgcggtggcgggtgatcgatccaacctgacctctacggccagtcaccattaatcttcttcttctccctcccctcctccggcgtgttctcggctgtgctccatgcaggtctccggcgcaccggcaagagctgccgcctccgctgggtcaactacctccacccgggcctcaagcgcggacgcatcaccgccgacgaggagcggctcatcctcagcctccacgccgagtggggctcccggtggtccaggatcgctaggaagctccccggccgcaccgacaacgagatcaagaactactggaggacgcacatgaggaagaaggcccaggaggagaagatgctggccaagaagaaggcctcatcctcgccctcctcctcctcctcctcgaccacgtcgctgacctgctcggcctcccccacggccacgtcgtcctcggcggccaccaccgaggcgccccaggagagcactactactagcatggacgacgaggccgagcaggaggccaccacgtcggcgagcgaggagaagaaggcggaggtggtgcagtactgctccgccgtggacatggaccagctctggaacgacatcgccgcgtcggagagctacccggagatgatgatgagctggggcgcagccggccacgtggccatgcccgcccccgctgtggagccctcgtcgccggtgtgggagttctgcgaggattactccctgtggaggatcgacgaccaagagtactacaacaagatcgatcaacacgctctgaattgagaggctttcgttacgtttctcttgttgttcttgttcttcctagctagctagcttaattgcatgtattactatatactaattcatgcatgtaattatatgtaaaacttgagttgtgagattatattggtgacagctttttgcgcacatgtgt

SEQ ID NO: 64217 - protein, 152 aa, Triticum aestivum
  peptide (1)..(152): Ceres Seq. ID no. 13584239
  misc_feature (1)..(108): Homolog of NCBI NO: 2832404 NR Description: R2R3-MYB transcription factor [Arabidopsis
  misc_feature (1)..(131): Homolog of NCBI NO: 7438337 NR Description: myb-related protein myb1, TMV-inducible - common
  misc_feature (1)..(106): Homolog of NCBI NO: 18415984 NR Description: myb family transcription factor [Arabidopsis
  misc_feature (1)..(72): Homolog of NCBI NO: 15230731 NR Description: myb family transcription factor (MYB108)
  misc_feature (1)..(59): Homolog of NCBI NO: 30697277 NR Description: myb family transcription factor [Arabidopsis
  misc_feature (1)..(93): Homolog of NCBI NO: 11967859 NR Description: Myb factor protein [Oryza sativa (japonica
  misc_feature (1)..(48): Homolog of NCBI NO: 34906070 NR Description: putative Myb factor protein
  misc_feature (1)..(59): Homolog of NCBI NO: 15238519 NR Description: myb family transcription factor [Arabidopsis
  misc_feature (1)..(59): Homolog of NCBI NO: 11358547 NR Description: myb-related transcription factor MYB59
  misc_feature (1)..(106): Homolog of NCBI NO: 15231343 NR Description: Myb family transcription factor [Arabidopsis
MRKKAQEEKMLAKKKASSSPSSSSSSTTSLTCSASPTATSSSAATTEAPQESTTTSMDDEAEQEATTSASEEKKAEVVQYCSAVDMDQLWNDIAASESYPEMMMSWGAAGHVAMPAPAVEPSSPVWEFCEDYSLWRIDDQEYYNKIDQHALN

SEQ ID NO: 64218 - protein, 143 aa, Triticum aestivum
  peptide (1)..(143): Ceres Seq. ID no. 13584240
  misc_feature (1)..(99): Homolog of NCBI NO: 2832404 NR Description: R2R3-MYB transcription factor [Arabidopsis
  misc_feature (1)..(122): Homolog of NCBI NO: 7438337 NR Description: myb-related protein myb1, TMV-inducible - common
  misc_feature (1)..(97): Homolog of NCBI NO: 18415984 NR Description: myb family transcription factor [Arabidopsis
  misc_feature (1)..(63): Homolog of NCBI NO: 15230731 NR Description: myb family transcription factor (MYB108)
  misc_feature (1)..(50): Homolog of NCBI NO: 30697277 NR Description: myb family transcription factor [Arabidopsis
  misc_feature (1)..(84): Homolog of NCBI NO: 11967859 NR Description: Myb factor protein [Oryza sativa (japonica
  misc_feature (1)..(39): Homolog of NCBI NO: 34906070 NR Description: putative Myb factor protein
  misc_feature (1)..(50): Homolog of NCBI NO: 15238519 NR Description: myb family transcription factor [Arabidopsis
  misc_feature (1)..(50): Homolog of NCBI NO: 11358547 NR Description: myb-related transcription factor MYB59
  misc_feature (1)..(97): Homolog of NCBI NO: 15231343 NR Description: Myb family transcription factor [Arabidopsis
MLAKKKASSSPSSSSSSTTSLTCSASPTATSSSAATTEAPQESTTTSMDDEAEQEATTSASEEKKAEVVQYCSAVDMDQLWNDIAASESYPEMMMSWGAAGHVAMPAPAVEPSSPVWEFCEDYSLWRIDDQEYYNKIDQHALN

SEQ ID NO: 64219 - protein, 105 aa, Triticum aestivum
  peptide (1)..(105): Ceres Seq. ID no. 13584241
  misc_feature (55)..(105): Homolog of NCBI NO: 18395645 NR Description: myb family transcription factor(MYB116)
  misc_feature (68)..(105): Homolog of NCBI NO: 34894466 NR Description: putative dehydration-induced myb-related protein
  misc_feature (65)..(105): Homolog of NCBI NO: 18415984 NR Description: myb family transcription factor [Arabidopsis
  misc_feature (65)..(105): Homolog of NCBI NO: 15230731 NR Description: myb family transcription factor (MYB108)
  misc_feature (65)..(105): Homolog of NCBI NO: 34895506 NR Description: putative myb-related transcription factor
  misc_feature (68)..(105): Homolog of NCBI NO: 11967859 NR Description: Myb factor protein [Oryza sativa (japonica
  misc_feature (68)..(105): Homolog of NCBI NO: 34906070 NR Description: putative Myb factor protein
  misc_feature (68)..(105): Homolog of NCBI NO: 15238519 NR Description: myb family transcription factor [Arabidopsis
  misc_feature (68)..(105): Homolog of NCBI NO: 11358547 NR Description: myb-related transcription factor MYB59
  misc_feature (68)..(105): Homolog of NCBI NO: 15231343 NR Description: Myb family transcription factor [Arabidopsis
IENPSISIHLRLATQTTFSFSSFFRVVGRSPGRSRRRRLQRGSSSVHRTNRPAMCNNSGGRGGAMAARKGPWTENEDAQLVWFVRLLGERRWDFLAQVSGLRGGG

SEQ ID NO: 64220 - DNA, 1314 bp, Triticum aestivum
  misc_feature (1)..(1314): Ceres Seq. ID no. 13656079
caagaagaaggaacgaatttgtcagccgacctagaggaagaggaagagaagagcgcaacgcaagcagaggcaagaatggcgatggcgaggaggagggccctcgcgctcgtgtcccagatcctacagaggcgggttctccccgcgccgcgcttcctctcgtcggcggccggcggcgctctagaccgcctcaattcgccgcccttcgcgcgccaggccgcgcacaggaaccccgctcctccttccccatgggatcggctcggagggcagaagaggaccatgttcatccagacgcagtcgacccccaacccgcagtcgctcatgttccatcctggaaagccggttatggaagttgggagctctgatttccctcatgctcggaccgccatgacatctcctttggcgaaggcgctgtttgcgatagaaggcgttacgagagtattctttggatctgattttgtaactgtgacaaaatctgacgagacttcatgggattatcttaagcctgaggtatttgctgcgataatggatttctactcatctggacagccacttttcctggactcaaataccgcagctgctatggacacagcaattcatgaggatgattcagaaatagttgctatgataaaagaactattggagacccgcattcgtccggctgttcaagatgatggtggtgacattgaataccgaggatttgagccagaaacagggatagtgaagctaaaaatgcaaggtgcctgcagtggctgcccgagttcatcagtcacgttgaaatctggcatagagaacatgctcatgcactatgtgcccgaggtgaaaggagtggagcaagagtttgatggtgatgaggaagctgaactggctggccagatggaatgagtttttacatttaaatcgcaaccatgtgacatgctgttcagggaaaccatgctacgcatgaaacgtcccggagaatttaaaccactcttaaaaccataggttaccactatattttgtgagataaaccaggagtagcctggagtttttgtgatgattagatggttgtaattttgatcagatgtgtgcaagaagcagactatcgtacatgctagagaggcagcagtagcctaaaccaacatcgactgcagtagggctgaataaagtgatagttggattgatctttccttttgtccaacactttatatgctgagcttgctaatagcaaaggtcatcactttggcatgacaggtgtaatttcatggtggttatttctgctatgtatatgtactttgtaagttttgcatttgcctctgcaagaatggttatggctgc

SEQ ID NO: 64221 - protein, 293 aa, Triticum aestivum
  peptide (1)..(293): Ceres Seq. ID no. 15220564
  misc_feature (209)..(279): Pfam Name: NifU-like domain Pfam Description: NifU-like domain
  misc_feature (91)..(287): Homolog of NCBI NO: 34856373 NR Description: similar to HIRA-interacting protein 5 (mHIRIP5)
  misc_feature (91)..(285): Homolog of NCBI NO: 37681825 NR Description: HIRA interacting protein 5 [Danio rerio]
  misc_feature (93)..(287): Homolog of NCBI NO: 9910264 NR Description: histone cell cycle regulation defective
  misc_feature (68)..(287): Homolog of NCBI NO: 34500321 NR Description: NifU-like protein HIRIP5 [Mus musculus]
  misc_feature (93)..(287): Homolog of NCBI NO: 26324295 NR Description: unnamed protein product [Mus musculus]
  misc_feature (68)..(287): Homolog of NCBI NO: 12834577 NR Description: unnamed protein product [Mus musculus]
  misc_feature (90)..(293): Homolog of NCBI NO: 15223842 NR Description: expressed protein [Arabidopsis thaliana]
  misc_feature (38)..(293): Homolog of NCBI NO: 25405462 NR Description: unknown protein, 90320-88994 [imported] -
  misc_feature (38)..(292): Homolog of NCBI NO: 18402817 NR Description: expressed protein [Arabidopsis thaliana]
  misc_feature (28)..(293): Homolog of NCBI NO: 34897632 NR Description: hypothetical protein [Oryza sativa]
QEEGTNLSADLEEEEEKSATQAEARMAMARRRALALVSQILQRRVLPAPRFLSSAAGGALDRLNSPPFARQAAHRNPAPPSPWDRLGGQKRTMFIQTQSTPNPQSLMFHPGKPVMEVGSSDFPHARTAMTSPLAKALFAIEGVTRVFFGSDFVTVTKSDETSWDYLKPEVFAAIMDFYSSGQPLFLDSNTAAAMDTAIHEDDSEIVAMIKELLETRIRPAVQDDGGDIEYRGFEPETGIVKLKMQGACSGCPSSSVTLKSGIENMLMHYVPEVKGVEQEFDGDEEAELAGQME

SEQ ID NO: 64222 - protein, 268 aa, Triticum aestivum
  peptide (1)..(268): Ceres Seq. ID no. 15220565
  misc_feature (184)..(254): Pfam Name: NifU-like domain Pfam Description: NifU-like domain
  misc_feature (66)..(262): Homolog of NCBI NO: 34856373 NR Description: similar to HIRA-interacting protein 5 (mHIRIP5)
  misc_feature (66)..(260): Homolog of NCBI NO: 37681825 NR Description: HIRA interacting protein 5 [Danio rerio]
  misc_feature (68)..(262): Homolog of NCBI NO: 9910264 NR Description: histone cell cycle regulation defective
  misc_feature (43)..(262): Homolog of NCBI NO: 34500321 NR Description: NifU-like protein HIRIP5 [Mus musculus]
  misc_feature (68)..(262): Homolog of NCBI NO: 26324295 NR Description: unnamed protein product [Mus musculus]
  misc_feature (43)..(262): Homolog of NCBI NO: 12834577 NR Description: unnamed protein product [Mus musculus]
  misc_feature (65)..(268): Homolog of NCBI NO: 15223842 NR Description: expressed protein [Arabidopsis thaliana]
  misc_feature (13)..(268): Homolog of NCBI NO: 25405462 NR Description: unknown protein, 90320-88994 [imported] -
  misc_feature (13)..(267): Homolog of NCBI NO: 18402817 NR Description: expressed protein [Arabidopsis thaliana]
  misc_feature (3)..(268): Homolog of NCBI NO: 34897632 NR Description: hypothetical protein [Oryza sativa]
MAMARRRALALVSQILQRRVLPAPRFLSSAAGGALDRLNSPPFARQAAHRNPAPPSPWDRLGGQKRTMFIQTQSTPNPQSLMFHPGKPVMEVGSSDFPHARTAMTSPLAKALFAIEGVTRVFFGSDFVTVTKSDETSWDYLKPEVFAAIMDFYSSGQPLFLDSNTAAAMDTAIHEDDSEIVAMIKELLETRIRPAVQDDGGDIEYRGFEPETGIVKLKMQGACSGCPSSSVTLKSGIENMLMHYVPEVKGVEQEFDGDEEAELAGQME

SEQ ID NO: 64223 - protein, 266 aa, Triticum aestivum
  peptide (1)..(266): Ceres Seq. ID no. 15220566
  misc_feature (182)..(252): Pfam Name: NifU-like domain Pfam Description: NifU-like domain
  misc_feature (64)..(260): Homolog of NCBI NO: 34856373 NR Description: similar to HIRA-interacting protein 5 (mHIRIP5)
  misc_feature (64)..(258): Homolog of NCBI NO: 37681825 NR Description: HIRA interacting protein 5 [Danio rerio]
  misc_feature (66)..(260): Homolog of NCBI NO: 9910264 NR Description: histone cell cycle regulation defective
  misc_feature (41)..(260): Homolog of NCBI NO: 34500321 NR Description: NifU-like protein HIRIP5 [Mus musculus]
  misc_feature (66)..(260): Homolog of NCBI NO: 26324295 NR Description: unnamed protein product [Mus musculus]
  misc_feature (41)..(260): Homolog of NCBI NO: 12834577 NR Description: unnamed protein product [Mus musculus]
  misc_feature (63)..(266): Homolog of NCBI NO: 15223842 NR Description: expressed protein [Arabidopsis thaliana]
  misc_feature (11)..(266): Homolog of NCBI NO: 25405462 NR Description: unknown protein, 90320-88994 [imported] -
  misc_feature (11)..(265): Homolog of NCBI NO: 18402817 NR Description: expressed protein [Arabidopsis thaliana]
  misc_feature (1)..(266): Homolog of NCBI NO: 34897632 NR Description: hypothetical protein [Oryza sativa]
MARRRALALVSQILQRRVLPAPRFLSSAAGGALDRLNSPPFARQAAHRNPAPPSPWDRLGGQKRTMFIQTQSTPNPQSLMFHPGKPVMEVGSSDFPHARTAMTSPLAKALFAIEGVTRVFFGSDFVTVTKSDETSWDYLKPEVFAAIMDFYSSGQPLFLDSNTAAAMDTAIHEDDSEIVAMIKELLETRIRPAVQDDGGDIEYRGFEPETGIVKLKMQGACSGCPSSSVTLKSGIENMLMHYVPEVKGVEQEFDGDEEAELAGQME

SEQ ID NO: 64224 - DNA, 1408 bp, Triticum aestivum
  misc_feature (1)..(1408): Ceres Seq. ID no. 13598248
gccattccccagccaccaccgaacccgaaagcccatccacccacccggaccgggcgacgaccggggcggaggcggcggcggcggatcgagggacggacggacggatgggcggcggcgggcagtaggacggcggcgggacgcggcgggacgcggcggcaccaccatgtctgcggtagtctgcggcaagaggtcctcctccatcttcgcggacgacctgctgctccaacaggcctcctcttcccctccctcctcccaccacagcagccccgcggccaagaggtcccgctacgcgcaccaccaccaccgccgggacggccgggacgcgctcctcaaccacctccgggccgccttccccgccatggacccccagctgcttgagagagcccttgaagcgtctggagatgatttggatgatgcaataaagagtctgaaggagctgcacctgatggagtcaaatcaggctaacctgtcggccactggttccgcattkgaaaacgggccgactgcagttcagccgtctgttgaaggcattgttaccagcggcggtgtggacacagctactgaacaccaacctcctgcagatggccaacagccaggtaatagtggccctgaatgggttgatctttttgtgagggagatgtcaaatgcttctgacatggatgacgcgcgggcccgtgcgtcaagagctcttgaagccttgacgaagtccatcctggagggtgcaggagctgaagcagcgcagagcttgcatcaggaaaacatgatgctcaaggagcagatgacggccgtcctgtcgcagaacgcggtcctgaagcgcgcggtggcgatccagcacgagcggcagaaggagttcgacgagcggagccacgaggtgcagggcctgaagcagctcgtcctgcagtaccaggagcagctgaggactctcgagatcaacaactacgcgctgcagatgcatctgaagcaggcccagcagagcagctccatgcccgggcgctacaacccggacgtcttctaatttggcctcagggcgatgatgatgagccctggcccttggggattgagagttgagactagtggtgccctgccgtatgatgatgatgaagatgactagaaaatgttgttgtctgggatagttgggtggatgttggtttgctgaccaccccgttggccgtgggatggggcgcaaggctcccatgatagatcatgtgttggttcaaacgtgtcgcgtttaaacgatttttcgtatttgatatatacacaaaacaatcccgattctttgcatgattgtcattcagtcaaaaaaaaaaaaaaaaaaaaaaaaaaaaaaaaaaaaaaaaaaaaaaaaaaaaaaaagaaaaaaaaaaaaaaaaaagcttatcrataccgtcracctcragggggggcccgg

SEQ ID NO: 64225 - protein, 337 aa, Triticum aestivum
  peptide (1)..(337): Ceres Seq. ID no. 15222276
  misc_feature (55)..(175): Homolog of NCBI NO: 35215037 NR Description: hypothetical protein [Oryza sativa (japonica
  misc_feature (202)..(337): Homolog of NCBI NO: 15241851 NR Description: hypothetical protein [Arabidopsis thaliana]
  misc_feature (186)..(244): Homolog of NCBI NO: 35215036 NR Description: hypothetical protein [Oryza sativa (japonica
  misc_feature (277)..(337): Homolog of NCBI NO: 35215036 NR Description: hypothetical protein [Oryza sativa (japonica
  misc_feature (149)..(337): Homolog of NCBI NO: 18412607 NR Description: expressed protein [Arabidopsis thaliana]
  misc_feature (55)..(337): Homolog of NCBI NO: 34015166 NR Description: hypothetical protein OSJNBa0017M13.20
  misc_feature (77)..(337): Homolog of NCBI NO: 13877755 NR Description: unknown protein [Arabidopsis thaliana]
  misc_feature (77)..(337): Homolog of NCBI NO: 18421340 NR Description: expressed protein [Arabidopsis thaliana]
  misc_feature (163)..(163): Xaa is any aa, unknown or other
PFPSHHRTRKPIHPPGPGDDRGGGGGGGSRDGRTDGRRRAVGRRRDAAGRGGTTMSAVVCGKRSSSIFADDLLLQQASSSPPSSHHSSPAAKRSRYAHHHHRRDGRDALLNHLRAAFPAMDPQLLERALEASGDDLDDAIKSLKELHLMESNQANLSATGSAXENGPTAVQPSVEGIVTSGGVDTATEHQPPADGQQPGNSGPEWVDLFVREMSNASDMDDARARASRALEALTKSILEGAGAEAAQSLHQENMMLKEQMTAVLSQNAVLKRAVAIQHERQKEFDERSHEVQGLKQLVLQYQEQLRTLEINNYALQMHLKQAQQSSSMPGRYNPDVF

SEQ ID NO: 64226 - protein, 283 aa, Triticum aestivum
  peptide (1)..(283): Ceres Seq. ID no. 15222277
  misc_feature (1)..(121): Homolog of NCBI NO: 35215037 NR Description: hypothetical protein [Oryza sativa (japonica
  misc_feature (148)..(283): Homolog of NCBI NO: 15241851 NR Description: hypothetical protein [Arabidopsis thaliana]
  misc_feature (132)..(190): Homolog of NCBI NO: 35215036 NR Description: hypothetical protein [Oryza sativa (japonica
  misc_feature (223)..(283): Homolog of NCBI NO: 35215036 NR Description: hypothetical protein [Oryza sativa (japonica
  misc_feature (95)..(283): Homolog of NCBI NO: 18412607 NR Description: expressed protein [Arabidopsis thaliana]
  misc_feature (1)..(283): Homolog of NCBI NO: 34015166 NR Description: hypothetical protein OSJNBa0017M13.20
  misc_feature (23)..(283): Homolog of NCBI NO: 13877755 NR Description: unknown protein [Arabidopsis thaliana]
  misc_feature (23)..(283): Homolog of NCBI NO: 18421340 NR Description: expressed protein [Arabidopsis thaliana]
  misc_feature (109)..(109): Xaa is any aa, unknown or other
MSAVVCGKRSSSIFADDLLLQQASSSPPSSHHSSPAAKRSRYAHHHHRRDGRDALLNHLRAAFPAMDPQLLERALEASGDDLDDAIKSLKELHLMESNQANLSATGSAXENGPTAVQPSVEGIVTSGGVDTATEHQPPADGQQPGNSGPEWVDLFVREMSNASDMDDARARASRALEALTKSILEGAGAEAAQSLHQENMMLKEQMTAVLSQNAVLKRAVAIQHERQKEFDERSHEVQGLKQLVLQYQEQLRTLEINNYALQMHLKQAQQSSSMPGRYNPDVF

SEQ ID NO: 64227 - protein, 218 aa, Triticum aestivum
  peptide (1)..(218): Ceres Seq. ID no. 15222278
  misc_feature (1)..(56): Homolog of NCBI NO: 35215037 NR Description: hypothetical protein [Oryza sativa (japonica
  misc_feature (83)..(218): Homolog of NCBI NO: 15241851 NR Description: hypothetical protein [Arabidopsis thaliana]
  misc_feature (67)..(125): Homolog of NCBI NO: 35215036 NR Description: hypothetical protein [Oryza sativa (japonica
  misc_feature (158)..(218): Homolog of NCBI NO: 35215036 NR Description: hypothetical protein [Oryza sativa (japonica
  misc_feature (30)..(218): Homolog of NCBI NO: 18412607 NR Description: expressed protein [Arabidopsis thaliana]
  misc_feature (1)..(218): Homolog of NCBI NO: 34015166 NR Description: hypothetical protein OSJNBa0017M13.20
  misc_feature (1)..(218): Homolog of NCBI NO: 13877755 NR Description: unknown protein [Arabidopsis thaliana]
  misc_feature (1)..(218): Homolog of NCBI NO: 18421340 NR Description: expressed protein [Arabidopsis thaliana]
  misc_feature (44)..(44): Xaa is any aa, unknown or other
MDPQLLERALEASGDDLDDAIKSLKELHLMESNQANLSATGSAXENGPTAVQPSVEGIVTSGGVDTATEHQPPADGQQPGNSGPEWVDLFVREMSNASDMDDARARASRALEALTKSILEGAGAEAAQSLHQENMMLKEQMTAVLSQNAVLKRAVAIQHERQKEFDERSHEVQGLKQLVLQYQEQLRTLEINNYALQMHLKQAQQSSSMPGRYNPDVF

SEQ ID NO: 64228 - DNA, 1628 bp, Triticum aestivum
  misc_feature (1)..(1628): Ceres Seq. ID no. 14313518
cactaggaacaaaaagaaaaaagaaaaagaggaaggaaggaaaaaatctcccggggcgcaagcaaacgtgacgccacgcctcactccggccttcgtcgtcctcctcttcctccccccactttccccacaatagtttggcgatcgctcgctgccgccgccgcgaccgcgactgaagcctctgctccgctccgctccgctcgccgctggaagatggagcctgaccagagtggcaccgggcagacttctccccgtgggaacgactgggaggtcgtgcagctcaccgcgtcgaactacgcgtctgcgcctggcccggctagaactgaaccttctgacgaggagtctgaaggccaagtgtatggcgcagaagggggtgattcggcagccgcggcactgctgatgtctggccacttctcggttccgcagaatgaggctgagaatctcctcatgggagctgatactagcatagagcagcaggaggcgcgcggcagccagtacgcagtctctgacaagggtgatgatggtgatagggaggaagacccgcaggagaaactgaaggatgatgttcttgacaggatcccgtccttcgacaaagggaaaagcctttcctctgttgatatggaacctgatgatggcagcgagttgcacaggggtagtctggttggaaaagacccagttacgttctcatcctctgtttacaatgcaactgacgctgagaaagaagctaccgagagtgccaaggagaagactgaagaaagtccaactctccaaaatattgaccctgtcactgattcgtccaatattgttgcttccggtgacgagagcaagcctgacggttctggagccccacgcaatgcatggtggcagaagcaacttatatcgctctacaggagcgctaaagagagcaacaagctctggcctatcgttgtggctgctgctgctctgatggggatggcgtatttccggcggcgctggcagaagggcaagctgcagcttcagcaggtcaaattgcaacctgccagcagcaaggaggtaatcgtgggacgccttccttttgatcatactagccaaattttccatgcaactgaacagactagtttggcctgaaattcagagaatcaaccaggccaccgtaccgcttaaccgaatcaaggacattcttgtcgccggcaaccacccgagtccggctcctcacggaaatgctcgattgggctgatgatgataaccatcccgcctgacggatgatgtatcctgaaactagtgtatgcaatggagaaatagccgatgccgcagaacgtatgggcgtttatgcgtgctggctgtgtaattaaaccccaaaactcctcctgggcatgtaaatatacacgagttttgtgtggttgctttccctcctttggaagaactctctccttggccaggttcagtgtgctgctgcttcagtttgtcggccactgtaacttcttccgttgctcccgtggatattttttatctgtcttgttgcgggttgcagtttgtcaggttgtcggccgatatatacacgatgaacttatgatattattgggtgccgaatttttggtttgtgttaaaggaaattttagcctatatatagttgagattacatttgggtccac

SEQ ID NO: 64229 - protein, 297 aa, Triticum aestivum
  peptide (1)..(297): Ceres Seq. ID no. 14313519
  misc_feature (203)..(271): Homolog of NCBI NO: 1808686 NR Description: hypothetical protein [Sporobolus stapfianus]
  misc_feature (9)..(99): Homolog of NCBI NO: 1808686 NR Description: hypothetical protein [Sporobolus stapfianus]
  misc_feature (2)..(153): Homolog of NCBI NO: 10241633 NR Description: hypothetical protein [Oryza sativa (indica
  misc_feature (4)..(271): Homolog of NCBI NO: 38346457 NR Description: OSJNBa0019G23.5 [Oryza sativa (japonica
  misc_feature (212)..(296): Homolog of NCBI NO: 21553358 NR Description: unknown [Arabidopsis thaliana]
  misc_feature (212)..(296): Homolog of NCBI NO: 18406940 NR Description: expressed protein [Arabidopsis thaliana]
  misc_feature (13)..(101): Homolog of NCBI NO: 21553358 NR Description: unknown [Arabidopsis thaliana]
  misc_feature (13)..(101): Homolog of NCBI NO: 18406940 NR Description: expressed protein [Arabidopsis thaliana]
  misc_feature (212)..(279): Homolog of NCBI NO: 7486469 NR Description: hypothetical protein At2g45980 [imported] -
  misc_feature (13)..(101): Homolog of NCBI NO: 7486469 NR Description: hypothetical protein At2g45980 [imported] -
MEPDQSGTGQTSPRGNDWEVVQLTASNYASAPGPARTEPSDEESEGQVYGAEGGDSAAAALLMSGHFSVPQNEAENLLMGADTSIEQQEARGSQYAVSDKGDDGDREEDPQEKLKDDVLDRIPSFDKGKSLSSVDMEPDDGSELHRGSLVGKDPVTFSSSVYNATDAEKEATESAKEKTEESPTLQNIDPVTDSSNIVASGDESKPDGSGAPRNAWWQKQLISLYRSAKESNKLWPIVVAAAALMGMAYFRRRWQKGKLQLQQVKLQPASSKEVIVGRLPFDHTSQIFHATEQTSLA

SEQ ID NO: 64230 - protein, 235 aa, Triticum aestivum
  peptide (1)..(235): Ceres Seq. ID no. 14313520
  misc_feature (141)..(209): Homolog of NCBI NO: 1808686 NR Description: hypothetical protein [Sporobolus stapfianus]
  misc_feature (1)..(37): Homolog of NCBI NO: 1808686 NR Description: hypothetical protein [Sporobolus stapfianus]
  misc_feature (1)..(91): Homolog of NCBI NO: 10241633 NR Description: hypothetical protein [Oryza sativa (indica
  misc_feature (1)..(209): Homolog of NCBI NO: 38346457 NR Description: OSJNBa0019G23.5 [Oryza sativa (japonica
  misc_feature (150)..(234): Homolog of NCBI NO: 21553358 NR Description: unknown [Arabidopsis thaliana]
  misc_feature (150)..(234): Homolog of NCBI NO: 18406940 NR Description: expressed protein [Arabidopsis thaliana]
  misc_feature (1)..(39): Homolog of NCBI NO: 21553358 NR Description: unknown [Arabidopsis thaliana]
  misc_feature (1)..(39): Homolog of NCBI NO: 18406940 NR Description: expressed protein [Arabidopsis thaliana]
  misc_feature (150)..(217): Homolog of NCBI NO: 7486469 NR Description: hypothetical protein At2g45980 [imported] -
  misc_feature (1)..(39): Homolog of NCBI NO: 7486469 NR Description: hypothetical protein At2g45980 [imported] -
MSGHFSVPQNEAENLLMGADTSIEQQEARGSQYAVSDKGDDGDREEDPQEKLKDDVLDRIPSFDKGKSLSSVDMEPDDGSELHRGSLVGKDPVTFSSSVYNATDAEKEATESAKEKTEESPTLQNIDPVTDSSNIVASGDESKPDGSGAPRNAWWQKQLISLYRSAKESNKLWPIVVAAAALMGMAYFRRRWQKGKLQLQQVKLQPASSKEVIVGRLPFDHTSQIFHATEQTSLA

SEQ ID NO: 64231 - protein, 219 aa, Triticum aestivum
  peptide (1)..(219): Ceres Seq. ID no. 14313521
  misc_feature (125)..(193): Homolog of NCBI NO: 1808686 NR Description: hypothetical protein [Sporobolus stapfianus]
  misc_feature (1)..(21): Homolog of NCBI NO: 1808686 NR Description: hypothetical protein [Sporobolus stapfianus]
  misc_feature (1)..(75): Homolog of NCBI NO: 10241633 NR Description: hypothetical protein [Oryza sativa (indica
  misc_feature (1)..(193): Homolog of NCBI NO: 38346457 NR Description: OSJNBa0019G23.5 [Oryza sativa (japonica
  misc_feature (134)..(218): Homolog of NCBI NO: 21553358 NR Description: unknown [Arabidopsis thaliana]
  misc_feature (134)..(218): Homolog of NCBI NO: 18406940 NR Description: expressed protein [Arabidopsis thaliana]
  misc_feature (1)..(23): Homolog of NCBI NO: 21553358 NR Description: unknown [Arabidopsis thaliana]
  misc_feature (1)..(23): Homolog of NCBI NO: 18406940 NR Description: expressed protein [Arabidopsis thaliana]
  misc_feature (134)..(201): Homolog of NCBI NO: 7486469 NR Description: hypothetical protein At2g45980 [imported] -
  misc_feature (1)..(23): Homolog of NCBI NO: 7486469 NR Description: hypothetical protein At2g45980 [imported] -
MGADTSIEQQEARGSQYAVSDKGDDGDREEDPQEKLKDDVLDRIPSFDKGKSLSSVDMEPDDGSELHRGSLVGKDPVTFSSSVYNATDAEKEATESAKEKTEESPTLQNIDPVTDSSNIVASGDESKPDGSGAPRNAWWQKQLISLYRSAKESNKLWPIVVAAAALMGMAYFRRRWQKGKLQLQQVKLQPASSKEVIVGRLPFDHTSQIFHATEQTSLA

SEQ ID NO: 64232 - DNA, 767 bp, Triticum aestivum
  misc_feature (1)..(767): Ceres Seq. ID no. 13655675
aagagaatggagaacagggtaatattacaggaatggtttgaccgcgttgactcggagaaaagtggaagcataacagcggtacagctgaagactgctcttgctgtgggcaacctggaatttccgctctcagttgttcagcaaatgatcaggatgtacgatttcgacaggaatggtactatgagctttcaagaatttgttgcactcaacaacttccttcttaaggttcaacatgcattttctgatctagagaggggtcgtggttttcttgtacctgatgatgtatttgaggctttgggaaaaattggtttcatgctggattctcctgctttttactctgtctgcgagagctttgatcaaagtaaaaatgggaggtttcggctggatgacttaatatcaatctgtatattcttacaatcagcacggaacctatttaattcatttgatacagctaaacaaggcagagttactctcgatctgaatcaatttgtctattgtactgccaattgcagaatatgattcaactatatgacggtttgagaagatgattcacaaatactgcactttgtaataccataaagtcatcttagagtaagttaagttgtgatggtgttgtataagatgaaaacatctcgggtttggatactatttgtcatctgtctgcaaaatactgtggttttttttttctttccagatgatgtaattttgtttataaaacgtaagttgttataaaacatcttgagttatgataacttgtgaagttgattccg

SEQ ID NO: 64233 - protein, 171 aa, Triticum aestivum
  peptide (1)..(171): Ceres Seq. ID no. 13655676
  misc_feature (13)..(163): Homolog of NCBI NO: 7019485 NR Description: programmed cell death 6; apoptosis-linked gene 2
  misc_feature (10)..(169): Homolog of NCBI NO: 19921976 NR Description: CG17765-PA [Drosophila melanogaster]
  misc_feature (12)..(168): Homolog of NCBI NO: 6912582 NR Description: PEF protein with a long N-terminal hydrophobic
  misc_feature (9)..(144): Homolog of NCBI NO: 17508397 NR Description: EF hand calcium binding protein [Caenorhabditis
  misc_feature (13)..(163): Homolog of NCBI NO: 8745027 NR Description: probable possible programmed cell death protein,
  misc_feature (3)..(163): Homolog of NCBI NO: 28277280 NR Description: Similar to programmed cell death 6 [Xenopus
  misc_feature (9)..(163): Homolog of NCBI NO: 3024652 NR Description: Sorcin
  misc_feature (13)..(168): Homolog of NCBI NO: 31418801 NR Description: Unknown (protein for MGC:63952) [Danio rerio]
  misc_feature (9)..(163): Homolog of NCBI NO: 39595321 NR Description: Hypothetical protein CBG03955 [Caenorhabditis
  misc_feature (1)..(163): Homolog of NCBI NO: 8745028 NR Description: probable possible programmed cell death protein,
KRMENRVILQEWFDRVDSEKSGSITAVQLKTALAVGNLEFPLSVVQQMIRMYDFDRNGTMSFQEFVALNNFLLKVQHAFSDLERGRGFLVPDDVFEALGKIGFMLDSPAFYSVCESFDQSKNGRFRLDDLISICIFLQSARNLFNSFDTAKQGRVTLDLNQFVYCTANCRI

SEQ ID NO: 64234 - protein, 169 aa, Triticum aestivum
  peptide (1)..(169): Ceres Seq. ID no. 13655677
  misc_feature (11)..(161): Homolog of NCBI NO: 7019485 NR Description: programmed cell death 6; apoptosis-linked gene 2
  misc_feature (8)..(167): Homolog of NCBI NO: 19921976 NR Description: CG17765-PA [Drosophila melanogaster]
  misc_feature (10)..(166): Homolog of NCBI NO: 6912582 NR Description: PEF protein with a long N-terminal hydrophobic
  misc_feature (7)..(142): Homolog of NCBI NO: 17508397 NR Description: EF hand calcium binding protein [Caenorhabditis
  misc_feature (11)..(161): Homolog of NCBI NO: 8745027 NR Description: probable possible programmed cell death protein,
  misc_feature (1)..(161): Homolog of NCBI NO: 28277280 NR Description: Similar to programmed cell death 6 [Xenopus
  misc_feature (7)..(161): Homolog of NCBI NO: 3024652 NR Description: Sorcin
  misc_feature (11)..(166): Homolog of NCBI NO: 31418801 NR Description: Unknown (protein for MGC:63952) [Danio rerio]
  misc_feature (7)..(161): Homolog of NCBI NO: 39595321 NR Description: Hypothetical protein CBG03955 [Caenorhabditis
  misc_feature (1)..(161): Homolog of NCBI NO: 8745028 NR Description: probable possible programmed cell death protein,
MENRVILQEWFDRVDSEKSGSITAVQLKTALAVGNLEFPLSVVQQMIRMYDFDRNGTMSFQEFVALNNFLLKVQHAFSDLERGRGFLVPDDVFEALGKIGFMLDSPAFYSVCESFDQSKNGRFRLDDLISICIFLQSARNLFNSFDTAKQGRVTLDLNQFVYCTANCRI

SEQ ID NO: 64235 - protein, 124 aa, Triticum aestivum
  peptide (1)..(124): Ceres Seq. ID no. 13655678
  misc_feature (1)..(116): Homolog of NCBI NO: 7019485 NR Description: programmed cell death 6; apoptosis-linked gene 2
  misc_feature (1)..(122): Homolog of NCBI NO: 19921976 NR Description: CG17765-PA [Drosophila melanogaster]
  misc_feature (1)..(121): Homolog of NCBI NO: 6912582 NR Description: PEF protein with a long N-terminal hydrophobic
  misc_feature (1)..(97): Homolog of NCBI NO: 17508397 NR Description: EF hand calcium binding protein [Caenorhabditis
  misc_feature (1)..(116): Homolog of NCBI NO: 8745027 NR Description: probable possible programmed cell death protein,
  misc_feature (1)..(116): Homolog of NCBI NO: 28277280 NR Description: Similar to programmed cell death 6 [Xenopus
  misc_feature (1)..(116): Homolog of NCBI NO: 3024652 NR Description: Sorcin
  misc_feature (1)..(121): Homolog of NCBI NO: 31418801 NR Description: Unknown (protein for MGC:63952) [Danio rerio]
  misc_feature (1)..(116): Homolog of NCBI NO: 39595321 NR Description: Hypothetical protein CBG03955 [Caenorhabditis
  misc_feature (1)..(116): Homolog of NCBI NO: 8745028 NR Description: probable possible programmed cell death protein,
MIRMYDFDRNGTMSFQEFVALNNFLLKVQHAFSDLERGRGFLVPDDVFEALGKIGFMLDSPAFYSVCESFDQSKNGRFRLDDLISICIFLQSARNLFNSFDTAKQGRVTLDLNQFVYCTANCRI

SEQ ID NO: 64236 - DNA, 1633 bp, Triticum aestivum
  misc_feature (1)..(1633): Ceres Seq. ID no. 13542155
tacctagaacatcctaatcgaaaacccgacttcactccccctcccccctcccccatcctctcctcgtagtctccgccggacgccgacgcccgccccctacctgcggcgaaaccccaggcgcggcggcggcggcgggacctgctcagatccgatgggggcgacggagccgcagtgggtgctgatggccacggggcggtcgccgaccaacatcgcggtgatcaagtactgggggaagcgggacgagacgctcatcctccccgtcaacgacagcatcagcgtcaccctcgaccccgaccacctctccgccaccaccaccgtcgctgccagcccctcattcccatccgaccgcatgtggctcaacggcaaggagatcgcgttgtcgggcgggagattccagagctgcctgagggagatacggaagcgggctcgtgatgtcgaggacgagaaaaaggggatcaagatcaagaaagaggactgggaaaagttgcatgtccacatagcatcctacaacaacttcccaaccgctgccggtttggcctcttcggccgctggccttgcttgtcttgttttcaccctgggaaagctaatgaacgtgaatgaagattacggagaactttcttcaatagcaaggcaggggtctggaagtgcatgccgcagtatatatggtggatttgtgaaatggtgtatgggaaaaaatgatgacggaagtgacagcatggcagtacagcttgctgacgagtcacattgggatgatcttgttataatcatagcagtggtcagttcaaagcagaaggaaaccagtagcaccagtgggatgcgagacactgtcgaaacaagccccctcttgcagtacagggcccagactgtagtgccaagtcggatattgaaaatggaagatgctatcaagaatcgtgattttgaatccttcgccaggttaacttgtgccgatagcaaccagtttcatgctgtatgtttggacacgagtcctcccatcttctacatgaacgacacatcacacaggataattagccttgtggaaaagtggaaccactcggaaggaacaccacaggttgcctacacatttgatgctgggcctaacgctgtcctaatagcacggaaccgcaaaactgccacccttctccttcagaggctcttatacactttccccccacagaagaatgacttggacagctatatgctcggcgataaatcgatcctaagcgacgctggtttgcaatccatagccgatgtcgaggcccttccagcgcctccagagatgaaagctccaaaccaaaaattcaaaggcgatgttagctacttcatctgtagcaggcctggggccggcccaaaagttctcaccgatgagagccacgccttgattgattcagccacggggcttgcgaaaggagtgtaattttgaacgacgataggtttccataacagtctttggttgagattaatgtagaattgtcacgttgttgtacactcagtactttcgtcattttgatcttgtactgtaccttcgatcttgtactatttccatcattttgtccctgactgttgtagcctcttaaagaacatgtatatttcttcaataaaagttcgtggaaygaattatcattttatcgatccc

SEQ ID NO: 64237 - protein, 420 aa, Triticum aestivum
  peptide (1)..(420): Ceres Seq. ID no. 15220498
  misc_feature (1)..(410): Homolog of NCBI NO: 13592005 NR Description: mevalonate pyrophosphate decarboxylase [Rattus
  misc_feature (1)..(416): Homolog of NCBI NO: 26354448 NR Description: unnamed protein product [Mus musculus]
  misc_feature (1)..(416): Homolog of NCBI NO: 20149736 NR Description: mevalonate (diphospho) decarboxylase
  misc_feature (13)..(416): Homolog of NCBI NO: 39645379 NR Description: Unknown (protein for IMAGE:5307745) [Silurana
  misc_feature (11)..(418): Homolog of NCBI NO: 21593039 NR Description: mevalonate diphosphate decarboxylase [Arabidopsis
  misc_feature (3)..(418): Homolog of NCBI NO: 11281655 NR Description: diphosphomevalonate decarboxylase (EC 4.1.1.33)
  misc_feature (5)..(418): Homolog of NCBI NO: 15224931 NR Description: mevalonate diphosphate decarboxylase [Arabidopsis
  misc_feature (3)..(418): Homolog of NCBI NO: 21593243 NR Description: diphosphomevalonate decarboxylase-like protein
  misc_feature (3)..(418): Homolog of NCBI NO: 18410026 NR Description: mevalonate diphosphate decarboxylase, putative
  misc_feature (8)..(418): Homolog of NCBI NO: 16417950 NR Description: mevalonate disphosphate decarboxylase [Hevea
MGATEPQWVLMATGRSPTNIAVIKYWGKRDETLILPVNDSISVTLDPDHLSATTTVAASPSFPSDRMWLNGKEIALSGGRFQSCLREIRKRARDVEDEKKGIKIKKEDWEKLHVHIASYNNFPTAAGLASSAAGLACLVFTLGKLMNVNEDYGELSSIARQGSGSACRSIYGGFVKWCMGKNDDGSDSMAVQLADESHWDDLVIIIAVVSSKQKETSSTSGMRDTVETSPLLQYRAQTVVPSRILKMEDAIKNRDFESFARLTCADSNQFHAVCLDTSPPIFYMNDTSHRIISLVEKWNHSEGTPQVAYTFDAGPNAVLIARNRKTATLLLQRLLYTFPPQKNDLDSYMLGDKSILSDAGLQSIADVEALPAPPEMKAPNQKFKGDVSYFICSRPGAGPKVLTDESHALIDSATGLAKGV

SEQ ID NO: 64238 - protein, 410 aa, Triticum aestivum
  peptide (1)..(410): Ceres Seq. ID no. 15220499
  misc_feature (1)..(400): Homolog of NCBI NO: 13592005 NR Description: mevalonate pyrophosphate decarboxylase [Rattus
  misc_feature (1)..(406): Homolog of NCBI NO: 26354448 NR Description: unnamed protein product [Mus musculus]
  misc_feature (1)..(406): Homolog of NCBI NO: 20149736 NR Description: mevalonate (diphospho) decarboxylase
  misc_feature (3)..(406): Homolog of NCBI NO: 39645379 NR Description: Unknown (protein for IMAGE:5307745) [Silurana
  misc_feature (1)..(408): Homolog of NCBI NO: 21593039 NR Description: mevalonate diphosphate decarboxylase [Arabidopsis
  misc_feature (1)..(408): Homolog of NCBI NO: 11281655 NR Description: diphosphomevalonate decarboxylase (EC 4.1.1.33)
  misc_feature (1)..(408): Homolog of NCBI NO: 15224931 NR Description: mevalonate diphosphate decarboxylase [Arabidopsis
  misc_feature (1)..(408): Homolog of NCBI NO: 21593243 NR Description: diphosphomevalonate decarboxylase-like protein
  misc_feature (1)..(408): Homolog of NCBI NO: 18410026 NR Description: mevalonate diphosphate decarboxylase, putative
  misc_feature (1)..(408): Homolog of NCBI NO: 16417950 NR Description: mevalonate disphosphate decarboxylase [Hevea
MATGRSPTNIAVIKYWGKRDETLILPVNDSISVTLDPDHLSATTTVAASPSFPSDRMWLNGKEIALSGGRFQSCLREIRKRARDVEDEKKGIKIKKEDWEKLHVHIASYNNFPTAAGLASSAAGLACLVFTLGKLMNVNEDYGELSSIARQGSGSACRSIYGGFVKWCMGKNDDGSDSMAVQLADESHWDDLVIIIAVVSSKQKETSSTSGMRDTVETSPLLQYRAQTVVPSRILKMEDAIKNRDFESFARLTCADSNQFHAVCLDTSPPIFYMNDTSHRIISLVEKWNHSEGTPQVAYTFDAGPNAVLIARNRKTATLLLQRLLYTFPPQKNDLDSYMLGDKSILSDAGLQSIADVEALPAPPEMKAPNQKFKGDVSYFICSRPGAGPKVLTDESHALIDSATGLAKGV

SEQ ID NO: 64239 - protein, 354 aa, Triticum aestivum
  peptide (1)..(354): Ceres Seq. ID no. 15220500
  misc_feature (1)..(344): Homolog of NCBI NO: 13592005 NR Description: mevalonate pyrophosphate decarboxylase [Rattus
  misc_feature (1)..(350): Homolog of NCBI NO: 26354448 NR Description: unnamed protein product [Mus musculus]
  misc_feature (1)..(350): Homolog of NCBI NO: 20149736 NR Description: mevalonate (diphospho) decarboxylase
  misc_feature (1)..(350): Homolog of NCBI NO: 39645379 NR Description: Unknown (protein for IMAGE:5307745) [Silurana
  misc_feature (1)..(352): Homolog of NCBI NO: 21593039 NR Description: mevalonate diphosphate decarboxylase [Arabidopsis
  misc_feature (1)..(352): Homolog of NCBI NO: 11281655 NR Description: diphosphomevalonate decarboxylase (EC 4.1.1.33)
  misc_feature (1)..(352): Homolog of NCBI NO: 15224931 NR Description: mevalonate diphosphate decarboxylase [Arabidopsis
  misc_feature (1)..(352): Homolog of NCBI NO: 21593243 NR Description: diphosphomevalonate decarboxylase-like protein
  misc_feature (1)..(352): Homolog of NCBI NO: 18410026 NR Description: mevalonate diphosphate decarboxylase, putative
  misc_feature (1)..(352): Homolog of NCBI NO: 16417950 NR Description: mevalonate disphosphate decarboxylase [Hevea
MWLNGKEIALSGGRFQSCLREIRKRARDVEDEKKGIKIKKEDWEKLHVHIASYNNFPTAAGLASSAAGLACLVFTLGKLMNVNEDYGELSSIARQGSGSACRSIYGGFVKWCMGKNDDGSDSMAVQLADESHWDDLVIIIAVVSSKQKETSSTSGMRDTVETSPLLQYRAQTVVPSRILKMEDAIKNRDFESFARLTCADSNQFHAVCLDTSPPIFYMNDTSHRIISLVEKWNHSEGTPQVAYTFDAGPNAVLIARNRKTATLLLQRLLYTFPPQKNDLDSYMLGDKSILSDAGLQSIADVEALPAPPEMKAPNQKFKGDVSYFICSRPGAGPKVLTDESHALIDSATGLAKGV

SEQ ID NO: 64240 - DNA, 657 bp, Triticum aestivum
  misc_feature (1)..(657): Ceres Seq. ID no. 15173170
actgcactctactctactccatcttcttgctctgcactacgccaccacctggtcagtcaagagaaggaaagatgcctagcgcggggctggaggcggggtcgaacaaggtggacgtggccatcgacctcgggaacccgctgctcaaccgcaccgtcgacggcttcctcaagatcggcgccgtcggcgcctgcagggtggtcgccgaggacgccttcgactgcatccacaggggggatatctcgaagcgccagcttgaagagtcgctgaagaaaatgtgcaaggagggtgcatattggggtgctgttgctggggtgtatgtaggcatggagtatggagtggaaagggcccgtggtgaccgtgactggaaaaatgcgttgatagcaggcattgcaaccggtgccctggtctctgctgctaccaacaacaaagggaacaagatcgcccaggacgccatcacaggaggcgccatcgcgaccgccgtcgagttcatcaactacctcacctagccgtgaggccatccatattcgcggcgatgtttttattggacaagactgaataagaacttcttcactgaagccatccaccctttgtgttaataattggagccgtttcctccaatgttcttccattttattttatttttgttgcctgcgttcg

SEQ ID NO: 64241 - protein, 167 aa, Triticum aestivum
  peptide (1)..(167): Ceres Seq. ID no. 15173171
  misc_feature (39)..(167): Pfam Name: Tim17/Tim22/Tim23 family Pfam Description: Tim17/Tim22/Tim23 family
  misc_feature (41)..(71): Homolog of NCBI NO: 18414605 NR Description: pore protein homolog [Arabidopsis thaliana]
  misc_feature (122)..(167): Homolog of NCBI NO: 34906056 NR Description: P0698H10.23 [Oryza sativa (japonica
  misc_feature (76)..(164): Homolog of NCBI NO: 30683558 NR Description: pore protein homolog [Arabidopsis thaliana]
  misc_feature (76)..(164): Homolog of NCBI NO: 18414605 NR Description: pore protein homolog [Arabidopsis thaliana]
  misc_feature (40)..(71): Homolog of NCBI NO: 16555405 NR Description: stress-inducible membrane pore protein [Bromus
  misc_feature (76)..(164): Homolog of NCBI NO: 16555405 NR Description: stress-inducible membrane pore protein [Bromus
  misc_feature (24)..(164): Homolog of NCBI NO: 15226998 NR Description: membrane channel protein -related [Arabidopsis
  misc_feature (24)..(164): Homolog of NCBI NO: 21536521 NR Description: putative membrane channel protein [Arabidopsis
  misc_feature (24)..(167): Homolog of NCBI NO: 7488792 NR Description: core protein - garden pea
  misc_feature (24)..(167): Homolog of NCBI NO: 3758827 NR Description: amino acid selective channel protein
CTLLYSIFLLCTTPPPGQSREGKMPSAGLEAGSNKVDVAIDLGNPLLNRTVDGFLKIGAVGACRVVAEDAFDCIHRGDISKRQLEESLKKMCKEGAYWGAVAGVYVGMEYGVERARGDRDWKNALIAGIATGALVSAATNNKGNKIAQDAITGGAIATAVEFINYLT

SEQ ID NO: 64242 - protein, 144 aa, Triticum aestivum
  peptide (1)..(144): Ceres Seq. ID no. 15173172
  misc_feature (16)..(144): Pfam Name: Tim17/Tim22/Tim23 family Pfam Description: Tim17/Tim22/Tim23 family
  misc_feature (18)..(48): Homolog of NCBI NO: 18414605 NR Description: pore protein homolog [Arabidopsis thaliana]
  misc_feature (99)..(144): Homolog of NCBI NO: 34906056 NR Description: P0698H10.23 [Oryza sativa (japonica
  misc_feature (53)..(141): Homolog of NCBI NO: 30683558 NR Description: pore protein homolog [Arabidopsis thaliana]
  misc_feature (53)..(141): Homolog of NCBI NO: 18414605 NR Description: pore protein homolog [Arabidopsis thaliana]
  misc_feature (17)..(48): Homolog of NCBI NO: 16555405 NR Description: stress-inducible membrane pore protein [Bromus
  misc_feature (53)..(141): Homolog of NCBI NO: 16555405 NR Description: stress-inducible membrane pore protein [Bromus
  misc_feature (1)..(141): Homolog of NCBI NO: 15226998 NR Description: membrane channel protein -related [Arabidopsis
  misc_feature (1)..(141): Homolog of NCBI NO: 21536521 NR Description: putative membrane channel protein [Arabidopsis
  misc_feature (1)..(144): Homolog of NCBI NO: 7488792 NR Description: core protein - garden pea
  misc_feature (1)..(144): Homolog of NCBI NO: 3758827 NR Description: amino acid selective channel protein
MPSAGLEAGSNKVDVAIDLGNPLLNRTVDGFLKIGAVGACRVVAEDAFDCIHRGDISKRQLEESLKKMCKEGAYWGAVAGVYVGMEYGVERARGDRDWKNALIAGIATGALVSAATNNKGNKIAQDAITGGAIATAVEFINYLT

SEQ ID NO: 64243 - protein, 88 aa, Triticum aestivum
  peptide (1)..(88): Ceres Seq. ID no. 15173173
TALYSTPSSCSALRHHLVSQEKERCLARGWRRGRTRWTWPSTSGTRCSTAPSTASSRSAPSAPAGWSPRTPSTASTGGISRSASLKSR

SEQ ID NO: 64244 - DNA, 2213 bp, Triticum aestivum
  misc_feature (1)..(2213): Ceres Seq. ID no. 13597334
tcatcatcaccatggctcggatccaaggagaggtacgtgagtgagtgatatgctcccactcccacatcttcttctagtccacaccttcctcccccatcccctgcctggccctgctccccatttacgcgcccggtgcgtacattcatgcatgacgcacacggccatgaagaggaggaggcggcggcatggccagcctcatcatcttcacctccttgtctccctcctcctcctcctactcctcgaccgcgcttgtgcagctctaccgtcgtcgcccaagatggcaaggatccagcagcatctcgaccgcgccaacaagccagcactgcgcaccatacagagcatggacggggacaccatcgactgcgtgccccggcacaagcagcacgcgctggaccacccgctcctcaggaaccacaggatccagagcgcgccgccgagcatgcccgcctccgccaccgccaccttcagtgctagcgcggcggcgtcgggcaactccaccagcagggccagagcggcgtggcagacgtggcaccacgcgggccactgcccgaaaggcacggtgcccgtgcggcggaccaccgccgaggacgtgctgcgcggcgggcagtcgctcttccgcttcggccgcaagcggcaccgccgcgaccgtgcggcccgcgccgccaacgcccccgacgtcgtcaccggcaacggccacgagcacgcgatcgcgtacacggcggtggggcagcaggaggtgtacggcgccaaggcgaccatcaacgtctgggatccggccatccacgagaacaacggcttcagcctctcgcagctctggctgctctccggctccttcaacggctccgacctcaacagcatcgaggccgggtggcaggtcactcccactcttccatcccatttccatcccatattcttagtgatgatccatctcacttggcttgttcattaaccgttgtaccagtaacttattgcatctgcattgcacggtaaaaaatcattgagatctgcagcgcgggcacatggcgccataaatgcgtgcacatctcgactcgatagatcgattccgtttgtgtacgacggctaccatagtttaacctcttctcttcatttgaggtcaacccatccatatggagaagtactccaacttgatatagtactaccatagaagaatccatgcatgtgagaaatatatatggaatccccgcagaaaaaggaggaatatatataatgggactgtacacttggctgtagtaggagacaaaattgctccaaaaagtgctaatgagttgtggtaatggacacgctcagctcagcgctaactttggatctactccagcaacatgcatgataagcactgcatgcatgcacatgtgctgcttaatcgatctgcatgcatgaaagcttacagtttacgtttctttctagtcaggtcagccctgagctgtacggtgacagcaggcctaggctcttcacatattggacaagcgacgcgtacgaggcgacgggctgctacaacgcgctgtgcccggacttcgtgcagaccagctcccgcgtggccatcggcgccgccatctccccggtctcctccctcgctggcgagcagtacgacatgacgctcctcatctggaaggaccccaagctcggcaactggtggcttagctacggcgacgccggagcctcgcagctcgtcggctactggcccgccgagctcttcacgcacctctccggccacgccagcatggtcgagtggggcggcgaggtcgttaacaccagcccggggggcgcgcacaccgccacgcagatgggctccggcaggttcgccgccgaggggttcggccgcgccagctacttccgcaacctcgagacggtggacgccgggaacagcctcgcccccgtgtcgctcgacgccttgcagacgctggccgaggacgccggctgctacgacatcaggaaggcctacgacgagcgggacggatggggcacgcacttctactacgggggaccgggacacaacccggcctgcccctagcatagccttggggaccaaacacgtcttgctggtgtacattttgtcttgtttttcggggacttgatcgctctcacctctcagccgatcgtgatcagcaacgtcttgactaaatctagtgttagagcatctacggccggactcgaaaaatccgacctttcaaacgcccgtgcacacggggtgtctg

SEQ ID NO: 64245 - protein, 299 aa, Triticum aestivum
  peptide (1)..(299): Ceres Seq. ID no. 13597335
  misc_feature (230)..(280): Pfam Name: Arabidopsis proteins of unknown function Pfam Description: Arabidopsis proteins of unknown function
  misc_feature (166)..(288): Homolog of NCBI NO: 6573746 NR Description: F20B24.18 [Arabidopsis thaliana]
  misc_feature (79)..(280): Homolog of NCBI NO: 18406483 NR Description: expressed protein [Arabidopsis thaliana]
  misc_feature (76)..(280): Homolog of NCBI NO: 34393554 NR Description: putative carboxyl-terminal proteinase
  misc_feature (55)..(280): Homolog of NCBI NO: 27311623 NR Description: unknown protein [Arabidopsis thaliana]
  misc_feature (63)..(280): Homolog of NCBI NO: 15241244 NR Description: expressed protein [Arabidopsis thaliana]
  misc_feature (55)..(280): Homolog of NCBI NO: 15222707 NR Description: expressed protein [Arabidopsis thaliana]
  misc_feature (67)..(280): Homolog of NCBI NO: 34393299 NR Description: putative DD1A protein [Oryza sativa (japonica
  misc_feature (56)..(280): Homolog of NCBI NO: 21593294 NR Description: putative carboxyl-terminal peptidase [Arabidopsis
  misc_feature (56)..(280): Homolog of NCBI NO: 18400044 NR Description: expressed protein [Arabidopsis thaliana]
  misc_feature (73)..(280): Homolog of NCBI NO: 15238835 NR Description: expressed protein [Arabidopsis thaliana]
MLPLPHLLLVHTFLPHPLPGPAPHLRARCVHSCMTHTAMKRRRRRHGQPHHLHLLVSLLLLLLLDRACAALPSSPKMARIQQHLDRANKPALRTIQSMDGDTIDCVPRHKQHALDHPLLRNHRIQSAPPSMPASATATFSASAAASGNSTSRARAAWQTWHHAGHCPKGTVPVRRTTAEDVLRGGQSLFRFGRKRHRRDRAARAANAPDVVTGNGHEHAIAYTAVGQQEVYGAKATINVWDPAIHENNGFSLSQLWLLSGSFNGSDLNSIEAGWQVTPTLPSHFHPIFLVMIHLTWLVH

SEQ ID NO: 64246 - protein, 266 aa, Triticum aestivum
  peptide (1)..(266): Ceres Seq. ID no. 13597336
  misc_feature (197)..(247): Pfam Name: Arabidopsis proteins of unknown function Pfam Description: Arabidopsis proteins of unknown function
  misc_feature (133)..(255): Homolog of NCBI NO: 6573746 NR Description: F20B24.18 [Arabidopsis thaliana]
  misc_feature (46)..(247): Homolog of NCBI NO: 18406483 NR Description: expressed protein [Arabidopsis thaliana]
  misc_feature (43)..(247): Homolog of NCBI NO: 34393554 NR Description: putative carboxyl-terminal proteinase
  misc_feature (22)..(247): Homolog of NCBI NO: 27311623 NR Description: unknown protein [Arabidopsis thaliana]
  misc_feature (30)..(247): Homolog of NCBI NO: 15241244 NR Description: expressed protein [Arabidopsis thaliana]
  misc_feature (22)..(247): Homolog of NCBI NO: 15222707 NR Description: expressed protein [Arabidopsis thaliana]
  misc_feature (34)..(247): Homolog of NCBI NO: 34393299 NR Description: putative DD1A protein [Oryza sativa (japonica
  misc_feature (23)..(247): Homolog of NCBI NO: 21593294 NR Description: putative carboxyl-terminal peptidase [Arabidopsis
  misc_feature (23)..(247): Homolog of NCBI NO: 18400044 NR Description: expressed protein [Arabidopsis thaliana]
  misc_feature (40)..(247): Homolog of NCBI NO: 15238835 NR Description: expressed protein [Arabidopsis thaliana]
MTHTAMKRRRRRHGQPHHLHLLVSLLLLLLLDRACAALPSSPKMARIQQHLDRANKPALRTIQSMDGDTIDCVPRHKQHALDHPLLRNHRIQSAPPSMPASATATFSASAAASGNSTSRARAAWQTWHHAGHCPKGTVPVRRTTAEDVLRGGQSLFRFGRKRHRRDRAARAANAPDVVTGNGHEHAIAYTAVGQQEVYGAKATINVWDPAIHENNGFSLSQLWLLSGSFNGSDLNSIEAGWQVTPTLPSHFHPIFLVMIHLTWLVH

SEQ ID NO: 64247 - protein, 261 aa, Triticum aestivum
  peptide (1)..(261): Ceres Seq. ID no. 13597337
  misc_feature (192)..(242): Pfam Name: Arabidopsis proteins of unknown function Pfam Description: Arabidopsis proteins of unknown function
  misc_feature (128)..(250): Homolog of NCBI NO: 6573746 NR Description: F20B24.18 [Arabidopsis thaliana]
  misc_feature (41)..(242): Homolog of NCBI NO: 18406483 NR Description: expressed protein [Arabidopsis thaliana]
  misc_feature (38)..(242): Homolog of NCBI NO: 34393554 NR Description: putative carboxyl-terminal proteinase
  misc_feature (17)..(242): Homolog of NCBI NO: 27311623 NR Description: unknown protein [Arabidopsis thaliana]
  misc_feature (25)..(242): Homolog of NCBI NO: 15241244 NR Description: expressed protein [Arabidopsis thaliana]
  misc_feature (17)..(242): Homolog of NCBI NO: 15222707 NR Description: expressed protein [Arabidopsis thaliana]
  misc_feature (29)..(242): Homolog of NCBI NO: 34393299 NR Description: putative DD1A protein [Oryza sativa (japonica
  misc_feature (18)..(242): Homolog of NCBI NO: 21593294 NR Description: putative carboxyl-terminal peptidase [Arabidopsis
  misc_feature (18)..(242): Homolog of NCBI NO: 18400044 NR Description: expressed protein [Arabidopsis thaliana]
  misc_feature (35)..(242): Homolog of NCBI NO: 15238835 NR Description: expressed protein [Arabidopsis thaliana]
MKRRRRRHGQPHHLHLLVSLLLLLLLDRACAALPSSPKMARIQQHLDRANKPALRTIQSMDGDTIDCVPRHKQHALDHPLLRNHRIQSAPPSMPASATATFSASAAASGNSTSRARAAWQTWHHAGHCPKGTVPVRRTTAEDVLRGGQSLFRFGRKRHRRDRAARAANAPDVVTGNGHEHAIAYTAVGQQEVYGAKATINVWDPAIHENNGFSLSQLWLLSGSFNGSDLNSIEAGWQVTPTLPSHFHPIFLVMIHLTWLVH

SEQ ID NO: 64248 - DNA, 1242 bp, Triticum aestivum
  misc_feature (1)..(1242): Ceres Seq. ID no. 15179772
cccaactcccaaccaaaccgagagcgcaaccgggacagcgagccaagatctgcagagccacaggcgacctcacaccggcgaccatggccgtggacctcatgggctgctacacccctcgccgcgccgacgaccagctcgccatccaggaggccgccaccgccggcctccgcagcctggagctcctcgtctcctccctctccggcgcggcgccgtccaaggcgccgcagcagcacccgcagcagccgttcggcgagatcgccgaccaggccgtctccaagttccgcaaggtgatctccatcctcgaccgcaccggccacgcccgcttccgccgcggccccgtccagtcgcctaccccgcctcctccggctccggtcgctcctccgccgcccccaccgcgccctctggccgtcgtcgagccggccaggcccgctcccttgaccgtcgtggcgccggtgtcggtggccgccccggtccctctcccgcagccgcagagcctgacgctggacttcaccaagccgaacctgaccatgtcaggcgcgacgtccgtgacgtccacgtccttcttctcgtcggtgaccgccggcgagggcagcgtgtccaagggccgcagcctggtctccgccggcaagccgccgctgtccgggcacaagagaaagccgtgcgccggcgcgcactcggaggccaacaccaccggcagccgatgccactgctccaagagaaggaagaaccgcgtgaagacgacggtgagggtgcccgcggtgagcgcgaagatcgccgacatcccgccggacgagtactcgtggaggaagtacggccagaagcccatcaagggatccccttacccacggggctactacaagtgcagcacagtgcgagggtgcccggcgcggaagcacgtggagcgcgccctggacgacccggcgatgctggtggtgacgtacgagggcgagcaccgccactcgccggggccgatgccgatgcagatggcgccgtcgccggtgccgattccgatgccgatgggcgcgcccgtagccgtagctagtgtgtccgccggcaacgggcacgtctgacttagttaaattttttctttctttccccatttggttgggggtgcttcgttcgttcgctcgcaatctgtctgatgtccgtgtaaagaagaagaaagattgtagagagacggagagggaaacttaatgccagagatttttactacctccaaaaaaaaaaaaaaaaaaaaaaaag

SEQ ID NO: 64249 - protein, 355 aa, Triticum aestivum
  peptide (1)..(355): Ceres Seq. ID no. 15179773
  misc_feature (261)..(320): Pfam Name: WRKY DNA -binding domain Pfam Description: WRKY DNA -binding domain
  misc_feature (177)..(320): Homolog of NCBI NO: 11993901 NR Description: somatic embryogenesis related protein [Dactylis
  misc_feature (164)..(323): Homolog of NCBI NO: 18402397 NR Description: WRKY family transcription factor [Arabidopsis
  misc_feature (163)..(320): Homolog of NCBI NO: 40539044 NR Description: putative somatic embryogenesis related protein
  misc_feature (28)..(320): Homolog of NCBI NO: 15227812 NR Description: WRKY family transcription factor [Arabidopsis
  misc_feature (28)..(331): Homolog of NCBI NO: 18400580 NR Description: WRKY family transcription factor [Arabidopsis
  misc_feature (28)..(339): Homolog of NCBI NO: 25348152 NR Description: probable WRKY-type DNA binding protein
  misc_feature (28)..(334): Homolog of NCBI NO: 4894963 NR Description: DNA-binding protein WRKY3 [Avena sativa]
  misc_feature (30)..(344): Homolog of NCBI NO: 38568048 NR Description: OSJNBa0065J03.18 [Oryza sativa (japonica
  misc_feature (28)..(326): Homolog of NCBI NO: 38175580 NR Description: putative DNA-binding protein NtWRKY3
  misc_feature (28)..(355): Homolog of NCBI NO: 38346908 NR Description: OSJNBb0015N08.8 [Oryza sativa (japonica
QLPTKPRAQPGQRAKICRATGDLTPATMAVDLMGCYTPRRADDQLAIQEAATAGLRSLELLVSSLSGAAPSKAPQQHPQQPFGEIADQAVSKFRKVISILDRTGHARFRRGPVQSPTPPPPAPVAPPPPPPRPLAVVEPARPAPLTVVAPVSVAAPVPLPQPQSLTLDFTKPNLTMSGATSVTSTSFFSSVTAGEGSVSKGRSLVSAGKPPLSGHKRKPCAGAHSEANTTGSRCHCSKRRKNRVKTTVRVPAVSAKIADIPPDEYSWRKYGQKPIKGSPYPRGYYKCSTVRGCPARKHVERALDDPAMLVVTYEGEHRHSPGPMPMQMAPSPVPIPMPMGAPVAVASVSAGNGHV

SEQ ID NO: 64250 - protein, 346 aa, Triticum aestivum
  peptide (1)..(346): Ceres Seq. ID no. 15179774
PTPNQTESATGTASQDLQSHRRPHTGDHGRGPHGLLHPSPRRRPARHPGGRHRRPPQPGAPRLLPLRRGAVQGAAAAPAAAVRRDRRPGRLQVPQGDLHPRPHRPRPLPPRPRPVAYPASSGSGRSSAAPTAPSGRRRAGQARSLDRRGAGVGGRPGPSPAAAEPDAGLHQAEPDHVRRDVRDVHVLLLVGDRRRGQRVQGPQPGLRRQAAAVRAQEKAVRRRALGGQHHRQPMPLLQEKEEPREDDGEGARGEREDRRHPAGRVLVEEVRPEAHQGIPLPTGLLQVQHSARVPGAEARGARPGRPGDAGGDVRGRAPPLAGADADADGAVAGADSDADGRARSRS

SEQ ID NO: 64251 - protein, 328 aa, Triticum aestivum
  peptide (1)..(328): Ceres Seq. ID no. 15179775
  misc_feature (234)..(293): Pfam Name: WRKY DNA -binding domain Pfam Description: WRKY DNA -binding domain
  misc_feature (150)..(293): Homolog of NCBI NO: 11993901 NR Description: somatic embryogenesis related protein [Dactylis
  misc_feature (137)..(296): Homolog of NCBI NO: 18402397 NR Description: WRKY family transcription factor [Arabidopsis
  misc_feature (136)..(293): Homolog of NCBI NO: 40539044 NR Description: putative somatic embryogenesis related protein
  misc_feature (1)..(293): Homolog of NCBI NO: 15227812 NR Description: WRKY family transcription factor [Arabidopsis
  misc_feature (1)..(304): Homolog of NCBI NO: 18400580 NR Description: WRKY family transcription factor [Arabidopsis
  misc_feature (1)..(312): Homolog of NCBI NO: 25348152 NR Description: probable WRKY-type DNA binding protein
  misc_feature (1)..(307): Homolog of NCBI NO: 4894963 NR Description: DNA-binding protein WRKY3 [Avena sativa]
  misc_feature (3)..(317): Homolog of NCBI NO: 38568048 NR Description: OSJNBa0065J03.18 [Oryza sativa (japonica
  misc_feature (1)..(299): Homolog of NCBI NO: 38175580 NR Description: putative DNA-binding protein NtWRKY3
  misc_feature (1)..(328): Homolog of NCBI NO: 38346908 NR Description: OSJNBb0015N08.8 [Oryza sativa (japonica
MAVDLMGCYTPRRADDQLAIQEAATAGLRSLELLVSSLSGAAPSKAPQQHPQQPFGEIADQAVSKFRKVISILDRTGHARFRRGPVQSPTPPPPAPVAPPPPPPRPLAVVEPARPAPLTVVAPVSVAAPVPLPQPQSLTLDFTKPNLTMSGATSVTSTSFFSSVTAGEGSVSKGRSLVSAGKPPLSGHKRKPCAGAHSEANTTGSRCHCSKRRKNRVKTTVRVPAVSAKIADIPPDEYSWRKYGQKPIKGSPYPRGYYKCSTVRGCPARKHVERALDDPAMLVVTYEGEHRHSPGPMPMQMAPSPVPIPMPMGAPVAVASVSAGNGHV

SEQ ID NO: 64252 - DNA, 1142 bp, Triticum aestivum
  misc_feature (1)..(1142): Ceres Seq. ID no. 12626108
aactccatttcccaaccaaccaaccaacagccgccaaaggccgatccatggcgtcggcgtcgccgtcgcggctgctgccgccctttccccctccagctgccccaacatcccgccacacaactctccgcgccgtccctcgcagctgcagcctcgccatcccgagcctccggtgccgcgcctccgctccagcggccgttgacgctggcgcgccgctgctgctagaggaccgcgccggcgcggtgtccatccgagagtttgtcacgctcgatgagctccacgccgccgtgcgcctccgcgttcgcaccttctacgagtacgcccgcgacactgtcggcgccgaggatcacaggaaaggtctggcagagagggaatatgaagcattacaaaatcggatttctgggaatatgattaattttcggagagtctcttgtataaatgggacagtgccactgttgccatcgttgatgtcagcagaggagctttgttcaacatgcaagtttgttgaagatggggaagagagaatagtagttggtagtttagacctgaatcagtgcctctggctaccagatgaactgactggaaagaggccaggggtaactgaatcaagccatacacgggcatatctgagcaatgtatgtgttgccaaggagctccaaagatgcggactgggctatgcattggttgacaagtctaagaagcttgctcgtcaatggggcataacggatttgtatgtccatgttgccatcaacaacgaggcggcacaaaagctgtacatcaagagtggatttgtgtacgaaagcgaggagcctgcccagcaggctaggcatcttgggcgcccccgaaggcttcttctttggcttgatatgaagaacgaaaccttgtgatcttacctgtaaatgcttctttttatagttatacagcattatctatatataattttgattttactgcccaattcaagtagtagtatttttttccttgtggaaagaaatacaattctcaaaatttaaattaaggattctccccataattttatttgttctgcacatagtactcattattcaatgtatatccagcattcccccggtggcaaacaatggtacatgataatacagtgctatcaaatctttgcattcctgctc

SEQ ID NO: 64253 - protein, 293 aa, Triticum aestivum
  peptide (1)..(293): Ceres Seq. ID no. 12626109
  misc_feature (169)..(262): Pfam Name: Acetyltransferase (GNAT) family Pfam Description: Acetyltransferase (GNAT) family
  misc_feature (207)..(284): Homolog of NCBI NO: 23126552 NR Description: hypothetical protein [Nostoc punctiforme]
  misc_feature (204)..(285): Homolog of NCBI NO: 16329719 NR Description: unknown protein [Synechocystis sp. PCC 6803]
  misc_feature (74)..(262): Homolog of NCBI NO: 30678254 NR Description: GCN5-related N-acetyltransferase (GNAT) family
  misc_feature (124)..(284): Homolog of NCBI NO: 23041456 NR Description: hypothetical protein [Trichodesmium erythraeum
  misc_feature (50)..(286): Homolog of NCBI NO: 18417112 NR Description: putative protein
  misc_feature (50)..(286): Homolog of NCBI NO: 21536955 NR Description: unknown [Arabidopsis thaliana]
  misc_feature (19)..(293): Homolog of NCBI NO: 28812153 NR Description: B1015H11.33 [Oryza sativa (japonica
LHFPTNQPTAAKGRSMASASPSRLLPPFPPPAAPTSRHTTLRAVPRSCSLAIPSLRCRASAPAAVDAGAPLLLEDRAGAVSIREFVTLDELHAAVRLRVRTFYEYARDTVGAEDHRKGLAEREYEALQNRISGNMINFRRVSCINGTVPLLPSLMSAEELCSTCKFVEDGEERIVVGSLDLNQCLWLPDELTGKRPGVTESSHTRAYLSNVCVAKELQRCGLGYALVDKSKKLARQWGITDLYVHVAINNEAAQKLYIKSGFVYESEEPAQQARHLGRPRRLLLWLDMKNETL

SEQ ID NO: 64254 - protein, 278 aa, Triticum aestivum
  peptide (1)..(278): Ceres Seq. ID no. 12626110
  misc_feature (154)..(247): Pfam Name: Acetyltransferase (GNAT) family Pfam Description: Acetyltransferase (GNAT) family
  misc_feature (192)..(269): Homolog of NCBI NO: 23126552 NR Description: hypothetical protein [Nostoc punctiforme]
  misc_feature (189)..(270): Homolog of NCBI NO: 16329719 NR Description: unknown protein [Synechocystis sp. PCC 6803]
  misc_feature (59)..(247): Homolog of NCBI NO: 30678254 NR Description: GCN5-related N-acetyltransferase (GNAT) family
  misc_feature (109)..(269): Homolog of NCBI NO: 23041456 NR Description: hypothetical protein [Trichodesmium erythraeum
  misc_feature (35)..(271): Homolog of NCBI NO: 18417112 NR Description: putative protein
  misc_feature (35)..(271): Homolog of NCBI NO: 21536955 NR Description: unknown [Arabidopsis thaliana]
  misc_feature (4)..(278): Homolog of NCBI NO: 28812153 NR Description: B1015H11.33 [Oryza sativa (japonica
MASASPSRLLPPFPPPAAPTSRHTTLRAVPRSCSLAIPSLRCRASAPAAVDAGAPLLLEDRAGAVSIREFVTLDELHAAVRLRVRTFYEYARDTVGAEDHRKGLAEREYEALQNRISGNMINFRRVSCINGTVPLLPSLMSAEELCSTCKFVEDGEERIVVGSLDLNQCLWLPDELTGKRPGVTESSHTRAYLSNVCVAKELQRCGLGYALVDKSKKLARQWGITDLYVHVAINNEAAQKLYIKSGFVYESEEPAQQARHLGRPRRLLLWLDMKNETL

SEQ ID NO: 64255 - protein, 159 aa, Triticum aestivum
  peptide (1)..(159): Ceres Seq. ID no. 12626111
  misc_feature (35)..(128): Pfam Name: Acetyltransferase (GNAT) family Pfam Description: Acetyltransferase (GNAT) family
  misc_feature (73)..(150): Homolog of NCBI NO: 23126552 NR Description: hypothetical protein [Nostoc punctiforme]
  misc_feature (70)..(151): Homolog of NCBI NO: 16329719 NR Description: unknown protein [Synechocystis sp. PCC 6803]
  misc_feature (1)..(128): Homolog of NCBI NO: 30678254 NR Description: GCN5-related N-acetyltransferase (GNAT) family
  misc_feature (1)..(150): Homolog of NCBI NO: 23041456 NR Description: hypothetical protein [Trichodesmium erythraeum
  misc_feature (1)..(152): Homolog of NCBI NO: 18417112 NR Description: putative protein
  misc_feature (1)..(152): Homolog of NCBI NO: 21536955 NR Description: unknown [Arabidopsis thaliana]
  misc_feature (1)..(159): Homolog of NCBI NO: 28812153 NR Description: B1015H11.33 [Oryza sativa (japonica
MINFRRVSCINGTVPLLPSLMSAEELCSTCKFVEDGEERIVVGSLDLNQCLWLPDELTGKRPGVTESSHTRAYLSNVCVAKELQRCGLGYALVDKSKKLARQWGITDLYVHVAINNEAAQKLYIKSGFVYESEEPAQQARHLGRPRRLLLWLDMKNETL

SEQ ID NO: 64256 - DNA, 1202 bp, Triticum aestivum
  misc_feature (1)..(1202): Ceres Seq. ID no. 12618341
atctcaaccttgccttagttttcgacgccgccgccgtagagcccgttccccctcacgcggccagcgaccatgtcgagtggcctgaacatgtccctagacgacctcatcaagcaatccaagtccaggcccaaagccaaccccgccttctcttccgggcccacccgccgggcggcgccgtccgcccggaccatgccctacccgccgtctgctcccaaggccgccaccgccgactctctgtacggtgtctactccgagcacgttgccgccatggcaacctccccgccaccgccggtggctgggccacaggcactcgagacgggcacgaagctgcacatctccaacctcgactccagcgtcaccgtcgaggacgtccaggaactcttttcagagattggtgagctcaaacgttattctgttaactacgataaggatgggaagtctcagggaagtgcggaagttgtctttgcaagaaaagtagatgctttggatgctattgagagatataacggtgttctgcttgatgggaagccaatgaagatagagctcattggaaataagaccgagccacacccaacagaacctttgatgtacaacggcacttcttctaactacaatgcaactccaaacagtttgcttcagagaggtgacccgagagggccatttcatggtaatggtcgttctggaggcagtggtcagggcggtgctggcaaaagaggaatgtttcaaggcaacgttcgtcctggaaacactgtgcaggacggtggtgggcggggtcagggcagagccagagggcatgatcgcagccgagttccggcctctgctgcggatcttgatgctgaactggagcagtatcatgcagcagcagtgaagcaaaaatgaggctctgatgtagtccgtatattttatactccctccgtccatatataggtgacgtggttttagtccaaatttaaactaaaaccacgtcacttgtttatgaacggagggagtatatacatagattgttgcattattagttttctgcttttagtcgtcaggtaccatgttgagaaaagttggaaggcattaattcgacatttacatctgctgtgcttttcatatccctactccgtgctggatatgccgtattacctaattttgaaacaggggtgttctcttggggtttatttggatagtaagattacaaagaactagttcttgtc

SEQ ID NO: 64257 - protein, 269 aa, Triticum aestivum
  peptide (1)..(269): Ceres Seq. ID no. 12618342
  misc_feature (1)..(215): Homolog of NCBI NO: 21555029 NR Description: transcriptional coactivator-like protein
  misc_feature (1)..(225): Homolog of NCBI NO: 30697310 NR Description: RNA and export factor binding protein, putative
  misc_feature (1)..(266): Homolog of NCBI NO: 25404603 NR Description: hypothetical protein T6J19.1 [imported] -
  misc_feature (1)..(225): Homolog of NCBI NO: 30697313 NR Description: RNA and export factor binding protein, putative
  misc_feature (1)..(266): Homolog of NCBI NO: 30693141 NR Description: RNA and export factor binding protein, putative
  misc_feature (27)..(267): Homolog of NCBI NO: 11358209 NR Description: hypothetical protein T22P11.120 - Arabidopsis
  misc_feature (27)..(267): Homolog of NCBI NO: 30679669 NR Description: RNA and export factor binding protein, putative
  misc_feature (166)..(269): Homolog of NCBI NO: 34900544 NR Description: P0565A07.3 [Oryza sativa (japonica
  misc_feature (1)..(189): Homolog of NCBI NO: 34900544 NR Description: P0565A07.3 [Oryza sativa (japonica
  misc_feature (1)..(269): Homolog of NCBI NO: 33146678 NR Description: putative RNA and export factor binding protein
MSSGLNMSLDDLIKQSKSRPKANPAFSSGPTRRAAPSARTMPYPPSAPKAATADSLYGVYSEHVAAMATSPPPPVAGPQALETGTKLHISNLDSSVTVEDVQELFSEIGELKRYSVNYDKDGKSQGSAEVVFARKVDALDAIERYNGVLLDGKPMKIELIGNKTEPHPTEPLMYNGTSSNYNATPNSLLQRGDPRGPFHGNGRSGGSGQGGAGKRGMFQGNVRPGNTVQDGGGRGQGRARGHDRSRVPASAADLDAELEQYHAAAVKQK

SEQ ID NO: 64258 - protein, 263 aa, Triticum aestivum
  peptide (1)..(263): Ceres Seq. ID no. 12618343
  misc_feature (1)..(209): Homolog of NCBI NO: 21555029 NR Description: transcriptional coactivator-like protein
  misc_feature (1)..(219): Homolog of NCBI NO: 30697310 NR Description: RNA and export factor binding protein, putative
  misc_feature (1)..(260): Homolog of NCBI NO: 25404603 NR Description: hypothetical protein T6J19.1 [imported] -
  misc_feature (1)..(219): Homolog of NCBI NO: 30697313 NR Description: RNA and export factor binding protein, putative
  misc_feature (1)..(260): Homolog of NCBI NO: 30693141 NR Description: RNA and export factor binding protein, putative
  misc_feature (21)..(261): Homolog of NCBI NO: 11358209 NR Description: hypothetical protein T22P11.120 - Arabidopsis
  misc_feature (21)..(261): Homolog of NCBI NO: 30679669 NR Description: RNA and export factor binding protein, putative
  misc_feature (160)..(263): Homolog of NCBI NO: 34900544 NR Description: P0565A07.3 [Oryza sativa (japonica
  misc_feature (1)..(183): Homolog of NCBI NO: 34900544 NR Description: P0565A07.3 [Oryza sativa (japonica
  misc_feature (1)..(263): Homolog of NCBI NO: 33146678 NR Description: putative RNA and export factor binding protein
MSLDDLIKQSKSRPKANPAFSSGPTRRAAPSARTMPYPPSAPKAATADSLYGVYSEHVAAMATSPPPPVAGPQALETGTKLHISNLDSSVTVEDVQELFSEIGELKRYSVNYDKDGKSQGSAEVVFARKVDALDAIERYNGVLLDGKPMKIELIGNKTEPHPTEPLMYNGTSSNYNATPNSLLQRGDPRGPFHGNGRSGGSGQGGAGKRGMFQGNVRPGNTVQDGGGRGQGRARGHDRSRVPASAADLDAELEQYHAAAVKQK

SEQ ID NO: 64259 - protein, 229 aa, Triticum aestivum
  peptide (1)..(229): Ceres Seq. ID no. 12618344
  misc_feature (1)..(175): Homolog of NCBI NO: 21555029 NR Description: transcriptional coactivator-like protein
  misc_feature (1)..(185): Homolog of NCBI NO: 30697310 NR Description: RNA and export factor binding protein, putative
  misc_feature (1)..(226): Homolog of NCBI NO: 25404603 NR Description: hypothetical protein T6J19.1 [imported] -
  misc_feature (1)..(185): Homolog of NCBI NO: 30697313 NR Description: RNA and export factor binding protein, putative
  misc_feature (1)..(226): Homolog of NCBI NO: 30693141 NR Description: RNA and export factor binding protein, putative
  misc_feature (1)..(227): Homolog of NCBI NO: 11358209 NR Description: hypothetical protein T22P11.120 - Arabidopsis
  misc_feature (1)..(227): Homolog of NCBI NO: 30679669 NR Description: RNA and export factor binding protein, putative
  misc_feature (126)..(229): Homolog of NCBI NO: 34900544 NR Description: P0565A07.3 [Oryza sativa (japonica
  misc_feature (1)..(149): Homolog of NCBI NO: 34900544 NR Description: P0565A07.3 [Oryza sativa (japonica
  misc_feature (1)..(229): Homolog of NCBI NO: 33146678 NR Description: putative RNA and export factor binding protein
MPYPPSAPKAATADSLYGVYSEHVAAMATSPPPPVAGPQALETGTKLHISNLDSSVTVEDVQELFSEIGELKRYSVNYDKDGKSQGSAEVVFARKVDALDAIERYNGVLLDGKPMKIELIGNKTEPHPTEPLMYNGTSSNYNATPNSLLQRGDPRGPFHGNGRSGGSGQGGAGKRGMFQGNVRPGNTVQDGGGRGQGRARGHDRSRVPASAADLDAELEQYHAAAVKQK

SEQ ID NO: 64260 - DNA, 953 bp, Triticum aestivum
  misc_feature (1)..(953): Ceres Seq. ID no. 13597839
ccccaatcctctctcgtccccatccccaatccccgatctcccgaccccgacccccgacgaaaccctagccagcaaaccgcggcggcggcggcaatgggcaacccggagaagctgatggcgcagatcttcgacctcaagttcacgtccaagtcgctgcagcggcaggcgcgcaagtgcgagaaggaggagaaggagcagaagctcaaggtgaagaaggccatcgagaagggcaacgtggacggcgcgcggatctacgccgagaacgccatccgcaagcgcaccgagcacatgaactacctccgcctcgcctcccgcctcgacgccgtcgtcgcgcgcctcgacacgcaggccaagatgcaggccatcggcaagtccatgggcagcatcgtcaagtcgcttgactcctccctcgccacgggcaacctccagaagatgtccgagaccatggacagcttcgagcgccagttcgtcaacatggaggtccaggccgagttcatggagggcgccatggccggctccacctccctctccacgcccgagaccgaggtcaactccctcatgcagcaggtcgccgacgactacggcctcgaggtctccgtcggcctcccccaggccgccgcccacgccatcccggccgccaaggacaaggagaaggtcgacgaggacgacctcacccgccgcctcgcagagctcaaggcccgcggctaaactgaacggccttcgcttcacttcaggtacggctcatgcaatgttcactcgcctcgccgtatgtcagttgtcaagggctgctcatatctgacagccccgtaaatattgttaacgcccatgtgggtgctctctttgtctgggatctctatgtggaactgatttaaacgctgctgtgtgatatgacgtgttattccgaatcggagtgtgatattgatattatgagtcagtaataatacatgtgcttg

SEQ ID NO: 64261 - protein, 235 aa, Triticum aestivum
  peptide (1)..(235): Ceres Seq. ID no. 13597840
  misc_feature (41)..(210): Pfam Name: SNF7 Pfam Description: SNF7
  misc_feature (32)..(232): Homolog of NCBI NO: 27229022 NR Description: RIKEN cDNA 2610002M06 [Mus musculus]
  misc_feature (22)..(232): Homolog of NCBI NO: 39644911 NR Description: CHMP1.5 protein [Homo sapiens]
  misc_feature (41)..(234): Homolog of NCBI NO: 3789911 NR Description: developmental protein DG1118 [Dictyostelium
  misc_feature (32)..(234): Homolog of NCBI NO: 25518422 NR Description: hypothetical protein F11A6.7 - Arabidopsis
  misc_feature (32)..(235): Homolog of NCBI NO: 15220819 NR Description: developmental protein -related [Arabidopsis
  misc_feature (32)..(235): Homolog of NCBI NO: 21537090 NR Description: developmental protein, putative [Arabidopsis
  misc_feature (32)..(235): Homolog of NCBI NO: 18410249 NR Description: developmental protein DG1118 -related
  misc_feature (32)..(235): Homolog of NCBI NO: 28916459 NR Description: putative developmental protein [Nicotiana
  misc_feature (32)..(235): Homolog of NCBI NO: 29367557 NR Description: development protein-like protein
  misc_feature (32)..(235): Homolog of NCBI NO: 30270581 NR Description: superal1 [Zea mays]
PQSSLVPIPNPRSPDPDPRRNPSQQTAAAAAMGNPEKLMAQIFDLKFTSKSLQRQARKCEKEEKEQKLKVKKAIEKGNVDGARIYAENAIRKRTEHMNYLRLASRLDAVVARLDTQAKMQAIGKSMGSIVKSLDSSLATGNLQKMSETMDSFERQFVNMEVQAEFMEGAMAGSTSLSTPETEVNSLMQQVADDYGLEVSVGLPQAAAHAIPAAKDKEKVDEDDLTRRLAELKARG

SEQ ID NO: 64262 - protein, 204 aa, Triticum aestivum
  peptide (1)..(204): Ceres Seq. ID no. 13597841
  misc_feature (10)..(179): Pfam Name: SNF7 Pfam Description: SNF7
  misc_feature (1)..(201): Homolog of NCBI NO: 27229022 NR Description: RIKEN cDNA 2610002M06 [Mus musculus]
  misc_feature (1)..(201): Homolog of NCBI NO: 39644911 NR Description: CHMP1.5 protein [Homo sapiens]
  misc_feature (10)..(203): Homolog of NCBI NO: 3789911 NR Description: developmental protein DG1118 [Dictyostelium
  misc_feature (1)..(203): Homolog of NCBI NO: 25518422 NR Description: hypothetical protein F11A6.7 - Arabidopsis
  misc_feature (1)..(204): Homolog of NCBI NO: 15220819 NR Description: developmental protein -related [Arabidopsis
  misc_feature (1)..(204): Homolog of NCBI NO: 21537090 NR Description: developmental protein, putative [Arabidopsis
  misc_feature (1)..(204): Homolog of NCBI NO: 18410249 NR Description: developmental protein DG1118 -related
  misc_feature (1)..(204): Homolog of NCBI NO: 28916459 NR Description: putative developmental protein [Nicotiana
  misc_feature (1)..(204): Homolog of NCBI NO: 29367557 NR Description: development protein-like protein
  misc_feature (1)..(204): Homolog of NCBI NO: 30270581 NR Description: superal1 [Zea mays]
MGNPEKLMAQIFDLKFTSKSLQRQARKCEKEEKEQKLKVKKAIEKGNVDGARIYAENAIRKRTEHMNYLRLASRLDAVVARLDTQAKMQAIGKSMGSIVKSLDSSLATGNLQKMSETMDSFERQFVNMEVQAEFMEGAMAGSTSLSTPETEVNSLMQQVADDYGLEVSVGLPQAAAHAIPAAKDKEKVDEDDLTRRLAELKARG

SEQ ID NO: 64263 - protein, 197 aa, Triticum aestivum
  peptide (1)..(197): Ceres Seq. ID no. 13597842
  misc_feature (3)..(172): Pfam Name: SNF7 Pfam Description: SNF7
  misc_feature (1)..(194): Homolog of NCBI NO: 27229022 NR Description: RIKEN cDNA 2610002M06 [Mus musculus]
  misc_feature (1)..(194): Homolog of NCBI NO: 39644911 NR Description: CHMP1.5 protein [Homo sapiens]
  misc_feature (3)..(196): Homolog of NCBI NO: 3789911 NR Description: developmental protein DG1118 [Dictyostelium
  misc_feature (1)..(196): Homolog of NCBI NO: 25518422 NR Description: hypothetical protein F11A6.7 - Arabidopsis
  misc_feature (1)..(197): Homolog of NCBI NO: 15220819 NR Description: developmental protein -related [Arabidopsis
  misc_feature (1)..(197): Homolog of NCBI NO: 21537090 NR Description: developmental protein, putative [Arabidopsis
  misc_feature (1)..(197): Homolog of NCBI NO: 18410249 NR Description: developmental protein DG1118 -related
  misc_feature (1)..(197): Homolog of NCBI NO: 28916459 NR Description: putative developmental protein [Nicotiana
  misc_feature (1)..(197): Homolog of NCBI NO: 29367557 NR Description: development protein-like protein
  misc_feature (1)..(197): Homolog of NCBI NO: 30270581 NR Description: superal1 [Zea mays]
MAQIFDLKFTSKSLQRQARKCEKEEKEQKLKVKKAIEKGNVDGARIYAENAIRKRTEHMNYLRLASRLDAVVARLDTQAKMQAIGKSMGSIVKSLDSSLATGNLQKMSETMDSFERQFVNMEVQAEFMEGAMAGSTSLSTPETEVNSLMQQVADDYGLEVSVGLPQAAAHAIPAAKDKEKVDEDDLTRRLAELKARG

SEQ ID NO: 64264 - DNA, 1675 bp, Triticum aestivum
  misc_feature (1)..(1675): Ceres Seq. ID no. 13598642
gaaaaatcgaccaaagagcaacccgacggccgtggtgatggaggcgatggggaagcagcagagggaggaggtgctcctccgcgccgcctccgacggcaacctccgactcctcaagaagatggcgcgctggatggggtcagggggccaaggcgaggccgccgtacttgcggcggtggaggacggcgaagggggtcgcccgctgcacctggcggccggggcgggccgggtcgaggtctgcaggtacctcgtcgaggacctccgcctcgatgtcaatcaactcaactgtcaaggtcacacgccactgtacctttctgcctattttgggagagctgctgctgcaacatatcttcttgatcatggtgccgatccactagctagcaaactacggtcacctctttatggcgctgcaatgcaagggcattgtgaaatgttagaaatgctgctttcaagaggactcgatgtggatttaaattctgtacaagggacggcattgcatgcagctgcttgttataaacaacatggcatgatgaagattttgttggagcaccatgccgatcctaacaaggtttgctatcttaataataccccgttgagtttggccatgcggcagcgggacatgtctacagagttgttggaatgtgccaagctactcataaaggctggtgctgatgtgaattttattgaccttgatggtgatagttacgtgacagtggcagcgaagttcggctatcctggcatcatgaagtgcttattagatgctggtgctaaccccgatattccagatgaatatggtagaacaccagttgaatttgctgcctctaacggcagtagggatatggttgaaatgttattccctttaacttctcctatttcaacgctgccggactggagtattgatggaatcatttctcatgtgaaacactatggtttgaagccgagggataaacaaaagtgtgcgaagagaagaactgaactgaaacagaaagctttaaaggcttttaaggaagaggaatattttatagcagcactgctgtatagttgtgcaataacacttgacccgagtccagatgaatatgcaaccctattggcaaataggagtctctgctgtttgcgcaccaagaacggaagagctgctctccctgatgctaccatgtgcagaagggtgcgacctttttggccaaaagcctgctatcgagaagggtcagcttttatgttattgaaggactatgagaaagcatgcaaggcttttgcggatggcttgaagcttgaccctacaaatggtgatcttgcaaatgctttaagggaagcccaagaagctgcgaaggatgctcgtcgccctgaaaattgactgatgtgtcaaaccttacatgcagaatctgaggctctgttttgttgctaagcaccttttgtccatcctgaaaacttctgccaagaatatcccgtggtcgtttaagacttccgttgcacccatcgtttgtaaatataactggggatgaactcgctgaccatagtatcttcattccagtgcatgtgttgacaaactttatcgtcacagaacgtacggcatagtccggtcaccgagaagcgctggaggcggagcagtatgtaattggctcattaattcttccttccccttaccttcgcgggaagtggtaaatgatgaaatttggacttg

SEQ ID NO: 64265 - protein, 448 aa, Triticum aestivum
  peptide (1)..(448): Ceres Seq. ID no. 15222389
  misc_feature (394)..(426): Pfam Name: TPR Domain Pfam Description: TPR Domain
  misc_feature (14)..(306): Homolog of NCBI NO: 34329680 NR Description: unknown [Nicotiana benthamiana]
  misc_feature (211)..(438): Homolog of NCBI NO: 34910278 NR Description: OSJNBa0089K24.26 [Oryza sativa (japonica
  misc_feature (14)..(327): Homolog of NCBI NO: 24745936 NR Description: ankyrin-like protein [Solanum tuberosum]
  misc_feature (60)..(448): Homolog of NCBI NO: 13435247 NR Description: putative ankyrin [Oryza sativa]
  misc_feature (15)..(441): Homolog of NCBI NO: 15229331 NR Description: ankyrin-related protein [Arabidopsis thaliana]
  misc_feature (316)..(433): Homolog of NCBI NO: 13435243 NR Description: putative gag-pol polyprotein [Oryza sativa]
  misc_feature (11)..(313): Homolog of NCBI NO: 13435243 NR Description: putative gag-pol polyprotein [Oryza sativa]
  misc_feature (16)..(441): Homolog of NCBI NO: 34896852 NR Description: putative ankyrin [Oryza sativa]
  misc_feature (28)..(436): Homolog of NCBI NO: 27542766 NR Description: ankyrin-like protein-like protein [Sorghum
  misc_feature (25)..(434): Homolog of NCBI NO: 27542768 NR Description: ankyrin-like protein-like protein [Sorghum
KNRPKSNPTAVVMEAMGKQQREEVLLRAASDGNLRLLKKMARWMGSGGQGEAAVLAAVEDGEGGRPLHLAAGAGRVEVCRYLVEDLRLDVNQLNCQGHTPLYLSAYFGRAAAATYLLDHGADPLASKLRSPLYGAAMQGHCEMLEMLLSRGLDVDLNSVQGTALHAAACYKQHGMMKILLEHHADPNKVCYLNNTPLSLAMRQRDMSTELLECAKLLIKAGADVNFIDLDGDSYVTVAAKFGYPGIMKCLLDAGANPDIPDEYGRTPVEFAASNGSRDMVEMLFPLTSPISTLPDWSIDGIISHVKHYGLKPRDKQKCAKRRTELKQKALKAFKEEEYFIAALLYSCAITLDPSPDEYATLLANRSLCCLRTKNGRAALPDATMCRRVRPFWPKACYREGSAFMLLKDYEKACKAFADGLKLDPTNGDLANALREAQEAAKDARRPEN

SEQ ID NO: 64266 - protein, 436 aa, Triticum aestivum
  peptide (1)..(436): Ceres Seq. ID no. 15222390
  misc_feature (382)..(414): Pfam Name: TPR Domain Pfam Description: TPR Domain
  misc_feature (2)..(294): Homolog of NCBI NO: 34329680 NR Description: unknown [Nicotiana benthamiana]
  misc_feature (199)..(426): Homolog of NCBI NO: 34910278 NR Description: OSJNBa0089K24.26 [Oryza sativa (japonica
  misc_feature (2)..(315): Homolog of NCBI NO: 24745936 NR Description: ankyrin-like protein [Solanum tuberosum]
  misc_feature (48)..(436): Homolog of NCBI NO: 13435247 NR Description: putative ankyrin [Oryza sativa]
  misc_feature (3)..(429): Homolog of NCBI NO: 15229331 NR Description: ankyrin-related protein [Arabidopsis thaliana]
  misc_feature (304)..(421): Homolog of NCBI NO: 13435243 NR Description: putative gag-pol polyprotein [Oryza sativa]
  misc_feature (1)..(301): Homolog of NCBI NO: 13435243 NR Description: putative gag-pol polyprotein [Oryza sativa]
  misc_feature (4)..(429): Homolog of NCBI NO: 34896852 NR Description: putative ankyrin [Oryza sativa]
  misc_feature (16)..(424): Homolog of NCBI NO: 27542766 NR Description: ankyrin-like protein-like protein [Sorghum
  misc_feature (13)..(422): Homolog of NCBI NO: 27542768 NR Description: ankyrin-like protein-like protein [Sorghum
MEAMGKQQREEVLLRAASDGNLRLLKKMARWMGSGGQGEAAVLAAVEDGEGGRPLHLAAGAGRVEVCRYLVEDLRLDVNQLNCQGHTPLYLSAYFGRAAAATYLLDHGADPLASKLRSPLYGAAMQGHCEMLEMLLSRGLDVDLNSVQGTALHAAACYKQHGMMKILLEHHADPNKVCYLNNTPLSLAMRQRDMSTELLECAKLLIKAGADVNFIDLDGDSYVTVAAKFGYPGIMKCLLDAGANPDIPDEYGRTPVEFAASNGSRDMVEMLFPLTSPISTLPDWSIDGIISHVKHYGLKPRDKQKCAKRRTELKQKALKAFKEEEYFIAALLYSCAITLDPSPDEYATLLANRSLCCLRTKNGRAALPDATMCRRVRPFWPKACYREGSAFMLLKDYEKACKAFADGLKLDPTNGDLANALREAQEAAKDARRPEN

SEQ ID NO: 64267 - protein, 433 aa, Triticum aestivum
  peptide (1)..(433): Ceres Seq. ID no. 15222391
  misc_feature (379)..(411): Pfam Name: TPR Domain Pfam Description: TPR Domain
  misc_feature (1)..(291): Homolog of NCBI NO: 34329680 NR Description: unknown [Nicotiana benthamiana]
  misc_feature (196)..(423): Homolog of NCBI NO: 34910278 NR Description: OSJNBa0089K24.26 [Oryza sativa (japonica
  misc_feature (1)..(312): Homolog of NCBI NO: 24745936 NR Description: ankyrin-like protein [Solanum tuberosum]
  misc_feature (45)..(433): Homolog of NCBI NO: 13435247 NR Description: putative ankyrin [Oryza sativa]
  misc_feature (1)..(426): Homolog of NCBI NO: 15229331 NR Description: ankyrin-related protein [Arabidopsis thaliana]
  misc_feature (301)..(418): Homolog of NCBI NO: 13435243 NR Description: putative gag-pol polyprotein [Oryza sativa]
  misc_feature (1)..(298): Homolog of NCBI NO: 13435243 NR Description: putative gag-pol polyprotein [Oryza sativa]
  misc_feature (1)..(426): Homolog of NCBI NO: 34896852 NR Description: putative ankyrin [Oryza sativa]
  misc_feature (13)..(421): Homolog of NCBI NO: 27542766 NR Description: ankyrin-like protein-like protein [Sorghum
  misc_feature (10)..(419): Homolog of NCBI NO: 27542768 NR Description: ankyrin-like protein-like protein [Sorghum
MGKQQREEVLLRAASDGNLRLLKKMARWMGSGGQGEAAVLAAVEDGEGGRPLHLAAGAGRVEVCRYLVEDLRLDVNQLNCQGHTPLYLSAYFGRAAAATYLLDHGADPLASKLRSPLYGAAMQGHCEMLEMLLSRGLDVDLNSVQGTALHAAACYKQHGMMKILLEHHADPNKVCYLNNTPLSLAMRQRDMSTELLECAKLLIKAGADVNFIDLDGDSYVTVAAKFGYPGIMKCLLDAGANPDIPDEYGRTPVEFAASNGSRDMVEMLFPLTSPISTLPDWSIDGIISHVKHYGLKPRDKQKCAKRRTELKQKALKAFKEEEYFIAALLYSCAITLDPSPDEYATLLANRSLCCLRTKNGRAALPDATMCRRVRPFWPKACYREGSAFMLLKDYEKACKAFADGLKLDPTNGDLANALREAQEAAKDARRPEN

SEQ ID NO: 64268 - DNA, 1412 bp, Triticum aestivum
  misc_feature (1)..(1412): Ceres Seq. ID no. 14302224
acgtaaggaagaagcaagaagcaggtagcagctagcataccacactcgatcgatcatacacatacaccatgccggccgcgcagcacatcgaacgagaccaagacctcgccatgagcagcgacgagttacttcaagctcagctggagctctaccaccacggcctcgccttcgtcaagtcactggcgctcaaggccgccacggacctgcgcatccccgacgccatccaccgccgcggcggcgccgccaccttgtccgagctggcctccgacaccgggatccaccccacgaagcgctccaacctccggcgggtcatgcgggtgctcaccaccaccggggtattctccattgtccaaggcaaaggcagcaacgaccacgccggtgatggcgctgcgtattacaagctcacgcgggtctcccggctccttgtcgagagatcaccgcacaacctgtccccgatggtgggcaccatcgtcaacacgttatgctggacctctctcctcaaaatgcccgagtggtttacccaaggccaagagggagagtcggcacagtcgcactcgctcgtccagctggccaacggctgcacgttctgggacaccaccaaggtcgatggcggcttgttcaacgacggcatggccgcggacagccgcatcgccatgaaggtcctgttgaaggagcacggcggagcgttcggggaagtgaaaagctcgctggtggacatcggcggcaaccatggcgccaccgcgtcggccgtggcgagagcgttcccgcacctcaagtgcagcgttctggacctcccacacgtcgtcgccgcggctcccgccagcgacattttgaccttcgtcgctggaaatatgttcgagtatgtcccacctgcggatgctgttctactcaagtggattttgcatgactggaaacacgaagattgcgtcaagataatgcgccggtgcaaggaagcgatcccagcgaaagaagccggaggaaaggtgataatcatcgacatggtggtgggatatccggtgactcagcccaaccattccaaagaggcgcaggttttgttagatatctacatgatgggctccgatggaatggagcgagaggaaaacgagtggagcttgattttctccgaagccgggttcagcgactacaagatcactccaaccaatgggattcgatcaattatcgaagtatacccttaaatgtacttacttccacttcggagatactatctccttccgtccgtacgtgtttattagtcttgcacgtgtaattgacttggtaaattagcagccaagatacacgtgcaagacttataaaccggaaaggaaggagtcgtcatttgatttgtaataaatctcaccaggaactctctgtattattgcatttaagttttactttttgtttatagattttac

SEQ ID NO: 64269 - protein, 375 aa, Triticum aestivum
  peptide (1)..(375): Ceres Seq. ID no. 14302225
  misc_feature (101)..(351): Pfam Name: O-methyltransferase Pfam Description: O-methyltransferase
  misc_feature (16)..(375): Homolog of NCBI NO: 2282586 NR Description: methyltransferase [Prunus armeniaca]
  misc_feature (19)..(375): Homolog of NCBI NO: 38175602 NR Description: putative catechol O-methyltransferase
  misc_feature (5)..(375): Homolog of NCBI NO: 20514369 NR Description: orcinol O-methyltransferase [Rosa hybrid
  misc_feature (5)..(375): Homolog of NCBI NO: 20514367 NR Description: orcinol O-methyltransferase [Rosa hybrid
  misc_feature (9)..(375): Homolog of NCBI NO: 34909608 NR Description: putative o-methyltransferase
  misc_feature (15)..(375): Homolog of NCBI NO: 22093735 NR Description: putative o-methyltransferase
  misc_feature (15)..(375): Homolog of NCBI NO: 4098238 NR Description: o-methyltransferase [Triticum aestivum]
  misc_feature (16)..(375): Homolog of NCBI NO: 1353193 NR Description: O-METHYLTRANSFERASE ZRP4 (OMT)
  misc_feature (4)..(375): Homolog of NCBI NO: 37530606 NR Description: putative o-methyltransferase ZRP4
  misc_feature (4)..(375): Homolog of NCBI NO: 37530600 NR Description: putative o-methyltransferase ZRP4
MPAAQHIERDQDLAMSSDELLQAQLELYHHGLAFVKSLALKAATDLRIPDAIHRRGGAATLSELASDTGIHPTKRSNLRRVMRVLTTTGVFSIVQGKGSNDHAGDGAAYYKLTRVSRLLVERSPHNLSPMVGTIVNTLCWTSLLKMPEWFTQGQEGESAQSHSLVQLANGCTFWDTTKVDGGLFNDGMAADSRIAMKVLLKEHGGAFGEVKSSLVDIGGNHGATASAVARAFPHLKCSVLDLPHVVAAAPASDILTFVAGNMFEYVPPADAVLLKWILHDWKHEDCVKIMRRCKEAIPAKEAGGKVIIIDMVVGYPVTQPNHSKEAQVLLDIYMMGSDGMEREENEWSLIFSEAGFSDYKITPTNGIRSIIEVYP

SEQ ID NO: 64270 - protein, 361 aa, Triticum aestivum
  peptide (1)..(361): Ceres Seq. ID no. 14302226
  misc_feature (87)..(337): Pfam Name: O-methyltransferase Pfam Description: O-methyltransferase
  misc_feature (2)..(361): Homolog of NCBI NO: 2282586 NR Description: methyltransferase [Prunus armeniaca]
  misc_feature (5)..(361): Homolog of NCBI NO: 38175602 NR Description: putative catechol O-methyltransferase
  misc_feature (1)..(361): Homolog of NCBI NO: 20514369 NR Description: orcinol O-methyltransferase [Rosa hybrid
  misc_feature (1)..(361): Homolog of NCBI NO: 20514367 NR Description: orcinol O-methyltransferase [Rosa hybrid
  misc_feature (1)..(361): Homolog of NCBI NO: 34909608 NR Description: putative o-methyltransferase
  misc_feature (1)..(361): Homolog of NCBI NO: 22093735 NR Description: putative o-methyltransferase
  misc_feature (1)..(361): Homolog of NCBI NO: 4098238 NR Description: o-methyltransferase [Triticum aestivum]
  misc_feature (2)..(361): Homolog of NCBI NO: 1353193 NR Description: O-METHYLTRANSFERASE ZRP4 (OMT)
  misc_feature (1)..(361): Homolog of NCBI NO: 37530606 NR Description: putative o-methyltransferase ZRP4
  misc_feature (1)..(361): Homolog of NCBI NO: 37530600 NR Description: putative o-methyltransferase ZRP4
MSSDELLQAQLELYHHGLAFVKSLALKAATDLRIPDAIHRRGGAATLSELASDTGIHPTKRSNLRRVMRVLTTTGVFSIVQGKGSNDHAGDGAAYYKLTRVSRLLVERSPHNLSPMVGTIVNTLCWTSLLKMPEWFTQGQEGESAQSHSLVQLANGCTFWDTTKVDGGLFNDGMAADSRIAMKVLLKEHGGAFGEVKSSLVDIGGNHGATASAVARAFPHLKCSVLDLPHVVAAAPASDILTFVAGNMFEYVPPADAVLLKWILHDWKHEDCVKIMRRCKEAIPAKEAGGKVIIIDMVVGYPVTQPNHSKEAQVLLDIYMMGSDGMEREENEWSLIFSEAGFSDYKITPTNGIRSIIEVYP

SEQ ID NO: 64271 - protein, 294 aa, Triticum aestivum
  peptide (1)..(294): Ceres Seq. ID no. 14302227
  misc_feature (20)..(270): Pfam Name: O-methyltransferase Pfam Description: O-methyltransferase
  misc_feature (1)..(294): Homolog of NCBI NO: 2282586 NR Description: methyltransferase [Prunus armeniaca]
  misc_feature (1)..(294): Homolog of NCBI NO: 38175602 NR Description: putative catechol O-methyltransferase
  misc_feature (1)..(294): Homolog of NCBI NO: 20514369 NR Description: orcinol O-methyltransferase [Rosa hybrid
  misc_feature (1)..(294): Homolog of NCBI NO: 20514367 NR Description: orcinol O-methyltransferase [Rosa hybrid
  misc_feature (1)..(294): Homolog of NCBI NO: 34909608 NR Description: putative o-methyltransferase
  misc_feature (1)..(294): Homolog of NCBI NO: 22093735 NR Description: putative o-methyltransferase
  misc_feature (1)..(294): Homolog of NCBI NO: 4098238 NR Description: o-methyltransferase [Triticum aestivum]
  misc_feature (1)..(294): Homolog of NCBI NO: 1353193 NR Description: O-METHYLTRANSFERASE ZRP4 (OMT)
  misc_feature (1)..(294): Homolog of NCBI NO: 37530606 NR Description: putative o-methyltransferase ZRP4
  misc_feature (1)..(294): Homolog of NCBI NO: 37530600 NR Description: putative o-methyltransferase ZRP4
MRVLTTTGVFSIVQGKGSNDHAGDGAAYYKLTRVSRLLVERSPHNLSPMVGTIVNTLCWTSLLKMPEWFTQGQEGESAQSHSLVQLANGCTFWDTTKVDGGLFNDGMAADSRIAMKVLLKEHGGAFGEVKSSLVDIGGNHGATASAVARAFPHLKCSVLDLPHVVAAAPASDILTFVAGNMFEYVPPADAVLLKWILHDWKHEDCVKIMRRCKEAIPAKEAGGKVIIIDMVVGYPVTQPNHSKEAQVLLDIYMMGSDGMEREENEWSLIFSEAGFSDYKITPTNGIRSIIEVYP

SEQ ID NO: 64272 - DNA, 1188 bp, Triticum aestivum
  misc_feature (1)..(1188): Ceres Seq. ID no. 13597338
aaaaacagatcagtccggggtcgtggcctccactcggcatcttcttcctcccccacatcgcacttcctcccctgctagattcgtccctccaccgaccggcaaggcctctctcctgcacttccctcgcccaaggttgcaccagagaaggcggaaaacatcacagtttgcgaaatcgtggagcggtagagagagatggccgagacggtgttcgctccgtgtttggaagggatgaagcatgtcaggtcggacagcggggtcatgctcgccaagcccttccttgatgtctgcaagcaaatcttgcctgtcctggataaatttggtgctgctatggcaattgtgaagagtgatattggaggtaatatcacgaggttggagaacaagtattcttcagacccgtcaaaatatgagcacttgtacaccatggtccaagaagaagttgaaaagaagaccgcaaagggttcatcaagctgcacaaatggacttctatggctcacgagggctatggacttccttgttgaactgttccgtaatctacttgaccatccagactggactatgagtcaagcatgtactgattcatacacaaaaactctgaagaaatggcatgggtggctcgccagttccagttttacggtggctatgaagcttgctcctaacaaagataaatttatggaggtaattagcggaacgggtgatatcaaagcagacattgagaaattctgcaccaccttttatccctttctcaaggagaatcatgacttcctggccagtgttgggctcgatgatatgaaggcttcttaatgcaatacacaccgacaatcatcacaaatatgaagtgctgctattttctcgaattttattgtggccaaggatacactgttttgcatactgatcttcaggaaattatagacgaataataagtcaaaatgtttgggtgttcatgacccatagctacttacatacaagatgaattgaatgtatgcatgggatcaaaattaacttttgaaagtcaccttgtcagccaagccggccattttaccaattgatgtaactgaagagaacgcagaggatgcagatatgtggtgatcttgtcgttcagtttataaactgctgtgtaagtgattctgtttataaactgctgtataagtgatgaggcgaagatgcaaattaagagtctgttattgatgc

SEQ ID NO: 64273 - protein, 202 aa, Triticum aestivum
  peptide (1)..(202): Ceres Seq. ID no. 13597339
  misc_feature (10)..(200): Homolog of NCBI NO: 28571195 NR Description: CG6299-PB [Drosophila melanogaster]
  misc_feature (19)..(164): Homolog of NCBI NO: 30481662 NR Description: Unknown (protein for MGC:58573) [Mus musculus]
  misc_feature (64)..(201): Homolog of NCBI NO: 21554671 NR Description: unknown [Arabidopsis thaliana]
  misc_feature (64)..(201): Homolog of NCBI NO: 18402939 NR Description: expressed protein [Arabidopsis thaliana]
  misc_feature (59)..(201): Homolog of NCBI NO: 30686173 NR Description: expressed protein [Arabidopsis thaliana]
  misc_feature (28)..(188): Homolog of NCBI NO: 39545646 NR Description: OJ000114_01.1 [Oryza sativa (japonica
  misc_feature (28)..(202): Homolog of NCBI NO: 38344077 NR Description: OSJNBa0006B20.21 [Oryza sativa (japonica
  misc_feature (26)..(201): Homolog of NCBI NO: 9280228 NR Description: gene_id:MXL8.12~unknown protein [Arabidopsis
  misc_feature (1)..(202): Homolog of NCBI NO: 18403285 NR Description: expressed protein [Arabidopsis thaliana]
  misc_feature (1)..(202): Homolog of NCBI NO: 34901156 NR Description: hypothetical protein~similar to Arabidopsis
MAETVFAPCLEGMKHVRSDSGVMLAKPFLDVCKQILPVLDKFGAAMAIVKSDIGGNITRLENKYSSDPSKYEHLYTMVQEEVEKKTAKGSSSCTNGLLWLTRAMDFLVELFRNLLDHPDWTMSQACTDSYTKTLKKWHGWLASSSFTVAMKLAPNKDKFMEVISGTGDIKADIEKFCTTFYPFLKENHDFLASVGLDDMKAS

SEQ ID NO: 64274 - protein, 190 aa, Triticum aestivum
  peptide (1)..(190): Ceres Seq. ID no. 13597340
  misc_feature (1)..(188): Homolog of NCBI NO: 28571195 NR Description: CG6299-PB [Drosophila melanogaster]
  misc_feature (7)..(152): Homolog of NCBI NO: 30481662 NR Description: Unknown (protein for MGC:58573) [Mus musculus]
  misc_feature (52)..(189): Homolog of NCBI NO: 21554671 NR Description: unknown [Arabidopsis thaliana]
  misc_feature (52)..(189): Homolog of NCBI NO: 18402939 NR Description: expressed protein [Arabidopsis thaliana]
  misc_feature (47)..(189): Homolog of NCBI NO: 30686173 NR Description: expressed protein [Arabidopsis thaliana]
  misc_feature (16)..(176): Homolog of NCBI NO: 39545646 NR Description: OJ000114_01.1 [Oryza sativa (japonica
  misc_feature (16)..(190): Homolog of NCBI NO: 38344077 NR Description: OSJNBa0006B20.21 [Oryza sativa (japonica
  misc_feature (14)..(189): Homolog of NCBI NO: 9280228 NR Description: gene_id:MXL8.12~unknown protein [Arabidopsis
  misc_feature (1)..(190): Homolog of NCBI NO: 18403285 NR Description: expressed protein [Arabidopsis thaliana]
  misc_feature (1)..(190): Homolog of NCBI NO: 34901156 NR Description: hypothetical protein~similar to Arabidopsis
MKHVRSDSGVMLAKPFLDVCKQILPVLDKFGAAMAIVKSDIGGNITRLENKYSSDPSKYEHLYTMVQEEVEKKTAKGSSSCTNGLLWLTRAMDFLVELFRNLLDHPDWTMSQACTDSYTKTLKKWHGWLASSSFTVAMKLAPNKDKFMEVISGTGDIKADIEKFCTTFYPFLKENHDFLASVGLDDMKAS

SEQ ID NO: 64275 - protein, 180 aa, Triticum aestivum
  peptide (1)..(180): Ceres Seq. ID no. 13597341
  misc_feature (1)..(178): Homolog of NCBI NO: 28571195 NR Description: CG6299-PB [Drosophila melanogaster]
  misc_feature (1)..(142): Homolog of NCBI NO: 30481662 NR Description: Unknown (protein for MGC:58573) [Mus musculus]
  misc_feature (42)..(179): Homolog of NCBI NO: 21554671 NR Description: unknown [Arabidopsis thaliana]
  misc_feature (42)..(179): Homolog of NCBI NO: 18402939 NR Description: expressed protein [Arabidopsis thaliana]
  misc_feature (37)..(179): Homolog of NCBI NO: 30686173 NR Description: expressed protein [Arabidopsis thaliana]
  misc_feature (6)..(166): Homolog of NCBI NO: 39545646 NR Description: OJ000114_01.1 [Oryza sativa (japonica
  misc_feature (6)..(180): Homolog of NCBI NO: 38344077 NR Description: OSJNBa0006B20.21 [Oryza sativa (japonica
  misc_feature (4)..(179): Homolog of NCBI NO: 9280228 NR Description: gene_id:MXL8.12~unknown protein [Arabidopsis
  misc_feature (1)..(180): Homolog of NCBI NO: 18403285 NR Description: expressed protein [Arabidopsis thaliana]
  misc_feature (1)..(180): Homolog of NCBI NO: 34901156 NR Description: hypothetical protein~similar to Arabidopsis
MLAKPFLDVCKQILPVLDKFGAAMAIVKSDIGGNITRLENKYSSDPSKYEHLYTMVQEEVEKKTAKGSSSCTNGLLWLTRAMDFLVELFRNLLDHPDWTMSQACTDSYTKTLKKWHGWLASSSFTVAMKLAPNKDKFMEVISGTGDIKADIEKFCTTFYPFLKENHDFLASVGLDDMKAS

SEQ ID NO: 64276 - DNA, 1294 bp, Triticum aestivum
  misc_feature (1)..(1294): Ceres Seq. ID no. 13662949
gcaacaagatcagtgatgaatatttctctgaaaaaaacaagccagattcgccaagcgcccggtctccgctctccacgtaacccttctcccctcccaacctccgcgtcgtcgcaaacccaaatcctcctcccactccagccccccctcatcagatcacgcgagcagggggcaccggaaccggatcgggcgcggcggcggaggcgggcgacggcgatgatgcacggcgtgggcccgtcggacgacgccgcggcggcggcggcgctggagctgcaggagtccgggtgggaggagctgcggcgggaggcgcggaagctggagggggacctggacgtgaagctctcctcgtacgcgcgcctcgccgcgcgctcctcctccgcctccgcctcggcctcggcctcggcggcctcccccaccgccgaccgctcctcctggaagtccacggagctcgagatccaggcgctgctcgacaagctgcaggacgtcaacgacgccatgagccgctgcgccgcgcccgccgcccccgccaccgcttccgtctcccagaagctcgcgcgccaccgcgacatcctgcacgagttcacgcaggagttcaggaggacgcgggggaacctgagctccatgagggagcacgccgacctgctcagctccgtgcgcggcgacatcaccgagtccaaggctaccggcggcatgtcgccgagggtacatttgctccgggagagggcttccattcacggcagcgtcaaccagatagacgaggtaattgggcaagctcaaagcacaagagcagccctatccaatcagagggccttgtttggagatgttcaggggaaagtcaagcagttgggtgaaaaattccctgtggtccgaggcctccttggcgccatcaagaggaagaaatcaaaggacacgatcatcctttcagcagtaatcgcggcctgcaccatctttttgatcatctactggctctcaaaatgatcggtccgttgttgggaaagctcgcgacggggacttcctctctcaccacagaatgactgacaagtgaccaacagatggcacgataaaagactggtgattattatccatttcttagggctagtacgagggaatgggagatcccgttgtgtttagctctcaccgtgctgccctcgacatatcttgtttttggagatctcccttgtcatttataccttagatcaattttgtttggtgaattgagatgttgcttgtttcgagtaaatacgatgacacacttctgacacttccatcttacaatgggaattgagctgttgcttgt

SEQ ID NO: 64277 - protein, 324 aa, Triticum aestivum
  peptide (1)..(324): Ceres Seq. ID no. 13662950
  misc_feature (151)..(302): Pfam Name: Vesicle transport v-SNARE protein Pfam Description: Vesicle transport v-SNARE protein
  misc_feature (97)..(320): Homolog of NCBI NO: 3335132 NR Description: GOS28/P28 protein [Homo sapiens]
  misc_feature (95)..(320): Homolog of NCBI NO: 11132188 NR Description: 28 kDa Golgi SNARE protein (Golgi SNAP receptor
  misc_feature (93)..(320): Homolog of NCBI NO: 4758456 NR Description: golgi SNAP receptor complex member 1; Golgi SNARE
  misc_feature (95)..(320): Homolog of NCBI NO: 31542904 NR Description: golgi SNAP receptor complex member 1; cis-Golgi
  misc_feature (95)..(320): Homolog of NCBI NO: 30388705 NR Description: Gosr1 protein [Mus musculus]
  misc_feature (95)..(320): Homolog of NCBI NO: 16758358 NR Description: golgi SNAP receptor complex member 1; cis-Golgi
  misc_feature (95)..(320): Homolog of NCBI NO: 11132038 NR Description: 28 kDa Golgi SNARE protein (Golgi SNAP receptor
  misc_feature (93)..(324): Homolog of NCBI NO: 18394296 NR Description: cis-Golgi SNARE protein, putative [Arabidopsis
  misc_feature (95)..(320): Homolog of NCBI NO: 28280046 NR Description: Similar to golgi SNAP receptor complex member 1
  misc_feature (86)..(324): Homolog of NCBI NO: 15225431 NR Description: cis-Golgi SNARE protein, putative [Arabidopsis
ATRSVMNISLKKTSQIRQAPGLRSPRNPSPLPTSASSQTQILLPLQPPLIRSREQGAPEPDRARRRRRATAMMHGVGPSDDAAAAAALELQESGWEELRREARKLEGDLDVKLSSYARLAARSSSASASASASAASPTADRSSWKSTELEIQALLDKLQDVNDAMSRCAAPAAPATASVSQKLARHRDILHEFTQEFRRTRGNLSSMREHADLLSSVRGDITESKATGGMSPRVHLLRERASIHGSVNQIDEVIGQAQSTRAALSNQRALFGDVQGKVKQLGEKFPVVRGLLGAIKRKKSKDTIILSAVIAACTIFLIIYWLSK

SEQ ID NO: 64278 - protein, 319 aa, Triticum aestivum
  peptide (1)..(319): Ceres Seq. ID no. 13662951
  misc_feature (146)..(297): Pfam Name: Vesicle transport v-SNARE protein Pfam Description: Vesicle transport v-SNARE protein
  misc_feature (92)..(315): Homolog of NCBI NO: 3335132 NR Description: GOS28/P28 protein [Homo sapiens]
  misc_feature (90)..(315): Homolog of NCBI NO: 11132188 NR Description: 28 kDa Golgi SNARE protein (Golgi SNAP receptor
  misc_feature (88)..(315): Homolog of NCBI NO: 4758456 NR Description: golgi SNAP receptor complex member 1; Golgi SNARE
  misc_feature (90)..(315): Homolog of NCBI NO: 31542904 NR Description: golgi SNAP receptor complex member 1; cis-Golgi
  misc_feature (90)..(315): Homolog of NCBI NO: 16758358 NR Description: golgi SNAP receptor complex member 1; cis-Golgi
  misc_feature (90)..(315): Homolog of NCBI NO: 30388705 NR Description: Gosr1 protein [Mus musculus]
  misc_feature (90)..(315): Homolog of NCBI NO: 11132038 NR Description: 28 kDa Golgi SNARE protein (Golgi SNAP receptor
  misc_feature (88)..(319): Homolog of NCBI NO: 18394296 NR Description: cis-Golgi SNARE protein, putative [Arabidopsis
  misc_feature (90)..(315): Homolog of NCBI NO: 28280046 NR Description: Similar to golgi SNAP receptor complex member 1
  misc_feature (81)..(319): Homolog of NCBI NO: 15225431 NR Description: cis-Golgi SNARE protein, putative [Arabidopsis
MNISLKKTSQIRQAPGLRSPRNPSPLPTSASSQTQILLPLQPPLIRSREQGAPEPDRARRRRRATAMMHGVGPSDDAAAAAALELQESGWEELRREARKLEGDLDVKLSSYARLAARSSSASASASASAASPTADRSSWKSTELEIQALLDKLQDVNDAMSRCAAPAAPATASVSQKLARHRDILHEFTQEFRRTRGNLSSMREHADLLSSVRGDITESKATGGMSPRVHLLRERASIHGSVNQIDEVIGQAQSTRAALSNQRALFGDVQGKVKQLGEKFPVVRGLLGAIKRKKSKDTIILSAVIAACTIFLIIYWLSK

SEQ ID NO: 64279 - protein, 253 aa, Triticum aestivum
  peptide (1)..(253): Ceres Seq. ID no. 13662952
  misc_feature (80)..(231): Pfam Name: Vesicle transport v-SNARE protein Pfam Description: Vesicle transport v-SNARE protein
  misc_feature (26)..(249): Homolog of NCBI NO: 3335132 NR Description: GOS28/P28 protein [Homo sapiens]
  misc_feature (24)..(249): Homolog of NCBI NO: 11132188 NR Description: 28 kDa Golgi SNARE protein (Golgi SNAP receptor
  misc_feature (22)..(249): Homolog of NCBI NO: 4758456 NR Description: golgi SNAP receptor complex member 1; Golgi SNARE
  misc_feature (24)..(249): Homolog of NCBI NO: 31542904 NR Description: golgi SNAP receptor complex member 1; cis-Golgi
  misc_feature (24)..(249): Homolog of NCBI NO: 16758358 NR Description: golgi SNAP receptor complex member 1; cis-Golgi
  misc_feature (24)..(249): Homolog of NCBI NO: 30388705 NR Description: Gosr1 protein [Mus musculus]
  misc_feature (24)..(249): Homolog of NCBI NO: 11132038 NR Description: 28 kDa Golgi SNARE protein (Golgi SNAP receptor
  misc_feature (22)..(253): Homolog of NCBI NO: 18394296 NR Description: cis-Golgi SNARE protein, putative [Arabidopsis
  misc_feature (24)..(249): Homolog of NCBI NO: 28280046 NR Description: Similar to golgi SNAP receptor complex member 1
  misc_feature (15)..(253): Homolog of NCBI NO: 15225431 NR Description: cis-Golgi SNARE protein, putative [Arabidopsis
MMHGVGPSDDAAAAAALELQESGWEELRREARKLEGDLDVKLSSYARLAARSSSASASASASAASPTADRSSWKSTELEIQALLDKLQDVNDAMSRCAAPAAPATASVSQKLARHRDILHEFTQEFRRTRGNLSSMREHADLLSSVRGDITESKATGGMSPRVHLLRERASIHGSVNQIDEVIGQAQSTRAALSNQRALFGDVQGKVKQLGEKFPVVRGLLGAIKRKKSKDTIILSAVIAACTIFLIIYWLSK

SEQ ID NO: 64280 - DNA, 1036 bp, Triticum aestivum
  misc_feature (1)..(1036): Ceres Seq. ID no. 12618436
gaacatcctaaccggaaaattaatcgatgctacacagcaataacgcggcagaagaaagatccagcagaaggcaacaacagccaaagactgaaggagaggggatccggcttccggcgaaatggctgcgctgccgccacctccgccgtcgctggagccggagatcggccccgacggcctcgcccgagactcccccgtcctggcctacactgagaaggtcattgcggaggagcagctgcaactgaagaaatatattcaggaaaattattccaaaattcgggatgttgagaaggagctagagaatctgactctagaagttaaactgacagctggaccaaagaaagcagcactcgagcatttgaggaaaaagattgagatgtcaactgagagaatacgtttggctaaggtgaaagaggacgaggcaaaaaaggcctgggaagctgctgcacaagttgttaaagaggaagaggaggctaagcagaggctatgtgatgatctgaaccggttggttcaagagagcgcggcttcacaatattcgaggttagaagagttaaagaagcgtttagaatgtctaaatcccatcagggcttctgtcgatgtttctggtatcaacattgtacagcaggctgccacaaattcggtacctcagcaacccacttcacaaaatctagcgaatgcaattgcccctgcaagcaatatccacaagcccgccaccagcggatcacagcaacaaagaaccgctgaggcggaaaggaagcagagatcatcaaactcgggaggaagagggagaggcggtgtgatggtcctccccaagggaaggggaagctctggatcaggatggacaggtgctgggtttgagacatgatgctgggatccgtagttatatatacttgaaagaattggcatggttgtcttggtataaaacgatggcttggttgtcttggtataaaacgatggcttggttggaactggaaggttgaaagtgtaatggaatgtcgatcctttttggatgtgttagaagcgtgagagggatttggcg

SEQ ID NO: 64281 - protein, 247 aa, Triticum aestivum
  peptide (1)..(247): Ceres Seq. ID no. 12618437
  misc_feature (9)..(103): Homolog of NCBI NO: 10177883 NR Description: gene_id:MIO24.2~unknown protein [Arabidopsis
  misc_feature (1)..(246): Homolog of NCBI NO: 37531870 NR Description: hypothetical protein [Oryza sativa (japonica
  misc_feature (9)..(246): Homolog of NCBI NO: 21593113 NR Description: unknown [Arabidopsis thaliana]
  misc_feature (9)..(246): Homolog of NCBI NO: 18423326 NR Description: expressed protein
MAALPPPPPSLEPEIGPDGLARDSPVLAYTEKVIAEEQLQLKKYIQENYSKIRDVEKELENLTLEVKLTAGPKKAALEHLRKKIEMSTERIRLAKVKEDEAKKAWEAAAQVVKEEEEAKQRLCDDLNRLVQESAASQYSRLEELKKRLECLNPIRASVDVSGINIVQQAATNSVPQQPTSQNLANAIAPASNIHKPATSGSQQQRTAEAERKQRSSNSGGRGRGGVMVLPKGRGSSGSGWTGAGFET

SEQ ID NO: 64282 - protein, 162 aa, Triticum aestivum
  peptide (1)..(162): Ceres Seq. ID no. 12618438
  misc_feature (1)..(18): Homolog of NCBI NO: 10177883 NR Description: gene_id:MIO24.2~unknown protein [Arabidopsis
  misc_feature (1)..(161): Homolog of NCBI NO: 37531870 NR Description: hypothetical protein [Oryza sativa (japonica
  misc_feature (1)..(161): Homolog of NCBI NO: 21593113 NR Description: unknown [Arabidopsis thaliana]
  misc_feature (1)..(161): Homolog of NCBI NO: 18423326 NR Description: expressed protein
MSTERIRLAKVKEDEAKKAWEAAAQVVKEEEEAKQRLCDDLNRLVQESAASQYSRLEELKKRLECLNPIRASVDVSGINIVQQAATNSVPQQPTSQNLANAIAPASNIHKPATSGSQQQRTAEAERKQRSSNSGGRGRGGVMVLPKGRGSSGSGWTGAGFET

SEQ ID NO: 64283 - DNA, 1764 bp, Triticum aestivum
  misc_feature (1)..(1764): Ceres Seq. ID no. 13597796
acctagaacatcctaatcgaaaactaaaagaaaaaaaaacactcccctaatcccctccatcttgccgccgccgccgccggattgcttccgcccgtcgccatgtccgccgcgggagaccgctctcccccgcgagaggaaggccgcgcttcgattcgcgcccgggctctccccagcgggccgccggccgggaggctcatcgacgacatcctcgtggagatcctctcgcgcgtcccggccaaggaactctgccgctgcaagagcgtctcgaagcactggttcggcctcatccaccaccccgaccaccgcaagcggctcccccaaaccctggccggcttcttctacggcagcagcgccggcaccaccgcgcagcggctcctggagctgcccttccgcttcaccagcgtctcgggggaccgctgccctccgttcggcgcctccctcaccttcctgcccaaccaccacctgcccgtcgatctgctggactcctgcaacggcctcctcctctgccgatgttaccacgtctccgacggggttggcgcgttccattacgtcgtgtgcaatcccgccacccagaagtgggtcgtgttgcccagctcctgcaaggacagcagcgaggtggccaccacatctctgggcttcgacccggctctatcgtcgcatttccatgtgtttgagctggtagttgagcagaattatactcaggacactgagctttgcggagtggcggtgtattcgtctgaaaccggagaatggatttataaggagaagagatggaacagagctagtcggcactccgcaacagtctttctcgacggccttctgttttttcgtgtccttggccttgaatatcacgactgtgtggctgcggtggacacaaagggagaaacatggatgaaattcagggtccctggtggtcaggttgatgattttggtctggctgatggttttgttcagcagatgttattcagggttcctggtggtccggctgatgattttggtctggctcatggttttattcagcagtcgcagggctgcttgcattttgccaattttcagagggatgaacatggtgttggcattcgattggtggtttatgttctgaaaaactatgaaagcgaagaatggatagtgaagcatagcattaaaacttcagacatatgtggatggacagatttatggcttgatgcggattttgatttcattgcgattcatccagaatgcaactcgttgttcttcattgcggggggtgtcacattaatgtgctataatatggataatcggcaggtcaaagtgatctcctatcttggaggtgccaagccgctatttctgccctatgtgccgttgtacacagagtcactatcactgcactgctaagtggatctctgatcggagtcaattcttcattctatggggcagcgtgcttgccatgtctgcttgaatttggctctcatttgctctgactgatgaatgcatgtttttctggtttggagcaatggtggttcagtatggagggaatttgactgatttctctgtgatctgctatccaaatttgcactaaactttctgccatatgtattggtctctggtttagtcaacttctaccttcatgcattgcttaacctcgtgtagcgtttgtgttaaggtactatgatcattatgtaagacatggacaatggttatcatgcaggaaaacttttctcgaacatcatgctgagggttaaacttttatcttctacagtatttgcagccatgggaattataagc

SEQ ID NO: 64284 - protein, 424 aa, Triticum aestivum
  peptide (1)..(424): Ceres Seq. ID no. 13597797
  misc_feature (304)..(420): Homolog of NCBI NO: 34898802 NR Description: OJ1131_E05.28 [Oryza sativa (japonica
  misc_feature (58)..(307): Homolog of NCBI NO: 34898802 NR Description: OJ1131_E05.28 [Oryza sativa (japonica
  misc_feature (304)..(420): Homolog of NCBI NO: 33146479 NR Description: receptor-like kinase-like [Oryza sativa (japonica
  misc_feature (58)..(307): Homolog of NCBI NO: 33146479 NR Description: receptor-like kinase-like [Oryza sativa (japonica
  misc_feature (304)..(420): Homolog of NCBI NO: 34898810 NR Description: OJ1131_E05.32 [Oryza sativa (japonica
  misc_feature (27)..(279): Homolog of NCBI NO: 34898810 NR Description: OJ1131_E05.32 [Oryza sativa (japonica
  misc_feature (304)..(421): Homolog of NCBI NO: 34898790 NR Description: OJ1131_E05.21 [Oryza sativa (japonica
  misc_feature (23)..(275): Homolog of NCBI NO: 34898790 NR Description: OJ1131_E05.21 [Oryza sativa (japonica
  misc_feature (304)..(424): Homolog of NCBI NO: 34898788 NR Description: OJ1131_E05.20 [Oryza sativa (japonica
  misc_feature (23)..(275): Homolog of NCBI NO: 34898788 NR Description: OJ1131_E05.20 [Oryza sativa (japonica
MSAAGDRSPPREEGRASIRARALPSGPPAGRLIDDILVEILSRVPAKELCRCKSVSKHWFGLIHHPDHRKRLPQTLAGFFYGSSAGTTAQRLLELPFRFTSVSGDRCPPFGASLTFLPNHHLPVDLLDSCNGLLLCRCYHVSDGVGAFHYVVCNPATQKWVVLPSSCKDSSEVATTSLGFDPALSSHFHVFELVVEQNYTQDTELCGVAVYSSETGEWIYKEKRWNRASRHSATVFLDGLLFFRVLGLEYHDCVAAVDTKGETWMKFRVPGGQVDDFGLADGFVQQMLFRVPGGPADDFGLAHGFIQQSQGCLHFANFQRDEHGVGIRLVVYVLKNYESEEWIVKHSIKTSDICGWTDLWLDADFDFIAIHPECNSLFFIAGGVTLMCYNMDNRQVKVISYLGGAKPLFLPYVPLYTESLSLHC

SEQ ID NO: 64285 - DNA, 904 bp, Triticum aestivum
  misc_feature (1)..(904): Ceres Seq. ID no. 13584363
aggcctcgaaactgggccgagtgttggcccacgctccttgggctaaaccctaacgcagagcgtcctctcctctccaacccgacgccggcctccgcctcctcctccgccctcgcctccttcctagccgcacaccttgctggtctggtttgggttgacccggagtgaggcgggatggcgctgaggggcgtttggcagctgcagaagctcgtggtgaacttctgcgattggggagggagcagcaaggggatcagggcttttatggagtcgcatcttccagctatcaaggaaaagaatccccagttagaggtggtgacacagcttgtccgtggccagcatcctaacttgaagggcatttacaaaaaccataatgagagagtggtttgcgtcagaaacttggcacctgaggacataatgctgcaagctagtaggctaaggtgttctctgggcaggaaagtggtgaagctgagaaccagacacgtgacgaagcggccaagcgtccagggaacatggacgacggaactgaagatgtgagtcaaagttcctgatggcacgcactcagcaacaaccgtctcagatctatagcaagaactccgtgctgctattagacctctgttccgtcagtagttattacagtttcattctgtctccttttgtttgagccgcagtctgataataacatgtgaacttggggattttttttttttgttagtgtcacctgtctagctgatattttgatggcaaatgcctgatctttagaccattgcattcattaaagctgtcagcgcagaatttgttctgaaggaaggaggaatgttctgcatgttatgacaggacaagttataaatgtaaaactgtcatgaactatatacattgtgccatgtcttgctgtccatctggtgcactc

SEQ ID NO: 64286 - protein, 119 aa, Triticum aestivum
  peptide (1)..(119): Ceres Seq. ID no. 13584364
  misc_feature (2)..(92): Pfam Name: Mitochondrial ribosomal protein L51 / S25 / Pfam Description: Mitochondrial ribosomal protein L51 / S25 /
  misc_feature (2)..(92): Pfam Name: Mitochondrial ribosomal protein L51 / S25 / Pfam Description: Mitochondrial ribosomal protein L51 / S25 /
  misc_feature (6)..(114): Homolog of NCBI NO: 6325356 NR Description: Mitochondrial Ribosome Protein, Large Subunit;
  misc_feature (4)..(119): Homolog of NCBI NO: 17647665 NR Description: mitochondrial ribosomal protein L-CI-B8 CG5479-PA
  misc_feature (10)..(114): Homolog of NCBI NO: 19112489 NR Description: hypothetical protein [Schizosaccharomyces pombe]
  misc_feature (8)..(114): Homolog of NCBI NO: 39589613 NR Description: Hypothetical protein CBG12220 [Caenorhabditis
  misc_feature (6)..(114): Homolog of NCBI NO: 6325356 NR Description: Mitochondrial Ribosome Protein, Large Subunit;
  misc_feature (10)..(114): Homolog of NCBI NO: 19112489 NR Description: hypothetical protein [Schizosaccharomyces pombe]
  misc_feature (8)..(114): Homolog of NCBI NO: 17505717 NR Description: NADH-ubiquinone oxidoreductase B8 [Caenorhabditis
  misc_feature (1)..(118): Homolog of NCBI NO: 15231727 NR Description: expressed protein [Arabidopsis thaliana]
  misc_feature (1)..(119): Homolog of NCBI NO: 26006491 NR Description: Unknown protein [Oryza sativa (japonica
  misc_feature (6)..(114): Homolog of NCBI NO: 40739113 NR Description: hypothetical protein AN6904.2 [Aspergillus
  misc_feature (8)..(114): Homolog of NCBI NO: 39589613 NR Description: Hypothetical protein CBG12220 [Caenorhabditis
  misc_feature (4)..(119): Homolog of NCBI NO: 17647665 NR Description: mitochondrial ribosomal protein L-CI-B8 CG5479-PA
  misc_feature (8)..(114): Homolog of NCBI NO: 17505717 NR Description: NADH-ubiquinone oxidoreductase B8 [Caenorhabditis
  misc_feature (6)..(114): Homolog of NCBI NO: 40739113 NR Description: hypothetical protein AN6904.2 [Aspergillus
  misc_feature (1)..(118): Homolog of NCBI NO: 15231727 NR Description: expressed protein [Arabidopsis thaliana]
  misc_feature (1)..(119): Homolog of NCBI NO: 26006491 NR Description: Unknown protein [Oryza sativa (japonica
MALRGVWQLQKLVVNFCDWGGSSKGIRAFMESHLPAIKEKNPQLEVVTQLVRGQHPNLKGIYKNHNERVVCVRNLAPEDIMLQASRLRCSLGRKVVKLRTRHVTKRPSVQGTWTTELKM

SEQ ID NO: 64287 - protein, 90 aa, Triticum aestivum
  peptide (1)..(90): Ceres Seq. ID no. 13584365
  misc_feature (1)..(63): Pfam Name: Mitochondrial ribosomal protein L51 / S25 / Pfam Description: Mitochondrial ribosomal protein L51 / S25 /
  misc_feature (1)..(63): Pfam Name: Mitochondrial ribosomal protein L51 / S25 / Pfam Description: Mitochondrial ribosomal protein L51 / S25 /
  misc_feature (1)..(85): Homolog of NCBI NO: 6325356 NR Description: Mitochondrial Ribosome Protein, Large Subunit;
  misc_feature (1)..(90): Homolog of NCBI NO: 17647665 NR Description: mitochondrial ribosomal protein L-CI-B8 CG5479-PA
  misc_feature (1)..(85): Homolog of NCBI NO: 19112489 NR Description: hypothetical protein [Schizosaccharomyces pombe]
  misc_feature (1)..(85): Homolog of NCBI NO: 39589613 NR Description: Hypothetical protein CBG12220 [Caenorhabditis
  misc_feature (1)..(85): Homolog of NCBI NO: 6325356 NR Description: Mitochondrial Ribosome Protein, Large Subunit;
  misc_feature (1)..(85): Homolog of NCBI NO: 19112489 NR Description: hypothetical protein [Schizosaccharomyces pombe]
  misc_feature (1)..(85): Homolog of NCBI NO: 17505717 NR Description: NADH-ubiquinone oxidoreductase B8 [Caenorhabditis
  misc_feature (1)..(89): Homolog of NCBI NO: 15231727 NR Description: expressed protein [Arabidopsis thaliana]
  misc_feature (1)..(90): Homolog of NCBI NO: 26006491 NR Description: Unknown protein [Oryza sativa (japonica
  misc_feature (1)..(85): Homolog of NCBI NO: 40739113 NR Description: hypothetical protein AN6904.2 [Aspergillus
  misc_feature (1)..(85): Homolog of NCBI NO: 39589613 NR Description: Hypothetical protein CBG12220 [Caenorhabditis
  misc_feature (1)..(90): Homolog of NCBI NO: 17647665 NR Description: mitochondrial ribosomal protein L-CI-B8 CG5479-PA
  misc_feature (1)..(85): Homolog of NCBI NO: 17505717 NR Description: NADH-ubiquinone oxidoreductase B8 [Caenorhabditis
  misc_feature (1)..(85): Homolog of NCBI NO: 40739113 NR Description: hypothetical protein AN6904.2 [Aspergillus
  misc_feature (1)..(89): Homolog of NCBI NO: 15231727 NR Description: expressed protein [Arabidopsis thaliana]
  misc_feature (1)..(90): Homolog of NCBI NO: 26006491 NR Description: Unknown protein [Oryza sativa (japonica
MESHLPAIKEKNPQLEVVTQLVRGQHPNLKGIYKNHNERVVCVRNLAPEDIMLQASRLRCSLGRKVVKLRTRHVTKRPSVQGTWTTELKM

SEQ ID NO: 64288 - DNA, 1448 bp, Triticum aestivum
  misc_feature (1)..(1448): Ceres Seq. ID no. 13597018
ctccctctccttccctctctctctctctcgctcgtcttccttgccccctcgcgcaacagcagcgccacaacgcagtgagtggcacttccgtgatttcgccgccgcgggggcggggggaggaggaggagggaaggaggccatgggcaacgccagcggcagggaggaggacgccgccgcgcccggggaggccgacgccgccgacgtcgacgtcgaggacggaggcgacgactcctcggcccgcggcttccctccctacggcggaggcgccaaccacgtgcgccgtgcgtgctcagtgggcgtcgtgggggccagcggcgggcccggatcgccgcccgtgagccccggccgctccctctcgccgcggatgttcgtgccccagacacctgtacctccattgcaaagacctgctgatgtaactccagtattcaatgaaatactgatgaatgaacaagaagaagaatttgatggcccccctcaaaaggaaatacctgctttgattgtgtggactcttggaggaaagaatgtatctgttgaaggatcttgggataactggaaatcaaggaaaccgatgcagaaatctggaaaagatcattctcttctgttgatccttccttctggagtttatcgttatagatttgttgtagatggagagaggagatgttttcctgaccttccatgtgaaactgacgccatgggcaatgctgttaaccttcttgatgttcatgattttgttcctgaaagtgttgaaagtgtatcagaatttgaggctcctccatccccagaatctagctacagtttccaggcacctgaggaaaaggactttgcgaatgagccacctgctcttccgtctcagcttcacctcggcgttcttaactcacagaactcagaggaaatatgtgcacggccccaacacatcgtcctcaaccaccttttcatcgagaagggttggggtgcccatccgctggtggctcttggtgtaacccacagattcgagtccaaatatgtaacggtcgtcttgtataagcccatagaacgatagcatagcaaccgcatgaaagttgaagctaatgcttgacaactcaccgcgaaaccagcaatgaacagcaacagcgtggcctctctccctgtaaaagcacttcaggtacaggaatattttcgataacttgaaggagcttctagtcgtgatattgctccccttctgtatacctcctggcggatggccttatcgtcgtgagttcatacatatacttgtgttgttgttgttgttgtttccaaccccttgggaatgatatgtgtagaattgtcaccgaaaagtgagaactgagaaccgtgggactccgctgaatcgctaagcttcagagttagatcttgtgatccttattcttcattgtttttcattgtgatgatggtgttgtataataatacaaagctaccggttacggatttgg

SEQ ID NO: 64289 - protein, 345 aa, Triticum aestivum
  peptide (1)..(345): Ceres Seq. ID no. 15222016
  misc_feature (257)..(343): Pfam Name: 5'-AMP-activated protein kinase, beta subunit, Pfam Description: 5'-AMP-activated protein kinase, beta subunit,
  misc_feature (88)..(343): Homolog of NCBI NO: 12018316 NR Description: AMP-activated protein kinase beta-2 regulatory
  misc_feature (103)..(343): Homolog of NCBI NO: 4885561 NR Description: protein kinase, AMP-activated, beta 2
  misc_feature (109)..(303): Homolog of NCBI NO: 29725558 NR Description: SNF1 kinase complex anchoring protein
  misc_feature (109)..(345): Homolog of NCBI NO: 15234895 NR Description: kinase like protein [Arabidopsis thaliana]
  misc_feature (122)..(345): Homolog of NCBI NO: 11935162 NR Description: SNF1-related kinase complex anchoring protein
  misc_feature (47)..(345): Homolog of NCBI NO: 6686784 NR Description: AKIN beta2 [Arabidopsis thaliana]
  misc_feature (47)..(345): Homolog of NCBI NO: 5702015 NR Description: GAL83 protein [Solanum tuberosum]
  misc_feature (47)..(345): Homolog of NCBI NO: 15242175 NR Description: AMPKBI (5'-AMP-activated protein kinase, beta
  misc_feature (47)..(345): Homolog of NCBI NO: 6686782 NR Description: AKIN gamma [Arabidopsis thaliana]
  misc_feature (47)..(345): Homolog of NCBI NO: 22324436 NR Description: AKIN beta1-like protein [Oryza sativa (japonica
SLSFPLSLSRSSSLPPRATAAPQRSEWHFRDFAAAGAGGGGGGKEAMGNASGREEDAAAPGEADAADVDVEDGGDDSSARGFPPYGGGANHVRRACSVGVVGASGGPGSPPVSPGRSLSPRMFVPQTPVPPLQRPADVTPVFNEILMNEQEEEFDGPPQKEIPALIVWTLGGKNVSVEGSWDNWKSRKPMQKSGKDHSLLLILPSGVYRYRFVVDGERRCFPDLPCETDAMGNAVNLLDVHDFVPESVESVSEFEAPPSPESSYSFQAPEEKDFANEPPALPSQLHLGVLNSQNSEEICARPQHIVLNHLFIEKGWGAHPLVALGVTHRFESKYVTVVLYKPIER

SEQ ID NO: 64290 - protein, 299 aa, Triticum aestivum
  peptide (1)..(299): Ceres Seq. ID no. 15222017
  misc_feature (211)..(297): Pfam Name: 5'-AMP-activated protein kinase, beta subunit, Pfam Description: 5'-AMP-activated protein kinase, beta subunit,
  misc_feature (42)..(297): Homolog of NCBI NO: 12018316 NR Description: AMP-activated protein kinase beta-2 regulatory
  misc_feature (57)..(297): Homolog of NCBI NO: 4885561 NR Description: protein kinase, AMP-activated, beta 2
  misc_feature (63)..(257): Homolog of NCBI NO: 29725558 NR Description: SNF1 kinase complex anchoring protein
  misc_feature (63)..(299): Homolog of NCBI NO: 15234895 NR Description: kinase like protein [Arabidopsis thaliana]
  misc_feature (76)..(299): Homolog of NCBI NO: 11935162 NR Description: SNF1-related kinase complex anchoring protein
  misc_feature (1)..(299): Homolog of NCBI NO: 6686784 NR Description: AKIN beta2 [Arabidopsis thaliana]
  misc_feature (1)..(299): Homolog of NCBI NO: 5702015 NR Description: GAL83 protein [Solanum tuberosum]
  misc_feature (1)..(299): Homolog of NCBI NO: 15242175 NR Description: AMPKBI (5'-AMP-activated protein kinase, beta
  misc_feature (1)..(299): Homolog of NCBI NO: 6686782 NR Description: AKIN gamma [Arabidopsis thaliana]
  misc_feature (1)..(299): Homolog of NCBI NO: 22324436 NR Description: AKIN beta1-like protein [Oryza sativa (japonica
MGNASGREEDAAAPGEADAADVDVEDGGDDSSARGFPPYGGGANHVRRACSVGVVGASGGPGSPPVSPGRSLSPRMFVPQTPVPPLQRPADVTPVFNEILMNEQEEEFDGPPQKEIPALIVWTLGGKNVSVEGSWDNWKSRKPMQKSGKDHSLLLILPSGVYRYRFVVDGERRCFPDLPCETDAMGNAVNLLDVHDFVPESVESVSEFEAPPSPESSYSFQAPEEKDFANEPPALPSQLHLGVLNSQNSEEICARPQHIVLNHLFIEKGWGAHPLVALGVTHRFESKYVTVVLYKPIER

SEQ ID NO: 64291 - protein, 224 aa, Triticum aestivum
  peptide (1)..(224): Ceres Seq. ID no. 15222018
  misc_feature (136)..(222): Pfam Name: 5'-AMP-activated protein kinase, beta subunit, Pfam Description: 5'-AMP-activated protein kinase, beta subunit,
  misc_feature (1)..(222): Homolog of NCBI NO: 12018316 NR Description: AMP-activated protein kinase beta-2 regulatory
  misc_feature (1)..(222): Homolog of NCBI NO: 4885561 NR Description: protein kinase, AMP-activated, beta 2
  misc_feature (1)..(182): Homolog of NCBI NO: 29725558 NR Description: SNF1 kinase complex anchoring protein
  misc_feature (1)..(224): Homolog of NCBI NO: 15234895 NR Description: kinase like protein [Arabidopsis thaliana]
  misc_feature (1)..(224): Homolog of NCBI NO: 11935162 NR Description: SNF1-related kinase complex anchoring protein
  misc_feature (1)..(224): Homolog of NCBI NO: 6686784 NR Description: AKIN beta2 [Arabidopsis thaliana]
  misc_feature (1)..(224): Homolog of NCBI NO: 5702015 NR Description: GAL83 protein [Solanum tuberosum]
  misc_feature (1)..(224): Homolog of NCBI NO: 15242175 NR Description: AMPKBI (5'-AMP-activated protein kinase, beta
  misc_feature (1)..(224): Homolog of NCBI NO: 6686782 NR Description: AKIN gamma [Arabidopsis thaliana]
  misc_feature (1)..(224): Homolog of NCBI NO: 22324436 NR Description: AKIN beta1-like protein [Oryza sativa (japonica
MFVPQTPVPPLQRPADVTPVFNEILMNEQEEEFDGPPQKEIPALIVWTLGGKNVSVEGSWDNWKSRKPMQKSGKDHSLLLILPSGVYRYRFVVDGERRCFPDLPCETDAMGNAVNLLDVHDFVPESVESVSEFEAPPSPESSYSFQAPEEKDFANEPPALPSQLHLGVLNSQNSEEICARPQHIVLNHLFIEKGWGAHPLVALGVTHRFESKYVTVVLYKPIER

SEQ ID NO: 64292 - DNA, 1204 bp, Triticum aestivum
  misc_feature (1)..(1204): Ceres Seq. ID no. 13597854
ctgtcgcttcatccttcacgccaccgctctcctcccccttctatatcaatcgccgctcccccggcggcagacacagcggagcgcatctcgacggcggccatggcgacgaacgagagaaccgtcgcgtccgtcgaccccgacgtcgcgctcgcctacaggttccccgaggtctccttcgcctacgacgagagggacgtggcgctctacgcgctcggcgtgggggcctgcggcgcggacgccgtcgacgacaaggagctccacctcgtgcaccacagggacagccagcgccacatcaaggtgcttcctacctttgtttctttatttcctaacaagaacagcaatgggcgtggaattgttaatgtgcctggcattcacttcgatgaaagccttctattgcacggtcaacaatacatagagatctacaagccaattccttcatgtgccagtgttgtaaacaaggttaaggtagctggtttgcacgacaaagggaaagcaacaattcttgagattgaaactacgaccagtctcaaggattctggcgaagtgttatgtatgaacaggagcactattttcttgcgtggtgcgggaggtttttcggactcttccaggccatactcgtatacaacttatcctgccaaccagatttctcgcatttccattccaaattccacaccttccgcagtgcatgaagaccagacacaacaatcccaggcactcttatacaggttatctggggattataatcctttgcattcagaccctatggttgcacagattgcaggattcactcgtccaatactgcacggcctctgcactctggggttcgcggccagggcagtcatcaagtctttctgcaacggggacccagcagcggtgcggaacatcttcggccggttcctgctgcacgtctaccccggcgaaacgctggtcaccgagatgtgggtcgacggccagagggtgcagtaccagaccaaggcgaaagagcgtgaccgcgccgtgctttccggatacgtgctgctcaaacacatcccctcatcattgtaagtgctgtgaggatcatactttttaatcggcgatttgattagttaactgtggtggtctgaagagaggatggtttccggtgtaaactatatatactcctaagagatgacacggttgtgcagatgatgaactcgtattagtgcttgctttttgttttgttcgt

SEQ ID NO: 64293 - protein, 347 aa, Triticum aestivum
  peptide (1)..(347): Ceres Seq. ID no. 13597855
  misc_feature (212)..(337): Pfam Name: MaoC like domain Pfam Description: MaoC like domain
  misc_feature (10)..(346): Homolog of NCBI NO: 7514017 NR Description: multifunctional beta-oxidation protein 2,
  misc_feature (10)..(346): Homolog of NCBI NO: 1620451 NR Description: multifunctional protein 2 [Rattus norvegicus]
  misc_feature (10)..(346): Homolog of NCBI NO: 2492741 NR Description: Estradiol 17 beta-dehydrogenase 4 (17-beta-HSD 4)
  misc_feature (10)..(346): Homolog of NCBI NO: 13242303 NR Description: peroxisomal multifunctional enzyme type II
  misc_feature (10)..(346): Homolog of NCBI NO: 3005897 NR Description: mutifunctional protein2 [Cavia porcellus]
  misc_feature (49)..(346): Homolog of NCBI NO: 499340 NR Description: 17beta-estradiol dehydrogenase [Sus scrofa]
  misc_feature (6)..(338): Homolog of NCBI NO: 2315981 NR Description: 17-beta-hydroxysteroid dehydrogenase type IV
  misc_feature (49)..(338): Homolog of NCBI NO: 4504505 NR Description: hydroxysteroid (17-beta) dehydrogenase 4 [Homo
  misc_feature (34)..(238): Homolog of NCBI NO: 6573727 NR Description: T23E18.9 [Arabidopsis thaliana]
  misc_feature (34)..(347): Homolog of NCBI NO: 22330656 NR Description: expressed protein [Arabidopsis thaliana]
LSLHPSRHRSPPPSISIAAPPAADTAERISTAAMATNERTVASVDPDVALAYRFPEVSFAYDERDVALYALGVGACGADAVDDKELHLVHHRDSQRHIKVLPTFVSLFPNKNSNGRGIVNVPGIHFDESLLLHGQQYIEIYKPIPSCASVVNKVKVAGLHDKGKATILEIETTTSLKDSGEVLCMNRSTIFLRGAGGFSDSSRPYSYTTYPANQISRISIPNSTPSAVHEDQTQQSQALLYRLSGDYNPLHSDPMVAQIAGFTRPILHGLCTLGFAARAVIKSFCNGDPAAVRNIFGRFLLHVYPGETLVTEMWVDGQRVQYQTKAKERDRAVLSGYVLLKHIPSSL

SEQ ID NO: 64294 - protein, 314 aa, Triticum aestivum
  peptide (1)..(314): Ceres Seq. ID no. 13597856
  misc_feature (179)..(304): Pfam Name: MaoC like domain Pfam Description: MaoC like domain
  misc_feature (1)..(313): Homolog of NCBI NO: 7514017 NR Description: multifunctional beta-oxidation protein 2,
  misc_feature (1)..(313): Homolog of NCBI NO: 1620451 NR Description: multifunctional protein 2 [Rattus norvegicus]
  misc_feature (1)..(313): Homolog of NCBI NO: 2492741 NR Description: Estradiol 17 beta-dehydrogenase 4 (17-beta-HSD 4)
  misc_feature (1)..(313): Homolog of NCBI NO: 13242303 NR Description: peroxisomal multifunctional enzyme type II
  misc_feature (1)..(313): Homolog of NCBI NO: 3005897 NR Description: mutifunctional protein2 [Cavia porcellus]
  misc_feature (16)..(313): Homolog of NCBI NO: 499340 NR Description: 17beta-estradiol dehydrogenase [Sus scrofa]
  misc_feature (1)..(305): Homolog of NCBI NO: 2315981 NR Description: 17-beta-hydroxysteroid dehydrogenase type IV
  misc_feature (16)..(305): Homolog of NCBI NO: 4504505 NR Description: hydroxysteroid (17-beta) dehydrogenase 4 [Homo
  misc_feature (1)..(205): Homolog of NCBI NO: 6573727 NR Description: T23E18.9 [Arabidopsis thaliana]
  misc_feature (1)..(314): Homolog of NCBI NO: 22330656 NR Description: expressed protein [Arabidopsis thaliana]
MATNERTVASVDPDVALAYRFPEVSFAYDERDVALYALGVGACGADAVDDKELHLVHHRDSQRHIKVLPTFVSLFPNKNSNGRGIVNVPGIHFDESLLLHGQQYIEIYKPIPSCASVVNKVKVAGLHDKGKATILEIETTTSLKDSGEVLCMNRSTIFLRGAGGFSDSSRPYSYTTYPANQISRISIPNSTPSAVHEDQTQQSQALLYRLSGDYNPLHSDPMVAQIAGFTRPILHGLCTLGFAARAVIKSFCNGDPAAVRNIFGRFLLHVYPGETLVTEMWVDGQRVQYQTKAKERDRAVLSGYVLLKHIPSSL

SEQ ID NO: 64295 - DNA, 1498 bp, Triticum aestivum
  misc_feature (1)..(1498): Ceres Seq. ID no. 13597887
caaaggcaaacccctcttttgaattccctccccctctcccctcggccgcctcgccgccgacccggcccgggacggaggccccctccctcccggaacctcctggaagcttccgcggctccctcccctgctccggcaacagcccgcgtcgtcgccgccgccgagggccagcacctcgcgctgccggcccgttgcttgcagcgggaggaaaggggtcaagatggttgtcggatcattcatcaccagagctttaatacttgttcttggatatgcatatccagcttatgattgttacaagacagtggagctgaataggcctgagattgagcagttgcggttctggtgtcagtactggattttacttgcaatgcttactgttttcgagagagttggggataatttcatatcatggttgccaatgtatagtgaagcaaagctggcttttattgtgtatttgtggtatcctaagacacaggggacttcatatgtctatgagtcgttcttcaagccttatatcgcaaaacacgaatctgagattgatcgcaatcttcttgagttgaggacaagggctagtgatattgctgttacttacttccacaaggttgcagactacagccagtcaaggttccatgaaatcttgcaatatattgcttctcaatcacaaggatctcgttctcaggcacagcaacagcagcagcgtccaccacctccacggactcggatggcgaatcctgcaccaccacctgttcccgcaccaacggcaccaccgatgccgccacaggccgcccaagttcctcctactccaccaaggatgcaggtgcaagataaaggcccagttccagttgcccctcctggcgcagtgcctcctgtgcagcaacaaacaccttcctgtcctggccctgtcgccggcaacagccccccaaagagtgaagacatgctggttgatcaatctgggccttcgacaagcaacgtgccaccccgcccaacaatgcctgaagacgaggagacgctcatccaggaggctattcggttgactcggggccggctcaggaggcgcatgggtggatctggacctccatccaactagctcttctcgcacttacgacgatggcaggggaaatgctgggttggtccatcaggcatggctgaatttcctcgcacagttgcaagctcacgtccaccttgtaaaacgatgaatcctggttcctgttgtttcacagcccagattgtgtatataaacccaccccatgccaggggtaaaaacgctgggatgccagtggaccaccagtttagctaggcggtagcagaagatggtggttaagatgctcggtgaaatcggttccaacttagttctgtcgaaattcgttggtggtgacttcgtctgtattggaaagtggttcaaaggtgaagtgaaataatcttaggctgtaccgggaagatagaaccttcgcccgcctcgcattagctgttkaaacacaataaagttggaactggagggggg

SEQ ID NO: 64296 - protein, 288 aa, Triticum aestivum
  peptide (1)..(288): Ceres Seq. ID no. 15222226
  misc_feature (4)..(99): Pfam Name: TB2/DP1, HVA22 family Pfam Description: TB2/DP1, HVA22 family
  misc_feature (2)..(168): Homolog of NCBI NO: 37531658 NR Description: putative Magnaporthe grisea pathogenicity protein
  misc_feature (13)..(163): Homolog of NCBI NO: 15222332 NR Description: hypothetical protein [Arabidopsis thaliana]
  misc_feature (13)..(260): Homolog of NCBI NO: 25513732 NR Description: T20H2.26 protein - Arabidopsis thaliana
  misc_feature (2)..(255): Homolog of NCBI NO: 21553483 NR Description: pathogenicity protein PATH531-like protein
  misc_feature (2)..(260): Homolog of NCBI NO: 18394805 NR Description: expressed protein [Arabidopsis thaliana]
  misc_feature (6)..(278): Homolog of NCBI NO: 9759014 NR Description: gene_id:K16E1.3~unknown protein [Arabidopsis
  misc_feature (2)..(278): Homolog of NCBI NO: 18422223 NR Description: expressed protein [Arabidopsis thaliana]
  misc_feature (2)..(278): Homolog of NCBI NO: 21553813 NR Description: unknown [Arabidopsis thaliana]
  misc_feature (145)..(286): Homolog of NCBI NO: 20502988 NR Description: Putative InsB from Escherichia coli
  misc_feature (2)..(158): Homolog of NCBI NO: 20502988 NR Description: Putative InsB from Escherichia coli
MVVGSFITRALILVLGYAYPAYDCYKTVELNRPEIEQLRFWCQYWILLAMLTVFERVGDNFISWLPMYSEAKLAFIVYLWYPKTQGTSYVYESFFKPYIAKHESEIDRNLLELRTRASDIAVTYFHKVADYSQSRFHEILQYIASQSQGSRSQAQQQQQRPPPPRTRMANPAPPPVPAPTAPPMPPQAAQVPPTPPRMQVQDKGPVPVAPPGAVPPVQQQTPSCPGPVAGNSPPKSEDMLVDQSGPSTSNVPPRPTMPEDEETLIQEAIRLTRGRLRRRMGGSGPPSN

SEQ ID NO: 64297 - protein, 239 aa, Triticum aestivum
  peptide (1)..(239): Ceres Seq. ID no. 15222227
  misc_feature (79)..(194): Pfam Name: Minor capsid protein VI Pfam Description: Minor capsid protein VI
  misc_feature (1)..(119): Homolog of NCBI NO: 37531658 NR Description: putative Magnaporthe grisea pathogenicity protein
  misc_feature (1)..(114): Homolog of NCBI NO: 15222332 NR Description: hypothetical protein [Arabidopsis thaliana]
  misc_feature (1)..(211): Homolog of NCBI NO: 25513732 NR Description: T20H2.26 protein - Arabidopsis thaliana
  misc_feature (1)..(206): Homolog of NCBI NO: 21553483 NR Description: pathogenicity protein PATH531-like protein
  misc_feature (1)..(211): Homolog of NCBI NO: 18394805 NR Description: expressed protein [Arabidopsis thaliana]
  misc_feature (1)..(229): Homolog of NCBI NO: 9759014 NR Description: gene_id:K16E1.3~unknown protein [Arabidopsis
  misc_feature (1)..(229): Homolog of NCBI NO: 18422223 NR Description: expressed protein [Arabidopsis thaliana]
  misc_feature (1)..(229): Homolog of NCBI NO: 21553813 NR Description: unknown [Arabidopsis thaliana]
  misc_feature (96)..(237): Homolog of NCBI NO: 20502988 NR Description: Putative InsB from Escherichia coli
  misc_feature (1)..(109): Homolog of NCBI NO: 20502988 NR Description: Putative InsB from Escherichia coli
MLTVFERVGDNFISWLPMYSEAKLAFIVYLWYPKTQGTSYVYESFFKPYIAKHESEIDRNLLELRTRASDIAVTYFHKVADYSQSRFHEILQYIASQSQGSRSQAQQQQQRPPPPRTRMANPAPPPVPAPTAPPMPPQAAQVPPTPPRMQVQDKGPVPVAPPGAVPPVQQQTPSCPGPVAGNSPPKSEDMLVDQSGPSTSNVPPRPTMPEDEETLIQEAIRLTRGRLRRRMGGSGPPSN

SEQ ID NO: 64298 - protein, 222 aa, Triticum aestivum
  peptide (1)..(222): Ceres Seq. ID no. 15222228
  misc_feature (62)..(177): Pfam Name: Minor capsid protein VI Pfam Description: Minor capsid protein VI
  misc_feature (1)..(102): Homolog of NCBI NO: 37531658 NR Description: putative Magnaporthe grisea pathogenicity protein
  misc_feature (1)..(97): Homolog of NCBI NO: 15222332 NR Description: hypothetical protein [Arabidopsis thaliana]
  misc_feature (1)..(194): Homolog of NCBI NO: 25513732 NR Description: T20H2.26 protein - Arabidopsis thaliana
  misc_feature (1)..(189): Homolog of NCBI NO: 21553483 NR Description: pathogenicity protein PATH531-like protein
  misc_feature (1)..(194): Homolog of NCBI NO: 18394805 NR Description: expressed protein [Arabidopsis thaliana]
  misc_feature (1)..(212): Homolog of NCBI NO: 9759014 NR Description: gene_id:K16E1.3~unknown protein [Arabidopsis
  misc_feature (1)..(212): Homolog of NCBI NO: 18422223 NR Description: expressed protein [Arabidopsis thaliana]
  misc_feature (1)..(212): Homolog of NCBI NO: 21553813 NR Description: unknown [Arabidopsis thaliana]
  misc_feature (79)..(220): Homolog of NCBI NO: 20502988 NR Description: Putative InsB from Escherichia coli
  misc_feature (1)..(92): Homolog of NCBI NO: 20502988 NR Description: Putative InsB from Escherichia coli
MYSEAKLAFIVYLWYPKTQGTSYVYESFFKPYIAKHESEIDRNLLELRTRASDIAVTYFHKVADYSQSRFHEILQYIASQSQGSRSQAQQQQQRPPPPRTRMANPAPPPVPAPTAPPMPPQAAQVPPTPPRMQVQDKGPVPVAPPGAVPPVQQQTPSCPGPVAGNSPPKSEDMLVDQSGPSTSNVPPRPTMPEDEETLIQEAIRLTRGRLRRRMGGSGPPSN

SEQ ID NO: 64299 - DNA, 1205 bp, Triticum aestivum
  misc_feature (1)..(1205): Ceres Seq. ID no. 13597888
actcctctccaccgcctggacgccgcgccgccgcctcgaccgagcctcggccacgcggctcgccccgtcccccggcctgtcctgccgctcctcccggccgacgcgctccgtgcgcccgatggcgtcgtcgacgaccgcggcccgggccgacgcggcgccgccggggctgaaggagggcatcgcggggctctacgacgagtcgtccggcctgtgggagagcatctggggcgagcacatgcaccacggcttctacgactccggcgaggccgcctccatgtccgaccaccgccgcgcccagatccgcatgatcgaggaggccctcgccttcgccgccgtccccgacgatccgacaaacaaaccgaaaacgattgttgatgttggatgcggaatcggtggtagctcaagatacctggcgaacaaatatggagcacaatgctctgggatcacattgagcccagtgcaagccgagagaggaaatgccctcgcagcagtgcaggggttgtcggacaaggcttctttccaagttgctgatgctctggagcaaccatttcctgatgggcagtttgatcttgtctggtctatggagagtggtgagcacatgccgaacaaacagaagtttgtaagcgagctggcacgcgtcgcagctccaggagcaactatcatcatcgtgacctggtgccataggaacctcgcgccgtcggaggactcactgaaacctgacgagctgaatcttttgaaaaagatttgtgatgcatattacctcccagattggtgctcgccctcggattatgtcaagattgccgagtcattgtctcttgaggatatcaaaacggctgactggtctgaaaacgtggccccgttctggcctgctgtcatccaatcagcactgacatggaaaggcctcacttctctactaaggagtggatggaagacgataaagggagcactggtgatgcctctcatgatccaaggctacaagaaaggcctcattaagttcagcatcatcacctgccgcaaaccccaagcagcaatagaaggagaacctgaggccgcatcgcccagtgtagaatagaacccatgtgattggaatagactcggcttgctgtcgcctcgtagctgaataatttcatgttaccgtgcatctgtatctgcaactggaagtgccatatgaaagtggttcctaaagcaaaattctcctcacattc

SEQ ID NO: 64300 - protein, 356 aa, Triticum aestivum
  peptide (1)..(356): Ceres Seq. ID no. 13597889
  misc_feature (56)..(339): Homolog of NCBI NO: 23039419 NR Description: hypothetical protein [Trichodesmium erythraeum
  misc_feature (56)..(335): Homolog of NCBI NO: 17229295 NR Description: gamma-tocopherol methyltransferase [Nostoc sp.
  misc_feature (42)..(340): Homolog of NCBI NO: 16331764 NR Description: delta(24)-sterol C-methyltransferase
  misc_feature (56)..(339): Homolog of NCBI NO: 23128517 NR Description: hypothetical protein [Nostoc punctiforme]
  misc_feature (30)..(340): Homolog of NCBI NO: 21592747 NR Description: gamma-tocopherol methyltransferase [Arabidopsis
  misc_feature (30)..(340): Homolog of NCBI NO: 15217804 NR Description: gamma-tocopherol methyltransferase [Arabidopsis
  misc_feature (30)..(340): Homolog of NCBI NO: 24211769 NR Description: Tocopherol O-methyltransferase, chloroplast
  misc_feature (23)..(340): Homolog of NCBI NO: 27448218 NR Description: gamma-tocopherol methyltransferase [Brassica
  misc_feature (35)..(340): Homolog of NCBI NO: 17224292 NR Description: gamma-tocopherol methyltransferase [Perilla
  misc_feature (46)..(340): Homolog of NCBI NO: 22208517 NR Description: putative gamma-tocopherol methyltransferase
LLSTAWTPRRRLDRASATRLAPSPGLSCRSSRPTRSVRPMASSTTAARADAAPPGLKEGIAGLYDESSGLWESIWGEHMHHGFYDSGEAASMSDHRRAQIRMIEEALAFAAVPDDPTNKPKTIVDVGCGIGGSSRYLANKYGAQCSGITLSPVQAERGNALAAVQGLSDKASFQVADALEQPFPDGQFDLVWSMESGEHMPNKQKFVSELARVAAPGATIIIVTWCHRNLAPSEDSLKPDELNLLKKICDAYYLPDWCSPSDYVKIAESLSLEDIKTADWSENVAPFWPAVIQSALTWKGLTSLLRSGWKTIKGALVMPLMIQGYKKGLIKFSIITCRKPQAAIEGEPEAASPSVE

SEQ ID NO: 64301 - protein, 317 aa, Triticum aestivum
  peptide (1)..(317): Ceres Seq. ID no. 13597890
  misc_feature (17)..(300): Homolog of NCBI NO: 23039419 NR Description: hypothetical protein [Trichodesmium erythraeum
  misc_feature (17)..(296): Homolog of NCBI NO: 17229295 NR Description: gamma-tocopherol methyltransferase [Nostoc sp.
  misc_feature (3)..(301): Homolog of NCBI NO: 16331764 NR Description: delta(24)-sterol C-methyltransferase
  misc_feature (17)..(300): Homolog of NCBI NO: 23128517 NR Description: hypothetical protein [Nostoc punctiforme]
  misc_feature (1)..(301): Homolog of NCBI NO: 21592747 NR Description: gamma-tocopherol methyltransferase [Arabidopsis
  misc_feature (1)..(301): Homolog of NCBI NO: 15217804 NR Description: gamma-tocopherol methyltransferase [Arabidopsis
  misc_feature (1)..(301): Homolog of NCBI NO: 24211769 NR Description: Tocopherol O-methyltransferase, chloroplast
  misc_feature (1)..(301): Homolog of NCBI NO: 27448218 NR Description: gamma-tocopherol methyltransferase [Brassica
  misc_feature (1)..(301): Homolog of NCBI NO: 17224292 NR Description: gamma-tocopherol methyltransferase [Perilla
  misc_feature (7)..(301): Homolog of NCBI NO: 22208517 NR Description: putative gamma-tocopherol methyltransferase
MASSTTAARADAAPPGLKEGIAGLYDESSGLWESIWGEHMHHGFYDSGEAASMSDHRRAQIRMIEEALAFAAVPDDPTNKPKTIVDVGCGIGGSSRYLANKYGAQCSGITLSPVQAERGNALAAVQGLSDKASFQVADALEQPFPDGQFDLVWSMESGEHMPNKQKFVSELARVAAPGATIIIVTWCHRNLAPSEDSLKPDELNLLKKICDAYYLPDWCSPSDYVKIAESLSLEDIKTADWSENVAPFWPAVIQSALTWKGLTSLLRSGWKTIKGALVMPLMIQGYKKGLIKFSIITCRKPQAAIEGEPEAASPSVE

SEQ ID NO: 64302 - protein, 278 aa, Triticum aestivum
  peptide (1)..(278): Ceres Seq. ID no. 13597891
  misc_feature (1)..(261): Homolog of NCBI NO: 23039419 NR Description: hypothetical protein [Trichodesmium erythraeum
  misc_feature (1)..(257): Homolog of NCBI NO: 17229295 NR Description: gamma-tocopherol methyltransferase [Nostoc sp.
  misc_feature (1)..(262): Homolog of NCBI NO: 16331764 NR Description: delta(24)-sterol C-methyltransferase
  misc_feature (1)..(261): Homolog of NCBI NO: 23128517 NR Description: hypothetical protein [Nostoc punctiforme]
  misc_feature (1)..(262): Homolog of NCBI NO: 21592747 NR Description: gamma-tocopherol methyltransferase [Arabidopsis
  misc_feature (1)..(262): Homolog of NCBI NO: 15217804 NR Description: gamma-tocopherol methyltransferase [Arabidopsis
  misc_feature (1)..(262): Homolog of NCBI NO: 24211769 NR Description: Tocopherol O-methyltransferase, chloroplast
  misc_feature (1)..(262): Homolog of NCBI NO: 27448218 NR Description: gamma-tocopherol methyltransferase [Brassica
  misc_feature (1)..(262): Homolog of NCBI NO: 17224292 NR Description: gamma-tocopherol methyltransferase [Perilla
  misc_feature (1)..(262): Homolog of NCBI NO: 22208517 NR Description: putative gamma-tocopherol methyltransferase
MHHGFYDSGEAASMSDHRRAQIRMIEEALAFAAVPDDPTNKPKTIVDVGCGIGGSSRYLANKYGAQCSGITLSPVQAERGNALAAVQGLSDKASFQVADALEQPFPDGQFDLVWSMESGEHMPNKQKFVSELARVAAPGATIIIVTWCHRNLAPSEDSLKPDELNLLKKICDAYYLPDWCSPSDYVKIAESLSLEDIKTADWSENVAPFWPAVIQSALTWKGLTSLLRSGWKTIKGALVMPLMIQGYKKGLIKFSIITCRKPQAAIEGEPEAASPSVE

SEQ ID NO: 64303 - DNA, 1568 bp, Triticum aestivum
  misc_feature (1)..(1568): Ceres Seq. ID no. 13597019
ctccgtcgtcgccaaaagcatcgcgacacccagaaacggccacgaaccgagagcaagcgagcgagcgagggagcgagtcagccatccgtccgtccgtcggccatggcactagtggacgcgctgtgcgcctccagcgtcgacaatgcggcgctcgtctacagcaccttcaacgccgcgggcttcctcttcgacaatgccgcgggcttctacgacgacaccggcattgccggtggcccggcgcttgcgttgcaggcggccgacagagcgccggggctgtccgccgcgggtgacgtggcgccgtgcctggagaagcaggccacgttgtcgcccgcgccgccgaggaggaagcggcgtcggcgggcgaggagctgcaagtcgagggaggagaccgagtgccagcgcatgacccacatcgccgtggagcgcaaccgccggcgacagatgaacgagtacctcgtcgtgctccgctccctcatgccggagtcctacgtccagaggggtgaccaggcatcgatcgtcggaggggcgatagatttcgtcaaggagctggagcagcagctgcagtccctggaggcgcagaagcgggcgctggctcaccagcagcagcacaaggcaggacgcgacgcggcgccgctgccgacggccatgccggcgcgcgccagcaccagcggcggcattggcaacgcgtgcgtggagtcgacgagcaactgcagcagcagcgtgaccgaggcggacggcgctcccgacgcgccgccgttcgcggggttcttcacgtacccgcagtacgtgtggcgccagtcgccgcgcgacgccacgacgctgtcggcggacgagagccgcgccggggtggccgacatcgaggtgaccctggtggagacgcacgccagcctccgcgtcatggcgccgcggcggcccggccagctgctccgcatggtcgccggcctgcaggcgctccgtctcaccgtgctgcacctcaacgtcaccgcgctcgactccctggccctctactccctcagcctcaaggtggaggaggggtgtggcctgacgacggcggacgacatcgcggcggcagtgcaccatgtgctctgcttcatccacgcggaggcggaggcggcgccgcagcagctgctcgcgccggcgcagtaggcaacgatggccgcggcggccggagggttaagccgcagccctcgtatatgtatgtactcgggcagctaggtagtgtatgccattttaaggattattaaggacgagtcatgtaatttaacccgtcggatctactgggcttagatgttgtcgacggcgcacgtcgcgctgccgctttctggcaagtctatccagtgtgatgtggcggcctagtgtaccgtagtactagattcagatgcatgcgttttcgcaataggcgagtcgtttcagtttctcaaaaacaagtcttgctatgtgctactgattattttcagtctatgccactgatcaagtgctggccatttcggttaaccttctgtcaggagatctacgttcagcatgtaaattcatcgtttgtttctgcctatgcattccagttgtactgt

SEQ ID NO: 64304 - protein, 381 aa, Triticum aestivum
  peptide (1)..(381): Ceres Seq. ID no. 13597020
  misc_feature (133)..(184): Pfam Name: Helix-loop-helix DNA-binding domain Pfam Description: Helix-loop-helix DNA-binding domain
  misc_feature (110)..(199): Homolog of NCBI NO: 21593808 NR Description: unknown [Arabidopsis thaliana]
  misc_feature (110)..(199): Homolog of NCBI NO: 18395124 NR Description: bHLH protein family [Arabidopsis thaliana]
  misc_feature (252)..(368): Homolog of NCBI NO: 21593808 NR Description: unknown [Arabidopsis thaliana]
  misc_feature (252)..(368): Homolog of NCBI NO: 18395124 NR Description: bHLH protein family [Arabidopsis thaliana]
  misc_feature (270)..(362): Homolog of NCBI NO: 34902426 NR Description: Unknown protein [Oryza sativa (japonica
  misc_feature (110)..(250): Homolog of NCBI NO: 34902426 NR Description: Unknown protein [Oryza sativa (japonica
  misc_feature (252)..(362): Homolog of NCBI NO: 37533680 NR Description: putative helix-loop-helix DNA-binding protein
  misc_feature (50)..(227): Homolog of NCBI NO: 37533680 NR Description: putative helix-loop-helix DNA-binding protein
  misc_feature (325)..(378): Homolog of NCBI NO: 38346722 NR Description: OSJNBa0086O06.20 [Oryza sativa (japonica
  misc_feature (35)..(341): Homolog of NCBI NO: 38346722 NR Description: OSJNBa0086O06.20 [Oryza sativa (japonica
LRRRQKHRDTQKRPRTESKRASEGASQPSVRPSAMALVDALCASSVDNAALVYSTFNAAGFLFDNAAGFYDDTGIAGGPALALQAADRAPGLSAAGDVAPCLEKQATLSPAPPRRKRRRRARSCKSREETECQRMTHIAVERNRRRQMNEYLVVLRSLMPESYVQRGDQASIVGGAIDFVKELEQQLQSLEAQKRALAHQQQHKAGRDAAPLPTAMPARASTSGGIGNACVESTSNCSSSVTEADGAPDAPPFAGFFTYPQYVWRQSPRDATTLSADESRAGVADIEVTLVETHASLRVMAPRRPGQLLRMVAGLQALRLTVLHLNVTALDSLALYSLSLKVEEGCGLTTADDIAAAVHHVLCFIHAEAEAAPQQLLAPAQ

SEQ ID NO: 64305 - protein, 347 aa, Triticum aestivum
  peptide (1)..(347): Ceres Seq. ID no. 13597021
  misc_feature (99)..(150): Pfam Name: Helix-loop-helix DNA-binding domain Pfam Description: Helix-loop-helix DNA-binding domain
  misc_feature (76)..(165): Homolog of NCBI NO: 21593808 NR Description: unknown [Arabidopsis thaliana]
  misc_feature (76)..(165): Homolog of NCBI NO: 18395124 NR Description: bHLH protein family [Arabidopsis thaliana]
  misc_feature (218)..(334): Homolog of NCBI NO: 21593808 NR Description: unknown [Arabidopsis thaliana]
  misc_feature (218)..(334): Homolog of NCBI NO: 18395124 NR Description: bHLH protein family [Arabidopsis thaliana]
  misc_feature (236)..(328): Homolog of NCBI NO: 34902426 NR Description: Unknown protein [Oryza sativa (japonica
  misc_feature (76)..(216): Homolog of NCBI NO: 34902426 NR Description: Unknown protein [Oryza sativa (japonica
  misc_feature (218)..(328): Homolog of NCBI NO: 37533680 NR Description: putative helix-loop-helix DNA-binding protein
  misc_feature (16)..(193): Homolog of NCBI NO: 37533680 NR Description: putative helix-loop-helix DNA-binding protein
  misc_feature (291)..(344): Homolog of NCBI NO: 38346722 NR Description: OSJNBa0086O06.20 [Oryza sativa (japonica
  misc_feature (1)..(307): Homolog of NCBI NO: 38346722 NR Description: OSJNBa0086O06.20 [Oryza sativa (japonica
MALVDALCASSVDNAALVYSTFNAAGFLFDNAAGFYDDTGIAGGPALALQAADRAPGLSAAGDVAPCLEKQATLSPAPPRRKRRRRARSCKSREETECQRMTHIAVERNRRRQMNEYLVVLRSLMPESYVQRGDQASIVGGAIDFVKELEQQLQSLEAQKRALAHQQQHKAGRDAAPLPTAMPARASTSGGIGNACVESTSNCSSSVTEADGAPDAPPFAGFFTYPQYVWRQSPRDATTLSADESRAGVADIEVTLVETHASLRVMAPRRPGQLLRMVAGLQALRLTVLHLNVTALDSLALYSLSLKVEEGCGLTTADDIAAAVHHVLCFIHAEAEAAPQQLLAPAQ

SEQ ID NO: 64306 - protein, 247 aa, Triticum aestivum
  peptide (1)..(247): Ceres Seq. ID no. 13597022
  misc_feature (1)..(50): Pfam Name: Helix-loop-helix DNA-binding domain Pfam Description: Helix-loop-helix DNA-binding domain
  misc_feature (1)..(65): Homolog of NCBI NO: 21593808 NR Description: unknown [Arabidopsis thaliana]
  misc_feature (1)..(65): Homolog of NCBI NO: 18395124 NR Description: bHLH protein family [Arabidopsis thaliana]
  misc_feature (118)..(234): Homolog of NCBI NO: 21593808 NR Description: unknown [Arabidopsis thaliana]
  misc_feature (118)..(234): Homolog of NCBI NO: 18395124 NR Description: bHLH protein family [Arabidopsis thaliana]
  misc_feature (136)..(228): Homolog of NCBI NO: 34902426 NR Description: Unknown protein [Oryza sativa (japonica
  misc_feature (1)..(116): Homolog of NCBI NO: 34902426 NR Description: Unknown protein [Oryza sativa (japonica
  misc_feature (118)..(228): Homolog of NCBI NO: 37533680 NR Description: putative helix-loop-helix DNA-binding protein
  misc_feature (1)..(93): Homolog of NCBI NO: 37533680 NR Description: putative helix-loop-helix DNA-binding protein
  misc_feature (191)..(244): Homolog of NCBI NO: 38346722 NR Description: OSJNBa0086O06.20 [Oryza sativa (japonica
  misc_feature (1)..(207): Homolog of NCBI NO: 38346722 NR Description: OSJNBa0086O06.20 [Oryza sativa (japonica
MTHIAVERNRRRQMNEYLVVLRSLMPESYVQRGDQASIVGGAIDFVKELEQQLQSLEAQKRALAHQQQHKAGRDAAPLPTAMPARASTSGGIGNACVESTSNCSSSVTEADGAPDAPPFAGFFTYPQYVWRQSPRDATTLSADESRAGVADIEVTLVETHASLRVMAPRRPGQLLRMVAGLQALRLTVLHLNVTALDSLALYSLSLKVEEGCGLTTADDIAAAVHHVLCFIHAEAEAAPQQLLAPAQ

SEQ ID NO: 64307 - DNA, 1568 bp, Triticum aestivum
  misc_feature (1)..(1568): Ceres Seq. ID no. 13598643
tgccactccagttcccggtgcatcaagctccagttccagcggcttccacaccgacgccaccgcccaccggagccccaatggccgccgccggagacctcaggtcggagtacctccaggtcctgctcagccgccgccgcgaaccccaagtgcctctgtccgtggagcaagggactccggtgacgaagccgctgttccagggcgactggcctctggggcccagagaggccatggagtcgtgcccgaggaaggaggtggaggacttccacgagaagctggtcgaggagaatttcttcctgattaccgagtcaggtgagcaggggcgtgtacctgtacttctgctgaaactcaacgacagtactgctcccgaaaggaagccggttgttgtgatactgcacagctcttacaaatgcaaggaatgggtgcgtccactgctagaggcatatgcctccaggggttatattgctgtttccatcgattctcgctatcatggtgaaagcgccagccacaagaatacttacaccgatgcactgaaagcagcttggaggaatggggacacgatgccttttatttttgacacggcatgggacttgataaagcttgcagatcatcttagtgcaaggaaggatgtcgatccctcaaggattgggattactggtgaatcactcggaggaatgcattcatggtttggtgctttcgtggatacacggtacagtgttgttgttccgatagttggttttcagggatttcggtgggcaatagacaataacatgtgggaagccagagttaacagcatcaggcctgtatttgaagaggcagcaactgatttagggaagagtgaaatagattcggaggttgtggagaaggtttgggacaggatagcacctgggcttgcttcacggtttgatgcaccttactcggttcccctgattgcaccacgtccgctcctcctcctaaatggcgctgaagacccttgttgccctatcgctggtctacaagagcctgcttccagagttgctgaagcttatgaaaaagctggttctgcggagaagttcaagttcatcgtggagccgggagttgaacatatgttaacggcgaacatggtgaaggaagcgagcgaatggttcgaccgattcctgcagtagctcggggttcgggatgcttcatggagtgcacggcctcaataaattgtcctcactttcggatcactgtcgttgttgaataaatcccttcgccgtgatggtgcgtgcgcggcgagttcgcctagaccacggtgaccgcgctcggcactcgttggatcgtgggatggcgcggtccgcaaggaggccgggtactgcgcgatctcgtggccatttttccgtcgttgctactaataacaagaggagtgcagtgaaaagccgtgaggttttacgcagcacaaattctgtgtgctccacagacttgatttgttccatcattatctagctaatcgctacgctatatttctccatttgaaacgacacagcatatgtgagcagtttttttatcatgcaccatcatgtttcctggggagctctgcatttactgaactg

SEQ ID NO: 64308 - protein, 379 aa, Triticum aestivum
  peptide (1)..(379): Ceres Seq. ID no. 13598644
  misc_feature (278)..(378): Homolog of NCBI NO: 16080077 NR Description: ytaP [Bacillus subtilis]
  misc_feature (61)..(242): Homolog of NCBI NO: 16080077 NR Description: ytaP [Bacillus subtilis]
  misc_feature (24)..(379): Homolog of NCBI NO: 30689997 NR Description: expressed protein [Arabidopsis thaliana]
  misc_feature (13)..(149): Homolog of NCBI NO: 34898368 NR Description: ESTs C19441(E10423),C99201(E10423) correspond to
  misc_feature (174)..(378): Homolog of NCBI NO: 34898368 NR Description: ESTs C19441(E10423),C99201(E10423) correspond to
PLQFPVHQAPVPAASTPTPPPTGAPMAAAGDLRSEYLQVLLSRRREPQVPLSVEQGTPVTKPLFQGDWPLGPREAMESCPRKEVEDFHEKLVEENFFLITESGEQGRVPVLLLKLNDSTAPERKPVVVILHSSYKCKEWVRPLLEAYASRGYIAVSIDSRYHGESASHKNTYTDALKAAWRNGDTMPFIFDTAWDLIKLADHLSARKDVDPSRIGITGESLGGMHSWFGAFVDTRYSVVVPIVGFQGFRWAIDNNMWEARVNSIRPVFEEAATDLGKSEIDSEVVEKVWDRIAPGLASRFDAPYSVPLIAPRPLLLLNGAEDPCCPIAGLQEPASRVAEAYEKAGSAEKFKFIVEPGVEHMLTANMVKEASEWFDRFLQ

SEQ ID NO: 64309 - protein, 354 aa, Triticum aestivum
  peptide (1)..(354): Ceres Seq. ID no. 13598645
  misc_feature (253)..(353): Homolog of NCBI NO: 16080077 NR Description: ytaP [Bacillus subtilis]
  misc_feature (36)..(217): Homolog of NCBI NO: 16080077 NR Description: ytaP [Bacillus subtilis]
  misc_feature (1)..(354): Homolog of NCBI NO: 30689997 NR Description: expressed protein [Arabidopsis thaliana]
  misc_feature (1)..(124): Homolog of NCBI NO: 34898368 NR Description: ESTs C19441(E10423),C99201(E10423) correspond to
  misc_feature (149)..(353): Homolog of NCBI NO: 34898368 NR Description: ESTs C19441(E10423),C99201(E10423) correspond to
MAAAGDLRSEYLQVLLSRRREPQVPLSVEQGTPVTKPLFQGDWPLGPREAMESCPRKEVEDFHEKLVEENFFLITESGEQGRVPVLLLKLNDSTAPERKPVVVILHSSYKCKEWVRPLLEAYASRGYIAVSIDSRYHGESASHKNTYTDALKAAWRNGDTMPFIFDTAWDLIKLADHLSARKDVDPSRIGITGESLGGMHSWFGAFVDTRYSVVVPIVGFQGFRWAIDNNMWEARVNSIRPVFEEAATDLGKSEIDSEVVEKVWDRIAPGLASRFDAPYSVPLIAPRPLLLLNGAEDPCCPIAGLQEPASRVAEAYEKAGSAEKFKFIVEPGVEHMLTANMVKEASEWFDRFLQ

SEQ ID NO: 64310 - protein, 304 aa, Triticum aestivum
  peptide (1)..(304): Ceres Seq. ID no. 13598646
  misc_feature (203)..(303): Homolog of NCBI NO: 16080077 NR Description: ytaP [Bacillus subtilis]
  misc_feature (1)..(167): Homolog of NCBI NO: 16080077 NR Description: ytaP [Bacillus subtilis]
  misc_feature (1)..(304): Homolog of NCBI NO: 30689997 NR Description: expressed protein [Arabidopsis thaliana]
  misc_feature (1)..(74): Homolog of NCBI NO: 34898368 NR Description: ESTs C19441(E10423),C99201(E10423) correspond to
  misc_feature (99)..(303): Homolog of NCBI NO: 34898368 NR Description: ESTs C19441(E10423),C99201(E10423) correspond to
MESCPRKEVEDFHEKLVEENFFLITESGEQGRVPVLLLKLNDSTAPERKPVVVILHSSYKCKEWVRPLLEAYASRGYIAVSIDSRYHGESASHKNTYTDALKAAWRNGDTMPFIFDTAWDLIKLADHLSARKDVDPSRIGITGESLGGMHSWFGAFVDTRYSVVVPIVGFQGFRWAIDNNMWEARVNSIRPVFEEAATDLGKSEIDSEVVEKVWDRIAPGLASRFDAPYSVPLIAPRPLLLLNGAEDPCCPIAGLQEPASRVAEAYEKAGSAEKFKFIVEPGVEHMLTANMVKEASEWFDRFLQ

SEQ ID NO: 64311 - DNA, 2166 bp, Triticum aestivum
  misc_feature (1)..(2166): Ceres Seq. ID no. 13597798
aacccaaacccccccggacctaaaatctccgaaccctcctcaccggcaacacccggggtggccgccatgcacgcctccgcccgcttgctccgccgcctctcctcttcctactccgcccgctcgctccgccgcctccctctccacccatcaccctcgccgcctccacatccatctcgtctgccgccccttcgaaccgtgacccgcgccctccttccccacctcgctgctccccgcttctccaccatctcttgcgcatccacaccctctctccgcctaggtgaatgcggcgctctgggaaccccggcgataccgtcggcggaggtatccgaggaagaggaggaggtggagtctgtggcggcgcggcatgacaccgacgcgttcgcggcggtggagctcgcgctggactcggtggtgaaggtgttcacggtgtcaagtggccctaactacttcctgccgtggcagaacaaggcccagcgcgagagcatgggctccggctttgtaatttctggaaaaaggatcgtcacaaatgctcatgtggtagctgatcatacttttgttcttgtgaggaagcatggatcacctgcaaagtacaaggcggaagttcaggctattggccatgagtgtgatttggctcttcttacagttgagagtgaggagttttgggaggggatgaacagcttggatcttggagacattccatttttgcaggaagctgtcgccgtggttggctaccctcagggtggagacaatatctctgtcaccaagggggttgtttctagagtggaaccaacacagtatgcccatggtgcgactcagctcatggctatacaaatagatgcagctattaatccaggcaatagtggagggcctgcaatcatgggtgataaagtggctggagttgctttccaaaatctgtcaggagcagaaaacattgggtatattatacctgtgcctgtaattaagcgttttatttctggtgtggaagagagtggcaaatattctgggttttgttctcttgggatatcttgccaggccactgagaacatccaaataagagagtgctttggtatgcggcctgaaatgactggagtgttagtcagtagaataaatcctctgtctggtgcttacgaaattttgaggaaagacgatatccttctcgagtttgatggcgtgcctattgcgaatgatgggacagttccatttcgaaatagagagagaatcacctttgatcatcttgtgtccatgaagaagcctgaagaaacagccgttatcaaagtactaagagatggcaaagagcatgaattgaatgtgacacttagacctttgcaacctttggttcctgtacatcaatttgataaactgcccagctactacatctttgctggttttgtttttatcccgctgacccagccttatctccatgaatttggggaggactggtacaacacttcgccacgtcgattgtgtgaacgggcactgagagaacttccgaagaaggctggccaacagttagtaatattatctcaggtcctaatggatgatattaatgttggttatgaaaggctggctgaactccaggtaaagaaggtgaatggtgttgaggttgagaatttgaagcatttgtgcagtatcgtggagaactgcactgaagaaaacttgagaattgatttggacgatgagcgggtgatcgtcctgaaatttcagaacgcgaggcttgccacgtctcggatcctcaagcggcacaggattccatcagccatgtcaaatgaccttgtcgatgaacaagcgagcaaaggtgagactgaggcatcatgcacaaactgacacattttcatagacgtagctacacagtttctgcggaagcaccgatgttagctcggttgtctttccagagacagatgaggtaggccaaggactgctggagtcagcgatgagcccatgggttgcagcaggctccagttttgctgattcagttttgacagaaggtagaggtcttcagcaaataagaacccaagttcttcagcccgagttgtaacatcattctttgctcccctcccaacgatttatcattctttctttcgccactgtacgggttttggcacccttatgttaaattcggattatgtatcatcaccaaagcagaacataggagatacaaatttcaag

SEQ ID NO: 64312 - protein, 607 aa, Triticum aestivum
  peptide (1)..(607): Ceres Seq. ID no. 15222191
  misc_feature (139)..(324): Pfam Name: Trypsin Pfam Description: Trypsin
  misc_feature (505)..(591): Homolog of NCBI NO: 9279653 NR Description: gb|AAF23847.1~gene_id:MDC8.17~strong similarity
  misc_feature (108)..(473): Homolog of NCBI NO: 9279653 NR Description: gb|AAF23847.1~gene_id:MDC8.17~strong similarity
  misc_feature (509)..(591): Homolog of NCBI NO: 18401167 NR Description: DegP protease [Arabidopsis thaliana]
  misc_feature (108)..(473): Homolog of NCBI NO: 18401167 NR Description: DegP protease [Arabidopsis thaliana]
  misc_feature (60)..(504): Homolog of NCBI NO: 2190549 NR Description: F5I14.17 gene product [Arabidopsis thaliana]
  misc_feature (501)..(597): Homolog of NCBI NO: 9758082 NR Description: contains similarity to serine
  misc_feature (114)..(472): Homolog of NCBI NO: 9758082 NR Description: contains similarity to serine
  misc_feature (113)..(598): Homolog of NCBI NO: 18408327 NR Description: DegP protease [Arabidopsis thaliana]
  misc_feature (60)..(590): Homolog of NCBI NO: 18408329 NR Description: DegP protease [Arabidopsis thaliana]
  misc_feature (26)..(606): Homolog of NCBI NO: 18421592 NR Description: DegP protease [Arabidopsis thaliana]
NPNPPGPKISEPSSPATPGVAAMHASARLLRRLSSSYSARSLRRLPLHPSPSPPPHPSRLPPLRTVTRALLPHLAAPRFSTISCASTPSLRLGECGALGTPAIPSAEVSEEEEEVESVAARHDTDAFAAVELALDSVVKVFTVSSGPNYFLPWQNKAQRESMGSGFVISGKRIVTNAHVVADHTFVLVRKHGSPAKYKAEVQAIGHECDLALLTVESEEFWEGMNSLDLGDIPFLQEAVAVVGYPQGGDNISVTKGVVSRVEPTQYAHGATQLMAIQIDAAINPGNSGGPAIMGDKVAGVAFQNLSGAENIGYIIPVPVIKRFISGVEESGKYSGFCSLGISCQATENIQIRECFGMRPEMTGVLVSRINPLSGAYEILRKDDILLEFDGVPIANDGTVPFRNRERITFDHLVSMKKPEETAVIKVLRDGKEHELNVTLRPLQPLVPVHQFDKLPSYYIFAGFVFIPLTQPYLHEFGEDWYNTSPRRLCERALRELPKKAGQQLVILSQVLMDDINVGYERLAELQVKKVNGVEVENLKHLCSIVENCTEENLRIDLDDERVIVLKFQNARLATSRILKRHRIPSAMSNDLVDEQASKGETEASCTN

SEQ ID NO: 64313 - protein, 585 aa, Triticum aestivum
  peptide (1)..(585): Ceres Seq. ID no. 15222192
  misc_feature (117)..(302): Pfam Name: Trypsin Pfam Description: Trypsin
  misc_feature (483)..(569): Homolog of NCBI NO: 9279653 NR Description: gb|AAF23847.1~gene_id:MDC8.17~strong similarity
  misc_feature (86)..(451): Homolog of NCBI NO: 9279653 NR Description: gb|AAF23847.1~gene_id:MDC8.17~strong similarity
  misc_feature (487)..(569): Homolog of NCBI NO: 18401167 NR Description: DegP protease [Arabidopsis thaliana]
  misc_feature (86)..(451): Homolog of NCBI NO: 18401167 NR Description: DegP protease [Arabidopsis thaliana]
  misc_feature (38)..(482): Homolog of NCBI NO: 2190549 NR Description: F5I14.17 gene product [Arabidopsis thaliana]
  misc_feature (479)..(575): Homolog of NCBI NO: 9758082 NR Description: contains similarity to serine
  misc_feature (92)..(450): Homolog of NCBI NO: 9758082 NR Description: contains similarity to serine
  misc_feature (91)..(576): Homolog of NCBI NO: 18408327 NR Description: DegP protease [Arabidopsis thaliana]
  misc_feature (38)..(568): Homolog of NCBI NO: 18408329 NR Description: DegP protease [Arabidopsis thaliana]
  misc_feature (4)..(584): Homolog of NCBI NO: 18421592 NR Description: DegP protease [Arabidopsis thaliana]
MHASARLLRRLSSSYSARSLRRLPLHPSPSPPPHPSRLPPLRTVTRALLPHLAAPRFSTISCASTPSLRLGECGALGTPAIPSAEVSEEEEEVESVAARHDTDAFAAVELALDSVVKVFTVSSGPNYFLPWQNKAQRESMGSGFVISGKRIVTNAHVVADHTFVLVRKHGSPAKYKAEVQAIGHECDLALLTVESEEFWEGMNSLDLGDIPFLQEAVAVVGYPQGGDNISVTKGVVSRVEPTQYAHGATQLMAIQIDAAINPGNSGGPAIMGDKVAGVAFQNLSGAENIGYIIPVPVIKRFISGVEESGKYSGFCSLGISCQATENIQIRECFGMRPEMTGVLVSRINPLSGAYEILRKDDILLEFDGVPIANDGTVPFRNRERITFDHLVSMKKPEETAVIKVLRDGKEHELNVTLRPLQPLVPVHQFDKLPSYYIFAGFVFIPLTQPYLHEFGEDWYNTSPRRLCERALRELPKKAGQQLVILSQVLMDDINVGYERLAELQVKKVNGVEVENLKHLCSIVENCTEENLRIDLDDERVIVLKFQNARLATSRILKRHRIPSAMSNDLVDEQASKGETEASCTN

SEQ ID NO: 64314 - protein, 446 aa, Triticum aestivum
  peptide (1)..(446): Ceres Seq. ID no. 15222193
  misc_feature (1)..(163): Pfam Name: Trypsin Pfam Description: Trypsin
  misc_feature (344)..(430): Homolog of NCBI NO: 9279653 NR Description: gb|AAF23847.1~gene_id:MDC8.17~strong similarity
  misc_feature (1)..(312): Homolog of NCBI NO: 9279653 NR Description: gb|AAF23847.1~gene_id:MDC8.17~strong similarity
  misc_feature (348)..(430): Homolog of NCBI NO: 18401167 NR Description: DegP protease [Arabidopsis thaliana]
  misc_feature (1)..(312): Homolog of NCBI NO: 18401167 NR Description: DegP protease [Arabidopsis thaliana]
  misc_feature (1)..(343): Homolog of NCBI NO: 2190549 NR Description: F5I14.17 gene product [Arabidopsis thaliana]
  misc_feature (340)..(436): Homolog of NCBI NO: 9758082 NR Description: contains similarity to serine
  misc_feature (1)..(311): Homolog of NCBI NO: 9758082 NR Description: contains similarity to serine
  misc_feature (1)..(437): Homolog of NCBI NO: 18408327 NR Description: DegP protease [Arabidopsis thaliana]
  misc_feature (1)..(429): Homolog of NCBI NO: 18408329 NR Description: DegP protease [Arabidopsis thaliana]
  misc_feature (1)..(445): Homolog of NCBI NO: 18421592 NR Description: DegP protease [Arabidopsis thaliana]
MGSGFVISGKRIVTNAHVVADHTFVLVRKHGSPAKYKAEVQAIGHECDLALLTVESEEFWEGMNSLDLGDIPFLQEAVAVVGYPQGGDNISVTKGVVSRVEPTQYAHGATQLMAIQIDAAINPGNSGGPAIMGDKVAGVAFQNLSGAENIGYIIPVPVIKRFISGVEESGKYSGFCSLGISCQATENIQIRECFGMRPEMTGVLVSRINPLSGAYEILRKDDILLEFDGVPIANDGTVPFRNRERITFDHLVSMKKPEETAVIKVLRDGKEHELNVTLRPLQPLVPVHQFDKLPSYYIFAGFVFIPLTQPYLHEFGEDWYNTSPRRLCERALRELPKKAGQQLVILSQVLMDDINVGYERLAELQVKKVNGVEVENLKHLCSIVENCTEENLRIDLDDERVIVLKFQNARLATSRILKRHRIPSAMSNDLVDEQASKGETEASCTN

SEQ ID NO: 64315 - DNA, 831 bp, Triticum aestivum
  misc_feature (1)..(831): Ceres Seq. ID no. 12585694
ctcacagaaacgacgcgtcgactctcccttcctctcctccttccccctctctagcaatcggcgagcagcgatggcgtgggcgacacggttcctgtccgcggtgtgcttcttcgcggcgggcgtcctcttcgccccagatgtcctcgtcggcgaccgctccggctccggcgccaccgccgtcacggccgccaaggtgtcccacctcctctgcttcgccacctgctggggcgctgcgctttgggctaccttcatcggtggaatcatcatgttcaagaatctgccgaggcaccagttcgggaacctgcaggggaagatgttcccggcctatttcacgctcatctccgcctgcgccgccgtctccgtcgccgcctttgcctacctccacccgtggaaggccgcctccgccgtcgagcgctaccagcttgggttcctcatctccgcgctcggcttcaacctctccaacctgctggtcttcacccccatgaccattgagatgatgaagaagaggcacaagatcgagagagagcttagcatcggtgacgaggtcgggtggtcgaagaacgtcaagacggcaaaaagcaaccctaccctcgctgcgatgaacaagaagtttgggatgatccacggtctctcatcgctggccaacatcttgtcgttcggcagccttgccatgcactcctggtactttgccagcaagcttgagctgtgaagtgtacaaacacccagcttgaccacgaacacggttgaatctagtatcatcgcaatatgcctatgctttgttctaaaaacagctacatgttatgagcttgcaaacagatttaatgtagactg

SEQ ID NO: 64316 - protein, 235 aa, Triticum aestivum
  peptide (1)..(235): Ceres Seq. ID no. 12585695
  misc_feature (67)..(234): Homolog of NCBI NO: 40741706 NR Description: hypothetical protein AN4553.2 [Aspergillus
  misc_feature (57)..(235): Homolog of NCBI NO: 20304097 NR Description: CG32512-PA [Drosophila melanogaster]
  misc_feature (52)..(233): Homolog of NCBI NO: 31204397 NR Description: ENSANGP00000020420 [Anopheles gambiae]
  misc_feature (64)..(216): Homolog of NCBI NO: 27719651 NR Description: similar to hypothetical protein MBC3205
  misc_feature (64)..(216): Homolog of NCBI NO: 7259296 NR Description: contains transmembrane (TM) region [Mus musculus]
  misc_feature (64)..(216): Homolog of NCBI NO: 31982159 NR Description: hypothetical protein MGC18837 [Mus musculus]
  misc_feature (64)..(216): Homolog of NCBI NO: 37552510 NR Description: similar to Hypothetical protein MGC18837 [Homo
  misc_feature (65)..(209): Homolog of NCBI NO: 11357672 NR Description: hypothetical protein F26K9.10 - Arabidopsis
  misc_feature (24)..(213): Homolog of NCBI NO: 15724187 NR Description: AT3g62580/T12C14_280 [Arabidopsis thaliana]
  misc_feature (24)..(235): Homolog of NCBI NO: 18412424 NR Description: putative membrane protein
SQKRRVDSPFLSSFPLSSNRRAAMAWATRFLSAVCFFAAGVLFAPDVLVGDRSGSGATAVTAAKVSHLLCFATCWGAALWATFIGGIIMFKNLPRHQFGNLQGKMFPAYFTLISACAAVSVAAFAYLHPWKAASAVERYQLGFLISALGFNLSNLLVFTPMTIEMMKKRHKIERELSIGDEVGWSKNVKTAKSNPTLAAMNKKFGMIHGLSSLANILSFGSLAMHSWYFASKLEL

SEQ ID NO: 64317 - protein, 212 aa, Triticum aestivum
  peptide (1)..(212): Ceres Seq. ID no. 12585696
  misc_feature (44)..(211): Homolog of NCBI NO: 40741706 NR Description: hypothetical protein AN4553.2 [Aspergillus
  misc_feature (34)..(212): Homolog of NCBI NO: 20304097 NR Description: CG32512-PA [Drosophila melanogaster]
  misc_feature (29)..(210): Homolog of NCBI NO: 31204397 NR Description: ENSANGP00000020420 [Anopheles gambiae]
  misc_feature (41)..(193): Homolog of NCBI NO: 27719651 NR Description: similar to hypothetical protein MBC3205
  misc_feature (41)..(193): Homolog of NCBI NO: 7259296 NR Description: contains transmembrane (TM) region [Mus musculus]
  misc_feature (41)..(193): Homolog of NCBI NO: 31982159 NR Description: hypothetical protein MGC18837 [Mus musculus]
  misc_feature (41)..(193): Homolog of NCBI NO: 37552510 NR Description: similar to Hypothetical protein MGC18837 [Homo
  misc_feature (42)..(186): Homolog of NCBI NO: 11357672 NR Description: hypothetical protein F26K9.10 - Arabidopsis
  misc_feature (1)..(190): Homolog of NCBI NO: 15724187 NR Description: AT3g62580/T12C14_280 [Arabidopsis thaliana]
  misc_feature (1)..(212): Homolog of NCBI NO: 18412424 NR Description: putative membrane protein
MAWATRFLSAVCFFAAGVLFAPDVLVGDRSGSGATAVTAAKVSHLLCFATCWGAALWATFIGGIIMFKNLPRHQFGNLQGKMFPAYFTLISACAAVSVAAFAYLHPWKAASAVERYQLGFLISALGFNLSNLLVFTPMTIEMMKKRHKIERELSIGDEVGWSKNVKTAKSNPTLAAMNKKFGMIHGLSSLANILSFGSLAMHSWYFASKLEL

SEQ ID NO: 64318 - protein, 160 aa, Triticum aestivum
  peptide (1)..(160): Ceres Seq. ID no. 12585697
  misc_feature (44)..(160): Pfam Name: Extensin-like region Pfam Description: Extensin-like region
  misc_feature (6)..(160): Homolog of NCBI NO: 11359723 NR Description: proteophosphoglycan, membrane-associated
  misc_feature (5)..(160): Homolog of NCBI NO: 13592175 NR Description: ppg3 [Leishmania major]
  misc_feature (3)..(158): Homolog of NCBI NO: 32699068 NR Description: hypothetical protein FLJ35107 [Homo sapiens]
  misc_feature (7)..(160): Homolog of NCBI NO: 15240947 NR Description: putative protein
  misc_feature (5)..(158): Homolog of NCBI NO: 32699068 NR Description: hypothetical protein FLJ35107 [Homo sapiens]
  misc_feature (9)..(159): Homolog of NCBI NO: 3044086 NR Description: unknown [Myxococcus xanthus]
  misc_feature (7)..(160): Homolog of NCBI NO: 15233976 NR Description: extensin-like protein; protein id: At4g18670.1
  misc_feature (36)..(160): Homolog of NCBI NO: 32699068 NR Description: hypothetical protein FLJ35107 [Homo sapiens]
  misc_feature (6)..(160): Homolog of NCBI NO: 23017082 NR Description: hypothetical protein [Thermobifida fusca]
  misc_feature (5)..(159): Homolog of NCBI NO: 32699068 NR Description: hypothetical protein FLJ35107 [Homo sapiens]
HRNDASTLPSSPPSPSLAIGEQRWRGRHGSCPRCASSRRASSSPQMSSSATAPAPAPPPSRPPRCPTSSASPPAGALRFGLPSSVESSCSRICRGTSSGTCRGRCSRPISRSSPPAPPSPSPPLPTSTRGRPPPPSSATSLGSSSPRSASTSPTCWSSPP

SEQ ID NO: 64319 - DNA, 1022 bp, Triticum aestivum
  misc_feature (1)..(1022): Ceres Seq. ID no. 15225623
aaaccgaaaccgaccggccttcccctctcgctctcgcgtctctcggcgggcgttcactctccggcgacgccgacctcccgtctccggcgaccggctgccgccccgccctccctctcaaccggctcggcggtgttccatagcctgccatgtcgaagaagaggggcctttccttggaggagaagcgggagcaaatgcttcaaatattttacgagagtcaagacttctatctgcttaaagagcttgagaagatgggtcctaaaaaaggagtgatcagccagtctgttaaggatgttgtgcaaagcctggtggatgatgatcttgtcttgagagacaaaataggaacttctgtgtacttttggagtcttcccagttgtgccggaaatcagctgaggactacctacaacaagctggagtctgatctttcaaactctaaaaaacgttacatggagcttcttgagcagagagatgacttgaaaagaggcagggaagacactgatgagagagaagacgctttggaggagctgaaggctgtagagctacgccataagaagttaaaggaagaactagctgcctatgctgatagtgatccatctgcactagaggcgatgaaggatgctactgaggttgcccattcggcagctaacagatggacagacaacatcttcactttgcaacaatggtgttcaactacattcccgcaagcaaaagaacagcttgaacacatgtacaaggaggtgggcataactgaagactttgagtatctgcagtaatgctcgacagcctgcatatgccctattgcatcatcgtgtgcagtctccctcagcacgtggtgttggatctagagtagttcacccaaaattggtgagaatcacccgtaccgtcggctatttaacatttgagcagatgatgccattattgcacatgttctgttatgtagaggtgagatgccttgcctatcattgtcgtcaggagagaatgttcactacgttaaaacggtgctacaagatgaatttggcacatgc

SEQ ID NO: 64320 - protein, 207 aa, Triticum aestivum
  peptide (1)..(207): Ceres Seq. ID no. 15225624
  misc_feature (10)..(207): Homolog of NCBI NO: 19074771 NR Description: similarity to HYPOTHETICAL PROTEIN YA53_SCHPO
  misc_feature (5)..(207): Homolog of NCBI NO: 29246883 NR Description: GLP_76_12374_11763 [Giardia lamblia ATCC 50803]
  misc_feature (5)..(207): Homolog of NCBI NO: 19113903 NR Description: hypothetical coiled-coil protein
  misc_feature (16)..(137): Homolog of NCBI NO: 7485748 NR Description: hypothetical protein F19B15.200 - Arabidopsis
  misc_feature (11)..(206): Homolog of NCBI NO: 29841076 NR Description: similar to GenBank Accession Number AY028916 GAJ
  misc_feature (1)..(206): Homolog of NCBI NO: 14149769 NR Description: GAJ protein; homolog of yeast MND1 [Homo sapiens]
  misc_feature (1)..(206): Homolog of NCBI NO: 37591185 NR Description: GAJ protein [Mus musculus]
  misc_feature (1)..(206): Homolog of NCBI NO: 20380711 NR Description: GAJ protein [Mus musculus]
  misc_feature (1)..(206): Homolog of NCBI NO: 34857888 NR Description: similar to RIKEN cDNA 2610034E18 gene [Rattus
  misc_feature (1)..(207): Homolog of NCBI NO: 30688234 NR Description: expressed protein [Arabidopsis thaliana]
MSKKRGLSLEEKREQMLQIFYESQDFYLLKELEKMGPKKGVISQSVKDVVQSLVDDDLVLRDKIGTSVYFWSLPSCAGNQLRTTYNKLESDLSNSKKRYMELLEQRDDLKRGREDTDEREDALEELKAVELRHKKLKEELAAYADSDPSALEAMKDATEVAHSAANRWTDNIFTLQQWCSTTFPQAKEQLEHMYKEVGITEDFEYLQ

SEQ ID NO: 64321 - protein, 192 aa, Triticum aestivum
  peptide (1)..(192): Ceres Seq. ID no. 15225625
  misc_feature (1)..(192): Homolog of NCBI NO: 19074771 NR Description: similarity to HYPOTHETICAL PROTEIN YA53_SCHPO
  misc_feature (1)..(192): Homolog of NCBI NO: 29246883 NR Description: GLP_76_12374_11763 [Giardia lamblia ATCC 50803]
  misc_feature (1)..(192): Homolog of NCBI NO: 19113903 NR Description: hypothetical coiled-coil protein
  misc_feature (1)..(122): Homolog of NCBI NO: 7485748 NR Description: hypothetical protein F19B15.200 - Arabidopsis
  misc_feature (1)..(191): Homolog of NCBI NO: 29841076 NR Description: similar to GenBank Accession Number AY028916 GAJ
  misc_feature (1)..(191): Homolog of NCBI NO: 14149769 NR Description: GAJ protein; homolog of yeast MND1 [Homo sapiens]
  misc_feature (1)..(191): Homolog of NCBI NO: 37591185 NR Description: GAJ protein [Mus musculus]
  misc_feature (1)..(191): Homolog of NCBI NO: 20380711 NR Description: GAJ protein [Mus musculus]
  misc_feature (1)..(191): Homolog of NCBI NO: 34857888 NR Description: similar to RIKEN cDNA 2610034E18 gene [Rattus
  misc_feature (1)..(192): Homolog of NCBI NO: 30688234 NR Description: expressed protein [Arabidopsis thaliana]
MLQIFYESQDFYLLKELEKMGPKKGVISQSVKDVVQSLVDDDLVLRDKIGTSVYFWSLPSCAGNQLRTTYNKLESDLSNSKKRYMELLEQRDDLKRGREDTDEREDALEELKAVELRHKKLKEELAAYADSDPSALEAMKDATEVAHSAANRWTDNIFTLQQWCSTTFPQAKEQLEHMYKEVGITEDFEYLQ

SEQ ID NO: 64322 - protein, 173 aa, Triticum aestivum
  peptide (1)..(173): Ceres Seq. ID no. 15225626
  misc_feature (1)..(173): Homolog of NCBI NO: 19074771 NR Description: similarity to HYPOTHETICAL PROTEIN YA53_SCHPO
  misc_feature (1)..(173): Homolog of NCBI NO: 29246883 NR Description: GLP_76_12374_11763 [Giardia lamblia ATCC 50803]
  misc_feature (1)..(173): Homolog of NCBI NO: 19113903 NR Description: hypothetical coiled-coil protein
  misc_feature (1)..(103): Homolog of NCBI NO: 7485748 NR Description: hypothetical protein F19B15.200 - Arabidopsis
  misc_feature (1)..(172): Homolog of NCBI NO: 29841076 NR Description: similar to GenBank Accession Number AY028916 GAJ
  misc_feature (1)..(172): Homolog of NCBI NO: 14149769 NR Description: GAJ protein; homolog of yeast MND1 [Homo sapiens]
  misc_feature (1)..(172): Homolog of NCBI NO: 37591185 NR Description: GAJ protein [Mus musculus]
  misc_feature (1)..(172): Homolog of NCBI NO: 20380711 NR Description: GAJ protein [Mus musculus]
  misc_feature (1)..(172): Homolog of NCBI NO: 34857888 NR Description: similar to RIKEN cDNA 2610034E18 gene [Rattus
  misc_feature (1)..(173): Homolog of NCBI NO: 30688234 NR Description: expressed protein [Arabidopsis thaliana]
MGPKKGVISQSVKDVVQSLVDDDLVLRDKIGTSVYFWSLPSCAGNQLRTTYNKLESDLSNSKKRYMELLEQRDDLKRGREDTDEREDALEELKAVELRHKKLKEELAAYADSDPSALEAMKDATEVAHSAANRWTDNIFTLQQWCSTTFPQAKEQLEHMYKEVGITEDFEYLQ

SEQ ID NO: 64323 - DNA, 1495 bp, Triticum aestivum
  misc_feature (1)..(1495): Ceres Seq. ID no. 15225627
tcgccccctcctccctattactctcccacctgctctccccgccgctccagaatcgccgccaccttgctgcgctcaccaacggcacgcgcatcccccctcagatccctccctcacgcattccgccttctcccgaggctcgtagctgctagcacggacgatggccccttgtgcaaccgccggcgcgcagatgctggccgcacgcccctgcgtctcggcctctcagagcatgctcacctcgaggccggccgtctcacggatcgacctgacgctcgtcgctggtagcttcgcgaactgtcccagaatctcctgctccaggtctcttggttcttcccggagcggcgctgtcgccgtaagagcggtgtcaggagaaggtagctcttctgggctgcccatcgatcttagagggaaaagggcatttattgctggggttgctgatgataacggctatggctgggcaattgcaaaggctcttgccgcagctggtgctgaaattcttgttggtacatgggtgcctgcacttaacatatttgagacaagcctgaggcgtggaaaatttgacgaatcacggaagctgcctgatggatctcttatggagattgttaaagtctatccactggatgctgtctatgattccccggaggatgttcctgaagatgtcaaaacaaacaaaaggtacgcaggatcgtcaaattggactgtgaaggaagctgccgaattagttaagaaggaatatggcagcattgacattcttgtgcattctcttgctaatggtcctgaggttacaaaacctttgctggaaacctcaagaagtgggtatcttgctgcaatttcagcatccagttactcctttgtttctttacttaagcacttccttcctattatgaatccaggtggtgctagcatctcgctaacatatattgcatctgaaaggacaattcctggatatggtggtggcatgagttcagctaaagcagctcttgagagtgatacaaaagtacttgcttttgaagctggacgcaaaggcaaaatccgagttaacaccatatctgcaggtcctctgggcagcagagctgccaaggcaattggattcattgagaagatgatcgagtactcttatgtcaatgcaccattgcagaaggagcttctggcagatgaagtcgggaacacggcagcattcctggtgtctcctttggcttctgccatcactggctcgactgtttacgtcgacaacggacttaacaccatgggtcttgcggttgacagccccacagtatcttcattgttgtgattccggtaggcggacctatttttcctgattcaccgcggcttgattgttgaataaggagcttagttagttagtactgtaagaagctcttgctaagagctgagggcaggagaaaaaagagaagggggtggctgttgaaaatgactttttaagcagtccagtacctcctctttggcccatttctaatattatctcaaatgttgttgttgc

SEQ ID NO: 64324 - protein, 376 aa, Triticum aestivum
  peptide (1)..(376): Ceres Seq. ID no. 15225628
  misc_feature (1)..(375): Homolog of NCBI NO: 7488486 NR Description: probable enoyl-
  misc_feature (1)..(375): Homolog of NCBI NO: 18396215 NR Description: enoyl-
  misc_feature (2)..(375): Homolog of NCBI NO: 14422259 NR Description: enoyl-[acyl-carrier protein] reductase [Brassica
  misc_feature (2)..(375): Homolog of NCBI NO: 99805 NR Description: enoyl-
  misc_feature (48)..(375): Homolog of NCBI NO: 14422257 NR Description: enoyl-[acyl-carrier protein] reductase [Brassica
  misc_feature (2)..(375): Homolog of NCBI NO: 461461 NR Description: Enoyl-
  misc_feature (2)..(375): Homolog of NCBI NO: 14422261 NR Description: enoyl-[acyl carrier-protein] reductase [Brassica
  misc_feature (1)..(375): Homolog of NCBI NO: 14422255 NR Description: enoyl-[acyl-carrier protein] reductase [Brassica
  misc_feature (1)..(374): Homolog of NCBI NO: 7489537 NR Description: probable enoyl-
  misc_feature (1)..(374): Homolog of NCBI NO: 38637198 NR Description: putative enoyl-ACP reductase
MAPCATAGAQMLAARPCVSASQSMLTSRPAVSRIDLTLVAGSFANCPRISCSRSLGSSRSGAVAVRAVSGEGSSSGLPIDLRGKRAFIAGVADDNGYGWAIAKALAAAGAEILVGTWVPALNIFETSLRRGKFDESRKLPDGSLMEIVKVYPLDAVYDSPEDVPEDVKTNKRYAGSSNWTVKEAAELVKKEYGSIDILVHSLANGPEVTKPLLETSRSGYLAAISASSYSFVSLLKHFLPIMNPGGASISLTYIASERTIPGYGGGMSSAKAALESDTKVLAFEAGRKGKIRVNTISAGPLGSRAAKAIGFIEKMIEYSYVNAPLQKELLADEVGNTAAFLVSPLASAITGSTVYVDNGLNTMGLAVDSPTVSSLL

SEQ ID NO: 64325 - protein, 366 aa, Triticum aestivum
  peptide (1)..(366): Ceres Seq. ID no. 15225629
  misc_feature (1)..(365): Homolog of NCBI NO: 7488486 NR Description: probable enoyl-
  misc_feature (1)..(365): Homolog of NCBI NO: 18396215 NR Description: enoyl-
  misc_feature (1)..(365): Homolog of NCBI NO: 14422259 NR Description: enoyl-[acyl-carrier protein] reductase [Brassica
  misc_feature (1)..(365): Homolog of NCBI NO: 99805 NR Description: enoyl-
  misc_feature (38)..(365): Homolog of NCBI NO: 14422257 NR Description: enoyl-[acyl-carrier protein] reductase [Brassica
  misc_feature (1)..(365): Homolog of NCBI NO: 461461 NR Description: Enoyl-
  misc_feature (1)..(365): Homolog of NCBI NO: 14422261 NR Description: enoyl-[acyl carrier-protein] reductase [Brassica
  misc_feature (1)..(365): Homolog of NCBI NO: 14422255 NR Description: enoyl-[acyl-carrier protein] reductase [Brassica
  misc_feature (1)..(364): Homolog of NCBI NO: 7489537 NR Description: probable enoyl-
  misc_feature (1)..(364): Homolog of NCBI NO: 38637198 NR Description: putative enoyl-ACP reductase
MLAARPCVSASQSMLTSRPAVSRIDLTLVAGSFANCPRISCSRSLGSSRSGAVAVRAVSGEGSSSGLPIDLRGKRAFIAGVADDNGYGWAIAKALAAAGAEILVGTWVPALNIFETSLRRGKFDESRKLPDGSLMEIVKVYPLDAVYDSPEDVPEDVKTNKRYAGSSNWTVKEAAELVKKEYGSIDILVHSLANGPEVTKPLLETSRSGYLAAISASSYSFVSLLKHFLPIMNPGGASISLTYIASERTIPGYGGGMSSAKAALESDTKVLAFEAGRKGKIRVNTISAGPLGSRAAKAIGFIEKMIEYSYVNAPLQKELLADEVGNTAAFLVSPLASAITGSTVYVDNGLNTMGLAVDSPTVSSLL

SEQ ID NO: 64326 - protein, 353 aa, Triticum aestivum
  peptide (1)..(353): Ceres Seq. ID no. 15225630
  misc_feature (1)..(352): Homolog of NCBI NO: 7488486 NR Description: probable enoyl-
  misc_feature (1)..(352): Homolog of NCBI NO: 18396215 NR Description: enoyl-
  misc_feature (1)..(352): Homolog of NCBI NO: 14422259 NR Description: enoyl-[acyl-carrier protein] reductase [Brassica
  misc_feature (1)..(352): Homolog of NCBI NO: 99805 NR Description: enoyl-
  misc_feature (25)..(352): Homolog of NCBI NO: 14422257 NR Description: enoyl-[acyl-carrier protein] reductase [Brassica
  misc_feature (1)..(352): Homolog of NCBI NO: 461461 NR Description: Enoyl-
  misc_feature (1)..(352): Homolog of NCBI NO: 14422261 NR Description: enoyl-[acyl carrier-protein] reductase [Brassica
  misc_feature (1)..(352): Homolog of NCBI NO: 14422255 NR Description: enoyl-[acyl-carrier protein] reductase [Brassica
  misc_feature (1)..(351): Homolog of NCBI NO: 7489537 NR Description: probable enoyl-
  misc_feature (1)..(351): Homolog of NCBI NO: 38637198 NR Description: putative enoyl-ACP reductase
MLTSRPAVSRIDLTLVAGSFANCPRISCSRSLGSSRSGAVAVRAVSGEGSSSGLPIDLRGKRAFIAGVADDNGYGWAIAKALAAAGAEILVGTWVPALNIFETSLRRGKFDESRKLPDGSLMEIVKVYPLDAVYDSPEDVPEDVKTNKRYAGSSNWTVKEAAELVKKEYGSIDILVHSLANGPEVTKPLLETSRSGYLAAISASSYSFVSLLKHFLPIMNPGGASISLTYIASERTIPGYGGGMSSAKAALESDTKVLAFEAGRKGKIRVNTISAGPLGSRAAKAIGFIEKMIEYSYVNAPLQKELLADEVGNTAAFLVSPLASAITGSTVYVDNGLNTMGLAVDSPTVSSLL

SEQ ID NO: 64327 - DNA, 584 bp, Triticum aestivum
  misc_feature (1)..(584): Ceres Seq. ID no. 13584968
aaatcgatagatagatagataagtaaaaatggcgcagtgtgtgaccaaaaacacattcgtgcaaggaaaacccttccttccagttccagcagctcccactaaaaatgttcggagagtggttcagtgcggtgtgtggtgcaggaagaaggagatacacccgcaattccacgaggaagcgaaggtgtactgcaacggggagctggtgctgacgacaggtgggacccagaaggagtacgtggtcgacgtgtggtcggggaaccaccctttctacctcggaagccggtcggcgtctatggtcagcgacgaccaggtcgagaagttccgcaagaagttcggagagctaaaagagatcatggagattcctgttctcaagggagagattgttatcccctcaagacgcaagggcgtttccaaaggaggcaagaaaaaataatttattcgattcaaacatgattgtcttttttcttcttcttaatttcaattcctgtaatgtaatatgataaaacgctttaagcctgtgctatggatattgttttgagcaagcccctgaatgtgctaatgtgattgatttggtgattctgtcc

SEQ ID NO: 64328 - protein, 134 aa, Triticum aestivum
  peptide (1)..(134): Ceres Seq. ID no. 13584969
  misc_feature (38)..(105): Pfam Name: Ribosomal protein L31 Pfam Description: Ribosomal protein L31
  misc_feature (39)..(103): Homolog of NCBI NO: 33866627 NR Description: 50S ribosomal protein L31 [Synechococcus sp. WH
  misc_feature (39)..(104): Homolog of NCBI NO: 23042796 NR Description: hypothetical protein [Trichodesmium erythraeum
  misc_feature (39)..(103): Homolog of NCBI NO: 33862086 NR Description: 50S ribosomal protein L31
  misc_feature (39)..(131): Homolog of NCBI NO: 22297654 NR Description: 50S ribosomal protein L31 [Thermosynechococcus
  misc_feature (39)..(103): Homolog of NCBI NO: 33241133 NR Description: Ribosomal protein L31
  misc_feature (39)..(103): Homolog of NCBI NO: 17231678 NR Description: 50S ribosomal protein L31 [Nostoc sp. PCC 7120]
  misc_feature (39)..(107): Homolog of NCBI NO: 11467741 NR Description: ribosomal protein L31 [Guillardia theta]
  misc_feature (16)..(107): Homolog of NCBI NO: 34912982 NR Description: putative chloroplast 50S ribosomal protein L31
  misc_feature (14)..(133): Homolog of NCBI NO: 18410833 NR Description: chloroplast 50S ribosomal protein L31 -related
  misc_feature (28)..(134): Homolog of NCBI NO: 3885513 NR Description: similar to chloroplast 50S ribosomal protein L31
MAQCVTKNTFVQGKPFLPVPAAPTKNVRRVVQCGVWCRKKEIHPQFHEEAKVYCNGELVLTTGGTQKEYVVDVWSGNHPFYLGSRSASMVSDDQVEKFRKKFGELKEIMEIPVLKGEIVIPSRRKGVSKGGKKK

SEQ ID NO: 64329 - DNA, 1181 bp, Triticum aestivum
  misc_feature (1)..(1181): Ceres Seq. ID no. 13585324
ctttttttaggaagtaccatctagataagtatatctatgccttagtagatttgacctaagaggttttttatagcaagcaggcagttctttaatacagtagtttacagaccttgttttacatggcccattccatgatcgtccttgtatttttgtcatcaagatctgtctgtttttgtcgttcagatttgatttcgtgcaaagccttaaccaagcagcatgttctcatcagtcgggtagtgaatggagctttattagccttgtctgtaaccaatgctgctcccctataatctgcatgtggacacgatcttgcaatcagccaaattggcaagcgatagcatttgatattgagcttggctgtggtgactagggagtcgtactgaaccccatgtgctatttgttgtttggtggcctacatgcgatgctttgatggatggaaggttgcaagtgcaacagcaacatttgtcatgatgttctcctcgtctctctctgtggtcgagttctactttctgggcaggttcccaattccttatgctctctacttgatcttcatttccatattggctgggttctggggccagtgcttggtcaggaagatcgtgcatgtgctcaagagggcctcgctgatcgtcttcatcctctcctctgtcatcttcgccagtgctcttaccatgggtgttgttgggaccgagaagagcatctcgatgatccacaatcacgaatacatggggttcctcagcttctgctgagtgaacaaaccaagcagacgaccaccagacccggggagaacccaaaccaggccaatacctaattgacctcacctctcccccagtccagttaagtccaaggatgaaataaaagaagcctgacgcgtgcccgtcgttagctcctcgctaacctgcaagcacctgcccggccaagcaaattctcctagtagtatagtgtcatggtcttgtggcgcggcgtcgtgccgtgtgctggatgttcttttttgttgtgttcatgtgctggttagctcctggttaacctgcagtgaagcattcgtcgtagggtttacgccgattcattcatgcgctagctagctcttggctggctggctacctgcaaacattggttgtattgggtgatgtaaatatatcagccggccaattggttgctgatttgtctatatagcttgttttgct

SEQ ID NO: 64330 - protein, 125 aa, Triticum aestivum
  peptide (1)..(125): Ceres Seq. ID no. 13585325
MEGCKCNSNICHDVLLVSLCGRVLLSGQVPNSLCSLLDLHFHIGWVLGPVLGQEDRACAQEGLADRLHPLLCHLRQCSYHGCCWDREEHLDDPQSRIHGVPQLLLSEQTKQTTTRPGENPNQANT

SEQ ID NO: 64331 - protein, 110 aa, Triticum aestivum
  peptide (1)..(110): Ceres Seq. ID no. 13585326
  misc_feature (8)..(110): Homolog of NCBI NO: 40253486 NR Description: unknown protein [Oryza sativa (japonica
  misc_feature (8)..(105): Homolog of NCBI NO: 16660290 NR Description: hypothetical protein [Musa acuminata]
  misc_feature (8)..(110): Homolog of NCBI NO: 25412342 NR Description: hypothetical protein At2g25740 [imported] -
  misc_feature (8)..(110): Homolog of NCBI NO: 40253412 NR Description: membrane protein-like [Oryza sativa (japonica
  misc_feature (8)..(110): Homolog of NCBI NO: 30682879 NR Description: expressed protein [Arabidopsis thaliana]
  misc_feature (8)..(110): Homolog of NCBI NO: 30686851 NR Description: expressed protein [Arabidopsis thaliana]
MRCFDGWKVASATATFVMMFSSSLSVVEFYFLGRFPIPYALYLIFISILAGFWGQCLVRKIVHVLKRASLIVFILSSVIFASALTMGVVGTEKSISMIHNHEYMGFLSFC

SEQ ID NO: 64332 - protein, 93 aa, Triticum aestivum
  peptide (1)..(93): Ceres Seq. ID no. 13585327
  misc_feature (1)..(93): Homolog of NCBI NO: 40253486 NR Description: unknown protein [Oryza sativa (japonica
  misc_feature (1)..(88): Homolog of NCBI NO: 16660290 NR Description: hypothetical protein [Musa acuminata]
  misc_feature (1)..(93): Homolog of NCBI NO: 25412342 NR Description: hypothetical protein At2g25740 [imported] -
  misc_feature (1)..(93): Homolog of NCBI NO: 40253412 NR Description: membrane protein-like [Oryza sativa (japonica
  misc_feature (1)..(93): Homolog of NCBI NO: 30682879 NR Description: expressed protein [Arabidopsis thaliana]
  misc_feature (1)..(93): Homolog of NCBI NO: 30686851 NR Description: expressed protein [Arabidopsis thaliana]
MMFSSSLSVVEFYFLGRFPIPYALYLIFISILAGFWGQCLVRKIVHVLKRASLIVFILSSVIFASALTMGVVGTEKSISMIHNHEYMGFLSFC

SEQ ID NO: 64333 - DNA, 808 bp, Triticum aestivum
  misc_feature (1)..(808): Ceres Seq. ID no. 12618251
acatcgagtcctcgcgccgtcccccgtcccatattccctttacccgttctcgcctcgtcgccggcaatggcgggtcccggcgtcggagcggccgcgcctcgcctgtcgctgctgctgctgctcgtcgtcgtcttcgcgggcccctctcgcgacagccgcaccgaggcggccgtgcggacgtgcacgtacacggtgaaggtgaagacgagctgcgcgtcgccggcgcggacgtcggacgcggtcagcgtggcgttcggggacgcgtaccggaacgaggcgtacggggcgcgcctcccgagcgcgccgggcgggagggccttcgagcggtgcggcaccgacaccttccgcgtctccggggtgtgcggctacggcgtctgctacctctacctccgccgcgccggccgcgacggctgggcgcccgagtgggtccaggtcaccgagccgggccccggcgccggagagaagcccgccaccttctacttcggggcgccgctgccggacggcgtctggtacggccacaaccgctgccccaaggccaaggccaaggcagcggcggcggctcggacaaacaccacctctgctgctgcttcgcctctgggctagcgcgacctgattcggctctacccaccgggcgcagcccctctccgtatgtaattcggcattcgccgagaataagcagactgtgcttacagattcagaataagtaattagagaatcataatccgaaatatgatgaggccatgagggcaccttcttcacaccccggaggatttgtttcctgtttacatttaccacacatctctattag

SEQ ID NO: 64334 - protein, 234 aa, Triticum aestivum
  peptide (1)..(234): Ceres Seq. ID no. 12618252
IESSRRPPSHIPFTRSRLVAGNGGSRRRSGRASPVAAAAARRRLRGPLSRQPHRGGRADVHVHGEGEDELRVAGADVGRGQRGVRGRVPERGVRGAPPERAGREGLRAVRHRHLPRLRGVRLRRLLPLPPPRRPRRLGARVGPGHRAGPRRRREARHLLLRGAAAGRRLVRPQPLPQGQGQGSGGGSDKHHLCCCFASGLARPDSALPTGRSPSPYVIRHSPRISRLCLQIQNK

SEQ ID NO: 64335 - protein, 200 aa, Triticum aestivum
  peptide (1)..(200): Ceres Seq. ID no. 12618253
  misc_feature (55)..(176): Pfam Name: Embryo-specific protein 3, (ATS3) Pfam Description: Embryo-specific protein 3, (ATS3)
  misc_feature (33)..(176): Homolog of NCBI NO: 15240721 NR Description: embryo-specific protein 3 (ATS3)
  misc_feature (33)..(176): Homolog of NCBI NO: 13877521 NR Description: embryo-specific protein 3; ATS3 [Arabidopsis
  misc_feature (33)..(176): Homolog of NCBI NO: 3335171 NR Description: embryo-specific protein 3 [Arabidopsis thaliana]
  misc_feature (36)..(176): Homolog of NCBI NO: 26450767 NR Description: embryo-specific protein like [Arabidopsis
  misc_feature (36)..(176): Homolog of NCBI NO: 15241758 NR Description: embryo-specific protein - like
  misc_feature (60)..(179): Homolog of NCBI NO: 15241727 NR Description: putative protein; protein id: At5g62200.1
  misc_feature (60)..(179): Homolog of NCBI NO: 8809633 NR Description: contains similarity to embryo-specific protein
  misc_feature (61)..(197): Homolog of NCBI NO: 15227355 NR Description: unknown protein; protein id: At2g41470.1
  misc_feature (55)..(185): Homolog of NCBI NO: 34910236 NR Description: OSJNBa0089K24.2 [Oryza sativa (japonica
TSSPRAVPRPIFPLPVLASSPAMAGPGVGAAAPRLSLLLLLVVVFAGPSRDSRTEAAVRTCTYTVKVKTSCASPARTSDAVSVAFGDAYRNEAYGARLPSAPGGRAFERCGTDTFRVSGVCGYGVCYLYLRRAGRDGWAPEWVQVTEPGPGAGEKPATFYFGAPLPDGVWYGHNRCPKAKAKAAAAARTNTTSAAASPLG

SEQ ID NO: 64336 - protein, 178 aa, Triticum aestivum
  peptide (1)..(178): Ceres Seq. ID no. 12618254
  misc_feature (33)..(154): Pfam Name: Embryo-specific protein 3, (ATS3) Pfam Description: Embryo-specific protein 3, (ATS3)
  misc_feature (11)..(154): Homolog of NCBI NO: 15240721 NR Description: embryo-specific protein 3 (ATS3)
  misc_feature (11)..(154): Homolog of NCBI NO: 13877521 NR Description: embryo-specific protein 3; ATS3 [Arabidopsis
  misc_feature (11)..(154): Homolog of NCBI NO: 3335171 NR Description: embryo-specific protein 3 [Arabidopsis thaliana]
  misc_feature (14)..(154): Homolog of NCBI NO: 26450767 NR Description: embryo-specific protein like [Arabidopsis
  misc_feature (14)..(154): Homolog of NCBI NO: 15241758 NR Description: embryo-specific protein - like
  misc_feature (38)..(157): Homolog of NCBI NO: 15241727 NR Description: putative protein; protein id: At5g62200.1
  misc_feature (38)..(157): Homolog of NCBI NO: 8809633 NR Description: contains similarity to embryo-specific protein
  misc_feature (39)..(175): Homolog of NCBI NO: 15227355 NR Description: unknown protein; protein id: At2g41470.1
  misc_feature (33)..(163): Homolog of NCBI NO: 34910236 NR Description: OSJNBa0089K24.2 [Oryza sativa (japonica
MAGPGVGAAAPRLSLLLLLVVVFAGPSRDSRTEAAVRTCTYTVKVKTSCASPARTSDAVSVAFGDAYRNEAYGARLPSAPGGRAFERCGTDTFRVSGVCGYGVCYLYLRRAGRDGWAPEWVQVTEPGPGAGEKPATFYFGAPLPDGVWYGHNRCPKAKAKAAAAARTNTTSAAASPLG

SEQ ID NO: 64337 - DNA, 1472 bp, Triticum aestivum
  misc_feature (1)..(1472): Ceres Seq. ID no. 13655434
ctaatcgaaaacattcggcagggttgtgaacaccatgtgcaacgtcggagccaaccgcaaccaggccttcgtggagttcgcagatcaaaaccaggcaatttcaatggtttcatattatgcttcatcttcagaacctgcccaagttcgtggtaaaactgtatatatccagtattcaaataggcaagaaattacaaacaataaaggcactggtgattcttctggcaatgtcctgcttgtcacctttgaaggtgtccagcctaatgatgttagcatagatgttatccatttggtattttctgcttttgggtttgttcacaagatagcaacgtttgagaaagccgctggtttccaggcacttatccaatatactgatgctccaactgctctagaggcaaaaaattcgttagacggaagaagcataccgaggtatctactggctgaacacgtcagcatttgtcacctgcgcataacattttctgcgcacaaagatttgaatattaaatttcaatcacatcgcagcagggattacacaaatccttatcttcctgttaatccaactgcaatcgagggaatcacacagcccatattaggctctgatgggaagattaaggagccagagagcaatgtacttttagcatcaatcgagaacatgcagtatgctgtgggagtggatgttctacacactgtgttctcttcttttggtgctgtccgaaagattgcaatgttcgagaagaatggtggaatgcaggctctaattcagtatccagatataacaacagcaggagttgctaaacaagctctggaggggcattgcatatatgatggtggttactgtaagcttcatctgtcatactctcgtcatactgatctgaatgtgaaggcacatgacgagagaagcagagactacaccgtctcggatcctagtgctcaggtacaagctgcaggtcaagcccctggtctaagcactcctggagcagcatggcaaagcaccacgcctgctgctttttatggaagctcagcaggaccgacctctatcggacaagcgccagcctggaatcctaacatgcagcgaggggcatttgcacctgcatcaacctcgtaccctacccaattattgatggcaaacccaggcccgcactttccagcagtcggatcaagctctggtgctcctccgatgttgtaccaagcttcgcagcagatggcacattatggcacagcccctgctgctctgcctcatgcagccttgtctggcgaaccgatgtacttcccaaaatgagctattcatccaatagagcagttgcctatgctttgtgcagcacctctggtcttcaatttttggaactgcactgtaatgccgatctgtttttcttggtacttgtgagacccctgtggcaaatgtacctgtctggctgttggtgcctgtaaactgcacaacaaaatggaaaattactcgagccatgtcagttcaatcc

SEQ ID NO: 64338 - protein, 413 aa, Triticum aestivum
  peptide (1)..(413): Ceres Seq. ID no. 13655435
  misc_feature (201)..(269): Pfam Name: RNA recognition motif. (a.k.a. RRM, RBD, or RNP domain) Pfam Description: RNA recognition motif. (a.k.a. RRM, RBD, or RNP
  misc_feature (196)..(292): Homolog of NCBI NO: 16589094 NR Description: hephaestus [Drosophila melanogaster]
  misc_feature (1)..(171): Homolog of NCBI NO: 28949889 NR Description: polypyrimidine track-binding protein homologue
  misc_feature (1)..(285): Homolog of NCBI NO: 22329999 NR Description: polypyrimidine tract-binding protein 1 (PTB)
  misc_feature (82)..(267): Homolog of NCBI NO: 20260638 NR Description: putative polypyrimidine tract-binding protein
  misc_feature (1)..(131): Homolog of NCBI NO: 34912728 NR Description: putative polypyrimidine tract-binding protein
  misc_feature (163)..(413): Homolog of NCBI NO: 34912728 NR Description: putative polypyrimidine tract-binding protein
  misc_feature (1)..(381): Homolog of NCBI NO: 15238677 NR Description: polypyrimidine tract-binding protein 1 (PTB)
  misc_feature (1)..(330): Homolog of NCBI NO: 11358627 NR Description: polypyrimidine tract-binding protein homolog
  misc_feature (1)..(343): Homolog of NCBI NO: 15232047 NR Description: polypyrimidine tract-binding protein 1 (PTB)
  misc_feature (1)..(408): Homolog of NCBI NO: 18921326 NR Description: putative polypyrimidine tract-binding protein
MCNVGANRNQAFVEFADQNQAISMVSYYASSSEPAQVRGKTVYIQYSNRQEITNNKGTGDSSGNVLLVTFEGVQPNDVSIDVIHLVFSAFGFVHKIATFEKAAGFQALIQYTDAPTALEAKNSLDGRSIPRYLLAEHVSICHLRITFSAHKDLNIKFQSHRSRDYTNPYLPVNPTAIEGITQPILGSDGKIKEPESNVLLASIENMQYAVGVDVLHTVFSSFGAVRKIAMFEKNGGMQALIQYPDITTAGVAKQALEGHCIYDGGYCKLHLSYSRHTDLNVKAHDERSRDYTVSDPSAQVQAAGQAPGLSTPGAAWQSTTPAAFYGSSAGPTSIGQAPAWNPNMQRGAFAPASTSYPTQLLMANPGPHFPAVGSSSGAPPMLYQASQQMAHYGTAPAALPHAALSGEPMYFPK

SEQ ID NO: 64339 - protein, 390 aa, Triticum aestivum
  peptide (1)..(390): Ceres Seq. ID no. 13655436
  misc_feature (178)..(246): Pfam Name: RNA recognition motif. (a.k.a. RRM, RBD, or RNP domain) Pfam Description: RNA recognition motif. (a.k.a. RRM, RBD, or RNP
  misc_feature (173)..(269): Homolog of NCBI NO: 16589094 NR Description: hephaestus [Drosophila melanogaster]
  misc_feature (1)..(148): Homolog of NCBI NO: 28949889 NR Description: polypyrimidine track-binding protein homologue
  misc_feature (1)..(262): Homolog of NCBI NO: 22329999 NR Description: polypyrimidine tract-binding protein 1 (PTB)
  misc_feature (59)..(244): Homolog of NCBI NO: 20260638 NR Description: putative polypyrimidine tract-binding protein
  misc_feature (1)..(108): Homolog of NCBI NO: 34912728 NR Description: putative polypyrimidine tract-binding protein
  misc_feature (140)..(390): Homolog of NCBI NO: 34912728 NR Description: putative polypyrimidine tract-binding protein
  misc_feature (1)..(358): Homolog of NCBI NO: 15238677 NR Description: polypyrimidine tract-binding protein 1 (PTB)
  misc_feature (1)..(307): Homolog of NCBI NO: 11358627 NR Description: polypyrimidine tract-binding protein homolog
  misc_feature (1)..(320): Homolog of NCBI NO: 15232047 NR Description: polypyrimidine tract-binding protein 1 (PTB)
  misc_feature (1)..(385): Homolog of NCBI NO: 18921326 NR Description: putative polypyrimidine tract-binding protein
MVSYYASSSEPAQVRGKTVYIQYSNRQEITNNKGTGDSSGNVLLVTFEGVQPNDVSIDVIHLVFSAFGFVHKIATFEKAAGFQALIQYTDAPTALEAKNSLDGRSIPRYLLAEHVSICHLRITFSAHKDLNIKFQSHRSRDYTNPYLPVNPTAIEGITQPILGSDGKIKEPESNVLLASIENMQYAVGVDVLHTVFSSFGAVRKIAMFEKNGGMQALIQYPDITTAGVAKQALEGHCIYDGGYCKLHLSYSRHTDLNVKAHDERSRDYTVSDPSAQVQAAGQAPGLSTPGAAWQSTTPAAFYGSSAGPTSIGQAPAWNPNMQRGAFAPASTSYPTQLLMANPGPHFPAVGSSSGAPPMLYQASQQMAHYGTAPAALPHAALSGEPMYFPK

SEQ ID NO: 64340 - protein, 208 aa, Triticum aestivum
  peptide (1)..(208): Ceres Seq. ID no. 13655437
  misc_feature (1)..(64): Pfam Name: RNA recognition motif. (a.k.a. RRM, RBD, or RNP domain) Pfam Description: RNA recognition motif. (a.k.a. RRM, RBD, or RNP
  misc_feature (1)..(87): Homolog of NCBI NO: 17864284 NR Description: hephaestus CG31000-PC [Drosophila melanogaster]
  misc_feature (1)..(87): Homolog of NCBI NO: 17861972 NR Description: LD03185p [Drosophila melanogaster]
  misc_feature (1)..(87): Homolog of NCBI NO: 16589094 NR Description: hephaestus [Drosophila melanogaster]
  misc_feature (1)..(80): Homolog of NCBI NO: 22329999 NR Description: polypyrimidine tract-binding protein 1 (PTB)
  misc_feature (1)..(62): Homolog of NCBI NO: 20260638 NR Description: putative polypyrimidine tract-binding protein
  misc_feature (1)..(208): Homolog of NCBI NO: 34912728 NR Description: putative polypyrimidine tract-binding protein
  misc_feature (1)..(176): Homolog of NCBI NO: 15238677 NR Description: polypyrimidine tract-binding protein 1 (PTB)
  misc_feature (1)..(125): Homolog of NCBI NO: 11358627 NR Description: polypyrimidine tract-binding protein homolog
  misc_feature (1)..(138): Homolog of NCBI NO: 15232047 NR Description: polypyrimidine tract-binding protein 1 (PTB)
  misc_feature (1)..(203): Homolog of NCBI NO: 18921326 NR Description: putative polypyrimidine tract-binding protein
MQYAVGVDVLHTVFSSFGAVRKIAMFEKNGGMQALIQYPDITTAGVAKQALEGHCIYDGGYCKLHLSYSRHTDLNVKAHDERSRDYTVSDPSAQVQAAGQAPGLSTPGAAWQSTTPAAFYGSSAGPTSIGQAPAWNPNMQRGAFAPASTSYPTQLLMANPGPHFPAVGSSSGAPPMLYQASQQMAHYGTAPAALPHAALSGEPMYFPK

SEQ ID NO: 64341 - DNA, 1260 bp, Triticum aestivum
  misc_feature (1)..(1260): Ceres Seq. ID no. 13598749
actccactcaatccccaaaatggggacgctgcttccgtgtcaccctacccttaccctcctccccctcctcttcgccgccgccatcgtcggcgtgcgttgcgcgccggtgtacaggccggagtacctggtggacgggaaccagctggtaaacatgcagtaccacatgggccccgtcgtgtcaggcgcgccgaccaacctgttcctcatctggtacggccggtgggaggccccggcgcaggctgtgctccgcgacttcctcgcctccctctccgctccggcgccgttccccgccgtctccgactggtgggcccgcacgccgcggctctacacggaccaatccggcgccaatgtcaccgccacattcgccatcgccggggagcactccgacgccgggtactcccacggcgcctccctgaagcggatcgacatgcagtccatcatccgcaccgccgtggtcgcgtacccggaccctctgccgctcgacccgtacaacggcgtgtacctggtgctctcctcaccggacgtgcaggtggaggagttctgccgcgccatgtgcggcttccactacttcaccttcgcgtccgtggtcggggtcaccgtcccgtacgcgtgggtcgggaacagcggctcgcagtgcccagggaggtgtgcgtatccgttcgccgcgccggagtacggcgccagcgggcagggggtgctgcggccgccgaacggcgaccccggggtggacgggatggtgatcgtgctggggcacgagcttgcggagctggccaccaacccgctggtgaacgcgtggtacgccggtgacacgccaacggcgcccacggagatcgccgacctctgtctcggggtctacggcgacggcggtggagcaggcgggttcgtcgggaatgtctcccacgcagccgacggcagctcctacaacgtgaacggcgtcaacggtcggcggttcctggtgcagtggctctggaaccccgtcctcggcgcgtgctacggacccaactccagcaactgaagccgctcttctcttccccggatccgtggcttctctcagttgatgccattgcgctggatggcgttgcagaggcaggaatggcaagtccatggatggatgggtacgacatgccatgatatccagatactgaatgtctgaaatgtcattcagactcgatctgttccttatttgttggcccagggtttgcgataggtttatggattttgatagatctgtatctgtgaggacaagatgcaaatttttgc

SEQ ID NO: 64342 - protein, 337 aa, Triticum aestivum
  peptide (1)..(337): Ceres Seq. ID no. 13598750
  misc_feature (51)..(334): Pfam Name: Phosphate-induced protein 1 conserved region Pfam Description: Phosphate-induced protein 1 conserved region
  misc_feature (22)..(330): Homolog of NCBI NO: 15219504 NR Description: phosphate-induced (phi-1) protein -related
  misc_feature (11)..(335): Homolog of NCBI NO: 21592873 NR Description: unknown [Arabidopsis thaliana]
  misc_feature (11)..(335): Homolog of NCBI NO: 15242118 NR Description: expressed protein [Arabidopsis thaliana]
  misc_feature (11)..(335): Homolog of NCBI NO: 16604527 NR Description: AT5g51550/K17N15_10 [Arabidopsis thaliana]
  misc_feature (46)..(335): Homolog of NCBI NO: 11875173 NR Description: contains ESTs
  misc_feature (46)..(337): Homolog of NCBI NO: 18403760 NR Description: expressed protein [Arabidopsis thaliana]
  misc_feature (16)..(337): Homolog of NCBI NO: 25408357 NR Description: hypothetical protein At2g35150 [imported] -
  misc_feature (46)..(335): Homolog of NCBI NO: 21594010 NR Description: unknown [Arabidopsis thaliana]
  misc_feature (46)..(335): Homolog of NCBI NO: 18398352 NR Description: expressed protein [Arabidopsis thaliana]
  misc_feature (17)..(337): Homolog of NCBI NO: 34901824 NR Description: putative phi-1(phosphate-induced protein 1)
LHSIPKMGTLLPCHPTLTLLPLLFAAAIVGVRCAPVYRPEYLVDGNQLVNMQYHMGPVVSGAPTNLFLIWYGRWEAPAQAVLRDFLASLSAPAPFPAVSDWWARTPRLYTDQSGANVTATFAIAGEHSDAGYSHGASLKRIDMQSIIRTAVVAYPDPLPLDPYNGVYLVLSSPDVQVEEFCRAMCGFHYFTFASVVGVTVPYAWVGNSGSQCPGRCAYPFAAPEYGASGQGVLRPPNGDPGVDGMVIVLGHELAELATNPLVNAWYAGDTPTAPTEIADLCLGVYGDGGGAGGFVGNVSHAADGSSYNVNGVNGRRFLVQWLWNPVLGACYGPNSSN

SEQ ID NO: 64343 - protein, 331 aa, Triticum aestivum
  peptide (1)..(331): Ceres Seq. ID no. 13598751
  misc_feature (45)..(328): Pfam Name: Phosphate-induced protein 1 conserved region Pfam Description: Phosphate-induced protein 1 conserved region
  misc_feature (16)..(324): Homolog of NCBI NO: 15219504 NR Description: phosphate-induced (phi-1) protein -related
  misc_feature (5)..(329): Homolog of NCBI NO: 21592873 NR Description: unknown [Arabidopsis thaliana]
  misc_feature (5)..(329): Homolog of NCBI NO: 15242118 NR Description: expressed protein [Arabidopsis thaliana]
  misc_feature (5)..(329): Homolog of NCBI NO: 16604527 NR Description: AT5g51550/K17N15_10 [Arabidopsis thaliana]
  misc_feature (40)..(329): Homolog of NCBI NO: 11875173 NR Description: contains ESTs
  misc_feature (40)..(331): Homolog of NCBI NO: 18403760 NR Description: expressed protein [Arabidopsis thaliana]
  misc_feature (10)..(331): Homolog of NCBI NO: 25408357 NR Description: hypothetical protein At2g35150 [imported] -
  misc_feature (40)..(329): Homolog of NCBI NO: 21594010 NR Description: unknown [Arabidopsis thaliana]
  misc_feature (40)..(329): Homolog of NCBI NO: 18398352 NR Description: expressed protein [Arabidopsis thaliana]
  misc_feature (11)..(331): Homolog of NCBI NO: 34901824 NR Description: putative phi-1(phosphate-induced protein 1)
MGTLLPCHPTLTLLPLLFAAAIVGVRCAPVYRPEYLVDGNQLVNMQYHMGPVVSGAPTNLFLIWYGRWEAPAQAVLRDFLASLSAPAPFPAVSDWWARTPRLYTDQSGANVTATFAIAGEHSDAGYSHGASLKRIDMQSIIRTAVVAYPDPLPLDPYNGVYLVLSSPDVQVEEFCRAMCGFHYFTFASVVGVTVPYAWVGNSGSQCPGRCAYPFAAPEYGASGQGVLRPPNGDPGVDGMVIVLGHELAELATNPLVNAWYAGDTPTAPTEIADLCLGVYGDGGGAGGFVGNVSHAADGSSYNVNGVNGRRFLVQWLWNPVLGACYGPNSSN

SEQ ID NO: 64344 - protein, 287 aa, Triticum aestivum
  peptide (1)..(287): Ceres Seq. ID no. 13598752
  misc_feature (1)..(284): Pfam Name: Phosphate-induced protein 1 conserved region Pfam Description: Phosphate-induced protein 1 conserved region
  misc_feature (1)..(280): Homolog of NCBI NO: 15219504 NR Description: phosphate-induced (phi-1) protein -related
  misc_feature (1)..(285): Homolog of NCBI NO: 21592873 NR Description: unknown [Arabidopsis thaliana]
  misc_feature (1)..(285): Homolog of NCBI NO: 15242118 NR Description: expressed protein [Arabidopsis thaliana]
  misc_feature (1)..(285): Homolog of NCBI NO: 16604527 NR Description: AT5g51550/K17N15_10 [Arabidopsis thaliana]
  misc_feature (1)..(285): Homolog of NCBI NO: 11875173 NR Description: contains ESTs
  misc_feature (1)..(287): Homolog of NCBI NO: 18403760 NR Description: expressed protein [Arabidopsis thaliana]
  misc_feature (1)..(287): Homolog of NCBI NO: 25408357 NR Description: hypothetical protein At2g35150 [imported] -
  misc_feature (1)..(285): Homolog of NCBI NO: 21594010 NR Description: unknown [Arabidopsis thaliana]
  misc_feature (1)..(285): Homolog of NCBI NO: 18398352 NR Description: expressed protein [Arabidopsis thaliana]
  misc_feature (1)..(287): Homolog of NCBI NO: 34901824 NR Description: putative phi-1(phosphate-induced protein 1)
MQYHMGPVVSGAPTNLFLIWYGRWEAPAQAVLRDFLASLSAPAPFPAVSDWWARTPRLYTDQSGANVTATFAIAGEHSDAGYSHGASLKRIDMQSIIRTAVVAYPDPLPLDPYNGVYLVLSSPDVQVEEFCRAMCGFHYFTFASVVGVTVPYAWVGNSGSQCPGRCAYPFAAPEYGASGQGVLRPPNGDPGVDGMVIVLGHELAELATNPLVNAWYAGDTPTAPTEIADLCLGVYGDGGGAGGFVGNVSHAADGSSYNVNGVNGRRFLVQWLWNPVLGACYGPNSSN

SEQ ID NO: 64345 - DNA, 1251 bp, Triticum aestivum
  misc_feature (1)..(1251): Ceres Seq. ID no. 12618555
attcccactttactccagcaatcttgtgctctcttctaattttatctcggttgctcggtattgattcaccgtctcctccttccagggcgcagcgcttgctcgtttcatctctcgtgccatgccacaggtagcacagtacaagatcgcgctgtgccagctgcctgtcaccgcggacaagcacggcaacatcgcccgcgcgcgcgcccgcatcgacgccgccgcggccgccggcgccaagctcgtcgtcctgccggaaatatggaactgcccctacgcgatggagaccatgccgagctacgccgaggacatcgacggcggccggtcgccgtcggtctcgatgctgtcggaggtggccgctgccaggaagatcaccatcgtcggcggatccgtgcccgagatggcgtcggggcagctgttcaacacctgctgcgtggtcggtcccgacggagagatcaaggccaagcacaggaagctgcatctgtttggaattgacatccccggagacatcactttcagggaatccgataccttcactgctgggcaagaacccaccgtggttgacacagatgttggacggattggtattgggatttgtcatgatatccggttcccagaactggcaatgctgtatcgatcaagaggtgcacacttgatatgctacccttctgcatttaacatgagcaccgggcagctcctctgggaccttatgcagaagtccagggctgttgacaatcagctgttcgtggcgacctgctcacctgcgcgagaccccaactcgccgtcggaattcgtggtctggggcaactcaagcctcatcgcaccatttggcgaggttcttgcggcggcagggcacgaggacgcgaccgtcatcggcgagatcgacctgtctttggttgaagctgtaagggcgaacctccctttggaaacgcagggtagaggggatctgtacaggctgatcgatgtccagagggaacgttcgagctagctgcgttgctcgaggagatggaaatgcagcgcacagagctgaagaaggccacgtctgcatgtgttggtcacatgctaggttcagtaagacactaagactgtaaggggtttgcaaaattgtgtagcggcatgcaaagattcgggatgccataatactgtatccttgtactgcatttgttttcttattacagtgaactaaaagtagatgtggatttgagtagtccggattctgctaaaacccggttactagtaggttttccctttttg

SEQ ID NO: 64346 - protein, 288 aa, Triticum aestivum
  peptide (1)..(288): Ceres Seq. ID no. 12618556
  misc_feature (8)..(277): Homolog of NCBI NO: 40743456 NR Description: hypothetical protein AN5486.2 [Aspergillus
  misc_feature (7)..(277): Homolog of NCBI NO: 19115066 NR Description: putative amidohydrolase [Schizosaccharomyces
  misc_feature (4)..(277): Homolog of NCBI NO: 12963555 NR Description: Nit protein 2 [Mus musculus]
  misc_feature (4)..(277): Homolog of NCBI NO: 34868007 NR Description: similar to Nit protein 2 [Rattus norvegicus]
  misc_feature (4)..(277): Homolog of NCBI NO: 18088311 NR Description: Nit protein 2 [Homo sapiens]
  misc_feature (4)..(277): Homolog of NCBI NO: 9910460 NR Description: Nit protein 2 [Homo sapiens]
  misc_feature (236)..(263): Homolog of NCBI NO: 18390107 NR Description: putative protein NP_196765.1 [Sorghum bicolor]
  misc_feature (31)..(206): Homolog of NCBI NO: 18390107 NR Description: putative protein NP_196765.1 [Sorghum bicolor]
  misc_feature (2)..(284): Homolog of NCBI NO: 11357420 NR Description: hypothetical protein F14F18.210 - Arabidopsis
  misc_feature (2)..(284): Homolog of NCBI NO: 22326744 NR Description: putative protein
MPQVAQYKIALCQLPVTADKHGNIARARARIDAAAAAGAKLVVLPEIWNCPYAMETMPSYAEDIDGGRSPSVSMLSEVAAARKITIVGGSVPEMASGQLFNTCCVVGPDGEIKAKHRKLHLFGIDIPGDITFRESDTFTAGQEPTVVDTDVGRIGIGICHDIRFPELAMLYRSRGAHLICYPSAFNMSTGQLLWDLMQKSRAVDNQLFVATCSPARDPNSPSEFVVWGNSSLIAPFGEVLAAAGHEDATVIGEIDLSLVEAVRANLPLETQGRGDLYRLIDVQRERSS

SEQ ID NO: 64347 - protein, 235 aa, Triticum aestivum
  peptide (1)..(235): Ceres Seq. ID no. 12618557
  misc_feature (1)..(224): Homolog of NCBI NO: 40743456 NR Description: hypothetical protein AN5486.2 [Aspergillus
  misc_feature (1)..(224): Homolog of NCBI NO: 19115066 NR Description: putative amidohydrolase [Schizosaccharomyces
  misc_feature (1)..(224): Homolog of NCBI NO: 12963555 NR Description: Nit protein 2 [Mus musculus]
  misc_feature (1)..(224): Homolog of NCBI NO: 34868007 NR Description: similar to Nit protein 2 [Rattus norvegicus]
  misc_feature (1)..(224): Homolog of NCBI NO: 18088311 NR Description: Nit protein 2 [Homo sapiens]
  misc_feature (1)..(224): Homolog of NCBI NO: 9910460 NR Description: Nit protein 2 [Homo sapiens]
  misc_feature (183)..(210): Homolog of NCBI NO: 18390107 NR Description: putative protein NP_196765.1 [Sorghum bicolor]
  misc_feature (1)..(153): Homolog of NCBI NO: 18390107 NR Description: putative protein NP_196765.1 [Sorghum bicolor]
  misc_feature (1)..(231): Homolog of NCBI NO: 11357420 NR Description: hypothetical protein F14F18.210 - Arabidopsis
  misc_feature (1)..(231): Homolog of NCBI NO: 22326744 NR Description: putative protein
METMPSYAEDIDGGRSPSVSMLSEVAAARKITIVGGSVPEMASGQLFNTCCVVGPDGEIKAKHRKLHLFGIDIPGDITFRESDTFTAGQEPTVVDTDVGRIGIGICHDIRFPELAMLYRSRGAHLICYPSAFNMSTGQLLWDLMQKSRAVDNQLFVATCSPARDPNSPSEFVVWGNSSLIAPFGEVLAAAGHEDATVIGEIDLSLVEAVRANLPLETQGRGDLYRLIDVQRERSS

SEQ ID NO: 64348 - protein, 232 aa, Triticum aestivum
  peptide (1)..(232): Ceres Seq. ID no. 12618558
  misc_feature (1)..(221): Homolog of NCBI NO: 40743456 NR Description: hypothetical protein AN5486.2 [Aspergillus
  misc_feature (1)..(221): Homolog of NCBI NO: 19115066 NR Description: putative amidohydrolase [Schizosaccharomyces
  misc_feature (1)..(221): Homolog of NCBI NO: 12963555 NR Description: Nit protein 2 [Mus musculus]
  misc_feature (1)..(221): Homolog of NCBI NO: 34868007 NR Description: similar to Nit protein 2 [Rattus norvegicus]
  misc_feature (1)..(221): Homolog of NCBI NO: 18088311 NR Description: Nit protein 2 [Homo sapiens]
  misc_feature (1)..(221): Homolog of NCBI NO: 9910460 NR Description: Nit protein 2 [Homo sapiens]
  misc_feature (180)..(207): Homolog of NCBI NO: 18390107 NR Description: putative protein NP_196765.1 [Sorghum bicolor]
  misc_feature (1)..(150): Homolog of NCBI NO: 18390107 NR Description: putative protein NP_196765.1 [Sorghum bicolor]
  misc_feature (1)..(228): Homolog of NCBI NO: 11357420 NR Description: hypothetical protein F14F18.210 - Arabidopsis
  misc_feature (1)..(228): Homolog of NCBI NO: 22326744 NR Description: putative protein
MPSYAEDIDGGRSPSVSMLSEVAAARKITIVGGSVPEMASGQLFNTCCVVGPDGEIKAKHRKLHLFGIDIPGDITFRESDTFTAGQEPTVVDTDVGRIGIGICHDIRFPELAMLYRSRGAHLICYPSAFNMSTGQLLWDLMQKSRAVDNQLFVATCSPARDPNSPSEFVVWGNSSLIAPFGEVLAAAGHEDATVIGEIDLSLVEAVRANLPLETQGRGDLYRLIDVQRERSS

SEQ ID NO: 64349 - DNA, 1489 bp, Triticum aestivum
  misc_feature (1)..(1489): Ceres Seq. ID no. 12618461
atcagggggtttttggttgccagggttcggagttcggtacacagatcggaagggtctagaagcttctggtggtgacgatggcggtcctcgcgaggtcggccgccgccgtggctgcgctcgcgctcgcgctgctcgtgtcggccgtcgccggcgaggtcttcttccaggagaagttcgacgatggatgggaggatcggtgggtcaagtcggagtggaagaaggaggacaacacggccggcgagtggaaccacacctccggcaaatggaacggagacgctgacgacaaaggcatccagacgtcggaggactacaggttctacgccatctcggcgcagtacccggagttgaggaacaaggacaagaccctggtgctgcagttctccgtcaagcacgagcaggacctcgactgcggcggcggctacatcaagctcctccccgccgacgtcgaccagaagaagttcggcggtgagaccccatacagcatcatgttcgggccggacatctgcgggtacgccaccaagaaggtgcacgcgatcctcaccaagaacggcaagaaccatctgatcaagaaggaggtgccctgcgagacggaccaactcacgcacgtctacaccttgatcttccggcccgacgccacgtacagcatcctcatcgacaacgtcgagaagcagtccggcagcgtctacgatgactgggacatccttcctgccaagaagaagagggatcctaatgccaagaagccagaggactgggaggacgaggagttccttcctgaccccgaggacaagaagccagaggggtatgatgacattcccaaggaaatcactgaacctgatgcaacgaagcctgaggactgggatgatgaggaagatggtgaatggacagctccaaccatcccaaacccggagtacaagggaccatggatccaaaagaaaatcaagaaccctaatttcaagggaaaatggaaggcacctttgatcgacaacccagagtacaaggacgatccttacatctacgcttttgacagcctgaagcacattggcattgagctgtggcaggttaaatcaggaactctgttcgacaacatcctgatcactgatgaccctgagtacgccaagaagttcgcggaggagacctggggcaagcacaaggatgctgagaaggccgcctttgatgaggccgagaagaagaggcttgaggaggaatccgcaaacactaagaccgaagacaatgacgatgcagctgatcaggaggatgagggcaaagctgccggcgccagcgatgaggagaacaaggatgcctccggcgatgaggaaattagcaaggatgcttcttcttcttccgacaagaaggacgagctttagagtgtggcaggcaggctctgtatctaaactttttcctcttgaggcagtagagcttcccatccagcaattagaagaacattttctctgaaagatgacagaagaagtaatgcaatctcggctcttgt

SEQ ID NO: 64350 - protein, 428 aa, Triticum aestivum
  peptide (1)..(428): Ceres Seq. ID no. 12618462
  misc_feature (27)..(339): Pfam Name: Calreticulin family Pfam Description: Calreticulin family
  misc_feature (13)..(428): Homolog of NCBI NO: 11131745 NR Description: Calreticulin precursor
  misc_feature (13)..(428): Homolog of NCBI NO: 15223517 NR Description: calreticulin (crt1)
  misc_feature (17)..(414): Homolog of NCBI NO: 11131769 NR Description: Calreticulin precursor
  misc_feature (1)..(428): Homolog of NCBI NO: 11131904 NR Description: Calreticulin precursor
  misc_feature (1)..(413): Homolog of NCBI NO: 11131949 NR Description: Calreticulin precursor
  misc_feature (1)..(428): Homolog of NCBI NO: 11131838 NR Description: Calreticulin precursor
  misc_feature (20)..(428): Homolog of NCBI NO: 7441499 NR Description: calreticulin - barley (fragment)
  misc_feature (1)..(428): Homolog of NCBI NO: 11131840 NR Description: Calreticulin precursor
  misc_feature (11)..(428): Homolog of NCBI NO: 7441498 NR Description: calreticulin - barley (fragment)
  misc_feature (1)..(428): Homolog of NCBI NO: 2119370 NR Description: calreticulin precursor - maize
MAVLARSAAAVAALALALLVSAVAGEVFFQEKFDDGWEDRWVKSEWKKEDNTAGEWNHTSGKWNGDADDKGIQTSEDYRFYAISAQYPELRNKDKTLVLQFSVKHEQDLDCGGGYIKLLPADVDQKKFGGETPYSIMFGPDICGYATKKVHAILTKNGKNHLIKKEVPCETDQLTHVYTLIFRPDATYSILIDNVEKQSGSVYDDWDILPAKKKRDPNAKKPEDWEDEEFLPDPEDKKPEGYDDIPKEITEPDATKPEDWDDEEDGEWTAPTIPNPEYKGPWIQKKIKNPNFKGKWKAPLIDNPEYKDDPYIYAFDSLKHIGIELWQVKSGTLFDNILITDDPEYAKKFAEETWGKHKDAEKAAFDEAEKKRLEEESANTKTEDNDDAADQEDEGKAAGASDEENKDASGDEEISKDASSSSDKKDEL

SEQ ID NO: 64351 - protein, 292 aa, Triticum aestivum
  peptide (1)..(292): Ceres Seq. ID no. 12618463
  misc_feature (1)..(203): Pfam Name: Calreticulin family Pfam Description: Calreticulin family
  misc_feature (1)..(292): Homolog of NCBI NO: 11131745 NR Description: Calreticulin precursor
  misc_feature (1)..(292): Homolog of NCBI NO: 15223517 NR Description: calreticulin (crt1)
  misc_feature (1)..(278): Homolog of NCBI NO: 11131769 NR Description: Calreticulin precursor
  misc_feature (1)..(292): Homolog of NCBI NO: 11131904 NR Description: Calreticulin precursor
  misc_feature (1)..(277): Homolog of NCBI NO: 11131949 NR Description: Calreticulin precursor
  misc_feature (1)..(292): Homolog of NCBI NO: 11131838 NR Description: Calreticulin precursor
  misc_feature (1)..(292): Homolog of NCBI NO: 7441499 NR Description: calreticulin - barley (fragment)
  misc_feature (1)..(292): Homolog of NCBI NO: 11131840 NR Description: Calreticulin precursor
  misc_feature (1)..(292): Homolog of NCBI NO: 7441498 NR Description: calreticulin - barley (fragment)
  misc_feature (1)..(292): Homolog of NCBI NO: 2119370 NR Description: calreticulin precursor - maize
MFGPDICGYATKKVHAILTKNGKNHLIKKEVPCETDQLTHVYTLIFRPDATYSILIDNVEKQSGSVYDDWDILPAKKKRDPNAKKPEDWEDEEFLPDPEDKKPEGYDDIPKEITEPDATKPEDWDDEEDGEWTAPTIPNPEYKGPWIQKKIKNPNFKGKWKAPLIDNPEYKDDPYIYAFDSLKHIGIELWQVKSGTLFDNILITDDPEYAKKFAEETWGKHKDAEKAAFDEAEKKRLEEESANTKTEDNDDAADQEDEGKAAGASDEENKDASGDEEISKDASSSSDKKDEL

SEQ ID NO: 64352 - DNA, 846 bp, Triticum aestivum
  misc_feature (1)..(846): Ceres Seq. ID no. 13585022
ctcaactcaaaccaccggcattagtcactcctcttcactccaaaccagcgagtaacactccaaacagccaatggcgttccccaagcccctggcggctctcctcctcgccgtggcgctggcagcgactgccatgtccgccgccggtcaggatccccaaaactgcaagccgagccgcaaggtgacggtgcagaacctgtgcggcaaggacctttacctcggcatcgagccgctggccaacagcaagctcctctacagccctggctacctgctccgccacggcacccacgtgtcgtacgacgtgtgctcgtggacggggcgcgtgaaggtgcaggacgccgtggtgacggagtttcacatcgggtacgacggcggggcgtggtaccaggtgagcaccgaccagtcccacatgcccatccgtgtctccatcaccccccacggccaccccctgaaagaccactgccccaccgccggctgcaacagcggtggccactgcttcgagcactccgtccccggcggcaagtgccacggcgtcgacgagatcaagatcgtcttctacaacccctagatccagctgctgggcgtgtttaataagtttgcagctcggtgatcttagtcgtattgcagctgctagtcagtgaatcatctgctccaacgagctattgtcgtgtcgtgtcgtgtcgatttactgttcaattagtagttgcggtggtgaatgtgtggctagagatgtttcatagccgtgcaatgaactgcatgtcgtcagctctgtatccgtcgttggtgtgttgtgtgttttctagtttataaatccgatttaaaatgtggctgggtcaccgaactgatgtc

SEQ ID NO: 64353 - protein, 164 aa, Triticum aestivum
  peptide (1)..(164): Ceres Seq. ID no. 13585023
  misc_feature (1)..(164): Homolog of NCBI NO: 13194668 NR Description: unknown [Pennisetum ciliare]
MAFPKPLAALLLAVALAATAMSAAGQDPQNCKPSRKVTVQNLCGKDLYLGIEPLANSKLLYSPGYLLRHGTHVSYDVCSWTGRVKVQDAVVTEFHIGYDGGAWYQVSTDQSHMPIRVSITPHGHPLKDHCPTAGCNSGGHCFEHSVPGGKCHGVDEIKIVFYNP

SEQ ID NO: 64354 - protein, 144 aa, Triticum aestivum
  peptide (1)..(144): Ceres Seq. ID no. 13585024
  misc_feature (1)..(144): Homolog of NCBI NO: 13194668 NR Description: unknown [Pennisetum ciliare]
MSAAGQDPQNCKPSRKVTVQNLCGKDLYLGIEPLANSKLLYSPGYLLRHGTHVSYDVCSWTGRVKVQDAVVTEFHIGYDGGAWYQVSTDQSHMPIRVSITPHGHPLKDHCPTAGCNSGGHCFEHSVPGGKCHGVDEIKIVFYNP

SEQ ID NO: 64355 - DNA, 1363 bp, Triticum aestivum
  misc_feature (1)..(1363): Ceres Seq. ID no. 12616314
aaaaacaagcacaaccggaaattctccacccagcaactcacacggtcacactccctcgcgctcacatcaaaacagcgagagaacgcgccgccgccgtggaccacgcaccgctcgacagccgataatgctcctcctcttcgcgctcctcgccggcgccggcgccgccgccttcctcctcttcaagttcgccaccgccgacggagatttcaccctcttgtcgtgcggccgggcgcggcgggacaaagtggacggcaaggttgtatggatcacgggagcgagccgtgggattggggaggttctttcgatgcagtttgcgagtttaggagcaaagctcatactatctgcacgtaacaaggaggagcttgagagagtgaaacgtaacatcatcagcaagcatccagatagcaaagttgaagtgttacctatggatttatcatctgatgaagaatctctgaaagaagttgtacattcagcggaatcactcttttccagtgcaggcattgactatatgatgcacaatgcggcctttgagcgtccaaaaaggggggccctggaagaaactgaggaaggtcttaaggctacttttcatgtcaatgtctttggaacaattactttgactcgccttcttgcacctttcatgttggatagagggatgggtcattttgttgtgatgagtagtgcagctggaaaggtgcccacacctggtcaggctctttactctgcttccaaacatgctctcaatggctactttgcttctctgcgctctgagttatgtacgaaaggcattaaggtcactgttgtctgtcctggacctattgaaacaccagtaccttctggtgcaacttcttcatcacaaaggcattcatccgagaaacgtgtttcagtggaaagatgtgctgaactgacaatagttgccgcaactcatggactaaaagaagcatggatatcatatcagcctgtgctggctgttatgtacgtggtgcaatacatgccaacaattggatggtggcttatggacaaggttggtgcgaagcgagtggatgctgctgcaaagaagggcaacgcctacagttggaatctcctcttcggtggcaaaaagtcggcttgacaatgaagttgctcattacgcctacagttggaatctcattgagattctgaaatagtcatacacatctatctatatagattatgaaccttgtcaccctttttcatctttatgtgcgaaatgaccaacgggaagcaagcactccttgtaatgtcacctagtcagcgagttgaagtattttataactcagatacaagtcagcattccagcttcgcatttccacaaaagaataaatcatgcaagatggatgactatttt

SEQ ID NO: 64356 - protein, 368 aa, Triticum aestivum
  peptide (1)..(368): Ceres Seq. ID no. 12616315
  misc_feature (79)..(352): Homolog of NCBI NO: 21358495 NR Description: CG7601-PA [Drosophila melanogaster]
  misc_feature (42)..(342): Homolog of NCBI NO: 34865689 NR Description: similar to CGI-86 protein [Rattus norvegicus]
  misc_feature (86)..(346): Homolog of NCBI NO: 21313492 NR Description: RIKEN cDNA 2310016E22 [Mus musculus]
  misc_feature (41)..(346): Homolog of NCBI NO: 34395851 NR Description: Retinal short-chain dehydrogenase/reductase 4
  misc_feature (86)..(347): Homolog of NCBI NO: 6318548 NR Description: retinal short-chain dehydrogenase/reductase
  misc_feature (43)..(346): Homolog of NCBI NO: 34865424 NR Description: similar to retinal short-chain
  misc_feature (43)..(347): Homolog of NCBI NO: 7706318 NR Description: CGI-86 protein [Homo sapiens]
  misc_feature (288)..(365): Homolog of NCBI NO: 6017123 NR Description: unknown protein [Arabidopsis thaliana]
  misc_feature (41)..(307): Homolog of NCBI NO: 6017123 NR Description: unknown protein [Arabidopsis thaliana]
  misc_feature (41)..(365): Homolog of NCBI NO: 30678824 NR Description: short-chain dehydrogenase/reductase family
KTSTTGNSPPSNSHGHTPSRSHQNSERTRRRRGPRTARQPIMLLLFALLAGAGAAAFLLFKFATADGDFTLLSCGRARRDKVDGKVVWITGASRGIGEVLSMQFASLGAKLILSARNKEELERVKRNIISKHPDSKVEVLPMDLSSDEESLKEVVHSAESLFSSAGIDYMMHNAAFERPKRGALEETEEGLKATFHVNVFGTITLTRLLAPFMLDRGMGHFVVMSSAAGKVPTPGQALYSASKHALNGYFASLRSELCTKGIKVTVVCPGPIETPVPSGATSSSQRHSSEKRVSVERCAELTIVAATHGLKEAWISYQPVLAVMYVVQYMPTIGWWLMDKVGAKRVDAAAKKGNAYSWNLLFGGKKSA

SEQ ID NO: 64357 - protein, 327 aa, Triticum aestivum
  peptide (1)..(327): Ceres Seq. ID no. 12616316
  misc_feature (38)..(311): Homolog of NCBI NO: 21358495 NR Description: CG7601-PA [Drosophila melanogaster]
  misc_feature (1)..(301): Homolog of NCBI NO: 34865689 NR Description: similar to CGI-86 protein [Rattus norvegicus]
  misc_feature (45)..(305): Homolog of NCBI NO: 21313492 NR Description: RIKEN cDNA 2310016E22 [Mus musculus]
  misc_feature (1)..(305): Homolog of NCBI NO: 34395851 NR Description: Retinal short-chain dehydrogenase/reductase 4
  misc_feature (45)..(306): Homolog of NCBI NO: 6318548 NR Description: retinal short-chain dehydrogenase/reductase
  misc_feature (2)..(305): Homolog of NCBI NO: 34865424 NR Description: similar to retinal short-chain
  misc_feature (2)..(306): Homolog of NCBI NO: 7706318 NR Description: CGI-86 protein [Homo sapiens]
  misc_feature (247)..(324): Homolog of NCBI NO: 6017123 NR Description: unknown protein [Arabidopsis thaliana]
  misc_feature (1)..(266): Homolog of NCBI NO: 6017123 NR Description: unknown protein [Arabidopsis thaliana]
  misc_feature (1)..(324): Homolog of NCBI NO: 30678824 NR Description: short-chain dehydrogenase/reductase family
MLLLFALLAGAGAAAFLLFKFATADGDFTLLSCGRARRDKVDGKVVWITGASRGIGEVLSMQFASLGAKLILSARNKEELERVKRNIISKHPDSKVEVLPMDLSSDEESLKEVVHSAESLFSSAGIDYMMHNAAFERPKRGALEETEEGLKATFHVNVFGTITLTRLLAPFMLDRGMGHFVVMSSAAGKVPTPGQALYSASKHALNGYFASLRSELCTKGIKVTVVCPGPIETPVPSGATSSSQRHSSEKRVSVERCAELTIVAATHGLKEAWISYQPVLAVMYVVQYMPTIGWWLMDKVGAKRVDAAAKKGNAYSWNLLFGGKKSA

SEQ ID NO: 64358 - protein, 267 aa, Triticum aestivum
  peptide (1)..(267): Ceres Seq. ID no. 12616317
  misc_feature (1)..(251): Homolog of NCBI NO: 21358495 NR Description: CG7601-PA [Drosophila melanogaster]
  misc_feature (1)..(241): Homolog of NCBI NO: 34865689 NR Description: similar to CGI-86 protein [Rattus norvegicus]
  misc_feature (1)..(245): Homolog of NCBI NO: 21313492 NR Description: RIKEN cDNA 2310016E22 [Mus musculus]
  misc_feature (1)..(245): Homolog of NCBI NO: 34395851 NR Description: Retinal short-chain dehydrogenase/reductase 4
  misc_feature (1)..(246): Homolog of NCBI NO: 6318548 NR Description: retinal short-chain dehydrogenase/reductase
  misc_feature (1)..(245): Homolog of NCBI NO: 34865424 NR Description: similar to retinal short-chain
  misc_feature (1)..(246): Homolog of NCBI NO: 7706318 NR Description: CGI-86 protein [Homo sapiens]
  misc_feature (187)..(264): Homolog of NCBI NO: 6017123 NR Description: unknown protein [Arabidopsis thaliana]
  misc_feature (1)..(206): Homolog of NCBI NO: 6017123 NR Description: unknown protein [Arabidopsis thaliana]
  misc_feature (1)..(264): Homolog of NCBI NO: 30678824 NR Description: short-chain dehydrogenase/reductase family
MQFASLGAKLILSARNKEELERVKRNIISKHPDSKVEVLPMDLSSDEESLKEVVHSAESLFSSAGIDYMMHNAAFERPKRGALEETEEGLKATFHVNVFGTITLTRLLAPFMLDRGMGHFVVMSSAAGKVPTPGQALYSASKHALNGYFASLRSELCTKGIKVTVVCPGPIETPVPSGATSSSQRHSSEKRVSVERCAELTIVAATHGLKEAWISYQPVLAVMYVVQYMPTIGWWLMDKVGAKRVDAAAKKGNAYSWNLLFGGKKSA

SEQ ID NO: 64359 - DNA, 1526 bp, Triticum aestivum
  misc_feature (1)..(1526): Ceres Seq. ID no. 13655442
acatcctaatcgaaaaaccacacacgagcacccgccggagccgatcgaccgagagccgccgcgcgcgcagctcagctcagccccgccgcctcccctcctcctccaccgcgccgcattcctctcccgcgcgcaggcagggggagatccgcctccctggcccgatggcgccgtcgcggccgctgatgcgcggggcgggcccgccgcgggtcttcggctccgggcgcgccggccgggcatcgccgtacgcgctcgcgctcgccgcgctgctcctcgcctccgccttcctcctcgccctcatcgccttcggcgtcttctcgctccccgtctcctcccccgcgctccccaccaccggcgccgagaccgagtcgtccggcgacggcggggccgcggagtccgatgcctccggcggctcctcccgcgccgcgcgcagccgcgcccgccgcgacctcagcgaggggctgggcgagcgcggcgcgcagtggacggaggtcatctcgtgggagcccagggcgttcgtctaccacaacttcctgtctaaggaagagtgtgagtacttaattggattggcgaagcctcgcatggtgaaatcaacagtggtcgacagtgagactggtaaaagcaaggacagcagggttcgtacaagttcaggcatgtttcttcaaagagggcgggacaaggttatccgggccattgaaaggaggatagcagattacaccttcatacctgcagaacatggagagggactccaagtactgcactatgaagtcgggcagaagtacgaaccccactttgattattttcttgacgagttcaacaccaagaatggtggccagaggatggcaactattctcatgtacctgtcagatgttgaagaagggggtgagactattttccccgatgcaaatgtgaacagcagttccttaccgtggtacaacgaactttcagagtgtgccagaaaaggtcttgctgtcaaaccgaagatgggagatgcgctgcttttctggagcatgaaaccagatgccactctagatccactaagtttgcacgggggctgtcctgtcatcaaagggaacaaatggtcatcaaccaagtggctgcatgttcacgagtacaaagcataggccttgtgaactcattccaaagatgacacgatctgagcatgtgacctgggctctttacatgatggctttacagttacagatccacccccattgtgttcattgcttgtggaggacatatatatacaaggagggcttcatgctggaatactgactcggcatttttcttcttcttctccctcgccgcagtgcccccagcaacttattatagaggaatgaatatgatatgatgtgatgtatgtagcgtcgggggctgtaggatccggagttccattttcggttcgtgttcttgtcctgtttgtagcactagtactataatgcagtactgatgtagcagcctcgaggtgagtcgttactgaacaataactattgaggattttgcttgtctcggcattttacacagttatt

SEQ ID NO: 64360 - protein, 372 aa, Triticum aestivum
  peptide (1)..(372): Ceres Seq. ID no. 13655443
  misc_feature (244)..(367): Pfam Name: 2OG-Fe(II) oxygenase superfamily Pfam Description: 2OG-Fe(II) oxygenase superfamily
  misc_feature (164)..(370): Homolog of NCBI NO: 29150365 NR Description: putative oxidoreductase [Oryza sativa (japonica
  misc_feature (148)..(213): Homolog of NCBI NO: 15233341 NR Description: oxidoreductase, 2OG-Fe(II) oxygenase family
  misc_feature (210)..(349): Homolog of NCBI NO: 15233341 NR Description: oxidoreductase, 2OG-Fe(II) oxygenase family
  misc_feature (151)..(349): Homolog of NCBI NO: 7488226 NR Description: procollagen-proline dioxygenase alpha chain
  misc_feature (134)..(349): Homolog of NCBI NO: 15239240 NR Description: oxidoreductase, 2OG-Fe(II) oxygenase family
  misc_feature (151)..(371): Homolog of NCBI NO: 21593091 NR Description: putative prolyl 4-hydroxylase, alpha subunit
  misc_feature (151)..(371): Homolog of NCBI NO: 15227885 NR Description: oxidoreductase, 2OG-Fe(II) oxygenase family
  misc_feature (58)..(354): Homolog of NCBI NO: 37535718 NR Description: putative prolyl 4-hydroxylase, alpha subunit
  misc_feature (144)..(371): Homolog of NCBI NO: 21537370 NR Description: putative prolyl 4-hydroxylase, alpha subunit
  misc_feature (144)..(371): Homolog of NCBI NO: 18394842 NR Description: oxidoreductase, 2OG-Fe(II) oxygenase family
ILIEKPHTSTRRSRSTESRRARSSAQPRRLPSSSTAPHSSPARRQGEIRLPGPMAPSRPLMRGAGPPRVFGSGRAGRASPYALALAALLLASAFLLALIAFGVFSLPVSSPALPTTGAETESSGDGGAAESDASGGSSRAARSRARRDLSEGLGERGAQWTEVISWEPRAFVYHNFLSKEECEYLIGLAKPRMVKSTVVDSETGKSKDSRVRTSSGMFLQRGRDKVIRAIERRIADYTFIPAEHGEGLQVLHYEVGQKYEPHFDYFLDEFNTKNGGQRMATILMYLSDVEEGGETIFPDANVNSSSLPWYNELSECARKGLAVKPKMGDALLFWSMKPDATLDPLSLHGGCPVIKGNKWSSTKWLHVHEYKA

SEQ ID NO: 64361 - protein, 319 aa, Triticum aestivum
  peptide (1)..(319): Ceres Seq. ID no. 13655444
  misc_feature (191)..(314): Pfam Name: 2OG-Fe(II) oxygenase superfamily Pfam Description: 2OG-Fe(II) oxygenase superfamily
  misc_feature (111)..(317): Homolog of NCBI NO: 29150365 NR Description: putative oxidoreductase [Oryza sativa (japonica
  misc_feature (95)..(160): Homolog of NCBI NO: 15233341 NR Description: oxidoreductase, 2OG-Fe(II) oxygenase family
  misc_feature (157)..(296): Homolog of NCBI NO: 15233341 NR Description: oxidoreductase, 2OG-Fe(II) oxygenase family
  misc_feature (98)..(296): Homolog of NCBI NO: 7488226 NR Description: procollagen-proline dioxygenase alpha chain
  misc_feature (81)..(296): Homolog of NCBI NO: 15239240 NR Description: oxidoreductase, 2OG-Fe(II) oxygenase family
  misc_feature (98)..(318): Homolog of NCBI NO: 21593091 NR Description: putative prolyl 4-hydroxylase, alpha subunit
  misc_feature (98)..(318): Homolog of NCBI NO: 15227885 NR Description: oxidoreductase, 2OG-Fe(II) oxygenase family
  misc_feature (5)..(301): Homolog of NCBI NO: 37535718 NR Description: putative prolyl 4-hydroxylase, alpha subunit
  misc_feature (91)..(318): Homolog of NCBI NO: 21537370 NR Description: putative prolyl 4-hydroxylase, alpha subunit
  misc_feature (91)..(318): Homolog of NCBI NO: 18394842 NR Description: oxidoreductase, 2OG-Fe(II) oxygenase family
MAPSRPLMRGAGPPRVFGSGRAGRASPYALALAALLLASAFLLALIAFGVFSLPVSSPALPTTGAETESSGDGGAAESDASGGSSRAARSRARRDLSEGLGERGAQWTEVISWEPRAFVYHNFLSKEECEYLIGLAKPRMVKSTVVDSETGKSKDSRVRTSSGMFLQRGRDKVIRAIERRIADYTFIPAEHGEGLQVLHYEVGQKYEPHFDYFLDEFNTKNGGQRMATILMYLSDVEEGGETIFPDANVNSSSLPWYNELSECARKGLAVKPKMGDALLFWSMKPDATLDPLSLHGGCPVIKGNKWSSTKWLHVHEYKA

SEQ ID NO: 64362 - protein, 312 aa, Triticum aestivum
  peptide (1)..(312): Ceres Seq. ID no. 13655445
  misc_feature (184)..(307): Pfam Name: 2OG-Fe(II) oxygenase superfamily Pfam Description: 2OG-Fe(II) oxygenase superfamily
  misc_feature (104)..(310): Homolog of NCBI NO: 29150365 NR Description: putative oxidoreductase [Oryza sativa (japonica
  misc_feature (88)..(153): Homolog of NCBI NO: 15233341 NR Description: oxidoreductase, 2OG-Fe(II) oxygenase family
  misc_feature (150)..(289): Homolog of NCBI NO: 15233341 NR Description: oxidoreductase, 2OG-Fe(II) oxygenase family
  misc_feature (91)..(289): Homolog of NCBI NO: 7488226 NR Description: procollagen-proline dioxygenase alpha chain
  misc_feature (74)..(289): Homolog of NCBI NO: 15239240 NR Description: oxidoreductase, 2OG-Fe(II) oxygenase family
  misc_feature (91)..(311): Homolog of NCBI NO: 21593091 NR Description: putative prolyl 4-hydroxylase, alpha subunit
  misc_feature (91)..(311): Homolog of NCBI NO: 15227885 NR Description: oxidoreductase, 2OG-Fe(II) oxygenase family
  misc_feature (1)..(294): Homolog of NCBI NO: 37535718 NR Description: putative prolyl 4-hydroxylase, alpha subunit
  misc_feature (84)..(311): Homolog of NCBI NO: 21537370 NR Description: putative prolyl 4-hydroxylase, alpha subunit
  misc_feature (84)..(311): Homolog of NCBI NO: 18394842 NR Description: oxidoreductase, 2OG-Fe(II) oxygenase family
MRGAGPPRVFGSGRAGRASPYALALAALLLASAFLLALIAFGVFSLPVSSPALPTTGAETESSGDGGAAESDASGGSSRAARSRARRDLSEGLGERGAQWTEVISWEPRAFVYHNFLSKEECEYLIGLAKPRMVKSTVVDSETGKSKDSRVRTSSGMFLQRGRDKVIRAIERRIADYTFIPAEHGEGLQVLHYEVGQKYEPHFDYFLDEFNTKNGGQRMATILMYLSDVEEGGETIFPDANVNSSSLPWYNELSECARKGLAVKPKMGDALLFWSMKPDATLDPLSLHGGCPVIKGNKWSSTKWLHVHEYKA

SEQ ID NO: 64363 - DNA, 1642 bp, Triticum aestivum
  misc_feature (1)..(1642): Ceres Seq. ID no. 15170155
agctccgcccacagggaggcaaccaagaatttaaagcggcaacaagatcgtcggcgccgccggatcctgctccgccttgttatctccgccccgtaaccacacgcccgaagctgcagccgagccgagatgcatctgagcgagaacgaggggatcgagggcgtgcggttcgtggtgacaggcgggcagggcttcgtcggcgccgccctctgcctggagctgatccgccgcggcgccctggaggtccgctccctcgacctgcgcgcctcctcctcctggtcccagcagctcctcgacgccggcgtccgcttcttccaaggggatgttcggaagaaggaggatgtggggaaggttttccgcaatgtggactgtgtcttccaccttgcttcatatggaatgtcagggaaagaaatggtacaggcaggacgaacagatgaggtcaatataaatgggacgtgcaatgtactggatgcttgccatgagcatggtgttagaaggcttgtgtatgttagcacatataatgtggtgtttgggggaaagccaattgtcaatggcagtgagacgttgccttattttcccattgaagaccatgttgatgcttatgggcgtagcaaatcgatcgctgaacagttggtgctgaagagcaatggtcggcaagctaagagtagtaaaggtactcgcctttatacatgtgcaatacgcccggctgctatctatggtccaggtgaagagcgtcatcttccaagaatcctgtctcttggaaaattgggattagcatctttcaggattgggggtccaaatgtgaagacagattgggtctatgctgataatcttgttcttgcactgatattggcaagtatgggacttttagatgacattcctggcaggaagggaactcctgtagcagctggtcaagcatacttcatatgtgatggagagcctattaatagttttgattttatcatcagtcccttgtttcgaagtttgggctatcctgtacctcgagctacactagatacctctgttgcccttgcaatttcaagaatcattttgttcatgtccacactattctatccatggttagatagtaaatggattcctcagcctcttattcttcctgctgaagtatacaaggtgggtgttacacattacttttcatatctgaaagctaaggaggaacttggctacgtgcctgtgacgagtccacaggaaggcctggccgcaacgatctcctattggcaagagcggaagaggagagagctcgatggcccgacgatattcacctgggttgcagtaatagccgggatgctggctgtgttctccgccgctttccttccacccgtcggtccgctcaaatgggtgctcgccatcaatctgttcgttttccgctcgatgctggtgatccggatagtctttgtggccgcggtcgcggcgcacgcgagtgaagccgtctacgcctggttcctggcaaagaaggtcgacccgaggaacgcgacggggtggttttggcagaccttcgccctggggttcctctccctccggtttctgctcaagagggcgagggcggggacgggaccgtgatttgtgtgttgtacttcagtaacaatggattctagtagaaattccccagaggttctaggtttgc

SEQ ID NO: 64364 - protein, 483 aa, Triticum aestivum
  peptide (1)..(483): Ceres Seq. ID no. 15170156
  misc_feature (9)..(374): Pfam Name: 3-beta hydroxysteroid dehydrogenase/isomerase family Pfam Description: 3-beta hydroxysteroid dehydrogenase/isomerase
  misc_feature (8)..(384): Homolog of NCBI NO: 31415899 NR Description: putative 3-beta hydroxysteroid
  misc_feature (8)..(384): Homolog of NCBI NO: 31415898 NR Description: putative 3-beta hydroxysteroid
  misc_feature (15)..(374): Homolog of NCBI NO: 30694041 NR Description: 3-beta hydroxysteroid dehydrogenase/isomerase
  misc_feature (15)..(374): Homolog of NCBI NO: 18401656 NR Description: 3-beta hydroxysteroid dehydrogenase/isomerase
  misc_feature (15)..(382): Homolog of NCBI NO: 15225272 NR Description: 3-beta hydroxysteroid dehydrogenase/isomerase
  misc_feature (55)..(355): Homolog of NCBI NO: 34859097 NR Description: hypothetical protein XP_219290 [Rattus norvegicus]
  misc_feature (15)..(271): Homolog of NCBI NO: 34851797 NR Description: similar to RIKEN cDNA 4632417N05 [Rattus
  misc_feature (15)..(355): Homolog of NCBI NO: 21311981 NR Description: RIKEN cDNA 4632417N05 [Mus musculus]
  misc_feature (15)..(396): Homolog of NCBI NO: 21553311 NR Description: NAD(P) dependent steroid dehydrogenase-like [Homo
  misc_feature (1)..(478): Homolog of NCBI NO: 15226138 NR Description: 3-beta hydroxysteroid dehydrogenase/isomerase
MHLSENEGIEGVRFVVTGGQGFVGAALCLELIRRGALEVRSLDLRASSSWSQQLLDAGVRFFQGDVRKKEDVGKVFRNVDCVFHLASYGMSGKEMVQAGRTDEVNINGTCNVLDACHEHGVRRLVYVSTYNVVFGGKPIVNGSETLPYFPIEDHVDAYGRSKSIAEQLVLKSNGRQAKSSKGTRLYTCAIRPAAIYGPGEERHLPRILSLGKLGLASFRIGGPNVKTDWVYADNLVLALILASMGLLDDIPGRKGTPVAAGQAYFICDGEPINSFDFIISPLFRSLGYPVPRATLDTSVALAISRIILFMSTLFYPWLDSKWIPQPLILPAEVYKVGVTHYFSYLKAKEELGYVPVTSPQEGLAATISYWQERKRRELDGPTIFTWVAVIAGMLAVFSAAFLPPVGPLKWVLAINLFVFRSMLVIRIVFVAAVAAHASEAVYAWFLAKKVDPRNATGWFWQTFALGFLSLRFLLKRARAGTGP

SEQ ID NO: 64365 - protein, 394 aa, Triticum aestivum
  peptide (1)..(394): Ceres Seq. ID no. 15170157
  misc_feature (1)..(285): Pfam Name: 3-beta hydroxysteroid dehydrogenase/isomerase family Pfam Description: 3-beta hydroxysteroid dehydrogenase/isomerase
  misc_feature (1)..(295): Homolog of NCBI NO: 31415899 NR Description: putative 3-beta hydroxysteroid
  misc_feature (1)..(295): Homolog of NCBI NO: 31415898 NR Description: putative 3-beta hydroxysteroid
  misc_feature (1)..(285): Homolog of NCBI NO: 30694041 NR Description: 3-beta hydroxysteroid dehydrogenase/isomerase
  misc_feature (1)..(285): Homolog of NCBI NO: 18401656 NR Description: 3-beta hydroxysteroid dehydrogenase/isomerase
  misc_feature (1)..(293): Homolog of NCBI NO: 15225272 NR Description: 3-beta hydroxysteroid dehydrogenase/isomerase
  misc_feature (1)..(266): Homolog of NCBI NO: 34859097 NR Description: hypothetical protein XP_219290 [Rattus norvegicus]
  misc_feature (1)..(182): Homolog of NCBI NO: 34851797 NR Description: similar to RIKEN cDNA 4632417N05 [Rattus
  misc_feature (1)..(266): Homolog of NCBI NO: 21311981 NR Description: RIKEN cDNA 4632417N05 [Mus musculus]
  misc_feature (1)..(307): Homolog of NCBI NO: 21553311 NR Description: NAD(P) dependent steroid dehydrogenase-like [Homo
  misc_feature (1)..(389): Homolog of NCBI NO: 15226138 NR Description: 3-beta hydroxysteroid dehydrogenase/isomerase
MSGKEMVQAGRTDEVNINGTCNVLDACHEHGVRRLVYVSTYNVVFGGKPIVNGSETLPYFPIEDHVDAYGRSKSIAEQLVLKSNGRQAKSSKGTRLYTCAIRPAAIYGPGEERHLPRILSLGKLGLASFRIGGPNVKTDWVYADNLVLALILASMGLLDDIPGRKGTPVAAGQAYFICDGEPINSFDFIISPLFRSLGYPVPRATLDTSVALAISRIILFMSTLFYPWLDSKWIPQPLILPAEVYKVGVTHYFSYLKAKEELGYVPVTSPQEGLAATISYWQERKRRELDGPTIFTWVAVIAGMLAVFSAAFLPPVGPLKWVLAINLFVFRSMLVIRIVFVAAVAAHASEAVYAWFLAKKVDPRNATGWFWQTFALGFLSLRFLLKRARAGTGP

SEQ ID NO: 64366 - protein, 389 aa, Triticum aestivum
  peptide (1)..(389): Ceres Seq. ID no. 15170158
  misc_feature (1)..(280): Pfam Name: 3-beta hydroxysteroid dehydrogenase/isomerase family Pfam Description: 3-beta hydroxysteroid dehydrogenase/isomerase
  misc_feature (1)..(290): Homolog of NCBI NO: 31415899 NR Description: putative 3-beta hydroxysteroid
  misc_feature (1)..(290): Homolog of NCBI NO: 31415898 NR Description: putative 3-beta hydroxysteroid
  misc_feature (1)..(280): Homolog of NCBI NO: 30694041 NR Description: 3-beta hydroxysteroid dehydrogenase/isomerase
  misc_feature (1)..(280): Homolog of NCBI NO: 18401656 NR Description: 3-beta hydroxysteroid dehydrogenase/isomerase
  misc_feature (1)..(288): Homolog of NCBI NO: 15225272 NR Description: 3-beta hydroxysteroid dehydrogenase/isomerase
  misc_feature (1)..(261): Homolog of NCBI NO: 34859097 NR Description: hypothetical protein XP_219290 [Rattus norvegicus]
  misc_feature (1)..(177): Homolog of NCBI NO: 34851797 NR Description: similar to RIKEN cDNA 4632417N05 [Rattus
  misc_feature (1)..(261): Homolog of NCBI NO: 21311981 NR Description: RIKEN cDNA 4632417N05 [Mus musculus]
  misc_feature (1)..(302): Homolog of NCBI NO: 21553311 NR Description: NAD(P) dependent steroid dehydrogenase-like [Homo
  misc_feature (1)..(384): Homolog of NCBI NO: 15226138 NR Description: 3-beta hydroxysteroid dehydrogenase/isomerase
MVQAGRTDEVNINGTCNVLDACHEHGVRRLVYVSTYNVVFGGKPIVNGSETLPYFPIEDHVDAYGRSKSIAEQLVLKSNGRQAKSSKGTRLYTCAIRPAAIYGPGEERHLPRILSLGKLGLASFRIGGPNVKTDWVYADNLVLALILASMGLLDDIPGRKGTPVAAGQAYFICDGEPINSFDFIISPLFRSLGYPVPRATLDTSVALAISRIILFMSTLFYPWLDSKWIPQPLILPAEVYKVGVTHYFSYLKAKEELGYVPVTSPQEGLAATISYWQERKRRELDGPTIFTWVAVIAGMLAVFSAAFLPPVGPLKWVLAINLFVFRSMLVIRIVFVAAVAAHASEAVYAWFLAKKVDPRNATGWFWQTFALGFLSLRFLLKRARAGTGP

SEQ ID NO: 64367 - DNA, 835 bp, Triticum aestivum
  misc_feature (1)..(835): Ceres Seq. ID no. 15174142
ccgttcgctctgtcgctcgcgtcatctcaccttccccgtcctgtggaagtcatctcctgtatcccggtaagaagaaggggtcgaaatggtgaagcacaacaatgttatccctaacggccacttcaagaagcattggcagaactatgtcaagacctggttcaaccagcctgcccgcaagcagaggcgccgcattgctcgtcaaaagaaggctgtgaagatcttccctcgccctacatctggtcctcttcgtcccattgtgcaatgccagactcggaagtacaacatgaaggcaagggctgggagaggctttacccttgaggagctgaagtcagcgggcatcccgaagaagctagctcctactattggcatttctgtggaccaccgacgtaaaaaccggtcacttgagggtatgcagtcaaacattcagcgactcaagacttacaaggccaagctggttatcttcccaaggtgtgctcacaaggttaaggctggtgattctacccctgaggaacttgccacagccacccaggtccagggtgactacttgcctattactcgtggtgagaagcgctcggttgagatcatgaaggtcactgaggagatgaaggcgttcaaggcctacggcaagctccgtgtcgagaggatgaaccagcaccagctcggtgcccgcacgaagaaggctgccgaggcagagaaggaagaaaagaagtgataagatattttgtttcattctgcagctagtgaatgttatcattgggaacttgttctaaattttgttttggggctggaaatagagaccaccggatggctttgatacctgctacttgtttgcatg

SEQ ID NO: 64368 - protein, 208 aa, Triticum aestivum
  peptide (1)..(208): Ceres Seq. ID no. 15174143
  misc_feature (6)..(185): Pfam Name: Ribosomal protein L13e Pfam Description: Ribosomal protein L13e
  misc_feature (1)..(208): Homolog of NCBI NO: 34860769 NR Description: similar to 60S RIBOSOMAL PROTEIN L13 [Rattus
  misc_feature (2)..(208): Homolog of NCBI NO: 7441103 NR Description: ribosomal protein L13.B, cytosolic - rape
  misc_feature (2)..(208): Homolog of NCBI NO: 730450 NR Description: 60S RIBOSOMAL PROTEIN L13-2 (COLD INDUCED PROTEIN
  misc_feature (2)..(208): Homolog of NCBI NO: 7441102 NR Description: ribosomal protein L13.A, cytosolic - rape
  misc_feature (2)..(208): Homolog of NCBI NO: 730449 NR Description: 60S RIBOSOMAL PROTEIN L13-1 (COLD INDUCED PROTEIN
  misc_feature (2)..(208): Homolog of NCBI NO: 21537149 NR Description: 60S ribosomal protein L13, BBC1 protein
  misc_feature (2)..(208): Homolog of NCBI NO: 15229064 NR Description: 60S ribosomal protein L13 (RPL13B)/breast basic
  misc_feature (1)..(208): Homolog of NCBI NO: 12580867 NR Description: 60S ribosomal protein L13E [Picea abies]
  misc_feature (1)..(208): Homolog of NCBI NO: 18873677 NR Description: putative cold-induced protein
  misc_feature (1)..(208): Homolog of NCBI NO: 34897952 NR Description: ESTs AU077873(S1878),D40121(S1878) correspond to region of the predicted gene.~Similar to Arabidopsis thaliana 60S
MVKHNNVIPNGHFKKHWQNYVKTWFNQPARKQRRRIARQKKAVKIFPRPTSGPLRPIVQCQTRKYNMKARAGRGFTLEELKSAGIPKKLAPTIGISVDHRRKNRSLEGMQSNIQRLKTYKAKLVIFPRCAHKVKAGDSTPEELATATQVQGDYLPITRGEKRSVEIMKVTEEMKAFKAYGKLRVERMNQHQLGARTKKAAEAEKEEKK

SEQ ID NO: 64369 - protein, 142 aa, Triticum aestivum
  peptide (1)..(142): Ceres Seq. ID no. 15174144
  misc_feature (1)..(119): Pfam Name: Ribosomal protein L13e Pfam Description: Ribosomal protein L13e
  misc_feature (1)..(142): Homolog of NCBI NO: 34860769 NR Description: similar to 60S RIBOSOMAL PROTEIN L13 [Rattus
  misc_feature (1)..(142): Homolog of NCBI NO: 7441103 NR Description: ribosomal protein L13.B, cytosolic - rape
  misc_feature (1)..(142): Homolog of NCBI NO: 730450 NR Description: 60S RIBOSOMAL PROTEIN L13-2 (COLD INDUCED PROTEIN
  misc_feature (1)..(142): Homolog of NCBI NO: 7441102 NR Description: ribosomal protein L13.A, cytosolic - rape
  misc_feature (1)..(142): Homolog of NCBI NO: 730449 NR Description: 60S RIBOSOMAL PROTEIN L13-1 (COLD INDUCED PROTEIN
  misc_feature (1)..(142): Homolog of NCBI NO: 21537149 NR Description: 60S ribosomal protein L13, BBC1 protein
  misc_feature (1)..(142): Homolog of NCBI NO: 15229064 NR Description: 60S ribosomal protein L13 (RPL13B)/breast basic
  misc_feature (1)..(142): Homolog of NCBI NO: 12580867 NR Description: 60S ribosomal protein L13E [Picea abies]
  misc_feature (1)..(142): Homolog of NCBI NO: 18873677 NR Description: putative cold-induced protein
  misc_feature (1)..(142): Homolog of NCBI NO: 34897952 NR Description: ESTs AU077873(S1878),D40121(S1878) correspond to region of the predicted gene.~Similar to Arabidopsis thaliana 60S
MKARAGRGFTLEELKSAGIPKKLAPTIGISVDHRRKNRSLEGMQSNIQRLKTYKAKLVIFPRCAHKVKAGDSTPEELATATQVQGDYLPITRGEKRSVEIMKVTEEMKAFKAYGKLRVERMNQHQLGARTKKAAEAEKEEKK

SEQ ID NO: 64370 - DNA, 1227 bp, Triticum aestivum
  misc_feature (1)..(1227): Ceres Seq. ID no. 13597233
acacaagactccaatattcagggaaccagcagcatctcaattatcaagagcggcaagagatgggatctctccccgtcccgagtgtgcaggccctggtggctgccaccggcggagacgatgtgccgctgaggtatctccggccagaggcggcagcagaggcggtcaccggcgacgccgacggcgaggctcagatccccatcatcgaccaccaaaggctgctgctggagctggaccatggcggcgaggagtctgcacgcctccacagagcctgccaggactggggtttcttccagttagttaaccacagtgtcccagacgatgtggtggagagtatgaaggccaacatccagcaattcttccagctatccgcagagacgaagaagcggttcgctcaggagcaagggcagctagaaggctacggtcaactgttcgtcgtctctgaggatcagaagctcgactgggccgacatgctcttcctctacacacagccacctgagatgaggaacaccaagttctggcctgaccagcctgctgccttcagatcggcgctggatagatattctgatgcggtgaaggatgtatcagactcccttttggctacgatggccaagaacttgggtctgaaacgagaggcgattgctgacaaatgcatccgtggaatgcagaaagtcagaataaactactacccaccatgcgcccaaccagagaaagtcgttggcttgtccccgcactctgatgctaatctcctgacacttgtcctccaagtgaatcatgtccagggcctgcagatcaagaggaacggcagctggcttcctgtcaagcccgtcccgggcgctttcgtcgtcaacatcggagatatgtttgaggtcttgacaaacgggaggtacaggagcatcgagcaccgggctgttgtcgacccgaaggaagaacggttgtcgattgcggcgttccaattcccaaacatccacaccatgataggtcctatgaaggagttgaccgcacacgaagacgatgcctacaagacattggacctcgagagcttcatgaggaccttcttctcgaccaagctcgaggggaagaacttcttggagcagatgaagctaaactagctagctagcggctgaagctgggcttgcgcgtatcatcattgagatggactcgacagtgcttgcttcagctcttctttccaatgaatggacacttctcgcaacggagttctctctcggg

SEQ ID NO: 64371 - protein, 368 aa, Triticum aestivum
  peptide (1)..(368): Ceres Seq. ID no. 15222051
  misc_feature (219)..(319): Pfam Name: 2OG-Fe(II) oxygenase superfamily Pfam Description: 2OG-Fe(II) oxygenase superfamily
  misc_feature (26)..(327): Homolog of NCBI NO: 34898470 NR Description: ESTs D47168(S12332),D46350(S10967) correspond to region of the predicted gene.~Similar to Prunus armeniaca
  misc_feature (22)..(367): Homolog of NCBI NO: 40736992 NR Description: putative oxidoreductase [Oryza sativa (japonica
  misc_feature (15)..(367): Homolog of NCBI NO: 15219986 NR Description: oxidoreductase, 2OG-Fe(II) oxygenase family
  misc_feature (22)..(367): Homolog of NCBI NO: 15235014 NR Description: oxidoreductase, 2OG-Fe(II) oxygenase family
  misc_feature (19)..(367): Homolog of NCBI NO: 15219988 NR Description: oxidoreductase, 2OG-Fe(II) oxygenase family
  misc_feature (27)..(367): Homolog of NCBI NO: 37536820 NR Description: putative ethylene-forming enzyme
  misc_feature (22)..(367): Homolog of NCBI NO: 37536792 NR Description: putative dioxygenase [Oryza sativa (japonica
  misc_feature (20)..(367): Homolog of NCBI NO: 37536804 NR Description: putative ethylene-forming enzyme
  misc_feature (18)..(368): Homolog of NCBI NO: 37536802 NR Description: putative ethylene-forming enzyme
  misc_feature (20)..(366): Homolog of NCBI NO: 34895204 NR Description: P0463A02.24 [Oryza sativa (japonica
TRLQYSGNQQHLNYQERQEMGSLPVPSVQALVAATGGDDVPLRYLRPEAAAEAVTGDADGEAQIPIIDHQRLLLELDHGGEESARLHRACQDWGFFQLVNHSVPDDVVESMKANIQQFFQLSAETKKRFAQEQGQLEGYGQLFVVSEDQKLDWADMLFLYTQPPEMRNTKFWPDQPAAFRSALDRYSDAVKDVSDSLLATMAKNLGLKREAIADKCIRGMQKVRINYYPPCAQPEKVVGLSPHSDANLLTLVLQVNHVQGLQIKRNGSWLPVKPVPGAFVVNIGDMFEVLTNGRYRSIEHRAVVDPKEERLSIAAFQFPNIHTMIGPMKELTAHEDDAYKTLDLESFMRTFFSTKLEGKNFLEQMKLN

SEQ ID NO: 64372 - protein, 349 aa, Triticum aestivum
  peptide (1)..(349): Ceres Seq. ID no. 15222052
  misc_feature (200)..(300): Pfam Name: 2OG-Fe(II) oxygenase superfamily Pfam Description: 2OG-Fe(II) oxygenase superfamily
  misc_feature (7)..(308): Homolog of NCBI NO: 34898470 NR Description: ESTs D47168(S12332),D46350(S10967) correspond to region of the predicted gene.~Similar to Prunus armeniaca
  misc_feature (3)..(348): Homolog of NCBI NO: 40736992 NR Description: putative oxidoreductase [Oryza sativa (japonica
  misc_feature (1)..(348): Homolog of NCBI NO: 15219986 NR Description: oxidoreductase, 2OG-Fe(II) oxygenase family
  misc_feature (3)..(348): Homolog of NCBI NO: 15235014 NR Description: oxidoreductase, 2OG-Fe(II) oxygenase family
  misc_feature (1)..(348): Homolog of NCBI NO: 15219988 NR Description: oxidoreductase, 2OG-Fe(II) oxygenase family
  misc_feature (8)..(348): Homolog of NCBI NO: 37536820 NR Description: putative ethylene-forming enzyme
  misc_feature (3)..(348): Homolog of NCBI NO: 37536792 NR Description: putative dioxygenase [Oryza sativa (japonica
  misc_feature (1)..(348): Homolog of NCBI NO: 37536804 NR Description: putative ethylene-forming enzyme
  misc_feature (1)..(349): Homolog of NCBI NO: 37536802 NR Description: putative ethylene-forming enzyme
  misc_feature (1)..(347): Homolog of NCBI NO: 34895204 NR Description: P0463A02.24 [Oryza sativa (japonica
MGSLPVPSVQALVAATGGDDVPLRYLRPEAAAEAVTGDADGEAQIPIIDHQRLLLELDHGGEESARLHRACQDWGFFQLVNHSVPDDVVESMKANIQQFFQLSAETKKRFAQEQGQLEGYGQLFVVSEDQKLDWADMLFLYTQPPEMRNTKFWPDQPAAFRSALDRYSDAVKDVSDSLLATMAKNLGLKREAIADKCIRGMQKVRINYYPPCAQPEKVVGLSPHSDANLLTLVLQVNHVQGLQIKRNGSWLPVKPVPGAFVVNIGDMFEVLTNGRYRSIEHRAVVDPKEERLSIAAFQFPNIHTMIGPMKELTAHEDDAYKTLDLESFMRTFFSTKLEGKNFLEQMKLN

SEQ ID NO: 64373 - protein, 258 aa, Triticum aestivum
  peptide (1)..(258): Ceres Seq. ID no. 15222053
  misc_feature (109)..(209): Pfam Name: 2OG-Fe(II) oxygenase superfamily Pfam Description: 2OG-Fe(II) oxygenase superfamily
  misc_feature (1)..(217): Homolog of NCBI NO: 34898470 NR Description: ESTs D47168(S12332),D46350(S10967) correspond to region of the predicted gene.~Similar to Prunus armeniaca
  misc_feature (1)..(257): Homolog of NCBI NO: 40736992 NR Description: putative oxidoreductase [Oryza sativa (japonica
  misc_feature (1)..(257): Homolog of NCBI NO: 15219986 NR Description: oxidoreductase, 2OG-Fe(II) oxygenase family
  misc_feature (1)..(257): Homolog of NCBI NO: 15235014 NR Description: oxidoreductase, 2OG-Fe(II) oxygenase family
  misc_feature (1)..(257): Homolog of NCBI NO: 15219988 NR Description: oxidoreductase, 2OG-Fe(II) oxygenase family
  misc_feature (1)..(257): Homolog of NCBI NO: 37536820 NR Description: putative ethylene-forming enzyme
  misc_feature (1)..(257): Homolog of NCBI NO: 37536792 NR Description: putative dioxygenase [Oryza sativa (japonica
  misc_feature (1)..(257): Homolog of NCBI NO: 37536804 NR Description: putative ethylene-forming enzyme
  misc_feature (1)..(258): Homolog of NCBI NO: 37536802 NR Description: putative ethylene-forming enzyme
  misc_feature (1)..(256): Homolog of NCBI NO: 34895204 NR Description: P0463A02.24 [Oryza sativa (japonica
MKANIQQFFQLSAETKKRFAQEQGQLEGYGQLFVVSEDQKLDWADMLFLYTQPPEMRNTKFWPDQPAAFRSALDRYSDAVKDVSDSLLATMAKNLGLKREAIADKCIRGMQKVRINYYPPCAQPEKVVGLSPHSDANLLTLVLQVNHVQGLQIKRNGSWLPVKPVPGAFVVNIGDMFEVLTNGRYRSIEHRAVVDPKEERLSIAAFQFPNIHTMIGPMKELTAHEDDAYKTLDLESFMRTFFSTKLEGKNFLEQMKLN

SEQ ID NO: 64374 - DNA, 1409 bp, Triticum aestivum
  misc_feature (1)..(1409): Ceres Seq. ID no. 13597899
caaaaccgtttgctccgtttcccccaaatctgccgcacgacccaaacaaaacccttgcggcggcgccccaccccatctccggcggccaagcggaatggagcgctcggcggcgggcgcctcgtaccagcgcttcccgcgcgtgcggatccgcgagctcaaggacgagtacgccaagttcgagctcaaggacaccgacgcgagcatggccaacgccctccgccgcgtcatgatcgccgaggtccccaccgtcgccatcgacctcgtcgagatcgagagcaactcctccgtcctcaacgacgagttcctcgcgcaccgcctcggcctcatcccgctcacctcctccgccgccatgtccatgcgcttctcccgcgactgcgacgcctgcgacggggacggctcctgcgagtactgctccgtcgagttccacctcgccgcccgcgccaccgactccggccagacgctcgaggtcacctccaccaaggacctccgctccaccgaccccaaggtctgccctgtcgaccagcaaagggagtaccagcaggccctcggcaacgtcgacgcttacgagcccgatgctgccggtgaccacaggggcatattaattgtaaagctgcgccgtgggcaagagctgcgtcttcgagcaattgccaggaagggaattggaaaggaccatgccaaatggtctccagctgctactgtgaccttcatgtatgagcctgacatacgtattaaccaagaactcatggagacacttacacttgaggaaaaacaaagctgggtggagagcagccctacaaaagtatttgacattgatcctgtcacccaacaggtgacgattgtggacccagaggcctacacatatgacgatgaggtgatcaagaaagcagaggccatggggaagccaggattggtagagatcaacgccaaggaggacagctttgtgttcactgtggagacaacgggggccattacagcctatgagctgattatgaacgctatcacggtcctgaggcagaagctggacgccgttcgcctgcaagacgatgacggcgatctgggcgagctcggcgcccaccttatcggaggctaaccaccgcttgtctgggaaagaagtcgccagcggtatctttgtttctccgtatctaggctcgtctcgtctaactggcttgcctgtggcaagtggtagttgatgcctcctttgatatgcagcaccagaactctacggtaatcgcctttgtatccctctgtttatgccctgacctctgccggaactctgtacgtgcaaaaagccatgggcgctgaagcttagcggcactgtggaacaagagaatagctggtagcccatgattggccgtgccgtgcggtggtgatacggcgtggtgtcttgaatgcagagttattcgcagggc

SEQ ID NO: 64375 - protein, 362 aa, Triticum aestivum
  peptide (1)..(362): Ceres Seq. ID no. 13597900
  misc_feature (88)..(228): Pfam Name: RNA polymerase Rpb3/RpoA insert domain Pfam Description: RNA polymerase Rpb3/RpoA insert domain
  misc_feature (41)..(240): Homolog of NCBI NO: 40645083 NR Description: homologue of DNA-directed RNA polymerase II
  misc_feature (254)..(345): Homolog of NCBI NO: 39589723 NR Description: Hypothetical protein CBG12350 [Caenorhabditis
  misc_feature (41)..(240): Homolog of NCBI NO: 39589723 NR Description: Hypothetical protein CBG12350 [Caenorhabditis
  misc_feature (46)..(356): Homolog of NCBI NO: 116575 NR Description: Conjugation stage-specific protein
  misc_feature (254)..(346): Homolog of NCBI NO: 28278474 NR Description: Similar to polymerase (RNA) II (DNA directed)
  misc_feature (41)..(240): Homolog of NCBI NO: 28278474 NR Description: Similar to polymerase (RNA) II (DNA directed)
  misc_feature (38)..(362): Homolog of NCBI NO: 2129725 NR Description: DNA-directed RNA polymerase (EC 2.7.7.6) II 35.5K
  misc_feature (38)..(362): Homolog of NCBI NO: 15226509 NR Description: DNA-directed RNA polymerase II, third largest
  misc_feature (38)..(362): Homolog of NCBI NO: 21593370 NR Description: DNA-directed RNA polymerase II, third largest
  misc_feature (38)..(362): Homolog of NCBI NO: 15226523 NR Description: DNA-directed RNA polymerase II, third largest
KTVCSVSPKSAARPKQNPCGGAPPHLRRPSGMERSAAGASYQRFPRVRIRELKDEYAKFELKDTDASMANALRRVMIAEVPTVAIDLVEIESNSSVLNDEFLAHRLGLIPLTSSAAMSMRFSRDCDACDGDGSCEYCSVEFHLAARATDSGQTLEVTSTKDLRSTDPKVCPVDQQREYQQALGNVDAYEPDAAGDHRGILIVKLRRGQELRLRAIARKGIGKDHAKWSPAATVTFMYEPDIRINQELMETLTLEEKQSWVESSPTKVFDIDPVTQQVTIVDPEAYTYDDEVIKKAEAMGKPGLVEINAKEDSFVFTVETTGAITAYELIMNAITVLRQKLDAVRLQDDDGDLGELGAHLIGG

SEQ ID NO: 64376 - protein, 331 aa, Triticum aestivum
  peptide (1)..(331): Ceres Seq. ID no. 13597901
  misc_feature (57)..(197): Pfam Name: RNA polymerase Rpb3/RpoA insert domain Pfam Description: RNA polymerase Rpb3/RpoA insert domain
  misc_feature (10)..(209): Homolog of NCBI NO: 40645083 NR Description: homologue of DNA-directed RNA polymerase II
  misc_feature (223)..(314): Homolog of NCBI NO: 39589723 NR Description: Hypothetical protein CBG12350 [Caenorhabditis
  misc_feature (10)..(209): Homolog of NCBI NO: 39589723 NR Description: Hypothetical protein CBG12350 [Caenorhabditis
  misc_feature (15)..(325): Homolog of NCBI NO: 116575 NR Description: Conjugation stage-specific protein
  misc_feature (223)..(315): Homolog of NCBI NO: 28278474 NR Description: Similar to polymerase (RNA) II (DNA directed)
  misc_feature (10)..(209): Homolog of NCBI NO: 28278474 NR Description: Similar to polymerase (RNA) II (DNA directed)
  misc_feature (7)..(331): Homolog of NCBI NO: 2129725 NR Description: DNA-directed RNA polymerase (EC 2.7.7.6) II 35.5K
  misc_feature (7)..(331): Homolog of NCBI NO: 15226509 NR Description: DNA-directed RNA polymerase II, third largest
  misc_feature (7)..(331): Homolog of NCBI NO: 21593370 NR Description: DNA-directed RNA polymerase II, third largest
  misc_feature (7)..(331): Homolog of NCBI NO: 15226523 NR Description: DNA-directed RNA polymerase II, third largest
MERSAAGASYQRFPRVRIRELKDEYAKFELKDTDASMANALRRVMIAEVPTVAIDLVEIESNSSVLNDEFLAHRLGLIPLTSSAAMSMRFSRDCDACDGDGSCEYCSVEFHLAARATDSGQTLEVTSTKDLRSTDPKVCPVDQQREYQQALGNVDAYEPDAAGDHRGILIVKLRRGQELRLRAIARKGIGKDHAKWSPAATVTFMYEPDIRINQELMETLTLEEKQSWVESSPTKVFDIDPVTQQVTIVDPEAYTYDDEVIKKAEAMGKPGLVEINAKEDSFVFTVETTGAITAYELIMNAITVLRQKLDAVRLQDDDGDLGELGAHLIGG

SEQ ID NO: 64377 - protein, 295 aa, Triticum aestivum
  peptide (1)..(295): Ceres Seq. ID no. 13597902
  misc_feature (21)..(161): Pfam Name: RNA polymerase Rpb3/RpoA insert domain Pfam Description: RNA polymerase Rpb3/RpoA insert domain
  misc_feature (1)..(173): Homolog of NCBI NO: 40645083 NR Description: homologue of DNA-directed RNA polymerase II
  misc_feature (187)..(278): Homolog of NCBI NO: 39589723 NR Description: Hypothetical protein CBG12350 [Caenorhabditis
  misc_feature (1)..(173): Homolog of NCBI NO: 39589723 NR Description: Hypothetical protein CBG12350 [Caenorhabditis
  misc_feature (1)..(289): Homolog of NCBI NO: 116575 NR Description: Conjugation stage-specific protein
  misc_feature (187)..(279): Homolog of NCBI NO: 28278474 NR Description: Similar to polymerase (RNA) II (DNA directed)
  misc_feature (1)..(173): Homolog of NCBI NO: 28278474 NR Description: Similar to polymerase (RNA) II (DNA directed)
  misc_feature (1)..(295): Homolog of NCBI NO: 2129725 NR Description: DNA-directed RNA polymerase (EC 2.7.7.6) II 35.5K
  misc_feature (1)..(295): Homolog of NCBI NO: 15226509 NR Description: DNA-directed RNA polymerase II, third largest
  misc_feature (1)..(295): Homolog of NCBI NO: 21593370 NR Description: DNA-directed RNA polymerase II, third largest
  misc_feature (1)..(295): Homolog of NCBI NO: 15226523 NR Description: DNA-directed RNA polymerase II, third largest
MANALRRVMIAEVPTVAIDLVEIESNSSVLNDEFLAHRLGLIPLTSSAAMSMRFSRDCDACDGDGSCEYCSVEFHLAARATDSGQTLEVTSTKDLRSTDPKVCPVDQQREYQQALGNVDAYEPDAAGDHRGILIVKLRRGQELRLRAIARKGIGKDHAKWSPAATVTFMYEPDIRINQELMETLTLEEKQSWVESSPTKVFDIDPVTQQVTIVDPEAYTYDDEVIKKAEAMGKPGLVEINAKEDSFVFTVETTGAITAYELIMNAITVLRQKLDAVRLQDDDGDLGELGAHLIGG

SEQ ID NO: 64378 - DNA, 1196 bp, Triticum aestivum
  misc_feature (1)..(1196): Ceres Seq. ID no. 13664349
actcactccgccctcgcccccgccacctcatcgacgcctcgaagccgaaccctgggcaaggaaaaatacctaaccctagctggtccgccatggccagggaggcgtcgtcgtcctccgcgccggggccctcagagttgccgccggcggctggtggcagcggcagcggaagcggcggggacacgccgcgagtgacgcggcgacgcgcccgcggcgaccccctcctcatcgtgtgcggctgcttcagcgtcgtcacggccgccaccgccttgctctgcgtcgccgtcaacgtcctctccgctgtccagtccttccgccgcaacggtggctacatattcgggggcatattccggtgctatgcggtggtgatctcgctgttcgtggccgtcctcgagaccgagtggggattcatcatcaaattctgcaagatattggaatactggcctgcaagggggatgctacagatatttgttgctgtcatgacgaaggcatacccaaacgttgaaaggagcgatctgattttgcttcaggacattgccagctatctgctccttgcatgtggactaatctatgtaatctcgggggtattatgtcttggtgtactaaagcgttctaggcagcagaaagcaacatcacgagagcaagcagccaaagatctgcatgagctggagaagcggagagaggaactcgaggcattgttaattgctgagaggtccgaattggtctgatgaatctgagcacgacgatttaacatttctcacgtggtgtagatagattgttgctcctgctaattgcatgccacttttcatggtcatcgatttgtcacccgagacattttcgttgggagtgcccccttttcctgttagtgctgacctttaccaatcatttgcttcctatgtttacatggattgcagtggaccatattgcgctcttattttatttttagctaggaatggcttgctaacatatttggtaaatcgacaggtgttccagttttcgtctagatttctgctgaatttggtttctggtgtgagcattttcgtggatgcatggatcaagcgggattgtgttgtctcagttgttggatttatgtcaatgccgtaggcctcaaaatgtaccatgctgacatggtgtgtgtttgttgtctctgtagtctttgactgaaccatggatgctaaataattttctgtattttgtgt

SEQ ID NO: 64379 - protein, 240 aa, Triticum aestivum
  peptide (1)..(240): Ceres Seq. ID no. 15220314
  misc_feature (69)..(237): Homolog of NCBI NO: 30689751 NR Description: expressed protein [Arabidopsis thaliana]
  misc_feature (30)..(240): Homolog of NCBI NO: 34915380 NR Description: contains ESTs
SLRPRPRHLIDASKPNPGQGKIPNPSWSAMAREASSSSAPGPSELPPAAGGSGSGSGGDTPRVTRRRARGDPLLIVCGCFSVVTAATALLCVAVNVLSAVQSFRRNGGYIFGGIFRCYAVVISLFVAVLETEWGFIIKFCKILEYWPARGMLQIFVAVMTKAYPNVERSDLILLQDIASYLLLACGLIYVISGVLCLGVLKRSRQQKATSREQAAKDLHELEKRREELEALLIAERSELV

SEQ ID NO: 64380 - protein, 211 aa, Triticum aestivum
  peptide (1)..(211): Ceres Seq. ID no. 15220315
  misc_feature (40)..(208): Homolog of NCBI NO: 30689751 NR Description: expressed protein [Arabidopsis thaliana]
  misc_feature (1)..(211): Homolog of NCBI NO: 34915380 NR Description: contains ESTs
MAREASSSSAPGPSELPPAAGGSGSGSGGDTPRVTRRRARGDPLLIVCGCFSVVTAATALLCVAVNVLSAVQSFRRNGGYIFGGIFRCYAVVISLFVAVLETEWGFIIKFCKILEYWPARGMLQIFVAVMTKAYPNVERSDLILLQDIASYLLLACGLIYVISGVLCLGVLKRSRQQKATSREQAAKDLHELEKRREELEALLIAERSELV

SEQ ID NO: 64381 - DNA, 1282 bp, Triticum aestivum
  misc_feature (1)..(1282): Ceres Seq. ID no. 14301882
aactggtggggggcggtggcaagtgcaaccgtgcgtgcgctcctgtatccatctgtctgccgggactcatcgtctcctccttccccaatcgccattgtcggtggtgcaagcaagcgcgccgaggcgtgtgggagggacatggcggggcgctacgatggcggcaaccctttcgaggaggaggaggacgtgaaccctttctcggaacaaacgcgaggcaaagctggcgggcagtccaactatggcggcggcggcgcgttctacatgccgaatcccagaaacgttgccccctcctcgaattcgcggctttcgccccttcccccggaacctgcagatttcagtgccacagtggatatccctcttgagtcgtcaaaggacctgaagaaaagagaaaaggagctgcaagcgagggaagcagagttgaacaagagggagaaggaattgaaaagaagggaggaagctgcagcacgagctggtattgtcatcgaggagaaaaactggcctccttttctgccactcatccaccatgacattgccaatgagataccgactcatcttcaaagaatgcaatacttcgcatttgcgtcatttcttggtttggttttctgtctcttctggaatgtcgtagcagttacttcagcctggatcaagggggaaggtgtgaaaatctggttgctagcaataatctacttcatctctggggttcctggtgcgtatgtgttatggtatcgccctctttataatgctatgaggactgacagtgcgttgaagtttggattgtttttcttgctctacttgtttcacatcattttcgtcgtatttgctgccgtggctcctcctgctgtctttgagggcaagtctttggcaggaattttaccggcgattgatcttatcagcgtgaatgctctagttgggatcttctacttcattggatttggattatttgccctggagtcattgctgagcatctgggttatccagcaagtgtacatgtacttccgaggaagtggaaaggccgcagagatgaagcgtgatgcgacgaggggcgctatgagagcggcattttgattgccacatatctcagatgatgataggtctcaagattaattccatggattagatggcacggtaaagaaaaatatatgtagcaatgtaaacatatatttttctttatcgccggtaagaaaagtggacaagtcctacaatgtcacttcatcatagcagtatgataacacggcgatcataacaaaaacttacaggttcatcggaaagtttgacaaaaggc

SEQ ID NO: 64382 - protein, 354 aa, Triticum aestivum
  peptide (1)..(354): Ceres Seq. ID no. 14301883
  misc_feature (162)..(336): Pfam Name: SCAMP family Pfam Description: SCAMP family
  misc_feature (55)..(335): Homolog of NCBI NO: 38347080 NR Description: OSJNBa0006A01.21 [Oryza sativa (japonica
  misc_feature (104)..(335): Homolog of NCBI NO: 15222550 NR Description: secretory carrier membrane protein -related
  misc_feature (90)..(353): Homolog of NCBI NO: 25402653 NR Description: hypothetical protein [imported] - Arabidopsis
  misc_feature (90)..(352): Homolog of NCBI NO: 18379111 NR Description: expressed protein [Arabidopsis thaliana]
  misc_feature (90)..(353): Homolog of NCBI NO: 3941289 NR Description: similarity to SCAMP37 [Pisum sativum]
  misc_feature (90)..(353): Homolog of NCBI NO: 15220305 NR Description: secretory carrier membrane protein -related
  misc_feature (90)..(353): Homolog of NCBI NO: 15219893 NR Description: secretory carrier membrane protein [Arabidopsis
  misc_feature (90)..(353): Homolog of NCBI NO: 15226410 NR Description: secretory carrier-associated membrane protein
  misc_feature (93)..(354): Homolog of NCBI NO: 7109232 NR Description: secretory carrier membrane protein [Oryza sativa]
  misc_feature (47)..(354): Homolog of NCBI NO: 34899754 NR Description: putative secretory carrier membrane protein
NWWGAVASATVRALLYPSVCRDSSSPPSPIAIVGGASKRAEACGRDMAGRYDGGNPFEEEEDVNPFSEQTRGKAGGQSNYGGGGAFYMPNPRNVAPSSNSRLSPLPPEPADFSATVDIPLESSKDLKKREKELQAREAELNKREKELKRREEAAARAGIVIEEKNWPPFLPLIHHDIANEIPTHLQRMQYFAFASFLGLVFCLFWNVVAVTSAWIKGEGVKIWLLAIIYFISGVPGAYVLWYRPLYNAMRTDSALKFGLFFLLYLFHIIFVVFAAVAPPAVFEGKSLAGILPAIDLISVNALVGIFYFIGFGLFALESLLSIWVIQQVYMYFRGSGKAAEMKRDATRGAMRAAF

SEQ ID NO: 64383 - protein, 308 aa, Triticum aestivum
  peptide (1)..(308): Ceres Seq. ID no. 14301884
  misc_feature (116)..(290): Pfam Name: SCAMP family Pfam Description: SCAMP family
  misc_feature (9)..(289): Homolog of NCBI NO: 38347080 NR Description: OSJNBa0006A01.21 [Oryza sativa (japonica
  misc_feature (58)..(289): Homolog of NCBI NO: 15222550 NR Description: secretory carrier membrane protein -related
  misc_feature (44)..(307): Homolog of NCBI NO: 25402653 NR Description: hypothetical protein [imported] - Arabidopsis
  misc_feature (44)..(306): Homolog of NCBI NO: 18379111 NR Description: expressed protein [Arabidopsis thaliana]
  misc_feature (44)..(307): Homolog of NCBI NO: 3941289 NR Description: similarity to SCAMP37 [Pisum sativum]
  misc_feature (44)..(307): Homolog of NCBI NO: 15220305 NR Description: secretory carrier membrane protein -related
  misc_feature (44)..(307): Homolog of NCBI NO: 15219893 NR Description: secretory carrier membrane protein [Arabidopsis
  misc_feature (44)..(307): Homolog of NCBI NO: 15226410 NR Description: secretory carrier-associated membrane protein
  misc_feature (47)..(308): Homolog of NCBI NO: 7109232 NR Description: secretory carrier membrane protein [Oryza sativa]
  misc_feature (1)..(308): Homolog of NCBI NO: 34899754 NR Description: putative secretory carrier membrane protein
MAGRYDGGNPFEEEEDVNPFSEQTRGKAGGQSNYGGGGAFYMPNPRNVAPSSNSRLSPLPPEPADFSATVDIPLESSKDLKKREKELQAREAELNKREKELKRREEAAARAGIVIEEKNWPPFLPLIHHDIANEIPTHLQRMQYFAFASFLGLVFCLFWNVVAVTSAWIKGEGVKIWLLAIIYFISGVPGAYVLWYRPLYNAMRTDSALKFGLFFLLYLFHIIFVVFAAVAPPAVFEGKSLAGILPAIDLISVNALVGIFYFIGFGLFALESLLSIWVIQQVYMYFRGSGKAAEMKRDATRGAMRAAF

SEQ ID NO: 64384 - protein, 267 aa, Triticum aestivum
  peptide (1)..(267): Ceres Seq. ID no. 14301885
  misc_feature (75)..(249): Pfam Name: SCAMP family Pfam Description: SCAMP family
  misc_feature (1)..(248): Homolog of NCBI NO: 38347080 NR Description: OSJNBa0006A01.21 [Oryza sativa (japonica
  misc_feature (17)..(248): Homolog of NCBI NO: 15222550 NR Description: secretory carrier membrane protein -related
  misc_feature (3)..(266): Homolog of NCBI NO: 25402653 NR Description: hypothetical protein [imported] - Arabidopsis
  misc_feature (3)..(265): Homolog of NCBI NO: 18379111 NR Description: expressed protein [Arabidopsis thaliana]
  misc_feature (3)..(266): Homolog of NCBI NO: 3941289 NR Description: similarity to SCAMP37 [Pisum sativum]
  misc_feature (3)..(266): Homolog of NCBI NO: 15220305 NR Description: secretory carrier membrane protein -related
  misc_feature (3)..(266): Homolog of NCBI NO: 15219893 NR Description: secretory carrier membrane protein [Arabidopsis
  misc_feature (3)..(266): Homolog of NCBI NO: 15226410 NR Description: secretory carrier-associated membrane protein
  misc_feature (6)..(267): Homolog of NCBI NO: 7109232 NR Description: secretory carrier membrane protein [Oryza sativa]
  misc_feature (1)..(267): Homolog of NCBI NO: 34899754 NR Description: putative secretory carrier membrane protein
MPNPRNVAPSSNSRLSPLPPEPADFSATVDIPLESSKDLKKREKELQAREAELNKREKELKRREEAAARAGIVIEEKNWPPFLPLIHHDIANEIPTHLQRMQYFAFASFLGLVFCLFWNVVAVTSAWIKGEGVKIWLLAIIYFISGVPGAYVLWYRPLYNAMRTDSALKFGLFFLLYLFHIIFVVFAAVAPPAVFEGKSLAGILPAIDLISVNALVGIFYFIGFGLFALESLLSIWVIQQVYMYFRGSGKAAEMKRDATRGAMRAAF

SEQ ID NO: 64385 - DNA, 1383 bp, Triticum aestivum
  misc_feature (1)..(1383): Ceres Seq. ID no. 12618559
aaaagtcatcgggtggacccgtgaaaccatcgaaccaactaaacaagcacagctgacacccacccctccgccaccgcagtcgccggtgaccaggacgcgcgcccgaattcgccggtggcgaggagaagggcgccgagtatggggtgctccctctcggggctcaacgccctctacgacgcagcgactggcggcggcgacgtgtggatcaacgagcgccgcttccgcgtcctccgccagatcggcgagggcggcttcgccttcgtctacctcgtcaaggagcacgacgcctcctcctacgccgcgcgcgacaggcacccctcccacgtctcagacgacgggacatatgctatgaagaaggtgctgatacagagcagggagcaactggatctggtgaaggaggagatccgcgtttcgtccttgttcaaccaccccaatctgctaccgcttcttgaccatgccataatagcagttaagagtacacagggagattggagccatgaagcctacttactcttcccagtccatttggatggtactctgttcgacaatgctgcagtcatgcagtcaaggaaagagttttattcggtggtcgatgttttgcgaatattccaacagatttgtgaaggactgaagcacatgcatagtcttgatcccacatatgcccataatgatgtcaagcctggcaatgttcttgtaacctgccgaaaagggcaagcacctcttgcaactttgatggattttggaagttcgcggcctgcaagaaatcaaattcgttctcgttctgaagcattacggttgcaggaatgggctgctgagcattgctctgcaccttttcgcgcacctgaattgtgggactgcccgagtcatgctgatattgatgagaggacagacatttggtcgctaggttgcactctttacgcgatcatgtatggtgtttctccctttgagtatgctcttggtgaatctggaggaagcttgcagctggccattatgaacgcacagttgaagtggccagcgctaccgagcacctaccctgacgcacttcacaagtttgttacctggatgcttcagccacagcctgagatgcgccctcgcatcaatgacatacttctccacgttgacaagcttgtggagaaatactcgccttaaagccagcttgcatattctgttctgacttgtttcttctttatacgattgcaaaaggggacatgttgtaagactcatgctctaggccttttcatcctttggaataggctcagtgtcaattctttatgtaactttcaggctgttaccgatatgtcgttctctaactcttggaagttatattactcgcttatcttgtacaaaatgtttgctgaatatgaaaaatacatgtgttattgc

SEQ ID NO: 64386 - protein, 336 aa, Triticum aestivum
  peptide (1)..(336): Ceres Seq. ID no. 12618560
  misc_feature (19)..(330): Homolog of NCBI NO: 4505837 NR Description: serine/threonine kinase 16
  misc_feature (19)..(330): Homolog of NCBI NO: 26327983 NR Description: unnamed protein product [Mus musculus]
  misc_feature (19)..(330): Homolog of NCBI NO: 3372666 NR Description: myristilated and palmitylated serine-threonine
  misc_feature (19)..(330): Homolog of NCBI NO: 33303961 NR Description: serine/threonine kinase 16 [synthetic construct]
  misc_feature (19)..(330): Homolog of NCBI NO: 12803571 NR Description: serine/threonine kinase 16 [Homo sapiens]
  misc_feature (19)..(330): Homolog of NCBI NO: 10640971 NR Description: F5-2 [Homo sapiens]
  misc_feature (1)..(30): Homolog of NCBI NO: 30682270 NR Description: serine/threonine protein kinase, putative
  misc_feature (60)..(335): Homolog of NCBI NO: 30682270 NR Description: serine/threonine protein kinase, putative
  misc_feature (1)..(335): Homolog of NCBI NO: 21593866 NR Description: serine/threonine protein kinase [Arabidopsis
  misc_feature (1)..(335): Homolog of NCBI NO: 15241535 NR Description: serine/threonine protein kinase
MGCSLSGLNALYDAATGGGDVWINERRFRVLRQIGEGGFAFVYLVKEHDASSYAARDRHPSHVSDDGTYAMKKVLIQSREQLDLVKEEIRVSSLFNHPNLLPLLDHAIIAVKSTQGDWSHEAYLLFPVHLDGTLFDNAAVMQSRKEFYSVVDVLRIFQQICEGLKHMHSLDPTYAHNDVKPGNVLVTCRKGQAPLATLMDFGSSRPARNQIRSRSEALRLQEWAAEHCSAPFRAPELWDCPSHADIDERTDIWSLGCTLYAIMYGVSPFEYALGESGGSLQLAIMNAQLKWPALPSTYPDALHKFVTWMLQPQPEMRPRINDILLHVDKLVEKYSP

SEQ ID NO: 64387 - protein, 266 aa, Triticum aestivum
  peptide (1)..(266): Ceres Seq. ID no. 12618561
  misc_feature (1)..(260): Homolog of NCBI NO: 13626604 NR Description: SERINE/THREONINE PROTEIN KINASE 16 (PROTEIN PKL12) (MYRISTOYLATED AND PALMITOYLATED SERINE-THREONINE KINASE)
  misc_feature (1)..(260): Homolog of NCBI NO: 4505837 NR Description: serine/threonine kinase 16
  misc_feature (1)..(260): Homolog of NCBI NO: 26327983 NR Description: unnamed protein product [Mus musculus]
  misc_feature (1)..(260): Homolog of NCBI NO: 3372666 NR Description: myristilated and palmitylated serine-threonine
  misc_feature (1)..(260): Homolog of NCBI NO: 33303961 NR Description: serine/threonine kinase 16 [synthetic construct]
  misc_feature (1)..(260): Homolog of NCBI NO: 12803571 NR Description: serine/threonine kinase 16 [Homo sapiens]
  misc_feature (1)..(260): Homolog of NCBI NO: 10640971 NR Description: F5-2 [Homo sapiens]
  misc_feature (1)..(265): Homolog of NCBI NO: 30682270 NR Description: serine/threonine protein kinase, putative
  misc_feature (1)..(265): Homolog of NCBI NO: 21593866 NR Description: serine/threonine protein kinase [Arabidopsis
  misc_feature (1)..(265): Homolog of NCBI NO: 15241535 NR Description: serine/threonine protein kinase
MKKVLIQSREQLDLVKEEIRVSSLFNHPNLLPLLDHAIIAVKSTQGDWSHEAYLLFPVHLDGTLFDNAAVMQSRKEFYSVVDVLRIFQQICEGLKHMHSLDPTYAHNDVKPGNVLVTCRKGQAPLATLMDFGSSRPARNQIRSRSEALRLQEWAAEHCSAPFRAPELWDCPSHADIDERTDIWSLGCTLYAIMYGVSPFEYALGESGGSLQLAIMNAQLKWPALPSTYPDALHKFVTWMLQPQPEMRPRINDILLHVDKLVEKYSP

SEQ ID NO: 64388 - protein, 196 aa, Triticum aestivum
  peptide (1)..(196): Ceres Seq. ID no. 12618562
  misc_feature (1)..(190): Homolog of NCBI NO: 13626604 NR Description: SERINE/THREONINE PROTEIN KINASE 16 (PROTEIN PKL12) (MYRISTOYLATED AND PALMITOYLATED SERINE-THREONINE KINASE)
  misc_feature (1)..(190): Homolog of NCBI NO: 4505837 NR Description: serine/threonine kinase 16
  misc_feature (1)..(190): Homolog of NCBI NO: 26327983 NR Description: unnamed protein product [Mus musculus]
  misc_feature (1)..(190): Homolog of NCBI NO: 3372666 NR Description: myristilated and palmitylated serine-threonine
  misc_feature (1)..(190): Homolog of NCBI NO: 33303961 NR Description: serine/threonine kinase 16 [synthetic construct]
  misc_feature (1)..(190): Homolog of NCBI NO: 12803571 NR Description: serine/threonine kinase 16 [Homo sapiens]
  misc_feature (1)..(190): Homolog of NCBI NO: 10640971 NR Description: F5-2 [Homo sapiens]
  misc_feature (1)..(195): Homolog of NCBI NO: 30682270 NR Description: serine/threonine protein kinase, putative
  misc_feature (1)..(195): Homolog of NCBI NO: 21593866 NR Description: serine/threonine protein kinase [Arabidopsis
  misc_feature (1)..(195): Homolog of NCBI NO: 15241535 NR Description: serine/threonine protein kinase
MQSRKEFYSVVDVLRIFQQICEGLKHMHSLDPTYAHNDVKPGNVLVTCRKGQAPLATLMDFGSSRPARNQIRSRSEALRLQEWAAEHCSAPFRAPELWDCPSHADIDERTDIWSLGCTLYAIMYGVSPFEYALGESGGSLQLAIMNAQLKWPALPSTYPDALHKFVTWMLQPQPEMRPRINDILLHVDKLVEKYSP

SEQ ID NO: 64389 - DNA, 1342 bp, Triticum aestivum
  misc_feature (1)..(1342): Ceres Seq. ID no. 14303313
accaaaccctcgtcgcgctcgtctctcccctctcgtgctctcaccccggccagcggcatctgagattcgcgcctcgccggcggccatgggcggcgactggcaggagctggcccagtcggcggtcatcggcctcatcttcgccttcctcgtcgccaagctcatctccgtcgtcctcgccttcaaggaggacaacctccgcatcacccgctccgcccccgcccccgccccctcgcccgacgccactgcccccgcgctcgacggcggcacgagcggcggcgacggcgacagcgacggcgactgggagggcgtggagagcacggagctcgacgaggacttcagcgccgcctccgccttcgtcgcggcctccgccgccggcgtccccgaggaggcgcagctccgcctctacggcctctacaagatcgccaccgagggcccctgcaccgcgccgcagccctccgccctcaagctcaaggcccgcgccaagtggaatgcttggaataaattgggtgctatgccaacagaagaagctatggaggagtacataacaattgttgatgagatattccctaactgggctgatggctcgaaaaagaaagatggggaaaccacaatgtctgcatcaggttcgaagggaccaatgggacctgtatttagcagtttaatgtacgaggaagatcaaggaaatgaatcagaacttggtgacatccatgtttctgcaagggaaggagcaatcgaagacgttaaaaagcatcttgctgctggtgtacaaatcaacttaagagatagcgaagagagaactccgttgcactgggctgtggaccggggtcatctagatgctgttgaggttcttgtcaactcaaatgcggacgtgaatgctcaggacaacgaagggcagacagcgctccactacgccgtcctctgcgagagggaggacatcgccgaactgctcgtcaagcaccacgcggatctccagatcaaggacggcgacgggaacaccgcccgggacttgtgctcctcggcctggccgttcatgaagccggcaaactgacggcacaatgaacccgatgatacagagttgacgcctgctgctgctactaccactagtgccgagaaactatacacaccgtgcttggttagctgaatcggatgagccgttttaccaacctcatcgaatacactgtcaaaaggtaactcagcgcagggtagacatcttgtagtggtattttgcctgtttcatagtgtgtttgtgctgcaggccaactgtttggcaggaaatatatcagtgtcaggattcaggcctcgcggcctcatactgtcaatatgcatacatgttaagagcatc

SEQ ID NO: 64390 - protein, 348 aa, Triticum aestivum
  peptide (1)..(348): Ceres Seq. ID no. 14303314
  misc_feature (108)..(189): Pfam Name: Acyl CoA binding protein Pfam Description: Acyl CoA binding protein
  misc_feature (88)..(330): Homolog of NCBI NO: 34880749 NR Description: similar to RIKEN cDNA 2610100E10 [Rattus
  misc_feature (88)..(330): Homolog of NCBI NO: 14150169 NR Description: hypothetical protein MGC2404 [Homo sapiens]
  misc_feature (31)..(97): Homolog of NCBI NO: 12039034 NR Description: acyl-CoA binding protein 2 [Arabidopsis thaliana]
  misc_feature (90)..(271): Homolog of NCBI NO: 12039034 NR Description: acyl-CoA binding protein 2 [Arabidopsis thaliana]
  misc_feature (32)..(345): Homolog of NCBI NO: 21593070 NR Description: putative acyl-CoA binding protein [Arabidopsis
  misc_feature (32)..(345): Homolog of NCBI NO: 21284389 NR Description: acyl-CoA binding protein [Arabidopsis thaliana]
  misc_feature (32)..(345): Homolog of NCBI NO: 15238757 NR Description: acyl-CoA binding protein (ACBP) [Arabidopsis
  misc_feature (31)..(97): Homolog of NCBI NO: 15234270 NR Description: acyl-CoA binding protein -related [Arabidopsis
  misc_feature (90)..(345): Homolog of NCBI NO: 15234270 NR Description: acyl-CoA binding protein -related [Arabidopsis
  misc_feature (29)..(348): Homolog of NCBI NO: 32488636 NR Description: OSJNBa0032F06.12 [Oryza sativa (japonica
PNPRRARLSPLVLSPRPAASEIRASPAAMGGDWQELAQSAVIGLIFAFLVAKLISVVLAFKEDNLRITRSAPAPAPSPDATAPALDGGTSGGDGDSDGDWEGVESTELDEDFSAASAFVAASAAGVPEEAQLRLYGLYKIATEGPCTAPQPSALKLKARAKWNAWNKLGAMPTEEAMEEYITIVDEIFPNWADGSKKKDGETTMSASGSKGPMGPVFSSLMYEEDQGNESELGDIHVSAREGAIEDVKKHLAAGVQINLRDSEERTPLHWAVDRGHLDAVEVLVNSNADVNAQDNEGQTALHYAVLCEREDIAELLVKHHADLQIKDGDGNTARDLCSSAWPFMKPAN

SEQ ID NO: 64391 - protein, 320 aa, Triticum aestivum
  peptide (1)..(320): Ceres Seq. ID no. 14303315
  misc_feature (80)..(161): Pfam Name: Acyl CoA binding protein Pfam Description: Acyl CoA binding protein
  misc_feature (60)..(302): Homolog of NCBI NO: 34880749 NR Description: similar to RIKEN cDNA 2610100E10 [Rattus
  misc_feature (60)..(302): Homolog of NCBI NO: 14150169 NR Description: hypothetical protein MGC2404 [Homo sapiens]
  misc_feature (3)..(69): Homolog of NCBI NO: 12039034 NR Description: acyl-CoA binding protein 2 [Arabidopsis thaliana]
  misc_feature (62)..(243): Homolog of NCBI NO: 12039034 NR Description: acyl-CoA binding protein 2 [Arabidopsis thaliana]
  misc_feature (4)..(317): Homolog of NCBI NO: 21593070 NR Description: putative acyl-CoA binding protein [Arabidopsis
  misc_feature (4)..(317): Homolog of NCBI NO: 21284389 NR Description: acyl-CoA binding protein [Arabidopsis thaliana]
  misc_feature (4)..(317): Homolog of NCBI NO: 15238757 NR Description: acyl-CoA binding protein (ACBP) [Arabidopsis
  misc_feature (3)..(69): Homolog of NCBI NO: 15234270 NR Description: acyl-CoA binding protein -related [Arabidopsis
  misc_feature (62)..(317): Homolog of NCBI NO: 15234270 NR Description: acyl-CoA binding protein -related [Arabidopsis
  misc_feature (1)..(320): Homolog of NCBI NO: 32488636 NR Description: OSJNBa0032F06.12 [Oryza sativa (japonica
MGGDWQELAQSAVIGLIFAFLVAKLISVVLAFKEDNLRITRSAPAPAPSPDATAPALDGGTSGGDGDSDGDWEGVESTELDEDFSAASAFVAASAAGVPEEAQLRLYGLYKIATEGPCTAPQPSALKLKARAKWNAWNKLGAMPTEEAMEEYITIVDEIFPNWADGSKKKDGETTMSASGSKGPMGPVFSSLMYEEDQGNESELGDIHVSAREGAIEDVKKHLAAGVQINLRDSEERTPLHWAVDRGHLDAVEVLVNSNADVNAQDNEGQTALHYAVLCEREDIAELLVKHHADLQIKDGDGNTARDLCSSAWPFMKPAN

SEQ ID NO: 64392 - protein, 180 aa, Triticum aestivum
  peptide (1)..(180): Ceres Seq. ID no. 14303316
  misc_feature (37)..(160): Pfam Name: Formin Homology 2 Domain Pfam Description: Formin Homology 2 Domain
  misc_feature (23)..(161): Homolog of NCBI NO: 7949115 NR Description: Ser/Arg-related nuclear matrix protein
  misc_feature (23)..(160): Homolog of NCBI NO: 81286 NR Description: extensin - Volvox carteri (fragment)
  misc_feature (37)..(160): Homolog of NCBI NO: 6523547 NR Description: hydroxyproline-rich glycoprotein DZ-HRGP
  misc_feature (37)..(161): Homolog of NCBI NO: 1076211 NR Description: hypothetical protein VSP-3 - Chlamydomonas
  misc_feature (23)..(161): Homolog of NCBI NO: 1076211 NR Description: hypothetical protein VSP-3 - Chlamydomonas
  misc_feature (21)..(162): Homolog of NCBI NO: 25989119 NR Description: unknown [Streptomyces aureofaciens]
  misc_feature (23)..(160): Homolog of NCBI NO: 29826652 NR Description: hypothetical protein [Streptomyces avermitilis
  misc_feature (57)..(165): Homolog of NCBI NO: 27461955 NR Description: tankyrase 1 [Gallus gallus]
  misc_feature (66)..(162): Homolog of NCBI NO: 4507613 NR Description: tankyrase, TRF1-interacting ankyrin-related
  misc_feature (38)..(163): Homolog of NCBI NO: 32420163 NR Description: predicted protein [Neurospora crassa]
QTLVALVSPLSCSHPGQRHLRFAPRRRPWAATGRSWPSRRSSASSSPSSSPSSSPSSSPSRRTTSASPAPPPPPPPRPTPLPPRSTAARAAATATATATGRAWRARSSTRTSAPPPPSSRPPPPASPRRRSSASTASTRSPPRAPAPRRSPPPSSSRPAPSGMLGINWVLCQQKKLWRST

SEQ ID NO: 64393 - DNA, 1154 bp, Triticum aestivum
  misc_feature (1)..(1154): Ceres Seq. ID no. 13656209
atcttccttcccccacttgttccccgaaaagcttctcgtccgctcctctcgcaccgccggagggaggcgcctcgccgtctcctcgccgccgctcgtcgagggtggttcctggcgagcgactgaagcccagccagcatggcggccaacgtgggggagtccacgagcggcagcggcagcagcgtggctggcgacggcgggggcagcttcgagtgcaacatatgcttcgagctgccgcaggagcccatcgtcacgctctgcggccacctcttctgctggccctgcctctacaagtggctgcacatccactcgcactcgcccgagtgccccgtctgcaaggccgtcgtcgaggaggacaagctcgtcccgctctacggccgcggcaaggaccgcgtcgaccccaggtccaagggcgtgccggccggggccgagatccccaaccggccgaccgggcagcggcctgccacggccccgcaggcagatcccaacaaccacttccctaatgcgaaccctaacccctggttcatggggggagggggcgtccctctggccaacgcgcggtgggggaactacaccttctcggccgcgttcggcggcctgttcccgctgctgagcttccaggtgcatggattcccggacgcggccgcgtacgggcagcctgccgggtttccctatgggtacggccatggccatggccacgggcatgctttccatggcgggcacgcccacgccgccgccccccggcacgcgccgcccgggcagcagcagcagcagcagcaggcggacgtgtacctcaaggcgctgctcatcctggttggctttctcgtgatcgcaagcctcatcacattctaggttcgtcggttcccaccattgtcatttgtcaccgtcataataagagaaacaacgattgtcgtgatacttctcagatgttgtgtgcattaccttggcccccccatacaaagccccggtctaaatccgagtggtgcgttttgagcgaaagtgttcatagaactcctgtatatatgtgctatttagacgcggtcctgtgggggggcgcatgtgtaccgtagtagtttcgcgctgattcgcggatgatttgggaaacctctgtttggagtggatgtaccagaccaattatatatcatgtgtaattttgt

SEQ ID NO: 64394 - protein, 237 aa, Triticum aestivum
  peptide (1)..(237): Ceres Seq. ID no. 15219813
  misc_feature (26)..(66): Pfam Name: Zinc finger, C3HC4 type (RING finger) Pfam Description: Zinc finger, C3HC4 type (RING finger)
  misc_feature (1)..(108): Homolog of NCBI NO: 31542783 NR Description: hypothetical protein FLJ38628 [Homo sapiens]
  misc_feature (12)..(125): Homolog of NCBI NO: 22795037 NR Description: putative RING protein [Populus x canescens]
  misc_feature (6)..(164): Homolog of NCBI NO: 21912604 NR Description: putative ubiquitin ligase [Taenia solium]
  misc_feature (1)..(235): Homolog of NCBI NO: 17554742 NR Description: Ring finger protein RNF-5 (24.9 kD) (rnf-5)
  misc_feature (19)..(119): Homolog of NCBI NO: 15222064 NR Description: zinc finger (C3HC4-type RING finger) protein
  misc_feature (8)..(235): Homolog of NCBI NO: 21553849 NR Description: putative RING zinc finger protein [Arabidopsis
  misc_feature (8)..(235): Homolog of NCBI NO: 15224062 NR Description: zinc finger (C3HC4-type RING finger) protein
  misc_feature (12)..(234): Homolog of NCBI NO: 18394721 NR Description: zinc finger (C3HC4-type RING finger) protein
  misc_feature (1)..(237): Homolog of NCBI NO: 34909840 NR Description: P0403C05.28 [Oryza sativa (japonica
  misc_feature (1)..(237): Homolog of NCBI NO: 29150403 NR Description: unknown protein [Oryza sativa (japonica
MAANVGESTSGSGSSVAGDGGGSFECNICFELPQEPIVTLCGHLFCWPCLYKWLHIHSHSPECPVCKAVVEEDKLVPLYGRGKDRVDPRSKGVPAGAEIPNRPTGQRPATAPQADPNNHFPNANPNPWFMGGGGVPLANARWGNYTFSAAFGGLFPLLSFQVHGFPDAAAYGQPAGFPYGYGHGHGHGHAFHGGHAHAAAPRHAPPGQQQQQQQADVYLKALLILVGFLVIASLITF

SEQ ID NO: 64395 - protein, 202 aa, Triticum aestivum
  peptide (1)..(202): Ceres Seq. ID no. 15219814
  misc_feature (1)..(202): Pfam Name: Glycoprotein GG/GX Pfam Description: Glycoprotein GG/GX
  misc_feature (63)..(202): Homolog of NCBI NO: 5420387 NR Description: proteophosphoglycan [Leishmania major]
  misc_feature (63)..(202): Homolog of NCBI NO: 5420387 NR Description: proteophosphoglycan [Leishmania major]
  misc_feature (15)..(202): Homolog of NCBI NO: 13592175 NR Description: ppg3 [Leishmania major]
  misc_feature (15)..(202): Homolog of NCBI NO: 13592175 NR Description: ppg3 [Leishmania major]
  misc_feature (27)..(202): Homolog of NCBI NO: 5420387 NR Description: proteophosphoglycan [Leishmania major]
  misc_feature (14)..(202): Homolog of NCBI NO: 15231954 NR Description: hypothetical protein [Arabidopsis thaliana]
  misc_feature (55)..(202): Homolog of NCBI NO: 11359723 NR Description: proteophosphoglycan, membrane-associated
  misc_feature (27)..(202): Homolog of NCBI NO: 11359723 NR Description: proteophosphoglycan, membrane-associated
  misc_feature (15)..(202): Homolog of NCBI NO: 13592175 NR Description: ppg3 [Leishmania major]
  misc_feature (15)..(202): Homolog of NCBI NO: 13592175 NR Description: ppg3 [Leishmania major]
SSFPHLFPEKLLVRSSRTAGGRRLAVSSPPLVEGGSWRATEAQPAWRPTWGSPRAAAAAAWLATAGAASSATYASSCRRSPSSRSAATSSAGPASTSGCTSTRTRPSAPSARPSSRRTSSSRSTAAARTASTPGPRACRPGPRSPTGRPGSGLPRPRRQIPTTTSLMRTLTPGSWGEGASLWPTRGGGTTPSRPRSAACSRC

SEQ ID NO: 64396 - protein, 165 aa, Triticum aestivum
  peptide (1)..(165): Ceres Seq. ID no. 15219815
LPSPTCSPKSFSSAPLAPPEGGASPSPRRRSSRVVPGERLKPSQHGGQRGGVHERQRQQRGWRRRGQLRVQHMLRAAAGAHRHALRPPLLLALPLQVAAHPLALARVPRLQGRRRGGQARPALRPRQGPRRPQVQGRAGRGRDPQPADRAAACHGPAGRSQQPLP

SEQ ID NO: 64397 - DNA, 1092 bp, Triticum aestivum
  misc_feature (1)..(1092): Ceres Seq. ID no. 13584319
ccacccacccccgattcacatccccttcacctcctctcctctcctctcctctgccgacgggatctctccctttctccgatccatgccgggatcctccgccgtgtggccgcacacgcgtgcagccctcctccaccacccgaccgaccaggcccatcccggcggccagcccgggctgctccccgccgcggcatgggggcagggcggcgcggcggccccgagggcgagcatagtggcggcgcgggcggtgcagaccaacaggcagcaggcgcgtgggaggagcagtgctgccgaagccggcgctaggaacaagctgaggaagccgccggctggaggagctggaggtgcagcggggatccacggctccgcgccctgtccccagtcagtcccctccaaatctcgccgcagccgccacagtggtttagcatggtggtgcgaaagtgttgcggcttggtttgtgagctacagaccttatcaagcagcaaagtcatctcacatatgccgacgacgaagatccatatttattggctgagggagcaacaacacaattctgatgattctgccaatatttacttgcaaggaccagagggtatgctgatgctgcgcaggcacttgagctatttacagaaggagaggacccgaccttcttcatgtcttgtggctgtgtcttcctttgattcattcgtgcaacaaagaggggacctggccttcttcatgtctcgtgcaaaaagggtgattgacactgactacgacagcctggtgggcgtcgtgctcttcaaccacttagaggtggacttcgacgtgaagcccagcgaccgcgccgcacggatgatcgtccatgtgatcacgatgccggatgtcgccgaggtggaggacctcgacgccatcttttggcgtgagggaggattcgggtcctccggcgtctgaactccgagccttggtagatacatgtagagaaataatctgtttaggctggtggtggaacactagggaaggtagccaccttcggttgtgtgtgtttaatttattttgcactggacgtgtccctgatttctatctatgaataatgcacgtaatttttattttttttaattt

SEQ ID NO: 64398 - protein, 175 aa, Triticum aestivum
  peptide (1)..(175): Ceres Seq. ID no. 13584320
HPPPIHIPFTSSPLLSSADGISPFLRSMPGSSAVWPHTRAALLHHPTDQAHPGGQPGLLPAAAWGQGGAAAPRASIVAARAVQTNRQQARGRSSAAEAGARNKLRKPPAGGAGGAAGIHGSAPCPQSVPSKSRRSRHSGLAWWCESVAAWFVSYRPYQAAKSSHICRRRRSIFIG

SEQ ID NO: 64399 - protein, 166 aa, Triticum aestivum
  peptide (1)..(166): Ceres Seq. ID no. 13584321
  misc_feature (103)..(165): Pfam Name: dUTPase Pfam Description: dUTPase
  misc_feature (87)..(165): Homolog of NCBI NO: 8347092 NR Description: dUTPase [Mus musculus]
  misc_feature (87)..(165): Homolog of NCBI NO: 3046554 NR Description: dUTPase homolog [orf virus strain D1701]
  misc_feature (87)..(166): Homolog of NCBI NO: 38047903 NR Description: similar to Drosophila melanogaster BcDNA:LD08534
  misc_feature (87)..(166): Homolog of NCBI NO: 24583610 NR Description: CG4584-PB [Drosophila melanogaster]
  misc_feature (87)..(166): Homolog of NCBI NO: 19921126 NR Description: CG4584-PA [Drosophila melanogaster]
  misc_feature (96)..(166): Homolog of NCBI NO: 38566986 NR Description: probable dUTP pyrophosphatase [Neurospora crassa]
  misc_feature (75)..(165): Homolog of NCBI NO: 1169437 NR Description: Deoxyuridine 5'-triphosphate nucleotidohydrolase
  misc_feature (103)..(166): Homolog of NCBI NO: 15232681 NR Description: dUTP pyrophosphatase-related protein [Arabidopsis
  misc_feature (103)..(166): Homolog of NCBI NO: 416922 NR Description: Deoxyuridine 5'-triphosphate nucleotidohydrolase
  misc_feature (103)..(166): Homolog of NCBI NO: 31126720 NR Description: putative deoxyuridine triphosphatase
MVVRKCCGLVCELQTLSSSKVISHMPTTKIHIYWLREQQHNSDDSANIYLQGPEGMLMLRRHLSYLQKERTRPSSCLVAVSSFDSFVQQRGDLAFFMSRAKRVIDTDYDSLVGVVLFNHLEVDFDVKPSDRAARMIVHVITMPDVAEVEDLDAIFWREGGFGSSGV

SEQ ID NO: 64400 - protein, 148 aa, Triticum aestivum
  peptide (1)..(148): Ceres Seq. ID no. 13584322
MPGSSAVWPHTRAALLHHPTDQAHPGGQPGLLPAAAWGQGGAAAPRASIVAARAVQTNRQQARGRSSAAEAGARNKLRKPPAGGAGGAAGIHGSAPCPQSVPSKSRRSRHSGLAWWCESVAAWFVSYRPYQAAKSSHICRRRRSIFIG

SEQ ID NO: 64401 - DNA, 1114 bp, Triticum aestivum
  misc_feature (1)..(1114): Ceres Seq. ID no. 12626033
acattagtccagttcgtcggttggtggtggtggcgtgcgtgcctgggcgactctgcctcaaaccctcatcaggtccctcgatcgccgcgctcgagttggttatatagaactgaagggaggtaaggtgagtataagcatcagagggagtacatagcatgagtaataccagcggcgcacggcgtgccgcaaggaggcaatcgctggatggatctgctgataaagttgttgtggacttggatgcaagctcgccggtggcggggaaccatcatgggctctcggtcttccctggtgcacgcacatcgcctattgatgtggaagctctcgatgatgaagtgcaggccctatcgccttcacaagtgcctcccccgggggtgaaccggagaactagagggcaacctgtgacacaattttctctggatgaagatgctgtcctggaagagaattggagaattataaggcaatgtgcgacaccattttatcttgatgaagatgctgccatggaagagaatcggagaactagaagtcaatttttgacaccactttatctggatgaagatgctgccctggaagataatgcagctatgccttctcataacacgtggaacaaacgccaaagggttgcgcctttgatatgtctctccccagaaagggaagaagggtccagcctgcagtcgaacaatgcggtgcaaattagccaagagcctgctaaggtggtggttccaaaggaaccgaatttcacttgcccggtgtgccttaacaagctggtggagccttcgacaacaaaatgtggccatatcttctgcgcagagtgcatcaagcaagccatccagtttcagaagaaatgccctacttgccgcaaggccctgaggaagaacaacttccatcgtatttaccttccgaactcggatggttaaggtcagcatcggatcaatcgccaaagagtatcatcacatagattatggttgctgaggaacctgtagcaggtgctcagatgaacaattgattaagttgactgctgtacgtatcattagatggttggtctatgatgtaactgagattaagcttgaagctgagataaaacagtggatagcatcttcagtattggtgtgttctt

SEQ ID NO: 64402 - protein, 252 aa, Triticum aestivum
  peptide (1)..(252): Ceres Seq. ID no. 12626034
  misc_feature (200)..(233): Pfam Name: Zinc finger, C3HC4 type (RING finger) Pfam Description: Zinc finger, C3HC4 type (RING finger)
  misc_feature (107)..(247): Homolog of NCBI NO: 20129579 NR Description: CG15150-PA [Drosophila melanogaster]
  misc_feature (190)..(247): Homolog of NCBI NO: 21357313 NR Description: CG10981-PA [Drosophila melanogaster]
  misc_feature (190)..(247): Homolog of NCBI NO: 24644441 NR Description: CG10981-PB [Drosophila melanogaster]
  misc_feature (200)..(251): Homolog of NCBI NO: 19386727 NR Description: P0678F11.16 [Oryza sativa (japonica
  misc_feature (169)..(250): Homolog of NCBI NO: 26451887 NR Description: putative RING finger protein [Arabidopsis
  misc_feature (169)..(250): Homolog of NCBI NO: 15231414 NR Description: putative RING zinc finger protein; protein id:
  misc_feature (77)..(250): Homolog of NCBI NO: 21954077 NR Description: unknown protein [Arabidopsis thaliana]
  misc_feature (77)..(250): Homolog of NCBI NO: 18422940 NR Description: Expressed protein
  misc_feature (47)..(250): Homolog of NCBI NO: 21537318 NR Description: unknown [Arabidopsis thaliana]
MSNTSGARRAARRQSLDGSADKVVVDLDASSPVAGNHHGLSVFPGARTSPIDVEALDDEVQALSPSQVPPPGVNRRTRGQPVTQFSLDEDAVLEENWRIIRQCATPFYLDEDAAMEENRRTRSQFLTPLYLDEDAALEDNAAMPSHNTWNKRQRVAPLICLSPEREEGSSLQSNNAVQISQEPAKVVVPKEPNFTCPVCLNKLVEPSTTKCGHIFCAECIKQAIQFQKKCPTCRKALRKNNFHRIYLPNSDG

SEQ ID NO: 64403 - protein, 138 aa, Triticum aestivum
  peptide (1)..(138): Ceres Seq. ID no. 12626035
  misc_feature (86)..(119): Pfam Name: Zinc finger, C3HC4 type (RING finger) Pfam Description: Zinc finger, C3HC4 type (RING finger)
  misc_feature (1)..(133): Homolog of NCBI NO: 20129579 NR Description: CG15150-PA [Drosophila melanogaster]
  misc_feature (76)..(133): Homolog of NCBI NO: 21357313 NR Description: CG10981-PA [Drosophila melanogaster]
  misc_feature (76)..(133): Homolog of NCBI NO: 24644441 NR Description: CG10981-PB [Drosophila melanogaster]
  misc_feature (86)..(137): Homolog of NCBI NO: 19386727 NR Description: P0678F11.16 [Oryza sativa (japonica
  misc_feature (55)..(136): Homolog of NCBI NO: 26451887 NR Description: putative RING finger protein [Arabidopsis
  misc_feature (55)..(136): Homolog of NCBI NO: 15231414 NR Description: putative RING zinc finger protein; protein id:
  misc_feature (1)..(136): Homolog of NCBI NO: 21954077 NR Description: unknown protein [Arabidopsis thaliana]
  misc_feature (1)..(136): Homolog of NCBI NO: 18422940 NR Description: Expressed protein
  misc_feature (1)..(136): Homolog of NCBI NO: 21537318 NR Description: unknown [Arabidopsis thaliana]
MEENRRTRSQFLTPLYLDEDAALEDNAAMPSHNTWNKRQRVAPLICLSPEREEGSSLQSNNAVQISQEPAKVVVPKEPNFTCPVCLNKLVEPSTTKCGHIFCAECIKQAIQFQKKCPTCRKALRKNNFHRIYLPNSDG

SEQ ID NO: 64404 - DNA, 830 bp, Triticum aestivum
  misc_feature (1)..(830): Ceres Seq. ID no. 13597908
agaaaaccgtgggccgaaattgaaaccctgcggctgcaatggaggcggcggcggcggctgctgcggccgtgggcggggaggacgacgggcggggtcggaagggaagctggtacgcggtgggggagcgtgcggtgctggtgccgtacctgcgggagcacgtcccgcggtaccacgagtggatgcaggacccggcgctgctggaggccaccgcgtcggagccgctctccctcgcccaggagttcgaggtccaccgctcctggaccctcgaccctctcaaacatactttcatagtgctggataaggagttgatcgagggagacttcgtggtcgggaaccctcacacggaagctatgattggcgatgtcaacatctatatgaatgaccctgatgatttggaacttgcagagatagagattatgatagctgaacaaaagagccgtggaaagggactaggtcaagaagtgaccttaatgatgatgtcgtttgcagtagagaaatacggaattcacactttcagagcaaaaattagtgactcaaatactgcatcgttaaagctcttcaggaaattgggcttcaaggatgcttcccatagtgcagtttttaaggaggtgacactggaggcgcctgcagctgaactcccattaagctcccctttgaccataggaagttggtgacatctgtgattatatgccccaagatgtgttgcagtagacatgcaatcagtggctggtcttcaccaactgatagaagctaattgtgtgcgctatttggcatacttaatgtaatgagtactgccttcatctgccaacaactgcttgggccgattgctc

SEQ ID NO: 64405 - protein, 211 aa, Triticum aestivum
  peptide (1)..(211): Ceres Seq. ID no. 13597909
  misc_feature (97)..(180): Pfam Name: Acetyltransferase (GNAT) family Pfam Description: Acetyltransferase (GNAT) family
  misc_feature (27)..(194): Homolog of NCBI NO: 28829592 NR Description: similar to Mus musculus (Mouse). 1110028N05Rik
  misc_feature (27)..(196): Homolog of NCBI NO: 24651688 NR Description: CG11539-PA [Drosophila melanogaster]
  misc_feature (27)..(199): Homolog of NCBI NO: 34875069 NR Description: similar to RIKEN cDNA 1110028N05 [Rattus
  misc_feature (27)..(200): Homolog of NCBI NO: 39584036 NR Description: Hypothetical protein CBG11716 [Caenorhabditis
  misc_feature (27)..(199): Homolog of NCBI NO: 13384782 NR Description: RIKEN cDNA 1110028N05 [Mus musculus]
  misc_feature (27)..(199): Homolog of NCBI NO: 13278945 NR Description: DKFZP564C103 protein [Homo sapiens]
  misc_feature (28)..(200): Homolog of NCBI NO: 21554294 NR Description: unknown [Arabidopsis thaliana]
  misc_feature (28)..(200): Homolog of NCBI NO: 18395874 NR Description: GCN5-related N-acetyltransferase (GNAT) family
  misc_feature (191)..(211): Homolog of NCBI NO: 24414273 NR Description: Unknown protein [Oryza sativa (japonica
  misc_feature (1)..(190): Homolog of NCBI NO: 24414273 NR Description: Unknown protein [Oryza sativa (japonica
MEAAAAAAAAVGGEDDGRGRKGSWYAVGERAVLVPYLREHVPRYHEWMQDPALLEATASEPLSLAQEFEVHRSWTLDPLKHTFIVLDKELIEGDFVVGNPHTEAMIGDVNIYMNDPDDLELAEIEIMIAEQKSRGKGLGQEVTLMMMSFAVEKYGIHTFRAKISDSNTASLKLFRKLGFKDASHSAVFKEVTLEAPAAELPLSSPLTIGSW

SEQ ID NO: 64406 - protein, 164 aa, Triticum aestivum
  peptide (1)..(164): Ceres Seq. ID no. 13597910
  misc_feature (50)..(133): Pfam Name: Acetyltransferase (GNAT) family Pfam Description: Acetyltransferase (GNAT) family
  misc_feature (1)..(147): Homolog of NCBI NO: 28829592 NR Description: similar to Mus musculus (Mouse). 1110028N05Rik
  misc_feature (1)..(149): Homolog of NCBI NO: 24651688 NR Description: CG11539-PA [Drosophila melanogaster]
  misc_feature (1)..(152): Homolog of NCBI NO: 34875069 NR Description: similar to RIKEN cDNA 1110028N05 [Rattus
  misc_feature (1)..(153): Homolog of NCBI NO: 39584036 NR Description: Hypothetical protein CBG11716 [Caenorhabditis
  misc_feature (1)..(152): Homolog of NCBI NO: 13384782 NR Description: RIKEN cDNA 1110028N05 [Mus musculus]
  misc_feature (1)..(152): Homolog of NCBI NO: 13278945 NR Description: DKFZP564C103 protein [Homo sapiens]
  misc_feature (1)..(153): Homolog of NCBI NO: 21554294 NR Description: unknown [Arabidopsis thaliana]
  misc_feature (1)..(153): Homolog of NCBI NO: 18395874 NR Description: GCN5-related N-acetyltransferase (GNAT) family
  misc_feature (144)..(164): Homolog of NCBI NO: 24414273 NR Description: Unknown protein [Oryza sativa (japonica
  misc_feature (1)..(143): Homolog of NCBI NO: 24414273 NR Description: Unknown protein [Oryza sativa (japonica
MQDPALLEATASEPLSLAQEFEVHRSWTLDPLKHTFIVLDKELIEGDFVVGNPHTEAMIGDVNIYMNDPDDLELAEIEIMIAEQKSRGKGLGQEVTLMMMSFAVEKYGIHTFRAKISDSNTASLKLFRKLGFKDASHSAVFKEVTLEAPAAELPLSSPLTIGSW

SEQ ID NO: 64407 - protein, 107 aa, Triticum aestivum
  peptide (1)..(107): Ceres Seq. ID no. 13597911
  misc_feature (1)..(76): Pfam Name: Acetyltransferase (GNAT) family Pfam Description: Acetyltransferase (GNAT) family
  misc_feature (1)..(90): Homolog of NCBI NO: 28829592 NR Description: similar to Mus musculus (Mouse). 1110028N05Rik
  misc_feature (1)..(92): Homolog of NCBI NO: 24651688 NR Description: CG11539-PA [Drosophila melanogaster]
  misc_feature (1)..(95): Homolog of NCBI NO: 34875069 NR Description: similar to RIKEN cDNA 1110028N05 [Rattus
  misc_feature (1)..(96): Homolog of NCBI NO: 39584036 NR Description: Hypothetical protein CBG11716 [Caenorhabditis
  misc_feature (1)..(95): Homolog of NCBI NO: 13384782 NR Description: RIKEN cDNA 1110028N05 [Mus musculus]
  misc_feature (1)..(95): Homolog of NCBI NO: 13278945 NR Description: DKFZP564C103 protein [Homo sapiens]
  misc_feature (1)..(96): Homolog of NCBI NO: 21554294 NR Description: unknown [Arabidopsis thaliana]
  misc_feature (1)..(96): Homolog of NCBI NO: 18395874 NR Description: GCN5-related N-acetyltransferase (GNAT) family
  misc_feature (87)..(107): Homolog of NCBI NO: 24414273 NR Description: Unknown protein [Oryza sativa (japonica
  misc_feature (1)..(86): Homolog of NCBI NO: 24414273 NR Description: Unknown protein [Oryza sativa (japonica
MIGDVNIYMNDPDDLELAEIEIMIAEQKSRGKGLGQEVTLMMMSFAVEKYGIHTFRAKISDSNTASLKLFRKLGFKDASHSAVFKEVTLEAPAAELPLSSPLTIGSW

SEQ ID NO: 64408 - DNA, 739 bp, Triticum aestivum
  misc_feature (1)..(739): Ceres Seq. ID no. 15173160
aagcaaccctgcgccattacaagactcacagattacatcatttgcaccggctgtactagcttgatcatcacaatatgtcctccaccaacagctggacccacgagatcgagtcggcggtcaccgcaccgcgcctcttccgcgctggcgtcatggactggcacaccctggctcccaagctcgcgccgcaaattgttgccagtgcccaccccgttgagggagaaggcggtatcggcagcgtcaggcagttcaacttcacctcagccatgcccttcaacctcatgaaggagaggctcgagttcattgacgcagataagtgcgagtgcaagtcgactcttatcgagggcggtggcatcggcatggcgatcgagacagccacttcgcacatcaaggtggagccggcagcaaacggtgggagcatagtgaaggtggaatcgacatacaagctgcttccaggcgtggaggtgaatgatgagattaccaaggccaaggattccgtcacggccatcttcaaggccgccgaggcctacctcatcgccaacccagacgcctacaactaaatcagttgagggatcaaatacgattatgttctccctggtttgatttttgtgtggtttcttcctgaataataaggctgctctaatctccaagtagtgatgcgagaacactaattaagtagagtgtggacctgagaagtttaaaatgtgtatttgtaactatcaaatggagctgttgtttgatg

SEQ ID NO: 64409 - protein, 160 aa, Triticum aestivum
  peptide (1)..(160): Ceres Seq. ID no. 15173161
  misc_feature (2)..(155): Pfam Name: Pathogenesis-related protein Bet v I family Pfam Description: Pathogenesis-related protein Bet v I family
  misc_feature (10)..(159): Homolog of NCBI NO: 6649902 NR Description: intracellular pathogenesis-related protein PR-105
  misc_feature (3)..(159): Homolog of NCBI NO: 4210628 NR Description: intracellular pathogenesis-related protein,
  misc_feature (3)..(159): Homolog of NCBI NO: 548591 NR Description: Pathogenesis-related protein 1 (AOPR1)
  misc_feature (3)..(159): Homolog of NCBI NO: 4210622 NR Description: intracellular pathogenesis-related protein
  misc_feature (3)..(159): Homolog of NCBI NO: 4210624 NR Description: intracellular pathogenesis-related protein,
  misc_feature (3)..(159): Homolog of NCBI NO: 4210626 NR Description: intracellular pathogenesis-related protein,
  misc_feature (6)..(159): Homolog of NCBI NO: 939857 NR Description: pathogenesis related protein [Asparagus
  misc_feature (3)..(159): Homolog of NCBI NO: 1572683 NR Description: early flowering protein 1 [Asparagus officinalis]
  misc_feature (1)..(160): Homolog of NCBI NO: 7442203 NR Description: pathogenesis-related protein - sorghum
  misc_feature (1)..(160): Homolog of NCBI NO: 16589076 NR Description: pathogen-related protein [Oryza sativa]
MSSTNSWTHEIESAVTAPRLFRAGVMDWHTLAPKLAPQIVASAHPVEGEGGIGSVRQFNFTSAMPFNLMKERLEFIDADKCECKSTLIEGGGIGMAIETATSHIKVEPAANGGSIVKVESTYKLLPGVEVNDEITKAKDSVTAIFKAAEAYLIANPDAYN

SEQ ID NO: 64410 - protein, 135 aa, Triticum aestivum
  peptide (1)..(135): Ceres Seq. ID no. 15173162
  misc_feature (1)..(130): Pfam Name: Pathogenesis-related protein Bet v I family Pfam Description: Pathogenesis-related protein Bet v I family
  misc_feature (1)..(134): Homolog of NCBI NO: 6649902 NR Description: intracellular pathogenesis-related protein PR-105
  misc_feature (1)..(134): Homolog of NCBI NO: 4210628 NR Description: intracellular pathogenesis-related protein,
  misc_feature (1)..(134): Homolog of NCBI NO: 548591 NR Description: Pathogenesis-related protein 1 (AOPR1)
  misc_feature (1)..(134): Homolog of NCBI NO: 4210622 NR Description: intracellular pathogenesis-related protein
  misc_feature (1)..(134): Homolog of NCBI NO: 4210624 NR Description: intracellular pathogenesis-related protein,
  misc_feature (1)..(134): Homolog of NCBI NO: 4210626 NR Description: intracellular pathogenesis-related protein,
  misc_feature (1)..(134): Homolog of NCBI NO: 939857 NR Description: pathogenesis related protein [Asparagus
  misc_feature (1)..(134): Homolog of NCBI NO: 1572683 NR Description: early flowering protein 1 [Asparagus officinalis]
  misc_feature (1)..(135): Homolog of NCBI NO: 7442203 NR Description: pathogenesis-related protein - sorghum
  misc_feature (1)..(135): Homolog of NCBI NO: 16589076 NR Description: pathogen-related protein [Oryza sativa]
MDWHTLAPKLAPQIVASAHPVEGEGGIGSVRQFNFTSAMPFNLMKERLEFIDADKCECKSTLIEGGGIGMAIETATSHIKVEPAANGGSIVKVESTYKLLPGVEVNDEITKAKDSVTAIFKAAEAYLIANPDAYN

SEQ ID NO: 64411 - protein, 97 aa, Triticum aestivum
  peptide (1)..(97): Ceres Seq. ID no. 15173163
  misc_feature (1)..(92): Pfam Name: Pathogenesis-related protein Bet v I family Pfam Description: Pathogenesis-related protein Bet v I family
  misc_feature (1)..(96): Homolog of NCBI NO: 6649902 NR Description: intracellular pathogenesis-related protein PR-105
  misc_feature (1)..(96): Homolog of NCBI NO: 4210628 NR Description: intracellular pathogenesis-related protein,
  misc_feature (1)..(96): Homolog of NCBI NO: 548591 NR Description: Pathogenesis-related protein 1 (AOPR1)
  misc_feature (1)..(96): Homolog of NCBI NO: 4210622 NR Description: intracellular pathogenesis-related protein
  misc_feature (1)..(96): Homolog of NCBI NO: 4210624 NR Description: intracellular pathogenesis-related protein,
  misc_feature (1)..(96): Homolog of NCBI NO: 4210626 NR Description: intracellular pathogenesis-related protein,
  misc_feature (1)..(96): Homolog of NCBI NO: 939857 NR Description: pathogenesis related protein [Asparagus
  misc_feature (1)..(96): Homolog of NCBI NO: 1572683 NR Description: early flowering protein 1 [Asparagus officinalis]
  misc_feature (1)..(97): Homolog of NCBI NO: 7442203 NR Description: pathogenesis-related protein - sorghum
  misc_feature (1)..(97): Homolog of NCBI NO: 16589076 NR Description: pathogen-related protein [Oryza sativa]
MPFNLMKERLEFIDADKCECKSTLIEGGGIGMAIETATSHIKVEPAANGGSIVKVESTYKLLPGVEVNDEITKAKDSVTAIFKAAEAYLIANPDAYN

SEQ ID NO: 64412 - DNA, 681 bp, Triticum aestivum
  misc_feature (1)..(681): Ceres Seq. ID no. 13591179
atcccgmacgcgcacggccgcagcctttcactcccaacccttgtctccaatggcggccacggccgcggcggcgacgctggcggcggccacctcctccctcctccggcgctcctccttgctgcggccgcacgggctccgggtctcccgcgacttcgctccccgaagatttgtgcgccacattgcttcatcaacaaatgaagaggctgctgccagaacagcggcagcaactgctgatactggaggaccgaccatttttgacaagatcatagcaaaggaaatcccttcaagcattgtctatgaggacgagaaagtcttagcatttagagatatcaatccgcaagctcctgtgcatgttctagtcatcccgaaactaagagatgggctaactggacttgataaggctgaaccaaggcatgctgaaattctggggcagctgctttacgctgcgaaggtagtggccgagaaggaaggcgtggcagatggattccgggtcgtcataaacaacggagcagaaggatgtcaatcagtctaccatctgcacgtacatgtacttggtggaaggcagatgaaatggcctcctggttaagtttaagaacagtgtctgccttttttctgcttctgtatgatcgatcatactagactgctattgagtttctactacttgccacctgscttgttatt

SEQ ID NO: 64413 - protein, 194 aa, Triticum aestivum
  peptide (1)..(194): Ceres Seq. ID no. 15221031
  misc_feature (65)..(194): Homolog of NCBI NO: 23612841 NR Description: protein kinase c inhibitor-like protein, putative
  misc_feature (87)..(194): Homolog of NCBI NO: 23480654 NR Description: putative protein kinase C interacting protein 1
  misc_feature (83)..(194): Homolog of NCBI NO: 1177046 NR Description: 14 KD ZINC-BINDING PROTEIN (PROTEIN KINASE C
  misc_feature (67)..(194): Homolog of NCBI NO: 11260559 NR Description: protein kinase C inhibitor-like protein -
  misc_feature (63)..(194): Homolog of NCBI NO: 1177047 NR Description: 14 KD ZINC-BINDING PROTEIN (PROTEIN KINASE C
  misc_feature (59)..(194): Homolog of NCBI NO: 18410510 NR Description: protein kinase C inhibitor-related protein
  misc_feature (63)..(194): Homolog of NCBI NO: 629858 NR Description: protein kinase C inhibitor - maize
  misc_feature (174)..(194): Homolog of NCBI NO: 25518144 NR Description: F28K20.9 protein - Arabidopsis thaliana
  misc_feature (54)..(175): Homolog of NCBI NO: 25518144 NR Description: F28K20.9 protein - Arabidopsis thaliana
  misc_feature (54)..(194): Homolog of NCBI NO: 15221629 NR Description: protein kinase C inhibitor (Zinc-binding protein)
  misc_feature (2)..(2): Xaa is any aa, unknown or other
SXTRTAAAFHSQPLSPMAATAAAATLAAATSSLLRRSSLLRPHGLRVSRDFAPRRFVRHIASSTNEEAAARTAAATADTGGPTIFDKIIAKEIPSSIVYEDEKVLAFRDINPQAPVHVLVIPKLRDGLTGLDKAEPRHAEILGQLLYAAKVVAEKEGVADGFRVVINNGAEGCQSVYHLHVHVLGGRQMKWPPG

SEQ ID NO: 64414 - protein, 178 aa, Triticum aestivum
  peptide (1)..(178): Ceres Seq. ID no. 15221032
  misc_feature (49)..(178): Homolog of NCBI NO: 23612841 NR Description: protein kinase c inhibitor-like protein, putative
  misc_feature (71)..(178): Homolog of NCBI NO: 23480654 NR Description: putative protein kinase C interacting protein 1
  misc_feature (67)..(178): Homolog of NCBI NO: 1177046 NR Description: 14 KD ZINC-BINDING PROTEIN (PROTEIN KINASE C
  misc_feature (51)..(178): Homolog of NCBI NO: 11260559 NR Description: protein kinase C inhibitor-like protein -
  misc_feature (47)..(178): Homolog of NCBI NO: 1177047 NR Description: 14 KD ZINC-BINDING PROTEIN (PROTEIN KINASE C
  misc_feature (43)..(178): Homolog of NCBI NO: 18410510 NR Description: protein kinase C inhibitor-related protein
  misc_feature (47)..(178): Homolog of NCBI NO: 629858 NR Description: protein kinase C inhibitor - maize
  misc_feature (158)..(178): Homolog of NCBI NO: 25518144 NR Description: F28K20.9 protein - Arabidopsis thaliana
  misc_feature (38)..(159): Homolog of NCBI NO: 25518144 NR Description: F28K20.9 protein - Arabidopsis thaliana
  misc_feature (38)..(178): Homolog of NCBI NO: 15221629 NR Description: protein kinase C inhibitor (Zinc-binding protein)
MAATAAAATLAAATSSLLRRSSLLRPHGLRVSRDFAPRRFVRHIASSTNEEAAARTAAATADTGGPTIFDKIIAKEIPSSIVYEDEKVLAFRDINPQAPVHVLVIPKLRDGLTGLDKAEPRHAEILGQLLYAAKVVAEKEGVADGFRVVINNGAEGCQSVYHLHVHVLGGRQMKWPPG

SEQ ID NO: 64415 - DNA, 1410 bp, Triticum aestivum
  misc_feature (1)..(1410): Ceres Seq. ID no. 13662937
gcttctcgccgcgccctctttccccctcccctcccccgcctcgcccactgccccctcgatccagcgcgggagcaccagatggatcggccggcgccggaccagcggcccacgctcttctcgccgtaccagatgcgccgcttcagcctcgcccaccgggtggtgctggcgccgatgacgaggtgcagggccatcggcgggctgccggggccggcgctggcggagtactacgcgcagcgggtcacccagggaggcctgctcatctccgagggcaccgtcgtctcgccggccgggccggggtttcctcacgtccctggaatatacaatcaggagcagatagatggatggaaaaaggtggtggatgctgttcatgctaagggaggcatctttttctgtcaattatggcacgtaggcagagcttctcaccaagtataccagccggacggtgctgctccaatatcctcaactgataagccgatatcagcaaggtggaagatattgctgcctgatggttcatacggaacgtatcccacgccaagccgccttgcgacatcggaaataccagacatagtcgagcaatatcgccaagctgccataaacgccatcaaagcaggtttcgatggcatcgagatccacggcgctcatggctacatcatcgatcagttcctcaaggatggcatcaacgaccgcaccgacgagtatggcggatcgctcaccaaccgttgcaagtttctactcgaggtgacccgagccgtggtatccgccatcagagcagagcgaactgcggtgagggtgtcaccggccatcgaccaccttgacgcctatgactcgaacccaatgcagctaggcatggccgtcgtcgaacggctcaacgctctccagcaggaagccgggcagctcgcctacctccacgtgacacagccaaggtacgcggcctacgggcagacagagtcgggcccgcatggcagcgccgaggaggagagccggctgatgcgcaccctgcggggcgcgtaccgtggcacgttcatgtgcagcggcggctacacgcgggagctcgggctggaggcggtggagagcggcgacgccgacctggtgtcgttcgggcggctgttcatttcgaacccggacctggtcgagcggctcaggctcaacgccggcctcaacaagtacgtgaggaagacgttctacacccctgaccccgtcgtgggctacaccgactacccgttcctcggcaagcctaaatcgcgcatgtagtgtgtacaaggttagtgatcggagatgggatttattgttaagtgtatttgggggaataaggtcatatacgcgcatgtagtgtacacgaattagtgatcggagaacagagatgggtttgtgaaacgtatttgaagaaaataaagtaatatacgtgactgc

SEQ ID NO: 64416 - protein, 416 aa, Triticum aestivum
  peptide (1)..(416): Ceres Seq. ID no. 13662938
  misc_feature (38)..(387): Pfam Name: NADH:flavin oxidoreductase / NADH oxidase family Pfam Description: NADH:flavin oxidoreductase / NADH oxidase family
  misc_feature (27)..(409): Homolog of NCBI NO: 15223138 NR Description: 12-oxophytodienoate reductase (OPR1) [Arabidopsis
  misc_feature (33)..(409): Homolog of NCBI NO: 14277800 NR Description: Chain A, Crystal Structure Of 12-Oxophytodienoate
  misc_feature (38)..(409): Homolog of NCBI NO: 40645459 NR Description: LEDI-5c protein [Lithospermum erythrorhizon]
  misc_feature (19)..(409): Homolog of NCBI NO: 7449901 NR Description: probable 12-oxophytodienoate reductase (EC
  misc_feature (37)..(416): Homolog of NCBI NO: 15225045 NR Description: 12-oxophytodienoate reductase (OPR3)(DDE1)
  misc_feature (37)..(416): Homolog of NCBI NO: 7688991 NR Description: 12-oxo-phytodienoate reductase [Arabidopsis
  misc_feature (37)..(416): Homolog of NCBI NO: 10242314 NR Description: 12-oxo-phytodienoate reductase [Arabidopsis
  misc_feature (37)..(416): Homolog of NCBI NO: 5059115 NR Description: OPDA-reductase homolog [Arabidopsis thaliana]
  misc_feature (37)..(416): Homolog of NCBI NO: 6707797 NR Description: 12-oxo-phytodienoate reductase [Arabidopsis
  misc_feature (27)..(409): Homolog of NCBI NO: 12056507 NR Description: 12-oxophytodienoate reductase 3 [Lycopersicon
ASRRALFPPPLPRLAHCPLDPAREHQMDRPAPDQRPTLFSPYQMRRFSLAHRVVLAPMTRCRAIGGLPGPALAEYYAQRVTQGGLLISEGTVVSPAGPGFPHVPGIYNQEQIDGWKKVVDAVHAKGGIFFCQLWHVGRASHQVYQPDGAAPISSTDKPISARWKILLPDGSYGTYPTPSRLATSEIPDIVEQYRQAAINAIKAGFDGIEIHGAHGYIIDQFLKDGINDRTDEYGGSLTNRCKFLLEVTRAVVSAIRAERTAVRVSPAIDHLDAYDSNPMQLGMAVVERLNALQQEAGQLAYLHVTQPRYAAYGQTESGPHGSAEEESRLMRTLRGAYRGTFMCSGGYTRELGLEAVESGDADLVSFGRLFISNPDLVERLRLNAGLNKYVRKTFYTPDPVVGYTDYPFLGKPKSRM

SEQ ID NO: 64417 - protein, 390 aa, Triticum aestivum
  peptide (1)..(390): Ceres Seq. ID no. 13662939
  misc_feature (12)..(361): Pfam Name: NADH:flavin oxidoreductase / NADH oxidase family Pfam Description: NADH:flavin oxidoreductase / NADH oxidase family
  misc_feature (1)..(383): Homolog of NCBI NO: 15223138 NR Description: 12-oxophytodienoate reductase (OPR1) [Arabidopsis
  misc_feature (7)..(383): Homolog of NCBI NO: 14277800 NR Description: Chain A, Crystal Structure Of 12-Oxophytodienoate
  misc_feature (12)..(383): Homolog of NCBI NO: 40645459 NR Description: LEDI-5c protein [Lithospermum erythrorhizon]
  misc_feature (1)..(383): Homolog of NCBI NO: 7449901 NR Description: probable 12-oxophytodienoate reductase (EC
  misc_feature (11)..(390): Homolog of NCBI NO: 15225045 NR Description: 12-oxophytodienoate reductase (OPR3)(DDE1)
  misc_feature (11)..(390): Homolog of NCBI NO: 7688991 NR Description: 12-oxo-phytodienoate reductase [Arabidopsis
  misc_feature (11)..(390): Homolog of NCBI NO: 10242314 NR Description: 12-oxo-phytodienoate reductase [Arabidopsis
  misc_feature (11)..(390): Homolog of NCBI NO: 5059115 NR Description: OPDA-reductase homolog [Arabidopsis thaliana]
  misc_feature (11)..(390): Homolog of NCBI NO: 6707797 NR Description: 12-oxo-phytodienoate reductase [Arabidopsis
  misc_feature (1)..(383): Homolog of NCBI NO: 12056507 NR Description: 12-oxophytodienoate reductase 3 [Lycopersicon
MDRPAPDQRPTLFSPYQMRRFSLAHRVVLAPMTRCRAIGGLPGPALAEYYAQRVTQGGLLISEGTVVSPAGPGFPHVPGIYNQEQIDGWKKVVDAVHAKGGIFFCQLWHVGRASHQVYQPDGAAPISSTDKPISARWKILLPDGSYGTYPTPSRLATSEIPDIVEQYRQAAINAIKAGFDGIEIHGAHGYIIDQFLKDGINDRTDEYGGSLTNRCKFLLEVTRAVVSAIRAERTAVRVSPAIDHLDAYDSNPMQLGMAVVERLNALQQEAGQLAYLHVTQPRYAAYGQTESGPHGSAEEESRLMRTLRGAYRGTFMCSGGYTRELGLEAVESGDADLVSFGRLFISNPDLVERLRLNAGLNKYVRKTFYTPDPVVGYTDYPFLGKPKSRM

SEQ ID NO: 64418 - protein, 373 aa, Triticum aestivum
  peptide (1)..(373): Ceres Seq. ID no. 13662940
  misc_feature (1)..(344): Pfam Name: NADH:flavin oxidoreductase / NADH oxidase family Pfam Description: NADH:flavin oxidoreductase / NADH oxidase family
  misc_feature (1)..(366): Homolog of NCBI NO: 15223138 NR Description: 12-oxophytodienoate reductase (OPR1) [Arabidopsis
  misc_feature (1)..(366): Homolog of NCBI NO: 14277800 NR Description: Chain A, Crystal Structure Of 12-Oxophytodienoate
  misc_feature (1)..(366): Homolog of NCBI NO: 40645459 NR Description: LEDI-5c protein [Lithospermum erythrorhizon]
  misc_feature (1)..(366): Homolog of NCBI NO: 7449901 NR Description: probable 12-oxophytodienoate reductase (EC
  misc_feature (1)..(373): Homolog of NCBI NO: 15225045 NR Description: 12-oxophytodienoate reductase (OPR3)(DDE1)
  misc_feature (1)..(373): Homolog of NCBI NO: 7688991 NR Description: 12-oxo-phytodienoate reductase [Arabidopsis
  misc_feature (1)..(373): Homolog of NCBI NO: 10242314 NR Description: 12-oxo-phytodienoate reductase [Arabidopsis
  misc_feature (1)..(373): Homolog of NCBI NO: 5059115 NR Description: OPDA-reductase homolog [Arabidopsis thaliana]
  misc_feature (1)..(373): Homolog of NCBI NO: 6707797 NR Description: 12-oxo-phytodienoate reductase [Arabidopsis
  misc_feature (1)..(366): Homolog of NCBI NO: 12056507 NR Description: 12-oxophytodienoate reductase 3 [Lycopersicon
MRRFSLAHRVVLAPMTRCRAIGGLPGPALAEYYAQRVTQGGLLISEGTVVSPAGPGFPHVPGIYNQEQIDGWKKVVDAVHAKGGIFFCQLWHVGRASHQVYQPDGAAPISSTDKPISARWKILLPDGSYGTYPTPSRLATSEIPDIVEQYRQAAINAIKAGFDGIEIHGAHGYIIDQFLKDGINDRTDEYGGSLTNRCKFLLEVTRAVVSAIRAERTAVRVSPAIDHLDAYDSNPMQLGMAVVERLNALQQEAGQLAYLHVTQPRYAAYGQTESGPHGSAEEESRLMRTLRGAYRGTFMCSGGYTRELGLEAVESGDADLVSFGRLFISNPDLVERLRLNAGLNKYVRKTFYTPDPVVGYTDYPFLGKPKSRM

SEQ ID NO: 64419 - DNA, 1542 bp, Triticum aestivum
  misc_feature (1)..(1542): Ceres Seq. ID no. 13662984
gtgtgtcccttcccggaagaattccccaattaaaagatctctctctctctctctctctcgtcacatccacctcactccctcgcttcctgctgccattccgcggccggacatgtcgtcgtcgggggccggcgaggagggcgccgccgcgccgcaggggccgctgcccgtggagcaccgcaagggcgccaacgggctcgacaaggtcgtcctccgcgaggcccggcgcatctccgccgaggtgtacctgtatggtggccatgtaacatcatggaaagatgagcatggggaggagctgcttttcgttagtaataaggctattttcaaacctccaaaagctatacgtggaggtataccaatctgctttcctcagttttccaacttcggacagctggaagctcatggatttgcaaggaacaagatctggagtgttgacactgatccaccaccatttccagtaccaatctctagtagagcttacatcgatttaatccttaaacctactgatgaagacttaaagatctggccacatagttttgagtaccgtctgagggttgcacttggacctggtggagatctgatgctgacttcacgtataaggaatacgaatgcagatggaaagccattctcttttacctttgcatatcacacgtacttctcaatttctgatataagtgagatacgagtagaaggcctggaaactctggattacctagacaacttacaagatagggcccgcttcactgaacaaggcgatgctattgtttttgaatctgagttggacagaatatatctgggcacgccgtcaaaaattgccattattgatcatgagaaaaaaagaacatttgttgtgaggaaaggaggacttccggatgctgttgtttggaacccatgggacaaaaaagctaaggcaatggcagattttggggatgacgaatataaacgcatggtatgtgtggaagcagctgctatagaaaaggcgattactctgaagcctggcgaggagtggactggaaaattggaactatctgcagttccgtctagttattacagtggtcaattggacccagatcgtgttattcaggattcagttgttccggaggattcagtcagctagcccttagtcaagttctgtgcaggtagactattaatatcatatgcacaagggaaatggcagccacgagtgtccaaacatttcttccattctattcaaatctttgttattttcagcgtaccgaccggaacagagcgaaaatctcaacactggtttctgtttcgggatccacatgacataaagggacaaatcagtgtttgtgccctgcatagggatgatcgaagaaacatcttagatgggttgtaaaataaatttataactgtattttctttatcagtttcttttattcccagatgagtaagtttcatagtgtggccaaaaggcgaagacgatgttgaaccacctttcagataaacacacatgatgtgtaaacatgccaaggttttgagttgcatggcttgttggtggttgcggaaccatgcttattttgg

SEQ ID NO: 64420 - protein, 370 aa, Triticum aestivum
  peptide (1)..(370): Ceres Seq. ID no. 13662985
  misc_feature (66)..(342): Pfam Name: Aldose 1-epimerase Pfam Description: Aldose 1-epimerase
  misc_feature (54)..(359): Homolog of NCBI NO: 18417396 NR Description: aldose 1-epimerase family [Arabidopsis thaliana]
  misc_feature (54)..(363): Homolog of NCBI NO: 16612258 NR Description: AT3g01590/F4P13_13 [Arabidopsis thaliana]
  misc_feature (39)..(347): Homolog of NCBI NO: 15236591 NR Description: aldose 1-epimerase family [Arabidopsis thaliana]
  misc_feature (54)..(363): Homolog of NCBI NO: 18395868 NR Description: aldose 1-epimerase family [Arabidopsis thaliana]
  misc_feature (60)..(354): Homolog of NCBI NO: 15233165 NR Description: aldose 1-epimerase family [Arabidopsis thaliana]
  misc_feature (31)..(359): Homolog of NCBI NO: 2501555 NR Description: POSSIBLE APOSPORY-ASSOCIATED PROTEIN C
  misc_feature (26)..(360): Homolog of NCBI NO: 40253263 NR Description: putative Aldose 1-epimerase
  misc_feature (57)..(360): Homolog of NCBI NO: 15242099 NR Description: aldose 1-epimerase family [Arabidopsis thaliana]
  misc_feature (50)..(360): Homolog of NCBI NO: 38344152 NR Description: OSJNBa0041A02.19 [Oryza sativa (japonica
  misc_feature (38)..(370): Homolog of NCBI NO: 19387263 NR Description: putative apospory-associated protein C
CVPSRKNSPIKRSLSLSLSRHIHLTPSLPAAIPRPDMSSSGAGEEGAAAPQGPLPVEHRKGANGLDKVVLREARRISAEVYLYGGHVTSWKDEHGEELLFVSNKAIFKPPKAIRGGIPICFPQFSNFGQLEAHGFARNKIWSVDTDPPPFPVPISSRAYIDLILKPTDEDLKIWPHSFEYRLRVALGPGGDLMLTSRIRNTNADGKPFSFTFAYHTYFSISDISEIRVEGLETLDYLDNLQDRARFTEQGDAIVFESELDRIYLGTPSKIAIIDHEKKRTFVVRKGGLPDAVVWNPWDKKAKAMADFGDDEYKRMVCVEAAAIEKAITLKPGEEWTGKLELSAVPSSYYSGQLDPDRVIQDSVVPEDSVS

SEQ ID NO: 64421 - protein, 334 aa, Triticum aestivum
  peptide (1)..(334): Ceres Seq. ID no. 13662986
  misc_feature (30)..(306): Pfam Name: Aldose 1-epimerase Pfam Description: Aldose 1-epimerase
  misc_feature (18)..(323): Homolog of NCBI NO: 18417396 NR Description: aldose 1-epimerase family [Arabidopsis thaliana]
  misc_feature (18)..(327): Homolog of NCBI NO: 16612258 NR Description: AT3g01590/F4P13_13 [Arabidopsis thaliana]
  misc_feature (3)..(311): Homolog of NCBI NO: 15236591 NR Description: aldose 1-epimerase family [Arabidopsis thaliana]
  misc_feature (18)..(327): Homolog of NCBI NO: 18395868 NR Description: aldose 1-epimerase family [Arabidopsis thaliana]
  misc_feature (24)..(318): Homolog of NCBI NO: 15233165 NR Description: aldose 1-epimerase family [Arabidopsis thaliana]
  misc_feature (1)..(323): Homolog of NCBI NO: 2501555 NR Description: POSSIBLE APOSPORY-ASSOCIATED PROTEIN C
  misc_feature (1)..(324): Homolog of NCBI NO: 40253263 NR Description: putative Aldose 1-epimerase
  misc_feature (21)..(324): Homolog of NCBI NO: 15242099 NR Description: aldose 1-epimerase family [Arabidopsis thaliana]
  misc_feature (14)..(324): Homolog of NCBI NO: 38344152 NR Description: OSJNBa0041A02.19 [Oryza sativa (japonica
  misc_feature (2)..(334): Homolog of NCBI NO: 19387263 NR Description: putative apospory-associated protein C
MSSSGAGEEGAAAPQGPLPVEHRKGANGLDKVVLREARRISAEVYLYGGHVTSWKDEHGEELLFVSNKAIFKPPKAIRGGIPICFPQFSNFGQLEAHGFARNKIWSVDTDPPPFPVPISSRAYIDLILKPTDEDLKIWPHSFEYRLRVALGPGGDLMLTSRIRNTNADGKPFSFTFAYHTYFSISDISEIRVEGLETLDYLDNLQDRARFTEQGDAIVFESELDRIYLGTPSKIAIIDHEKKRTFVVRKGGLPDAVVWNPWDKKAKAMADFGDDEYKRMVCVEAAAIEKAITLKPGEEWTGKLELSAVPSSYYSGQLDPDRVIQDSVVPEDSVS

SEQ ID NO: 64422 - DNA, 1185 bp, Triticum aestivum
  misc_feature (1)..(1185): Ceres Seq. ID no. 13656147
actagagcagaaccacatctcatccatccccaaccccagccccaaaccccccaaagtggaagagaagattgttgcggcggcggatcggagtgagaagaatcaatggcttccgacggcgtggtggccctgtacggcaacaacaaggcggtggtggagccctccgccaagcctgccgccgccaccttctccgtcaaggtgggcctcgcccagatgctgcgcggcggcgtcatcatggacgtggtcaccgccgagcaggcgcgcctcgccgaggaggccggcgcctgcgccgtcatggcgctggagcgcgtgcccgccgacatccgcgcccagggcggcgtggcccgcatgtccgacccggccctcatccgcgacatcaagcgcgccgtcaccatcccggtgatggccaaggcccgcatcgggcacttcgtggaggcccagatcctggaggccatcggcgtggactacgtggacgagagcgaggtcctgaccctcgccgacgacgcccaccacatcaacaagcacaacttccgtgtccccttcgtgtgcggctgccgcgacctgggggaggcgctccgccgcatccgcgagggcgccgccatgatccacaccaagggcgaggccggcaccggtaacgtggtggaggccgtccgccacgtccgctccgtgatgggcgccgtccgcgccctgcgcaacatggacgaggacgaggtcttcagctacgccaagcagatcgccgccccgtacgacctggtgatgcagaccaagcagctgggccgcctcccggtggtgcagttcgccgccggcggcgtggccacccccgcggacgccgccctgatgatgcagctcgggtgcgacggggtgttcgtcggctccggcatcttcaagagcggcgacccggcgcgtcgcgcccgcgccatcgtgcaggccgtgacgcactacagcgacccggagatcctggccaacgtcagcgcggggctcggggaggccatggtggggatcaacctgtccgaccccaacgtggagcgcttcgccgcccgatcccagtagcttcataccttgttgccaagttggtgccatggatcgtcgtcgtaataacttgaatctggctttgcatcatgtgtcgttttgttcctctactctaggtgcatcatcatgtattatccagcagaactatcttgggtgttg

SEQ ID NO: 64423 - protein, 314 aa, Triticum aestivum
  peptide (1)..(314): Ceres Seq. ID no. 13656148
  misc_feature (27)..(233): Pfam Name: SOR/SNZ family Pfam Description: SOR/SNZ family
  misc_feature (20)..(312): Homolog of NCBI NO: 19115894 NR Description: putative stress-induced protein
  misc_feature (26)..(312): Homolog of NCBI NO: 22970419 NR Description: hypothetical protein [Chloroflexus aurantiacus]
  misc_feature (1)..(314): Homolog of NCBI NO: 15224470 NR Description: SOR1 from the fungus Cercospora nicotianae
  misc_feature (1)..(314): Homolog of NCBI NO: 13310484 NR Description: Sor-like protein [Ginkgo biloba]
  misc_feature (1)..(314): Homolog of NCBI NO: 21617922 NR Description: pyridoxine biosynthesis protein-like [Arabidopsis
  misc_feature (1)..(314): Homolog of NCBI NO: 2501578 NR Description: ETHYLENE-INDUCIBLE PROTEIN HEVER
  misc_feature (1)..(314): Homolog of NCBI NO: 15240972 NR Description: pyridoxine biosynthesis protein - like
  misc_feature (1)..(314): Homolog of NCBI NO: 10719739 NR Description: putative pyridoxine biosynthetic enzyme
  misc_feature (1)..(313): Homolog of NCBI NO: 37530308 NR Description: putative pyridoxine/pyridoxal 5-phosphate
  misc_feature (1)..(314): Homolog of NCBI NO: 34394152 NR Description: putative ethylene-inducible protein
MASDGVVALYGNNKAVVEPSAKPAAATFSVKVGLAQMLRGGVIMDVVTAEQARLAEEAGACAVMALERVPADIRAQGGVARMSDPALIRDIKRAVTIPVMAKARIGHFVEAQILEAIGVDYVDESEVLTLADDAHHINKHNFRVPFVCGCRDLGEALRRIREGAAMIHTKGEAGTGNVVEAVRHVRSVMGAVRALRNMDEDEVFSYAKQIAAPYDLVMQTKQLGRLPVVQFAAGGVATPADAALMMQLGCDGVFVGSGIFKSGDPARRARAIVQAVTHYSDPEILANVSAGLGEAMVGINLSDPNVERFAARSQ

SEQ ID NO: 64424 - protein, 278 aa, Triticum aestivum
  peptide (1)..(278): Ceres Seq. ID no. 13656149
  misc_feature (1)..(197): Pfam Name: SOR/SNZ family Pfam Description: SOR/SNZ family
  misc_feature (1)..(276): Homolog of NCBI NO: 19115894 NR Description: putative stress-induced protein
  misc_feature (1)..(276): Homolog of NCBI NO: 22970419 NR Description: hypothetical protein [Chloroflexus aurantiacus]
  misc_feature (1)..(278): Homolog of NCBI NO: 15224470 NR Description: SOR1 from the fungus Cercospora nicotianae
  misc_feature (1)..(278): Homolog of NCBI NO: 13310484 NR Description: Sor-like protein [Ginkgo biloba]
  misc_feature (1)..(278): Homolog of NCBI NO: 21617922 NR Description: pyridoxine biosynthesis protein-like [Arabidopsis
  misc_feature (1)..(278): Homolog of NCBI NO: 2501578 NR Description: ETHYLENE-INDUCIBLE PROTEIN HEVER
  misc_feature (1)..(278): Homolog of NCBI NO: 15240972 NR Description: pyridoxine biosynthesis protein - like
  misc_feature (1)..(278): Homolog of NCBI NO: 10719739 NR Description: putative pyridoxine biosynthetic enzyme
  misc_feature (1)..(277): Homolog of NCBI NO: 37530308 NR Description: putative pyridoxine/pyridoxal 5-phosphate
  misc_feature (1)..(278): Homolog of NCBI NO: 34394152 NR Description: putative ethylene-inducible protein
MLRGGVIMDVVTAEQARLAEEAGACAVMALERVPADIRAQGGVARMSDPALIRDIKRAVTIPVMAKARIGHFVEAQILEAIGVDYVDESEVLTLADDAHHINKHNFRVPFVCGCRDLGEALRRIREGAAMIHTKGEAGTGNVVEAVRHVRSVMGAVRALRNMDEDEVFSYAKQIAAPYDLVMQTKQLGRLPVVQFAAGGVATPADAALMMQLGCDGVFVGSGIFKSGDPARRARAIVQAVTHYSDPEILANVSAGLGEAMVGINLSDPNVERFAARSQ

SEQ ID NO: 64425 - protein, 271 aa, Triticum aestivum
  peptide (1)..(271): Ceres Seq. ID no. 13656150
  misc_feature (1)..(190): Pfam Name: SOR/SNZ family Pfam Description: SOR/SNZ family
  misc_feature (1)..(269): Homolog of NCBI NO: 19115894 NR Description: putative stress-induced protein
  misc_feature (1)..(269): Homolog of NCBI NO: 22970419 NR Description: hypothetical protein [Chloroflexus aurantiacus]
  misc_feature (1)..(271): Homolog of NCBI NO: 15224470 NR Description: SOR1 from the fungus Cercospora nicotianae
  misc_feature (1)..(271): Homolog of NCBI NO: 13310484 NR Description: Sor-like protein [Ginkgo biloba]
  misc_feature (1)..(271): Homolog of NCBI NO: 21617922 NR Description: pyridoxine biosynthesis protein-like [Arabidopsis
  misc_feature (1)..(271): Homolog of NCBI NO: 2501578 NR Description: ETHYLENE-INDUCIBLE PROTEIN HEVER
  misc_feature (1)..(271): Homolog of NCBI NO: 15240972 NR Description: pyridoxine biosynthesis protein - like
  misc_feature (1)..(271): Homolog of NCBI NO: 10719739 NR Description: putative pyridoxine biosynthetic enzyme
  misc_feature (1)..(270): Homolog of NCBI NO: 37530308 NR Description: putative pyridoxine/pyridoxal 5-phosphate
  misc_feature (1)..(271): Homolog of NCBI NO: 34394152 NR Description: putative ethylene-inducible protein
MDVVTAEQARLAEEAGACAVMALERVPADIRAQGGVARMSDPALIRDIKRAVTIPVMAKARIGHFVEAQILEAIGVDYVDESEVLTLADDAHHINKHNFRVPFVCGCRDLGEALRRIREGAAMIHTKGEAGTGNVVEAVRHVRSVMGAVRALRNMDEDEVFSYAKQIAAPYDLVMQTKQLGRLPVVQFAAGGVATPADAALMMQLGCDGVFVGSGIFKSGDPARRARAIVQAVTHYSDPEILANVSAGLGEAMVGINLSDPNVERFAARSQ

SEQ ID NO: 64426 - DNA, 1367 bp, Triticum aestivum
  misc_feature (1)..(1367): Ceres Seq. ID no. 13655881
gctctctcgcatcccgatctcccctgctgctttcttctcctcctcatcccaaaccctagcccccctccgcctcggccaccgcttcgtcgccatggccgccgccgccgcggaggagttcgtgaagggtcgcgtcttccccaacggcgtcgcggtcatcaccctcgaccgccccaaggccctcaacgccatgaacctcgaaatggaccttaggtacaagacatttcttgatgactgggaaacaaatccaaacgtgaagtgcattcttgtggaaagcagttctccgcgtgccttctcagctgggatggatattaagggcgttgcagcggaaattcaaaaggacaagagcacatcacttgtgcaaaaggtcttcacagctgagtactctttgatttgcaagatacatgagtatgcaaaaccttatatatgcttgatggatggtgtgaccatggggtttggaattggattgtctggacatgggcgctaccgcattattacggagagaacactgctggccatgccggaaaatggtattggcttgttcccagatgttggctttgcttacatcggtgcaaaagcgccaggagggggtgcagtcggagcttaccttgggatgacaggaaaaagaatatcttcacctgctgatgctctattcattggtctcggaacccattatgtaccttccggggacttgggttcactcaaggaatccctcctgagtgctaacttcrctgctgatcctcacaaagatgttgagtcactcctgactgggtacaagaaggagcctgagtcggtgccccaattagaaaagcttttaccggatatcgtttcttcttttggtcctgataaatcagctactgaatctgtggaagagctaaagaagcgtactcaaaatggtgatgccacagtgtcagaatgggccaatgatgctttagcaggacttaagaaaggtgctccgttttctctttgtttaacacagaaacatttctctcgagttgcatcatcatatgggaacaatgaaaattatctatctaagttggctggtgttatgaaattggagtaccgtattgccttgagatcgtcggttcgaaatgattttgctgaaggcgtacgcgctgtcttagttgacaaggaccagaatccaaaatggagtccagcaactctggaagaggtaaacatggatgaggtcgaatcagtgtttgaaccattagctgccgatgctgagttgaatgtgtgattttctgtagcagcccagaatgctgtgaccacctgaacaccctttgtccttccgatgatgtaataggaaattactacaaacctacacacggctatccattgagccaataaatttgcctggagtgcatcgtctg

SEQ ID NO: 64427 - protein, 410 aa, Triticum aestivum
  peptide (1)..(410): Ceres Seq. ID no. 15219778
  misc_feature (50)..(226): Pfam Name: Enoyl-CoA hydratase/isomerase family Pfam Description: Enoyl-CoA hydratase/isomerase family
  misc_feature (48)..(303): Homolog of NCBI NO: 15608211 NR Description: echA9 [Mycobacterium tuberculosis H37Rv]
  misc_feature (349)..(385): Homolog of NCBI NO: 23016278 NR Description: hypothetical protein [Magnetospirillum
  misc_feature (52)..(333): Homolog of NCBI NO: 23016278 NR Description: hypothetical protein [Magnetospirillum
  misc_feature (304)..(405): Homolog of NCBI NO: 23013936 NR Description: hypothetical protein [Magnetospirillum
  misc_feature (31)..(326): Homolog of NCBI NO: 23013936 NR Description: hypothetical protein [Magnetospirillum
  misc_feature (303)..(408): Homolog of NCBI NO: 31208011 NR Description: ENSANGP00000024573 [Anopheles gambiae]
  misc_feature (51)..(326): Homolog of NCBI NO: 31208011 NR Description: ENSANGP00000024573 [Anopheles gambiae]
  misc_feature (33)..(410): Homolog of NCBI NO: 15230101 NR Description: 3-hydroxyisobutyryl-coenzyme A hydrolase
  misc_feature (7)..(410): Homolog of NCBI NO: 11994698 NR Description: 3-hydroxyisobutyryl-coenzyme A hydrolase-like
  misc_feature (31)..(407): Homolog of NCBI NO: 15235689 NR Description: 3-hydroxyisobutyryl-coenzyme A hydrolase
  misc_feature (243)..(243): Xaa is any aa, unknown or other
LSRIPISPAAFFSSSSQTLAPLRLGHRFVAMAAAAAEEFVKGRVFPNGVAVITLDRPKALNAMNLEMDLRYKTFLDDWETNPNVKCILVESSSPRAFSAGMDIKGVAAEIQKDKSTSLVQKVFTAEYSLICKIHEYAKPYICLMDGVTMGFGIGLSGHGRYRIITERTLLAMPENGIGLFPDVGFAYIGAKAPGGGAVGAYLGMTGKRISSPADALFIGLGTHYVPSGDLGSLKESLLSANFXADPHKDVESLLTGYKKEPESVPQLEKLLPDIVSSFGPDKSATESVEELKKRTQNGDATVSEWANDALAGLKKGAPFSLCLTQKHFSRVASSYGNNENYLSKLAGVMKLEYRIALRSSVRNDFAEGVRAVLVDKDQNPKWSPATLEEVNMDEVESVFEPLAADAELNV

SEQ ID NO: 64428 - protein, 380 aa, Triticum aestivum
  peptide (1)..(380): Ceres Seq. ID no. 15219779
  misc_feature (20)..(196): Pfam Name: Enoyl-CoA hydratase/isomerase family Pfam Description: Enoyl-CoA hydratase/isomerase family
  misc_feature (18)..(273): Homolog of NCBI NO: 15608211 NR Description: echA9 [Mycobacterium tuberculosis H37Rv]
  misc_feature (319)..(355): Homolog of NCBI NO: 23016278 NR Description: hypothetical protein [Magnetospirillum
  misc_feature (22)..(303): Homolog of NCBI NO: 23016278 NR Description: hypothetical protein [Magnetospirillum
  misc_feature (274)..(375): Homolog of NCBI NO: 23013936 NR Description: hypothetical protein [Magnetospirillum
  misc_feature (1)..(296): Homolog of NCBI NO: 23013936 NR Description: hypothetical protein [Magnetospirillum
  misc_feature (273)..(378): Homolog of NCBI NO: 31208011 NR Description: ENSANGP00000024573 [Anopheles gambiae]
  misc_feature (21)..(296): Homolog of NCBI NO: 31208011 NR Description: ENSANGP00000024573 [Anopheles gambiae]
  misc_feature (3)..(380): Homolog of NCBI NO: 15230101 NR Description: 3-hydroxyisobutyryl-coenzyme A hydrolase
  misc_feature (1)..(380): Homolog of NCBI NO: 11994698 NR Description: 3-hydroxyisobutyryl-coenzyme A hydrolase-like
  misc_feature (1)..(377): Homolog of NCBI NO: 15235689 NR Description: 3-hydroxyisobutyryl-coenzyme A hydrolase
  misc_feature (213)..(213): Xaa is any aa, unknown or other
MAAAAAEEFVKGRVFPNGVAVITLDRPKALNAMNLEMDLRYKTFLDDWETNPNVKCILVESSSPRAFSAGMDIKGVAAEIQKDKSTSLVQKVFTAEYSLICKIHEYAKPYICLMDGVTMGFGIGLSGHGRYRIITERTLLAMPENGIGLFPDVGFAYIGAKAPGGGAVGAYLGMTGKRISSPADALFIGLGTHYVPSGDLGSLKESLLSANFXADPHKDVESLLTGYKKEPESVPQLEKLLPDIVSSFGPDKSATESVEELKKRTQNGDATVSEWANDALAGLKKGAPFSLCLTQKHFSRVASSYGNNENYLSKLAGVMKLEYRIALRSSVRNDFAEGVRAVLVDKDQNPKWSPATLEEVNMDEVESVFEPLAADAELNV

SEQ ID NO: 64429 - protein, 348 aa, Triticum aestivum
  peptide (1)..(348): Ceres Seq. ID no. 15219780
  misc_feature (1)..(164): Pfam Name: Enoyl-CoA hydratase/isomerase family Pfam Description: Enoyl-CoA hydratase/isomerase family
  misc_feature (1)..(241): Homolog of NCBI NO: 15608211 NR Description: echA9 [Mycobacterium tuberculosis H37Rv]
  misc_feature (287)..(323): Homolog of NCBI NO: 23016278 NR Description: hypothetical protein [Magnetospirillum
  misc_feature (1)..(271): Homolog of NCBI NO: 23016278 NR Description: hypothetical protein [Magnetospirillum
  misc_feature (242)..(343): Homolog of NCBI NO: 23013936 NR Description: hypothetical protein [Magnetospirillum
  misc_feature (1)..(264): Homolog of NCBI NO: 23013936 NR Description: hypothetical protein [Magnetospirillum
  misc_feature (241)..(346): Homolog of NCBI NO: 31208011 NR Description: ENSANGP00000024573 [Anopheles gambiae]
  misc_feature (1)..(264): Homolog of NCBI NO: 31208011 NR Description: ENSANGP00000024573 [Anopheles gambiae]
  misc_feature (1)..(348): Homolog of NCBI NO: 15230101 NR Description: 3-hydroxyisobutyryl-coenzyme A hydrolase
  misc_feature (1)..(348): Homolog of NCBI NO: 11994698 NR Description: 3-hydroxyisobutyryl-coenzyme A hydrolase-like
  misc_feature (1)..(345): Homolog of NCBI NO: 15235689 NR Description: 3-hydroxyisobutyryl-coenzyme A hydrolase
  misc_feature (181)..(181): Xaa is any aa, unknown or other
MNLEMDLRYKTFLDDWETNPNVKCILVESSSPRAFSAGMDIKGVAAEIQKDKSTSLVQKVFTAEYSLICKIHEYAKPYICLMDGVTMGFGIGLSGHGRYRIITERTLLAMPENGIGLFPDVGFAYIGAKAPGGGAVGAYLGMTGKRISSPADALFIGLGTHYVPSGDLGSLKESLLSANFXADPHKDVESLLTGYKKEPESVPQLEKLLPDIVSSFGPDKSATESVEELKKRTQNGDATVSEWANDALAGLKKGAPFSLCLTQKHFSRVASSYGNNENYLSKLAGVMKLEYRIALRSSVRNDFAEGVRAVLVDKDQNPKWSPATLEEVNMDEVESVFEPLAADAELNV

SEQ ID NO: 64430 - DNA, 1137 bp, Triticum aestivum
  misc_feature (1)..(1137): Ceres Seq. ID no. 15174190
aagtgtttcccggctcggaaggcgctttcttacagctgctctgccctcagctaaaccagcgcacaccaaaaagaaatggaggagaaaagaaaaatggcgggtttgctccggcacatcgccgccgctctccttttcctcgtcacggccgcttcgaccgccggtgcttccacttattacgcctcggatcccaacctcggatccgcccgcgtcatcttccagttaaatcatggtgacattgaattcggcttctttcctcgtgttgcacctaagacagttgaacacatttttaaacttgtgcagcttggatgctataatacaaatcacttcttccgggttgacaagggttttgttgcgcaagttgccgatgtcatgggaggtagaaaagcccctatgaataaagagcaggaacaacaggcagagaaatcaattgttggtgaatttagtactgtcaagcatgtcagaggaattctctcaatgggaaggtattctgacccagacagtgcctcctcttccttttctatcctccttggtgatgctccccaccttgatggccagtatgctgtatttgggagggtgactaagggtgacgatacattaagaaaactagagcgcctgccaacccataaagaaggcatttttgtaatgccaattgagcgcattgagattctgtcgacatactattatgatattgatgtagagagctgtgagccagagaagtctattcttaagaggagactttctgaatcagcatcagaagttgagagatggagacgaaaatgcttcgcatgatccagcgattgagtgccttttttttcctttcggcctcactgagaagacatgtgtttcaaaaggacatccatattacctcttccaggatttagagtgcatgtgcattccaaggagaggggtcagacttgtactatgtccaaatgcgttgtaccatgtaatttttccatgagtttgatgttactaggtctgcacgtttagcattgtttctctatggtgaccaaaattttgtcttgtacctatttggcatgcttagcacatgcagaacgtgaagcattgggaaggtcctaatgcaatccaatcgaccgatagtctaatggaaaaaaatcaatattacacatgtatgcttcc

SEQ ID NO: 64431 - protein, 237 aa, Triticum aestivum
  peptide (1)..(237): Ceres Seq. ID no. 15174191
  misc_feature (45)..(193): Homolog of NCBI NO: 15896024 NR Description: Peptidyl-prolyl cis-transisomerase, cyclophilin
  misc_feature (32)..(179): Homolog of NCBI NO: 17987170 NR Description: PEPTIDYL-PROLYL CIS-TRANS ISOMERASE [Brucella
  misc_feature (18)..(186): Homolog of NCBI NO: 22982921 NR Description: hypothetical protein [Burkholderia fungorum]
  misc_feature (11)..(195): Homolog of NCBI NO: 22967403 NR Description: hypothetical protein [Rhodospirillum rubrum]
  misc_feature (11)..(179): Homolog of NCBI NO: 23501972 NR Description: peptidyl-prolyl cis-trans isomerase,
  misc_feature (10)..(179): Homolog of NCBI NO: 15888986 NR Description: AGR_C_3090p [Agrobacterium tumefaciens]
  misc_feature (45)..(182): Homolog of NCBI NO: 28210402 NR Description: peptidyl-prolyl cis-trans isomerase [Clostridium
  misc_feature (5)..(214): Homolog of NCBI NO: 18310549 NR Description: probable peptidyl-prolyl cis-trans isomerase B
  misc_feature (45)..(230): Homolog of NCBI NO: 25518514 NR Description: hypothetical protein T2P11.13 - Arabidopsis
  misc_feature (9)..(236): Homolog of NCBI NO: 18396122 NR Description: expressed protein [Arabidopsis thaliana]
MEEKRKMAGLLRHIAAALLFLVTAASTAGASTYYASDPNLGSARVIFQLNHGDIEFGFFPRVAPKTVEHIFKLVQLGCYNTNHFFRVDKGFVAQVADVMGGRKAPMNKEQEQQAEKSIVGEFSTVKHVRGILSMGRYSDPDSASSSFSILLGDAPHLDGQYAVFGRVTKGDDTLRKLERLPTHKEGIFVMPIERIEILSTYYYDIDVESCEPEKSILKRRLSESASEVERWRRKCFA

SEQ ID NO: 64432 - protein, 231 aa, Triticum aestivum
  peptide (1)..(231): Ceres Seq. ID no. 15174192
  misc_feature (39)..(187): Homolog of NCBI NO: 15896024 NR Description: Peptidyl-prolyl cis-transisomerase, cyclophilin
  misc_feature (26)..(173): Homolog of NCBI NO: 17987170 NR Description: PEPTIDYL-PROLYL CIS-TRANS ISOMERASE [Brucella
  misc_feature (12)..(180): Homolog of NCBI NO: 22982921 NR Description: hypothetical protein [Burkholderia fungorum]
  misc_feature (5)..(189): Homolog of NCBI NO: 22967403 NR Description: hypothetical protein [Rhodospirillum rubrum]
  misc_feature (5)..(173): Homolog of NCBI NO: 23501972 NR Description: peptidyl-prolyl cis-trans isomerase,
  misc_feature (4)..(173): Homolog of NCBI NO: 15888986 NR Description: AGR_C_3090p [Agrobacterium tumefaciens]
  misc_feature (39)..(176): Homolog of NCBI NO: 28210402 NR Description: peptidyl-prolyl cis-trans isomerase [Clostridium
  misc_feature (1)..(208): Homolog of NCBI NO: 18310549 NR Description: probable peptidyl-prolyl cis-trans isomerase B
  misc_feature (39)..(224): Homolog of NCBI NO: 25518514 NR Description: hypothetical protein T2P11.13 - Arabidopsis
  misc_feature (3)..(230): Homolog of NCBI NO: 18396122 NR Description: expressed protein [Arabidopsis thaliana]
MAGLLRHIAAALLFLVTAASTAGASTYYASDPNLGSARVIFQLNHGDIEFGFFPRVAPKTVEHIFKLVQLGCYNTNHFFRVDKGFVAQVADVMGGRKAPMNKEQEQQAEKSIVGEFSTVKHVRGILSMGRYSDPDSASSSFSILLGDAPHLDGQYAVFGRVTKGDDTLRKLERLPTHKEGIFVMPIERIEILSTYYYDIDVESCEPEKSILKRRLSESASEVERWRRKCFA

SEQ ID NO: 64433 - protein, 139 aa, Triticum aestivum
  peptide (1)..(139): Ceres Seq. ID no. 15174193
  misc_feature (1)..(95): Homolog of NCBI NO: 15896024 NR Description: Peptidyl-prolyl cis-transisomerase, cyclophilin
  misc_feature (1)..(81): Homolog of NCBI NO: 17987170 NR Description: PEPTIDYL-PROLYL CIS-TRANS ISOMERASE [Brucella
  misc_feature (1)..(88): Homolog of NCBI NO: 22982921 NR Description: hypothetical protein [Burkholderia fungorum]
  misc_feature (1)..(97): Homolog of NCBI NO: 22967403 NR Description: hypothetical protein [Rhodospirillum rubrum]
  misc_feature (1)..(81): Homolog of NCBI NO: 23501972 NR Description: peptidyl-prolyl cis-trans isomerase,
  misc_feature (1)..(81): Homolog of NCBI NO: 15888986 NR Description: AGR_C_3090p [Agrobacterium tumefaciens]
  misc_feature (1)..(84): Homolog of NCBI NO: 28210402 NR Description: peptidyl-prolyl cis-trans isomerase [Clostridium
  misc_feature (1)..(116): Homolog of NCBI NO: 18310549 NR Description: probable peptidyl-prolyl cis-trans isomerase B
  misc_feature (1)..(132): Homolog of NCBI NO: 25518514 NR Description: hypothetical protein T2P11.13 - Arabidopsis
  misc_feature (1)..(138): Homolog of NCBI NO: 18396122 NR Description: expressed protein [Arabidopsis thaliana]
MGGRKAPMNKEQEQQAEKSIVGEFSTVKHVRGILSMGRYSDPDSASSSFSILLGDAPHLDGQYAVFGRVTKGDDTLRKLERLPTHKEGIFVMPIERIEILSTYYYDIDVESCEPEKSILKRRLSESASEVERWRRKCFA

SEQ ID NO: 64434 - DNA, 752 bp, Triticum aestivum
  misc_feature (1)..(752): Ceres Seq. ID no. 15173164
gaaacacagcgagcaagagcaagagcaagagcaagagcaagagcagcctttctccgtgaggtccattgcaatccagaaaccttcaagtatgggcagatctgcaatttctcaggccctcccggtgcaccaggaggacgaagacctgttcgagacctcgtcatccttctcctgcgactccgacgacgaggcccagttctcggacggcgaggaccagtttgtgccggcttccccgccggtgcggagactcaactctgacagcgtctacgatctgtcgtccatcaaggctgagctctccgccaagaaaggagggttgtccaagtactacgacgggaagtcccagtcgttcgcgtgcatgtccgaggtgaggtgcctggaggatctacccaagaagagcccctacaagaagatcaagtcatgcaggagcaacatcaatctagacggaaaccagagagattgccccgtaactggttctaacaacagcaaaggaatcgccaagcagagctctgcgagttcctgcgcgaatctgatgatggcgcggaccagcagcgccaacatgctctacaggcctccggcgatccctgttaacaagagcgcgtgccaccagtagggctcgcagctgcctggaaatgtccgtccatggctggcctcgcgcctcttctttgttccttgatgaggatttttcttggcgggcgtattagcctgtcaaatgtaaagaggcttttgattctctcatgttcaggaagatattgatg

SEQ ID NO: 64435 - protein, 201 aa, Triticum aestivum
  peptide (1)..(201): Ceres Seq. ID no. 15173165
  misc_feature (30)..(201): Homolog of NCBI NO: 34909358 NR Description: P0638D12.11 [Oryza sativa (japonica
  misc_feature (30)..(201): Homolog of NCBI NO: 20159729 NR Description: unknown cold induced protein [Deschampsia
KHSEQEQEQEQEQEQPFSVRSIAIQKPSSMGRSAISQALPVHQEDEDLFETSSSFSCDSDDEAQFSDGEDQFVPASPPVRRLNSDSVYDLSSIKAELSAKKGGLSKYYDGKSQSFACMSEVRCLEDLPKKSPYKKIKSCRSNINLDGNQRDCPVTGSNNSKGIAKQSSASSCANLMMARTSSANMLYRPPAIPVNKSACHQ

SEQ ID NO: 64436 - protein, 172 aa, Triticum aestivum
  peptide (1)..(172): Ceres Seq. ID no. 15173166
  misc_feature (1)..(172): Homolog of NCBI NO: 34909358 NR Description: P0638D12.11 [Oryza sativa (japonica
  misc_feature (1)..(172): Homolog of NCBI NO: 20159729 NR Description: unknown cold induced protein [Deschampsia
MGRSAISQALPVHQEDEDLFETSSSFSCDSDDEAQFSDGEDQFVPASPPVRRLNSDSVYDLSSIKAELSAKKGGLSKYYDGKSQSFACMSEVRCLEDLPKKSPYKKIKSCRSNINLDGNQRDCPVTGSNNSKGIAKQSSASSCANLMMARTSSANMLYRPPAIPVNKSACHQ

SEQ ID NO: 64437 - DNA, 1133 bp, Triticum aestivum
  misc_feature (1)..(1133): Ceres Seq. ID no. 13597027
tgcttcgtccagcataacccccaaaaccacctcacccgacagaacaggcggcggcggcggcggaatcgggcgagatgatcaagaggcgctacttcaggcaagaccacggcgacaatagcgcctcctcgtcctcctcctcttcgggttctgattcggaccgcgaccccgcggaagaagaggtctcggaggaggaagtagaaggggagcaagaaaaagaagaagaagatgatgatgaagaagcggaggtggagtcgggggaagaacaggaaaaggaagtagatgagcaggccgaagatgagggttcaggataccaaagtgaggacagctctggacatcatgttgatagtccttgtgcaggtttactttcagatgagaacagcagtctggtgtatgaacaataccaagcaatcaggttgcctgctaagaaagcatcaagtggtgatgctgattctgccgaaggtgctgttaacaaggatgacactgttgaggtcgatttcaataactacattctgaagtgcaaatctgtgtataagtgcaagctttgtcccagaatcatgtgcttaagtgaggagatggtcagggtacatcttgaatcaaagagacatgctcgatcaaagaaactactgggagaaggtaggcttaagatggtgctcaacagtgatggtgagctggaggaagaggcagagacacatgctgaacgacatgcccgaactatagctcttgctcagcaagtacaaaagcccaagaaggattcaggcaggcagcgacaaaatcggagaagacagaagaggtcgcagaatcgtctcaaggacaaagatcagagacacagctctggaaaggaaggtgcaaggccgaacaatggaactgctgataagaaaatgccgaatgttgaaactgctgctaagaaaatgccgaatcttgaaactgctgctaagaaaaggcgcaagactgaaaaataagtcggtgctgcagaaatatttcttgcgtgtcatttcttcctatattgttgtaatttttaggagctttctgcggttttactgtttctggtttgcttctttaagtgtagttcatgaaagctgagagattaaattgaaaggaaagacgacaactagaaagtggacatttaatcgtgc

SEQ ID NO: 64438 - protein, 294 aa, Triticum aestivum
  peptide (1)..(294): Ceres Seq. ID no. 13597028
  misc_feature (3)..(91): Pfam Name: Prothymosin/parathymosin family Pfam Description: Prothymosin/parathymosin family
  misc_feature (1)..(85): Homolog of NCBI NO: 29251343 NR Description: GLP_574_57226_57648 [Giardia lamblia ATCC 50803]
  misc_feature (14)..(83): Homolog of NCBI NO: 39586319 NR Description: Hypothetical protein CBG12079 [Caenorhabditis
  misc_feature (2)..(83): Homolog of NCBI NO: 33086440 NR Description: Ab1-013 [Rattus norvegicus]
  misc_feature (200)..(294): Homolog of NCBI NO: 33086440 NR Description: Ab1-013 [Rattus norvegicus]
  misc_feature (2)..(83): Homolog of NCBI NO: 33086446 NR Description: Ab1-042 [Rattus norvegicus]
  misc_feature (200)..(294): Homolog of NCBI NO: 33086446 NR Description: Ab1-042 [Rattus norvegicus]
  misc_feature (1)..(86): Homolog of NCBI NO: 29251343 NR Description: GLP_574_57226_57648 [Giardia lamblia ATCC 50803]
  misc_feature (46)..(294): Homolog of NCBI NO: 15219776 NR Description: hypothetical protein [Arabidopsis thaliana]
  misc_feature (46)..(268): Homolog of NCBI NO: 25404282 NR Description: hypothetical protein F8A5.16 [imported] -
  misc_feature (1)..(251): Homolog of NCBI NO: 13359054 NR Description: P0436D06.15 [Oryza sativa (japonica
MIKRRYFRQDHGDNSASSSSSSSGSDSDRDPAEEEVSEEEVEGEQEKEEEDDDEEAEVESGEEQEKEVDEQAEDEGSGYQSEDSSGHHVDSPCAGLLSDENSSLVYEQYQAIRLPAKKASSGDADSAEGAVNKDDTVEVDFNNYILKCKSVYKCKLCPRIMCLSEEMVRVHLESKRHARSKKLLGEGRLKMVLNSDGELEEEAETHAERHARTIALAQQVQKPKKDSGRQRQNRRRQKRSQNRLKDKDQRHSSGKEGARPNNGTADKKMPNVETAAKKMPNLETAAKKRRKTEK

SEQ ID NO: 64439 - DNA, 527 bp, Triticum aestivum
  misc_feature (1)..(527): Ceres Seq. ID no. 15224346
caaaaccatggatgaaattaatgacaatatggagaacatgaggcagatccaggatctactgtctgcgcctatgggagcagcaagtgatttcgatgaagatgagctggaagctgaacttgcggatttggagggcgaggagttggaggcacagctactagcaccaaccacaagtgctcctatgactgctccagcgcgtgtacctcagcagtcgagtcggcccactgctcagagtagtaaaaccgaagatgatgagctggcagctttacaagcagagatggctatgtaattagtttgcaggacttgggcgtgggcatgtttagagaccagattgtgcaaatatatttgggaccacggtattttcatggaggtcttcctgggaagacgtcagaagtgcacacagaaactagttgcatctcaccctgatgatctcttatgtatatcttatcatgttacttctgtaatcaaacatctaagatgcgctgttgagcgcattatcagctaataaagggcatctgccatcattgtat

SEQ ID NO: 64440 - protein, 94 aa, Triticum aestivum
  peptide (1)..(94): Ceres Seq. ID no. 15224347
  misc_feature (1)..(59): Pfam Name: SNF7 Pfam Description: SNF7
  misc_feature (3)..(89): Homolog of NCBI NO: 13182765 NR Description: CDA04 [Homo sapiens]
  misc_feature (3)..(93): Homolog of NCBI NO: 29841209 NR Description: similar to GenBank Accession Number BC011429
  misc_feature (3)..(84): Homolog of NCBI NO: 28278647 NR Description: Similar to RIKEN cDNA 2010012F05 gene [Danio
  misc_feature (3)..(89): Homolog of NCBI NO: 28827795 NR Description: Snf7 homologue associated with Alix 1 [Homo
  misc_feature (3)..(89): Homolog of NCBI NO: 28077049 NR Description: RIKEN cDNA 2010012F05 [Mus musculus]
  misc_feature (3)..(89): Homolog of NCBI NO: 13905218 NR Description: 2010012F05Rik protein [Mus musculus]
  misc_feature (3)..(90): Homolog of NCBI NO: 28277855 NR Description: Unknown (protein for MGC:56112) [Danio rerio]
  misc_feature (1)..(94): Homolog of NCBI NO: 15224854 NR Description: copia-related retroelement pol polyprotein
  misc_feature (1)..(94): Homolog of NCBI NO: 21594892 NR Description: copia-like retroelement pol polyprotein
  misc_feature (1)..(94): Homolog of NCBI NO: 15233464 NR Description: expressed protein [Arabidopsis thaliana]
KTMDEINDNMENMRQIQDLLSAPMGAASDFDEDELEAELADLEGEELEAQLLAPTTSAPMTAPARVPQQSSRPTAQSSKTEDDELAALQAEMAM

SEQ ID NO: 64441 - protein, 92 aa, Triticum aestivum
  peptide (1)..(92): Ceres Seq. ID no. 15224348
  misc_feature (1)..(57): Pfam Name: SNF7 Pfam Description: SNF7
  misc_feature (1)..(87): Homolog of NCBI NO: 13182765 NR Description: CDA04 [Homo sapiens]
  misc_feature (1)..(91): Homolog of NCBI NO: 29841209 NR Description: similar to GenBank Accession Number BC011429
  misc_feature (1)..(82): Homolog of NCBI NO: 28278647 NR Description: Similar to RIKEN cDNA 2010012F05 gene [Danio
  misc_feature (1)..(87): Homolog of NCBI NO: 28827795 NR Description: Snf7 homologue associated with Alix 1 [Homo
  misc_feature (1)..(87): Homolog of NCBI NO: 28077049 NR Description: RIKEN cDNA 2010012F05 [Mus musculus]
  misc_feature (1)..(87): Homolog of NCBI NO: 13905218 NR Description: 2010012F05Rik protein [Mus musculus]
  misc_feature (1)..(88): Homolog of NCBI NO: 28277855 NR Description: Unknown (protein for MGC:56112) [Danio rerio]
  misc_feature (1)..(92): Homolog of NCBI NO: 15224854 NR Description: copia-related retroelement pol polyprotein
  misc_feature (1)..(92): Homolog of NCBI NO: 21594892 NR Description: copia-like retroelement pol polyprotein
  misc_feature (1)..(92): Homolog of NCBI NO: 15233464 NR Description: expressed protein [Arabidopsis thaliana]
MDEINDNMENMRQIQDLLSAPMGAASDFDEDELEAELADLEGEELEAQLLAPTTSAPMTAPARVPQQSSRPTAQSSKTEDDELAALQAEMAM

SEQ ID NO: 64442 - protein, 85 aa, Triticum aestivum
  peptide (1)..(85): Ceres Seq. ID no. 15224349
  misc_feature (1)..(80): Homolog of NCBI NO: 13182765 NR Description: CDA04 [Homo sapiens]
  misc_feature (1)..(84): Homolog of NCBI NO: 29841209 NR Description: similar to GenBank Accession Number BC011429
  misc_feature (1)..(75): Homolog of NCBI NO: 28278647 NR Description: Similar to RIKEN cDNA 2010012F05 gene [Danio
  misc_feature (1)..(80): Homolog of NCBI NO: 28827795 NR Description: Snf7 homologue associated with Alix 1 [Homo
  misc_feature (1)..(80): Homolog of NCBI NO: 28077049 NR Description: RIKEN cDNA 2010012F05 [Mus musculus]
  misc_feature (1)..(80): Homolog of NCBI NO: 13905218 NR Description: 2010012F05Rik protein [Mus musculus]
  misc_feature (1)..(81): Homolog of NCBI NO: 28277855 NR Description: Unknown (protein for MGC:56112) [Danio rerio]
  misc_feature (1)..(85): Homolog of NCBI NO: 15224854 NR Description: copia-related retroelement pol polyprotein
  misc_feature (1)..(85): Homolog of NCBI NO: 21594892 NR Description: copia-like retroelement pol polyprotein
  misc_feature (1)..(85): Homolog of NCBI NO: 15233464 NR Description: expressed protein [Arabidopsis thaliana]
MENMRQIQDLLSAPMGAASDFDEDELEAELADLEGEELEAQLLAPTTSAPMTAPARVPQQSSRPTAQSSKTEDDELAALQAEMAM

SEQ ID NO: 64443 - DNA, 965 bp, Triticum aestivum
  misc_feature (1)..(965): Ceres Seq. ID no. 12599167
cttctccgttctcctagctagctcccacacatcctcgaatcacagcctcacacctcctcccctgatcgaccaccctgcagctagcttcgtgcccgcagccagcaccgatcacacgctagctgctgctgctgctggggcgaccgaccggccatccatggcggtgaaggactgcggcgggcacaagggcgggggctgcgagtgccaccgccggcggctctaccgcaagtgctgcggcgcgctgctcgccctcgtcctcctcgccctcttcatcatcctcatcgtctacctggtgctccgcccccacaagccccgcttctacctgcaggacctggcggtgctctgcctcaacgtcacgccgcccacctccgcctacctcttcaccaccatgcaggccacggtcgcggcgcgcaaccccaacgaccgcgtcggcgtctactacgacgaggcggacatgtacgcgcagtacaagggcgtcgccatcaccgtccccacccgcctccccgtcgcctaccagggccaccgcgaccagtccgtgtggtcgccgtatctgaggtccatggacagcgtcgtgctcccgccgcagctcgccgtggcgctggcgcaggacgagacggccgggtacgtgctggtggacgtgcgcgtggacggtcaggtgcgctggaaggtgggcacgtggatctccggccactaccacctccgggtcaactgcccggcgctcatcagggtgaacgagggcaagggcagctacggcgccaccaccggcggcggccccgactacttccgcttccagcaggccgccgcctgcgccgtcgacgtctgatcatgcatcatcggttcgacctccaccgatccatgcatgtgtccaaattcagtggaatcgattgattgcttctccttctagtctctttcttgcttctttttagtctctttttgacttgttgatcgattggttaaagaaatggatg

SEQ ID NO: 64444 - protein, 272 aa, Triticum aestivum
  peptide (1)..(272): Ceres Seq. ID no. 12599168
  misc_feature (52)..(272): Homolog of NCBI NO: 15240001 NR Description: hairpin-induced protein, putative (HIN1); protein
  misc_feature (54)..(272): Homolog of NCBI NO: 28392929 NR Description: putative VAMP protein SEC22 [Arabidopsis thaliana]
  misc_feature (54)..(272): Homolog of NCBI NO: 18399308 NR Description: VAMP protein SEC22
  misc_feature (55)..(272): Homolog of NCBI NO: 15231227 NR Description: hairpin-induced protein, putative (HIN1)
  misc_feature (52)..(272): Homolog of NCBI NO: 15227538 NR Description: hairpin-induced protein, putative (HIN1)
  misc_feature (52)..(272): Homolog of NCBI NO: 22326984 NR Description: similar to hairpin-induced protein, putative
  misc_feature (65)..(272): Homolog of NCBI NO: 15229906 NR Description: hairpin-induced protein, putative (HIN1); protein
  misc_feature (68)..(272): Homolog of NCBI NO: 38344036 NR Description: OJ991214_12.17 [Oryza sativa (japonica
  misc_feature (52)..(272): Homolog of NCBI NO: 38637038 NR Description: harpin-induced protein 1 family (HIN1)-like
  misc_feature (54)..(272): Homolog of NCBI NO: 32488715 NR Description: OSJNBa0088H09.16 [Oryza sativa (japonica
FSVLLASSHTSSNHSLTPPPLIDHPAASFVPAASTDHTLAAAAAGATDRPSMAVKDCGGHKGGGCECHRRRLYRKCCGALLALVLLALFIILIVYLVLRPHKPRFYLQDLAVLCLNVTPPTSAYLFTTMQATVAARNPNDRVGVYYDEADMYAQYKGVAITVPTRLPVAYQGHRDQSVWSPYLRSMDSVVLPPQLAVALAQDETAGYVLVDVRVDGQVRWKVGTWISGHYHLRVNCPALIRVNEGKGSYGATTGGGPDYFRFQQAAACAVDV

SEQ ID NO: 64445 - protein, 221 aa, Triticum aestivum
  peptide (1)..(221): Ceres Seq. ID no. 12599169
  misc_feature (1)..(221): Homolog of NCBI NO: 15240001 NR Description: hairpin-induced protein, putative (HIN1); protein
  misc_feature (3)..(221): Homolog of NCBI NO: 28392929 NR Description: putative VAMP protein SEC22 [Arabidopsis thaliana]
  misc_feature (3)..(221): Homolog of NCBI NO: 18399308 NR Description: VAMP protein SEC22
  misc_feature (4)..(221): Homolog of NCBI NO: 15231227 NR Description: hairpin-induced protein, putative (HIN1)
  misc_feature (1)..(221): Homolog of NCBI NO: 15227538 NR Description: hairpin-induced protein, putative (HIN1)
  misc_feature (1)..(221): Homolog of NCBI NO: 22326984 NR Description: similar to hairpin-induced protein, putative
  misc_feature (14)..(221): Homolog of NCBI NO: 15229906 NR Description: hairpin-induced protein, putative (HIN1); protein
  misc_feature (17)..(221): Homolog of NCBI NO: 38344036 NR Description: OJ991214_12.17 [Oryza sativa (japonica
  misc_feature (1)..(221): Homolog of NCBI NO: 38637038 NR Description: harpin-induced protein 1 family (HIN1)-like
  misc_feature (3)..(221): Homolog of NCBI NO: 32488715 NR Description: OSJNBa0088H09.16 [Oryza sativa (japonica
MAVKDCGGHKGGGCECHRRRLYRKCCGALLALVLLALFIILIVYLVLRPHKPRFYLQDLAVLCLNVTPPTSAYLFTTMQATVAARNPNDRVGVYYDEADMYAQYKGVAITVPTRLPVAYQGHRDQSVWSPYLRSMDSVVLPPQLAVALAQDETAGYVLVDVRVDGQVRWKVGTWISGHYHLRVNCPALIRVNEGKGSYGATTGGGPDYFRFQQAAACAVDV

SEQ ID NO: 64446 - protein, 144 aa, Triticum aestivum
  peptide (1)..(144): Ceres Seq. ID no. 12599170
  misc_feature (1)..(144): Homolog of NCBI NO: 15240001 NR Description: hairpin-induced protein, putative (HIN1); protein
  misc_feature (1)..(144): Homolog of NCBI NO: 28392929 NR Description: putative VAMP protein SEC22 [Arabidopsis thaliana]
  misc_feature (1)..(144): Homolog of NCBI NO: 18399308 NR Description: VAMP protein SEC22
  misc_feature (1)..(144): Homolog of NCBI NO: 15231227 NR Description: hairpin-induced protein, putative (HIN1)
  misc_feature (1)..(144): Homolog of NCBI NO: 15227538 NR Description: hairpin-induced protein, putative (HIN1)
  misc_feature (1)..(144): Homolog of NCBI NO: 22326984 NR Description: similar to hairpin-induced protein, putative
  misc_feature (1)..(144): Homolog of NCBI NO: 15229906 NR Description: hairpin-induced protein, putative (HIN1); protein
  misc_feature (1)..(144): Homolog of NCBI NO: 38344036 NR Description: OJ991214_12.17 [Oryza sativa (japonica
  misc_feature (1)..(144): Homolog of NCBI NO: 38637038 NR Description: harpin-induced protein 1 family (HIN1)-like
  misc_feature (1)..(144): Homolog of NCBI NO: 32488715 NR Description: OSJNBa0088H09.16 [Oryza sativa (japonica
MQATVAARNPNDRVGVYYDEADMYAQYKGVAITVPTRLPVAYQGHRDQSVWSPYLRSMDSVVLPPQLAVALAQDETAGYVLVDVRVDGQVRWKVGTWISGHYHLRVNCPALIRVNEGKGSYGATTGGGPDYFRFQQAAACAVDV

SEQ ID NO: 64447 - DNA, 913 bp, Triticum aestivum
  misc_feature (1)..(913): Ceres Seq. ID no. 12618524
gcaggcagctccactcccctctccccttgcagccgccgccgctcgccgtcgcgatggccgagacggtggacttcgcgagcggcgacggggaggcctggcgtgcggcgctgggcgcgtacgaccgccggctcgcggcgctggacaagcccgacctcctggacgccgactccttctaccgccacgacctccccctcctgctgcaccgccgcgacccggacccctacctcgccaagccggagctggtgcagctcatgcagtggaagctctcgcgcggcaagtggaggccgaggctgatggatttcgtcaaaagcttggatgacaaagttgtagagtcagcgtcacgcaaggcatttgcagcgctgcctgacctcagcaaggccatcaccgagctcaccgtgctcaagggtgttggccctgccactgcatctgcggtgctcgctgcctatgcacccgatgttgcacccttcatgtcagacgaagctatggtcgcagccttgggcaatgtaaaggaatacactctgaagcagtaccttgcgtttgcggagaagttgcaggctaaagcgaaggagttgagcgtaggaggagaaagcttcacgcctttggatgttgagagagctttgtggagctcggcaatcgcctccaagccaccgaaggcaccagcaggtgggaagagaaaacgatgacttgtgtcgccgcactgttgcgctagagctagaatggtctgctggtggtagatcgatctttgtagaatgtatatgtcatgtacttcttgcctttggatcccaaacatatttgtgaatggggaatggcgcacctcctgagcttggtatttggctatcggatgatgacctggtgtattccgtcaaaggactaaccgcctgtaaaattgtcatgaaatccatagaccaattcc

SEQ ID NO: 64448 - protein, 226 aa, Triticum aestivum
  peptide (1)..(226): Ceres Seq. ID no. 12618525
  misc_feature (50)..(207): Homolog of NCBI NO: 40746364 NR Description: hypothetical protein AN1337.2 [Aspergillus
  misc_feature (48)..(213): Homolog of NCBI NO: 20129011 NR Description: CG2446-PC [Drosophila melanogaster]
  misc_feature (22)..(159): Homolog of NCBI NO: 30682101 NR Description: expressed protein [Arabidopsis thaliana]
  misc_feature (22)..(226): Homolog of NCBI NO: 18399536 NR Description: expressed protein
  misc_feature (22)..(226): Homolog of NCBI NO: 15795142 NR Description: gb|AAF48080.1~gene_id:MQC3.4~similar to unknown
RQLHSPLPLQPPPLAVAMAETVDFASGDGEAWRAALGAYDRRLAALDKPDLLDADSFYRHDLPLLLHRRDPDPYLAKPELVQLMQWKLSRGKWRPRLMDFVKSLDDKVVESASRKAFAALPDLSKAITELTVLKGVGPATASAVLAAYAPDVAPFMSDEAMVAALGNVKEYTLKQYLAFAEKLQAKAKELSVGGESFTPLDVERALWSSAIASKPPKAPAGGKRKR

SEQ ID NO: 64449 - protein, 209 aa, Triticum aestivum
  peptide (1)..(209): Ceres Seq. ID no. 12618526
  misc_feature (33)..(190): Homolog of NCBI NO: 40746364 NR Description: hypothetical protein AN1337.2 [Aspergillus
  misc_feature (31)..(196): Homolog of NCBI NO: 20129011 NR Description: CG2446-PC [Drosophila melanogaster]
  misc_feature (5)..(142): Homolog of NCBI NO: 30682101 NR Description: expressed protein [Arabidopsis thaliana]
  misc_feature (5)..(209): Homolog of NCBI NO: 18399536 NR Description: expressed protein
  misc_feature (5)..(209): Homolog of NCBI NO: 15795142 NR Description: gb|AAF48080.1~gene_id:MQC3.4~similar to unknown
MAETVDFASGDGEAWRAALGAYDRRLAALDKPDLLDADSFYRHDLPLLLHRRDPDPYLAKPELVQLMQWKLSRGKWRPRLMDFVKSLDDKVVESASRKAFAALPDLSKAITELTVLKGVGPATASAVLAAYAPDVAPFMSDEAMVAALGNVKEYTLKQYLAFAEKLQAKAKELSVGGESFTPLDVERALWSSAIASKPPKAPAGGKRKR

SEQ ID NO: 64450 - protein, 143 aa, Triticum aestivum
  peptide (1)..(143): Ceres Seq. ID no. 12618527
  misc_feature (1)..(124): Homolog of NCBI NO: 40746364 NR Description: hypothetical protein AN1337.2 [Aspergillus
  misc_feature (1)..(130): Homolog of NCBI NO: 20129011 NR Description: CG2446-PC [Drosophila melanogaster]
  misc_feature (1)..(76): Homolog of NCBI NO: 30682101 NR Description: expressed protein [Arabidopsis thaliana]
  misc_feature (1)..(143): Homolog of NCBI NO: 18399536 NR Description: expressed protein
  misc_feature (1)..(143): Homolog of NCBI NO: 15795142 NR Description: gb|AAF48080.1~gene_id:MQC3.4~similar to unknown
MQWKLSRGKWRPRLMDFVKSLDDKVVESASRKAFAALPDLSKAITELTVLKGVGPATASAVLAAYAPDVAPFMSDEAMVAALGNVKEYTLKQYLAFAEKLQAKAKELSVGGESFTPLDVERALWSSAIASKPPKAPAGGKRKR

SEQ ID NO: 64451 - DNA, 1168 bp, Triticum aestivum
  misc_feature (1)..(1168): Ceres Seq. ID no. 12388947
attcaggaaactgccattgaccagacaaaacgaaaacgtgacggcaaacagttccgtaccacctccctccactggtcgatccccatcccctgttccgttcatacatctacctccgccgccgctgccatgccgccggccggcagcctcaccgccgagcagctcagcttcttcgagaagaacggctacctggtgctggagtcgttatccagcgtggaggaggttcaggcgatgcgcgaccgcatggccgagctcgtcgacggcttcgacggcgctgactccagtgtcttctccaccaaggatcatcggcagttgaaggacgactacttctttaagagtgcggagaatatatctttcttcttcgaggaaaaggcatttggagatgatggatgcttgagacagccaaaggaactttcaatcaataaagttggacatgcactacatgaacatgaccctgtgttcaaaaagtttgctttctcggagagtatttctagcctgttctcttctttagggtacaagagacctgcagttattcaatctatgtacatctttaagcaaccgggcattggtggcgaggtggtgccacaccaggataatacattcctttatacagagcccctatcatgcacaggattgtggcttgcacttgaagatgcaacagttaccaatggttgcctatgggcaattcccggatcacataaaaatggtctaaaaaggcgaatgatcagagatgaaaatggtactcattttgatcgcccctctccactttatgaccagaaagagtttgtaccactggaaatgaaatcaggtgactttgttgttattcacgacgatcttgtacatcagagctttgagaacctttctccagtgtcaagacatgcactgagcttacatgtagttgacatggaaggatgtaaatggtccaaggacaactggatacagaggaaaactgcgcctgaaccgctctatgtgtcttagttcagccagttactaataaacaagcagtttcagttgcttatcatcggtgcagtgaaatttgggaacgccgcggagcaatgctggtttctttgtcgtctttcacatgtgtacactgtaaatactgaatacttgctgctgtgttgtcatgatatcagttactatctgcaatcctgaaataaatccaatttcctcc

SEQ ID NO: 64452 - protein, 324 aa, Triticum aestivum
  peptide (1)..(324): Ceres Seq. ID no. 12388948
  misc_feature (56)..(293): Pfam Name: Phytanoyl-CoA dioxygenase (PhyH) Pfam Description: Phytanoyl-CoA dioxygenase (PhyH)
  misc_feature (49)..(320): Homolog of NCBI NO: 30802141 NR Description: Similar to hypothetical protein MGC16638 [Homo
  misc_feature (57)..(313): Homolog of NCBI NO: 17544346 NR Description: Factor of activated T-cells cytoplasmic like
  misc_feature (59)..(321): Homolog of NCBI NO: 24645709 NR Description: CG14688-PA [Drosophila melanogaster]
  misc_feature (49)..(322): Homolog of NCBI NO: 25058918 NR Description: Unknown (protein for MGC:49146) [Mus musculus]
  misc_feature (30)..(322): Homolog of NCBI NO: 12837748 NR Description: unnamed protein product [Mus musculus]
  misc_feature (30)..(323): Homolog of NCBI NO: 34853210 NR Description: similar to hypothetical protein MGC49146 [Rattus
  misc_feature (47)..(234): Homolog of NCBI NO: 25410910 NR Description: hypothetical protein At2g01490 [imported] -
  misc_feature (47)..(323): Homolog of NCBI NO: 18379234 NR Description: expressed protein
  misc_feature (47)..(323): Homolog of NCBI NO: 21593659 NR Description: unknown [Arabidopsis thaliana]
  misc_feature (43)..(322): Homolog of NCBI NO: 13937293 NR Description: putative LN1 protein [Oryza sativa]
IQETAIDQTKRKRDGKQFRTTSLHWSIPIPCSVHTSTSAAAAMPPAGSLTAEQLSFFEKNGYLVLESLSSVEEVQAMRDRMAELVDGFDGADSSVFSTKDHRQLKDDYFFKSAENISFFFEEKAFGDDGCLRQPKELSINKVGHALHEHDPVFKKFAFSESISSLFSSLGYKRPAVIQSMYIFKQPGIGGEVVPHQDNTFLYTEPLSCTGLWLALEDATVTNGCLWAIPGSHKNGLKRRMIRDENGTHFDRPSPLYDQKEFVPLEMKSGDFVVIHDDLVHQSFENLSPVSRHALSLHVVDMEGCKWSKDNWIQRKTAPEPLYVS

SEQ ID NO: 64453 - protein, 282 aa, Triticum aestivum
  peptide (1)..(282): Ceres Seq. ID no. 12388949
  misc_feature (14)..(251): Pfam Name: Phytanoyl-CoA dioxygenase (PhyH) Pfam Description: Phytanoyl-CoA dioxygenase (PhyH)
  misc_feature (7)..(278): Homolog of NCBI NO: 30802141 NR Description: Similar to hypothetical protein MGC16638 [Homo
  misc_feature (15)..(271): Homolog of NCBI NO: 17544346 NR Description: Factor of activated T-cells cytoplasmic like
  misc_feature (17)..(279): Homolog of NCBI NO: 24645709 NR Description: CG14688-PA [Drosophila melanogaster]
  misc_feature (7)..(280): Homolog of NCBI NO: 25058918 NR Description: Unknown (protein for MGC:49146) [Mus musculus]
  misc_feature (1)..(280): Homolog of NCBI NO: 12837748 NR Description: unnamed protein product [Mus musculus]
  misc_feature (1)..(281): Homolog of NCBI NO: 34853210 NR Description: similar to hypothetical protein MGC49146 [Rattus
  misc_feature (5)..(192): Homolog of NCBI NO: 25410910 NR Description: hypothetical protein At2g01490 [imported] -
  misc_feature (5)..(281): Homolog of NCBI NO: 18379234 NR Description: expressed protein
  misc_feature (5)..(281): Homolog of NCBI NO: 21593659 NR Description: unknown [Arabidopsis thaliana]
  misc_feature (1)..(280): Homolog of NCBI NO: 13937293 NR Description: putative LN1 protein [Oryza sativa]
MPPAGSLTAEQLSFFEKNGYLVLESLSSVEEVQAMRDRMAELVDGFDGADSSVFSTKDHRQLKDDYFFKSAENISFFFEEKAFGDDGCLRQPKELSINKVGHALHEHDPVFKKFAFSESISSLFSSLGYKRPAVIQSMYIFKQPGIGGEVVPHQDNTFLYTEPLSCTGLWLALEDATVTNGCLWAIPGSHKNGLKRRMIRDENGTHFDRPSPLYDQKEFVPLEMKSGDFVVIHDDLVHQSFENLSPVSRHALSLHVVDMEGCKWSKDNWIQRKTAPEPLYVS

SEQ ID NO: 64454 - protein, 248 aa, Triticum aestivum
  peptide (1)..(248): Ceres Seq. ID no. 12388950
  misc_feature (1)..(217): Pfam Name: Phytanoyl-CoA dioxygenase (PhyH) Pfam Description: Phytanoyl-CoA dioxygenase (PhyH)
  misc_feature (1)..(244): Homolog of NCBI NO: 30802141 NR Description: Similar to hypothetical protein MGC16638 [Homo
  misc_feature (1)..(237): Homolog of NCBI NO: 17544346 NR Description: Factor of activated T-cells cytoplasmic like
  misc_feature (1)..(245): Homolog of NCBI NO: 24645709 NR Description: CG14688-PA [Drosophila melanogaster]
  misc_feature (1)..(246): Homolog of NCBI NO: 25058918 NR Description: Unknown (protein for MGC:49146) [Mus musculus]
  misc_feature (1)..(246): Homolog of NCBI NO: 12837748 NR Description: unnamed protein product [Mus musculus]
  misc_feature (1)..(247): Homolog of NCBI NO: 34853210 NR Description: similar to hypothetical protein MGC49146 [Rattus
  misc_feature (1)..(158): Homolog of NCBI NO: 25410910 NR Description: hypothetical protein At2g01490 [imported] -
  misc_feature (1)..(247): Homolog of NCBI NO: 18379234 NR Description: expressed protein
  misc_feature (1)..(247): Homolog of NCBI NO: 21593659 NR Description: unknown [Arabidopsis thaliana]
  misc_feature (1)..(246): Homolog of NCBI NO: 13937293 NR Description: putative LN1 protein [Oryza sativa]
MRDRMAELVDGFDGADSSVFSTKDHRQLKDDYFFKSAENISFFFEEKAFGDDGCLRQPKELSINKVGHALHEHDPVFKKFAFSESISSLFSSLGYKRPAVIQSMYIFKQPGIGGEVVPHQDNTFLYTEPLSCTGLWLALEDATVTNGCLWAIPGSHKNGLKRRMIRDENGTHFDRPSPLYDQKEFVPLEMKSGDFVVIHDDLVHQSFENLSPVSRHALSLHVVDMEGCKWSKDNWIQRKTAPEPLYVS

SEQ ID NO: 64455 - DNA, 983 bp, Triticum aestivum
  misc_feature (1)..(983): Ceres Seq. ID no. 13585554
aggaataggattcaggcccgggcggccgcgtcaaaatcgtctctttgctcctcctcctgtccgtccgtctccgtccgtccgcccgcccgccccgaagcgtctcgccgccccctccaccggagaaccccctcgaaggcgagcacccgccctccccttcctcccggattcttgtctgccatgggtgactacacaatccggataagcaccagcttgatcgagcagctcgcgcgcgatgacgagaagcagatgaagaggaggaccaggaaacccaagccgaggaaggtcgtggagcaaccagaggagcctcaggacaatggcagggaacttccaactgaacccaagagcagccctgctcctgttttgccttttccgccacccatgtacctgccagtgacccccgctcctccaccgcccccgcccgtgatccaggaggtggaagccatacgcgccgtggttgtggagagcgagaaggtgctggagaagctgcagaagaaggaggcgacgatgcgcgaggagctcaccaagagggccaaggagctgcacgacaaggagttcaagctgccctaccagaacccctcgccgtgcaccgacgagagggcaggctgcgctgagtgctacaggagcaacgtgcaggacccgctcaagtgcgccgaggcggtcaagaggttcgaggcgtgcgttcgcatggcgattcggggcggtaccaccatgggagctgctcagtaggcagtggcgctgggagtcggggctgagtgagcgaggtgtcgagcacacgattttgcttctgtcgggatgattgattgaataacctgcctggatttttgtttggtgagacctgaaacaccatcagttgtagattaattctggtaacgggttgctactggtgttggcaacaagaggccatgagtgtccttgaatttaggggagtggctccatgctacttgcatacatattacaaaatgagacatgaaatttgcagggtc

SEQ ID NO: 64456 - protein, 241 aa, Triticum aestivum
  peptide (1)..(241): Ceres Seq. ID no. 13585555
  misc_feature (90)..(140): Pfam Name: Extensin-like region Pfam Description: Extensin-like region
  misc_feature (60)..(228): Homolog of NCBI NO: 18413789 NR Description: expressed protein [Arabidopsis thaliana]
RNRIQARAAASKSSLCSSSCPSVSVRPPARPEASRRPLHRRTPSKASTRPPLPPGFLSAMGDYTIRISTSLIEQLARDDEKQMKRRTRKPKPRKVVEQPEEPQDNGRELPTEPKSSPAPVLPFPPPMYLPVTPAPPPPPPVIQEVEAIRAVVVESEKVLEKLQKKEATMREELTKRAKELHDKEFKLPYQNPSPCTDERAGCAECYRSNVQDPLKCAEAVKRFEACVRMAIRGGTTMGAAQ

SEQ ID NO: 64457 - protein, 182 aa, Triticum aestivum; identical to SEQ ID NO: 52012
  peptide (1)..(182): Ceres Seq. ID no. 13585556
  misc_feature (31)..(81): Pfam Name: Extensin-like region Pfam Description: Extensin-like region
  misc_feature (1)..(169): Homolog of NCBI NO: 18413789 NR Description: expressed protein [Arabidopsis thaliana]

SEQ ID NO: 64458 - protein, 159 aa, Triticum aestivum; identical to SEQ ID NO: 52013
  peptide (1)..(159): Ceres Seq. ID no. 13585557
  misc_feature (8)..(58): Pfam Name: Extensin-like region Pfam Description: Extensin-like region
  misc_feature (1)..(146): Homolog of NCBI NO: 18413789 NR Description: expressed protein [Arabidopsis thaliana]

SEQ ID NO: 64459 - DNA, 1101 bp, Triticum aestivum
  misc_feature (1)..(1101): Ceres Seq. ID no. 14313511
gtcctgtactagtagagtacatctctgtcccaatcgccgtgatccagctagcttactacacaggcaagggcgattcgatcgaggccgccgccgccgccgccggagacgaccccgccgccttcagttagttaagatacaaaaatggcctcattggacaccgtcacaggagatcttggcctggttgttttgtacctaagcaaggctgaggcaagagataagatctgcagagctatacaatatggatccaagttcctgagcaacggacaaccaggacctgcacagaatgtcgacaaatcaactagtcttgctcggaaagttttccggctgtttaagtttgttaatgatctccaagctctgattagcccccctgccaaaggaactccacttccgctgatcttacttggaaagtcgaagaacgcgatgctgtcaactttcctctttctggaccaaattgtttgggctgggagaacaggagtatacaagaacaaggagcgagcagaattccttggcaggattgccttttattgctttcttggatctaatacatgtactaccatcatcgagctagcggagcttcagcggctttccaaatcgatgaagaagttagagaaggacctcaagcaccaagagctgtacaagaacgagcagtatcggatgaagctgaagaagtccaatgagaggctgcttgctctcatcaaatcgagccttgacatagttgttgcagtggggctgctgcaactggccccgaaaaaggtcactcctcgcgtcactggggcctttgggttcgctagctcgctcatcgcctgttaccagttgcttccagccccagccaaatccaagtgatctgcctgcccacctcgggccaggcagctggtgcatcgattggtgaaacggcggttgctgtcgctgatacttgataagaaataaatctggaccaaattgtccgtcctgtaggatataaccgaggattattgttgtggaagtcggcattgcccagggccatctcatagcctggttgatctgccttgccttatgacttgattatgtagcacgcttgtatttgtatggtctggtgtgccactatcatactataactgttgc

SEQ ID NO: 64460 - protein, 233 aa, Triticum aestivum
  peptide (1)..(233): Ceres Seq. ID no. 14313512
  misc_feature (11)..(226): Pfam Name: Peroxisomal biogenesis factor 11 (PEX11) Pfam Description: Peroxisomal biogenesis factor 11 (PEX11)
  misc_feature (131)..(233): Homolog of NCBI NO: 14335058 NR Description: At2g45740/F4I18.28 [Arabidopsis thaliana]
  misc_feature (1)..(233): Homolog of NCBI NO: 11358250 NR Description: hypothetical protein T27I15_160 - Arabidopsis
  misc_feature (1)..(233): Homolog of NCBI NO: 30695340 NR Description: expressed protein [Arabidopsis thaliana]
  misc_feature (3)..(225): Homolog of NCBI NO: 7486466 NR Description: hypothetical protein At2g45740 [imported] -
  misc_feature (3)..(233): Homolog of NCBI NO: 18406877 NR Description: expressed protein [Arabidopsis thaliana]
  misc_feature (1)..(233): Homolog of NCBI NO: 8489788 NR Description: unknown [Lycopersicon esculentum]
  misc_feature (1)..(233): Homolog of NCBI NO: 18378887 NR Description: expressed protein [Arabidopsis thaliana]
  misc_feature (1)..(229): Homolog of NCBI NO: 34898026 NR Description: ESTs AU064537(E31904),AU082147(E31904) correspond a region of the predicted gene.~Similar to Arabidopsis thaliana
  misc_feature (1)..(233): Homolog of NCBI NO: 25553559 NR Description: OSJNBa0038F22.7 [Oryza sativa (japonica
MASLDTVTGDLGLVVLYLSKAEARDKICRAIQYGSKFLSNGQPGPAQNVDKSTSLARKVFRLFKFVNDLQALISPPAKGTPLPLILLGKSKNAMLSTFLFLDQIVWAGRTGVYKNKERAEFLGRIAFYCFLGSNTCTTIIELAELQRLSKSMKKLEKDLKHQELYKNEQYRMKLKKSNERLLALIKSSLDIVVAVGLLQLAPKKVTPRVTGAFGFASSLIACYQLLPAPAKSK

SEQ ID NO: 64461 - protein, 140 aa, Triticum aestivum
  peptide (1)..(140): Ceres Seq. ID no. 14313513
  misc_feature (1)..(133): Pfam Name: Peroxisomal biogenesis factor 11 (PEX11) Pfam Description: Peroxisomal biogenesis factor 11 (PEX11)
  misc_feature (38)..(140): Homolog of NCBI NO: 14335058 NR Description: At2g45740/F4I18.28 [Arabidopsis thaliana]
  misc_feature (1)..(140): Homolog of NCBI NO: 11358250 NR Description: hypothetical protein T27I15_160 - Arabidopsis
  misc_feature (1)..(140): Homolog of NCBI NO: 30695340 NR Description: expressed protein [Arabidopsis thaliana]
  misc_feature (1)..(132): Homolog of NCBI NO: 7486466 NR Description: hypothetical protein At2g45740 [imported] -
  misc_feature (1)..(140): Homolog of NCBI NO: 18406877 NR Description: expressed protein [Arabidopsis thaliana]
  misc_feature (1)..(140): Homolog of NCBI NO: 8489788 NR Description: unknown [Lycopersicon esculentum]
  misc_feature (1)..(140): Homolog of NCBI NO: 18378887 NR Description: expressed protein [Arabidopsis thaliana]
  misc_feature (1)..(136): Homolog of NCBI NO: 34898026 NR Description: ESTs AU064537(E31904),AU082147(E31904) correspond a region of the predicted gene.~Similar to Arabidopsis thaliana
  misc_feature (1)..(140): Homolog of NCBI NO: 25553559 NR Description: OSJNBa0038F22.7 [Oryza sativa (japonica
MLSTFLFLDQIVWAGRTGVYKNKERAEFLGRIAFYCFLGSNTCTTIIELAELQRLSKSMKKLEKDLKHQELYKNEQYRMKLKKSNERLLALIKSSLDIVVAVGLLQLAPKKVTPRVTGAFGFASSLIACYQLLPAPAKSK

SEQ ID NO: 64462 - DNA, 1205 bp, Triticum aestivum
  misc_feature (1)..(1205): Ceres Seq. ID no. 13597821
gagccggcgagccgcgcaaccttcgactccgaggggaaccgctcaccggagcaccaccgacccgcggacatggccgacgaggggaagcacctggagacgggccgggccgaccgctccgtctggctcatgaagtgcccgaccatcgtctcgcgcgcctggcaggaggccgccgccgcccaccgccgccgccgatgcgggaggccccaaccctaaccctaaccccgtcgtcgccaaggtcatcctctccttcgacccgctcagcaccgacgaggacccgaaccagttcaagatggagatggctcaaactaataatggcaacacaccgaagaattactctttaaatatgttcaaggattttgtgccaatgtgtgttttctcagagtctaaccaaggggtaagactaggttcctataatccctccccagaccccaccttgtgtgggagcttctatgcactgggtaagcttgcatgcgaaggaaaagtcgagcacaaatttgacatggaaccgcacaaagaaaacctttcagactatgcaaaattatgccgtgagaggactaaaaattctatgattaaaacaagaaaagtgcatgtacttgacaaggagcatgtgaacgtgcgcacaatgattagcatgattggtggcgggcctcattctggtccaaaggacaagaagaagccggcgccaaccagaactcctgaagtgaaaagaacacgcagggatcgtggggacattgaaaacatcctattcaagttatttgagaggcagccgaattggtcactgaggcatctaatgcaggaaactgatcaaccagagcaattcctgaaggagataatgaacgatctttgtgtctacaacaagagaggaccgaatcaagggacacatgagctcaagcctgaatacaagaagtctgttgaggacactagcgcgacctgaagtctatatcatctcttatgatatgctatacctgagagctagaagcccgtatgctctgataagttgaatgtgggtcatcgacagattctgactccagcctgttagttgctgatgaatcgcgtatgcttcatctggttgttctttgcaaaagtaatttttacgctgtataagcctcgagatatcttgttataccacggtttgccgtatcaaagatcctgagttttcagcatccttgtgtcccgaaggaaaagttgttcatgtttctgtgtat

SEQ ID NO: 64463 - protein, 214 aa, Triticum aestivum
  peptide (1)..(214): Ceres Seq. ID no. 15222203
  misc_feature (57)..(210): Pfam Name: Transcription initiation factor IIF, beta subunit Pfam Description: Transcription initiation factor IIF, beta
  misc_feature (58)..(205): Homolog of NCBI NO: 450771 NR Description: dTFIIF30
  misc_feature (56)..(212): Homolog of NCBI NO: 464520 NR Description: TRANSCRIPTION INITIATION FACTOR IIF, BETA SUBUNIT
  misc_feature (60)..(212): Homolog of NCBI NO: 19111874 NR Description: transcription initiation factor iif, beta subunit
  misc_feature (56)..(212): Homolog of NCBI NO: 38174399 NR Description: Unknown (protein for MGC:75790) [Silurana
  misc_feature (1)..(210): Homolog of NCBI NO: 11285686 NR Description: hypothetical protein T25B15.40 - Arabidopsis
  misc_feature (1)..(210): Homolog of NCBI NO: 15231173 NR Description: transcription initiation factor IIF, beta subunit
  misc_feature (1)..(35): Homolog of NCBI NO: 15222264 NR Description: transcription initiation factor -related
  misc_feature (57)..(210): Homolog of NCBI NO: 15222264 NR Description: transcription initiation factor -related
  misc_feature (1)..(35): Homolog of NCBI NO: 34909946 NR Description: putative transcription initiation factor
  misc_feature (57)..(214): Homolog of NCBI NO: 34909946 NR Description: putative transcription initiation factor
MEMAQTNNGNTPKNYSLNMFKDFVPMCVFSESNQGVRLGSYNPSPDPTLCGSFYALGKLACEGKVEHKFDMEPHKENLSDYAKLCRERTKNSMIKTRKVHVLDKEHVNVRTMISMIGGGPHSGPKDKKKPAPTRTPEVKRTRRDRGDIENILFKLFERQPNWSLRHLMQETDQPEQFLKEIMNDLCVYNKRGPNQGTHELKPEYKKSVEDTSAT

SEQ ID NO: 64464 - protein, 212 aa, Triticum aestivum
  peptide (1)..(212): Ceres Seq. ID no. 15222204
  misc_feature (55)..(208): Pfam Name: Transcription initiation factor IIF, beta subunit Pfam Description: Transcription initiation factor IIF, beta
  misc_feature (56)..(203): Homolog of NCBI NO: 450771 NR Description: dTFIIF30
  misc_feature (54)..(210): Homolog of NCBI NO: 464520 NR Description: TRANSCRIPTION INITIATION FACTOR IIF, BETA SUBUNIT
  misc_feature (58)..(210): Homolog of NCBI NO: 19111874 NR Description: transcription initiation factor iif, beta subunit
  misc_feature (54)..(210): Homolog of NCBI NO: 38174399 NR Description: Unknown (protein for MGC:75790) [Silurana
  misc_feature (1)..(208): Homolog of NCBI NO: 11285686 NR Description: hypothetical protein T25B15.40 - Arabidopsis
  misc_feature (1)..(208): Homolog of NCBI NO: 15231173 NR Description: transcription initiation factor IIF, beta subunit
  misc_feature (1)..(33): Homolog of NCBI NO: 15222264 NR Description: transcription initiation factor -related
  misc_feature (55)..(208): Homolog of NCBI NO: 15222264 NR Description: transcription initiation factor -related
  misc_feature (1)..(33): Homolog of NCBI NO: 34909946 NR Description: putative transcription initiation factor
  misc_feature (55)..(212): Homolog of NCBI NO: 34909946 NR Description: putative transcription initiation factor
MAQTNNGNTPKNYSLNMFKDFVPMCVFSESNQGVRLGSYNPSPDPTLCGSFYALGKLACEGKVEHKFDMEPHKENLSDYAKLCRERTKNSMIKTRKVHVLDKEHVNVRTMISMIGGGPHSGPKDKKKPAPTRTPEVKRTRRDRGDIENILFKLFERQPNWSLRHLMQETDQPEQFLKEIMNDLCVYNKRGPNQGTHELKPEYKKSVEDTSAT

SEQ ID NO: 64465 - protein, 196 aa, Triticum aestivum
  peptide (1)..(196): Ceres Seq. ID no. 15222205
  misc_feature (39)..(192): Pfam Name: Transcription initiation factor IIF, beta subunit Pfam Description: Transcription initiation factor IIF, beta
  misc_feature (40)..(187): Homolog of NCBI NO: 450771 NR Description: dTFIIF30
  misc_feature (38)..(194): Homolog of NCBI NO: 464520 NR Description: TRANSCRIPTION INITIATION FACTOR IIF, BETA SUBUNIT
  misc_feature (42)..(194): Homolog of NCBI NO: 19111874 NR Description: transcription initiation factor iif, beta subunit
  misc_feature (38)..(194): Homolog of NCBI NO: 38174399 NR Description: Unknown (protein for MGC:75790) [Silurana
  misc_feature (1)..(192): Homolog of NCBI NO: 11285686 NR Description: hypothetical protein T25B15.40 - Arabidopsis
  misc_feature (1)..(192): Homolog of NCBI NO: 15231173 NR Description: transcription initiation factor IIF, beta subunit
  misc_feature (1)..(17): Homolog of NCBI NO: 15222264 NR Description: transcription initiation factor -related
  misc_feature (39)..(192): Homolog of NCBI NO: 15222264 NR Description: transcription initiation factor -related
  misc_feature (1)..(17): Homolog of NCBI NO: 34909946 NR Description: putative transcription initiation factor
  misc_feature (39)..(196): Homolog of NCBI NO: 34909946 NR Description: putative transcription initiation factor
MFKDFVPMCVFSESNQGVRLGSYNPSPDPTLCGSFYALGKLACEGKVEHKFDMEPHKENLSDYAKLCRERTKNSMIKTRKVHVLDKEHVNVRTMISMIGGGPHSGPKDKKKPAPTRTPEVKRTRRDRGDIENILFKLFERQPNWSLRHLMQETDQPEQFLKEIMNDLCVYNKRGPNQGTHELKPEYKKSVEDTSAT

SEQ ID NO: 64466 - DNA, 648 bp, Triticum aestivum
  misc_feature (1)..(648): Ceres Seq. ID no. 12587729
cacaagtgggaaatcatggttgatctgttcttctacagggacccagaggaagctaaggagcttgaggaagatgaggctttgggtgctcctgagtacgctgcagttgcagagtacactgccccagcgggagatacctggggtgctgaatggccaggagctgcagctccagctgctgccgtcgaagccccggctggtgctgagtggactggtgctccagctcctgcggccgatggatgggatgccgttgcagcacctgcccctactggctgggaacagggcagtgctccggcacctgcagcagcaccagctgctactcagaactgggagtgaaggacttgacccaaggtttatgctactcggcactctggagtgaaggagttcggccgtggtttattggtgaaggctgtgttatttgccccgtcagtactctgttggtagacgctggttaagtagatttaatttttacagtactgagttatgttagatggaaatcgatttttgtcttcttggctttgcaggggttgggagttatcaccccagccttctgttgcctctcatcgaatagctttatttgaagttccattttgccagcaagtgtatggtcagattctcttgaaatgttataaaagcccggatcatgtgataccg

SEQ ID NO: 64467 - protein, 123 aa, Triticum aestivum
  peptide (1)..(123): Ceres Seq. ID no. 12587730
TSGKSWLICSSTGTQRKLRSLRKMRLWVLLSTLQLQSTLPQREIPGVLNGQELQLQLLPSKPRLVLSGLVLQLLRPMDGMPLQHLPLLAGNRAVLRHLQQHQLLLRTGSEGLDPRFMLLGTLE

SEQ ID NO: 64468 - protein, 109 aa, Triticum aestivum
  peptide (1)..(109): Ceres Seq. ID no. 12587731
  misc_feature (1)..(108): Homolog of NCBI NO: 27882337 NR Description: Similar to laminin receptor 1 (67kD, ribosomal
  misc_feature (3)..(108): Homolog of NCBI NO: 730683 NR Description: 40S RIBOSOMAL PROTEIN SA (P40) (34/67 KD LAMININ
  misc_feature (2)..(91): Homolog of NCBI NO: 15214300 NR Description: 40S ribosomal protein SA (p40) (Laminin
  misc_feature (2)..(109): Homolog of NCBI NO: 11467967 NR Description: 40S ribosomal protein SA (p40) (Laminin receptor
  misc_feature (2)..(109): Homolog of NCBI NO: 16380 NR Description: laminin receptor homologue [Arabidopsis thaliana]
  misc_feature (1)..(91): Homolog of NCBI NO: 8928330 NR Description: 40S ribosomal protein SA (p40)
  misc_feature (2)..(109): Homolog of NCBI NO: 15218458 NR Description: putative 40S ribosomal protein SA (laminin
  misc_feature (1)..(109): Homolog of NCBI NO: 15217294 NR Description: Putative 40S Ribosomal protein [Oryza sativa]
  misc_feature (1)..(108): Homolog of NCBI NO: 34906686 NR Description: putative 40S ribosomal protein
  misc_feature (1)..(108): Homolog of NCBI NO: 33146943 NR Description: putative 40S ribosomal protein
HKWEIMVDLFFYRDPEEAKELEEDEALGAPEYAAVAEYTAPAGDTWGAEWPGAAAPAAAVEAPAGAEWTGAPAPAADGWDAVAAPAPTGWEQGSAPAPAAAPAATQNWE

SEQ ID NO: 64469 - protein, 104 aa, Triticum aestivum
  peptide (1)..(104): Ceres Seq. ID no. 12587732
  misc_feature (1)..(103): Homolog of NCBI NO: 27882337 NR Description: Similar to laminin receptor 1 (67kD, ribosomal
  misc_feature (1)..(103): Homolog of NCBI NO: 730683 NR Description: 40S RIBOSOMAL PROTEIN SA (P40) (34/67 KD LAMININ
  misc_feature (1)..(86): Homolog of NCBI NO: 15214300 NR Description: 40S ribosomal protein SA (p40) (Laminin
  misc_feature (1)..(104): Homolog of NCBI NO: 11467967 NR Description: 40S ribosomal protein SA (p40) (Laminin receptor
  misc_feature (1)..(104): Homolog of NCBI NO: 16380 NR Description: laminin receptor homologue [Arabidopsis thaliana]
  misc_feature (1)..(86): Homolog of NCBI NO: 8928330 NR Description: 40S ribosomal protein SA (p40)
  misc_feature (1)..(104): Homolog of NCBI NO: 15218458 NR Description: putative 40S ribosomal protein SA (laminin
  misc_feature (1)..(104): Homolog of NCBI NO: 15217294 NR Description: Putative 40S Ribosomal protein [Oryza sativa]
  misc_feature (1)..(103): Homolog of NCBI NO: 34906686 NR Description: putative 40S ribosomal protein
  misc_feature (1)..(103): Homolog of NCBI NO: 33146943 NR Description: putative 40S ribosomal protein
MVDLFFYRDPEEAKELEEDEALGAPEYAAVAEYTAPAGDTWGAEWPGAAAPAAAVEAPAGAEWTGAPAPAADGWDAVAAPAPTGWEQGSAPAPAAAPAATQNWE

SEQ ID NO: 64470 - DNA, 909 bp, Triticum aestivum
  misc_feature (1)..(909): Ceres Seq. ID no. 13585560
ctcctaccccgccgcctcattgattttcctcctcttcccctccaccgcccgcccttgccgccgccgcgtaacccaacaacgccggggcaagagaaggagcagctatccaagcttacaagggctcggagagccatgtcgtcgtcgtcggcggcgccgatcggcctgtcgtgggcgccccagctgccatcccttgcggcggccggcggcagcaagaagggctcggcgccgacatcgagcattgacgcgcaggagtccctctggaagcccagcaacgagctcgtggacgggctctacgtgcccccgagggaccccaggaaggtcaacaagatggcgaggaagaacgtcaaggacaccaccggcaagggctggttcgacatgccggcgccgagcatcactcccgagttgaagaaagaccttgagattttgcagctgaggcatgtaatggaccctaaaaggcatttcaagaggtctggtaaatccaaggctcttccgaagtatttccaagttggaacggttattgagcctgcatctgagttctactcaagtaggttgacaaagcatgaacggaagcagaccttggttgatgagctgttatctgaccaaaaactcaagaactacaggatgcgtaaggtaagggaaattcaggtggcccggacacccggaggcaaccagaagtggaagaacaagggcaagcaaacgttcaaaagggccaaggacaggcggaaataggatcaatgtaaaacaaggaagaacagaagaacggagccaaggagaaatgggcgagcacggctataggttgtgcactccactgtaatgtgttgaattcatgtaactgaacgtatggaacttttctccccgcacttagagagatgagatcagtgtttgaggggatgatggtcaaagcattgt

SEQ ID NO: 64471 - protein, 242 aa, Triticum aestivum
  peptide (1)..(242): Ceres Seq. ID no. 13585561
  misc_feature (107)..(219): Homolog of NCBI NO: 21358313 NR Description: CG1142 gene product [Drosophila melanogaster]
  misc_feature (108)..(242): Homolog of NCBI NO: 39580393 NR Description: Hypothetical protein CBG17763 [Caenorhabditis
  misc_feature (109)..(242): Homolog of NCBI NO: 17537287 NR Description: Acidic protein mRNA (29.6 kD) [Caenorhabditis
  misc_feature (99)..(231): Homolog of NCBI NO: 8218113 NR Description: dJ561L24.2 (acidic 82 kDa protein) [Homo sapiens]
  misc_feature (99)..(235): Homolog of NCBI NO: 34859943 NR Description: similar to expressed sequence AA408582 [Rattus
  misc_feature (99)..(235): Homolog of NCBI NO: 24418931 NR Description: expressed sequence AA408582 [Mus musculus]
  misc_feature (112)..(242): Homolog of NCBI NO: 19114999 NR Description: hypothetical protein [Schizosaccharomyces pombe]
  misc_feature (45)..(222): Homolog of NCBI NO: 25405768 NR Description: T22H22.18 [imported] - Arabidopsis thaliana
  misc_feature (45)..(241): Homolog of NCBI NO: 15221891 NR Description: expressed protein [Arabidopsis thaliana]
  misc_feature (53)..(241): Homolog of NCBI NO: 30692242 NR Description: expressed protein [Arabidopsis thaliana]
LLPRRLIDFPPLPLHRPPLPPPRNPTTPGQEKEQLSKLTRARRAMSSSSAAPIGLSWAPQLPSLAAAGGSKKGSAPTSSIDAQESLWKPSNELVDGLYVPPRDPRKVNKMARKNVKDTTGKGWFDMPAPSITPELKKDLEILQLRHVMDPKRHFKRSGKSKALPKYFQVGTVIEPASEFYSSRLTKHERKQTLVDELLSDQKLKNYRMRKVREIQVARTPGGNQKWKNKGKQTFKRAKDRRK

SEQ ID NO: 64472 - protein, 198 aa, Triticum aestivum
  peptide (1)..(198): Ceres Seq. ID no. 13585562
  misc_feature (63)..(175): Homolog of NCBI NO: 21358313 NR Description: CG1142 gene product [Drosophila melanogaster]
  misc_feature (64)..(198): Homolog of NCBI NO: 39580393 NR Description: Hypothetical protein CBG17763 [Caenorhabditis
  misc_feature (65)..(198): Homolog of NCBI NO: 17537287 NR Description: Acidic protein mRNA (29.6 kD) [Caenorhabditis
  misc_feature (55)..(187): Homolog of NCBI NO: 8218113 NR Description: dJ561L24.2 (acidic 82 kDa protein) [Homo sapiens]
  misc_feature (55)..(191): Homolog of NCBI NO: 34859943 NR Description: similar to expressed sequence AA408582 [Rattus
  misc_feature (55)..(191): Homolog of NCBI NO: 24418931 NR Description: expressed sequence AA408582 [Mus musculus]
  misc_feature (68)..(198): Homolog of NCBI NO: 19114999 NR Description: hypothetical protein [Schizosaccharomyces pombe]
  misc_feature (1)..(178): Homolog of NCBI NO: 25405768 NR Description: T22H22.18 [imported] - Arabidopsis thaliana
  misc_feature (1)..(197): Homolog of NCBI NO: 15221891 NR Description: expressed protein [Arabidopsis thaliana]
  misc_feature (9)..(197): Homolog of NCBI NO: 30692242 NR Description: expressed protein [Arabidopsis thaliana]
MSSSSAAPIGLSWAPQLPSLAAAGGSKKGSAPTSSIDAQESLWKPSNELVDGLYVPPRDPRKVNKMARKNVKDTTGKGWFDMPAPSITPELKKDLEILQLRHVMDPKRHFKRSGKSKALPKYFQVGTVIEPASEFYSSRLTKHERKQTLVDELLSDQKLKNYRMRKVREIQVARTPGGNQKWKNKGKQTFKRAKDRRK

SEQ ID NO: 64473 - protein, 134 aa, Triticum aestivum
  peptide (1)..(134): Ceres Seq. ID no. 13585563
SYPAASLIFLLFPSTARPCRRRVTQQRRGKRRSSYPSLQGLGEPCRRRRRRRSACRGRPSCHPLRRPAAARRARRRHRALTRRSPSGSPATSSWTGSTCPRGTPGRSTRWRGRTSRTPPARAGSTCRRRASLPS

SEQ ID NO: 64474 - DNA, 963 bp, Triticum aestivum
  misc_feature (1)..(963): Ceres Seq. ID no. 12618538
gcaaccaccgcagagcacgccatcgatcgaatcgagcgaaccgaagccaagaagagtttcctcgttgctagcgccgctaagtagacgtcgacggcgatgggcaagatgaagatgccggccctgttccgccgccgctcctcctccaagtcgcgctccgcgtcgccgccgacgactcctccccgggaggagcagcaggaggagagccggcaggccatcgggtccccggcgcggtcggcggaggaggagatggagcgggtcttccgcaagttcgacgccaacggcgacggccggatctcgcggccggagctggccgccctcttcgagagcctgggccacgcggccaccgaggacgagctgacccgcatgatgttcgaggcggacgcggacggcgacggcttcatcagcctggaggagttcgcggcgctcaacgccacggcgcccggcgacgacgaggaggacctgcggctcgccttcaaggtgttcgacgcggacggcagcggcgacatctcggccgcggagctggcgcacgtgctccacggcctcggcgagaaggccacggtccagcagtgccggcgcatgatcgagggcgtcgacaagaacggcgacggcctcatctccttcgacgagttcaaggtcatgatggccgccggcttcgctgccaagatggcctgatccgtcctccctcttcttggattcaatccgttgtcgtccgcggacagattgatttcgtccacgccttcctcgctccttcctctcgcgtgcggtgcagattaagtgggaattaagtgtacataattcaaggattaaagggcgggcattagagcgtacgtgcgttagtagattctttgtttctttgtcttcttggtggtgccgagtacgtaataaccagaaatctctcgcgaataattgtctcgcgattatctaaagatctgagatataatggaattggtgaggttgccggtt

SEQ ID NO: 64475 - protein, 191 aa, Triticum aestivum
  peptide (1)..(191): Ceres Seq. ID no. 12618539
  misc_feature (157)..(185): Pfam Name: EF hand Pfam Description: EF hand
  misc_feature (50)..(184): Homolog of NCBI NO: 2392137 NR Description: Calmodulin Mutant With A Two Residue Deletion In
  misc_feature (48)..(188): Homolog of NCBI NO: 15231470 NR Description: putative calmodulin; protein id: At3g07490.1
  misc_feature (50)..(188): Homolog of NCBI NO: 15235516 NR Description: putative calmodulin; protein id: At4g12860.1
  misc_feature (48)..(183): Homolog of NCBI NO: 13397927 NR Description: putative calmodulin-related protein [Medicago
  misc_feature (36)..(188): Homolog of NCBI NO: 15240340 NR Description: CALMODULIN-RELATED PROTEIN 2, TOUCH-INDUCED (TCH2)
  misc_feature (21)..(182): Homolog of NCBI NO: 14589311 NR Description: calcium binding protein [Sesbania rostrata]
  misc_feature (22)..(188): Homolog of NCBI NO: 34895640 NR Description: OSJNBa0083M16.33 [Oryza sativa (japonica
  misc_feature (50)..(189): Homolog of NCBI NO: 14423843 NR Description: Polcalcin Jun o 2 (Calcium-binding pollen
  misc_feature (44)..(185): Homolog of NCBI NO: 15221781 NR Description: putative calmodulin; protein id: At1g24620.1
  misc_feature (1)..(191): Homolog of NCBI NO: 19386815 NR Description: B1147A04.10 [Oryza sativa (japonica
MGKMKMPALFRRRSSSKSRSASPPTTPPREEQQEESRQAIGSPARSAEEEMERVFRKFDANGDGRISRPELAALFESLGHAATEDELTRMMFEADADGDGFISLEEFAALNATAPGDDEEDLRLAFKVFDADGSGDISAAELAHVLHGLGEKATVQQCRRMIEGVDKNGDGLISFDEFKVMMAAGFAAKMA

SEQ ID NO: 64476 - protein, 188 aa, Triticum aestivum
  peptide (1)..(188): Ceres Seq. ID no. 12618540
  misc_feature (154)..(182): Pfam Name: EF hand Pfam Description: EF hand
  misc_feature (47)..(181): Homolog of NCBI NO: 2392137 NR Description: Calmodulin Mutant With A Two Residue Deletion In
  misc_feature (45)..(185): Homolog of NCBI NO: 15231470 NR Description: putative calmodulin; protein id: At3g07490.1
  misc_feature (47)..(185): Homolog of NCBI NO: 15235516 NR Description: putative calmodulin; protein id: At4g12860.1
  misc_feature (45)..(180): Homolog of NCBI NO: 13397927 NR Description: putative calmodulin-related protein [Medicago
  misc_feature (33)..(185): Homolog of NCBI NO: 15240340 NR Description: CALMODULIN-RELATED PROTEIN 2, TOUCH-INDUCED (TCH2)
  misc_feature (18)..(179): Homolog of NCBI NO: 14589311 NR Description: calcium binding protein [Sesbania rostrata]
  misc_feature (19)..(185): Homolog of NCBI NO: 34895640 NR Description: OSJNBa0083M16.33 [Oryza sativa (japonica
  misc_feature (47)..(186): Homolog of NCBI NO: 14423843 NR Description: Polcalcin Jun o 2 (Calcium-binding pollen
  misc_feature (41)..(182): Homolog of NCBI NO: 15221781 NR Description: putative calmodulin; protein id: At1g24620.1
  misc_feature (1)..(188): Homolog of NCBI NO: 19386815 NR Description: B1147A04.10 [Oryza sativa (japonica
MKMPALFRRRSSSKSRSASPPTTPPREEQQEESRQAIGSPARSAEEEMERVFRKFDANGDGRISRPELAALFESLGHAATEDELTRMMFEADADGDGFISLEEFAALNATAPGDDEEDLRLAFKVFDADGSGDISAAELAHVLHGLGEKATVQQCRRMIEGVDKNGDGLISFDEFKVMMAAGFAAKMA

SEQ ID NO: 64477 - protein, 186 aa, Triticum aestivum
  peptide (1)..(186): Ceres Seq. ID no. 12618541
  misc_feature (152)..(180): Pfam Name: EF hand Pfam Description: EF hand
  misc_feature (45)..(179): Homolog of NCBI NO: 2392137 NR Description: Calmodulin Mutant With A Two Residue Deletion In
  misc_feature (43)..(183): Homolog of NCBI NO: 15231470 NR Description: putative calmodulin; protein id: At3g07490.1
  misc_feature (45)..(183): Homolog of NCBI NO: 15235516 NR Description: putative calmodulin; protein id: At4g12860.1
  misc_feature (43)..(178): Homolog of NCBI NO: 13397927 NR Description: putative calmodulin-related protein [Medicago
  misc_feature (31)..(183): Homolog of NCBI NO: 15240340 NR Description: CALMODULIN-RELATED PROTEIN 2, TOUCH-INDUCED (TCH2)
  misc_feature (16)..(177): Homolog of NCBI NO: 14589311 NR Description: calcium binding protein [Sesbania rostrata]
  misc_feature (17)..(183): Homolog of NCBI NO: 34895640 NR Description: OSJNBa0083M16.33 [Oryza sativa (japonica
  misc_feature (45)..(184): Homolog of NCBI NO: 14423843 NR Description: Polcalcin Jun o 2 (Calcium-binding pollen
  misc_feature (39)..(180): Homolog of NCBI NO: 15221781 NR Description: putative calmodulin; protein id: At1g24620.1
  misc_feature (1)..(186): Homolog of NCBI NO: 19386815 NR Description: B1147A04.10 [Oryza sativa (japonica
MPALFRRRSSSKSRSASPPTTPPREEQQEESRQAIGSPARSAEEEMERVFRKFDANGDGRISRPELAALFESLGHAATEDELTRMMFEADADGDGFISLEEFAALNATAPGDDEEDLRLAFKVFDADGSGDISAAELAHVLHGLGEKATVQQCRRMIEGVDKNGDGLISFDEFKVMMAAGFAAKMA

SEQ ID NO: 64478 - DNA, 1451 bp, Triticum aestivum
  misc_feature (1)..(1451): Ceres Seq. ID no. 12618197
aaaaagaaaaaatcaagctcccgtcgaaaagaagaaaggaaaaaacacagctctcacaccccgcctcggccgcgtctaaaaccctagcccccgccgccggcgagcgacgagatgatggaccagcggtggcgcccgacggtgaacgagcgggagttcatcgagcaggccctccagtcggacctccgcgtcgacggccgccgccccttcgacttccaccccttcgacttccgcaagctcacaatctccttcggcagggaggacggctccgcggaggtgctgctcggcgagacgtgcgtgatgggctatgtgaccgcccaattggtcccgccgtacaaggacaggccgaacgagggcacgctcgccatattcaccgagttctcgcccatggctgatcccgcctttgagccggggcggcccggggaagcggcgattgagctgggtcgtgtcatcgatcgtggcctaagggagagcagagccgtggatatggaatccttgtgtgttgttgcggggaagcatgtctgggcggtgcgcgttgaccttcacattctggacaatggggggaatctcatcgatgcagctaacatcgctgcattggcagctttgtctacattccggaggcctgaatgcacggttggtggggatgatggtcagcaagtcacagtacatgaccctgaggtcatggatccacttcccctaacaattcatcatctccccatagctgtaacctttgcatattttggtgacggtaatatcatggttatcgatccaacatacaaggaagaagctgttatgggaggaaggatgacagctacggttaactcgaatggtgatgtctgtgccattcagaaagctggtggagagggtgtcatgtcaagtgttatcatgcagtgtttaaggattgcttcggttaaagctgctgatatcacaagcaaaataaagaccaaggtcgataagtacactactgataaggcattgcagaaagtaaagcgtactccagcaatagttgctaaagaagttaacgttcctgatgtcgctatgaaggagagcatgcatagtgcaatggaaaaccaaacctcgaaggcacccaatgatgatcagcagataagtgaagattcaccagctgtagcaaatgacaaaaagcatgaggatgtcgagccagtgttgattgaatctaatccagaggtgaaaagtgtgtcaaattctggaagtgctggagagtcagatgaggtcaaggaaagcagatcaccggagagtctagtagatgctgtcaaaccaaaacataaaaggaagaagaaacaacatggcaagagttagattgactgtagccttaaagtcttaactgcatgatggttgcagacacagttagttagctttcttattctcttgatgtgcacatgctacagtggtacattattaaattttaagcaacgagtaatagtgctatcctttgc

SEQ ID NO: 64479 - protein, 400 aa, Triticum aestivum
  peptide (1)..(400): Ceres Seq. ID no. 12618198
  misc_feature (38)..(170): Pfam Name: 3' exoribonuclease family, domain 1 Pfam Description: 3' exoribonuclease family, domain 1
  misc_feature (2)..(289): Homolog of NCBI NO: 19075183 NR Description: putative exosome 3'-5' exoribonuclease complex
  misc_feature (25)..(387): Homolog of NCBI NO: 14285675 NR Description: Exosome complex exonuclease RRP45 autoantigen 1) (Autoantigen PM/Scl 1) (Polymyositis/scleroderma
  misc_feature (8)..(384): Homolog of NCBI NO: 12847890 NR Description: unnamed protein product [Mus musculus]
  misc_feature (8)..(384): Homolog of NCBI NO: 9506981 NR Description: polymyositis/scleroderma autoantigen 1 [Mus
  misc_feature (8)..(375): Homolog of NCBI NO: 34856829 NR Description: similar to polymyositis scleroderma overlap
  misc_feature (8)..(387): Homolog of NCBI NO: 28172868 NR Description: polymyositis/scleroderma autoantigen 1 [Homo
  misc_feature (8)..(387): Homolog of NCBI NO: 28172864 NR Description: polymyositis/scleroderma autoantigen 1 [Homo
  misc_feature (2)..(309): Homolog of NCBI NO: 21536581 NR Description: nucleolar autoantigen-like protein [Arabidopsis
  misc_feature (2)..(309): Homolog of NCBI NO: 18399822 NR Description: expressed protein
  misc_feature (6)..(398): Homolog of NCBI NO: 15232342 NR Description: nucleolar autoantigen - like protein; protein id:
MMDQRWRPTVNEREFIEQALQSDLRVDGRRPFDFHPFDFRKLTISFGREDGSAEVLLGETCVMGYVTAQLVPPYKDRPNEGTLAIFTEFSPMADPAFEPGRPGEAAIELGRVIDRGLRESRAVDMESLCVVAGKHVWAVRVDLHILDNGGNLIDAANIAALAALSTFRRPECTVGGDDGQQVTVHDPEVMDPLPLTIHHLPIAVTFAYFGDGNIMVIDPTYKEEAVMGGRMTATVNSNGDVCAIQKAGGEGVMSSVIMQCLRIASVKAADITSKIKTKVDKYTTDKALQKVKRTPAIVAKEVNVPDVAMKESMHSAMENQTSKAPNDDQQISEDSPAVANDKKHEDVEPVLIESNPEVKSVSNSGSAGESDEVKESRSPESLVDAVKPKHKRKKKQHGKS

SEQ ID NO: 64480 - protein, 399 aa, Triticum aestivum
  peptide (1)..(399): Ceres Seq. ID no. 12618199
  misc_feature (37)..(169): Pfam Name: 3' exoribonuclease family, domain 1 Pfam Description: 3' exoribonuclease family, domain 1
  misc_feature (1)..(288): Homolog of NCBI NO: 19075183 NR Description: putative exosome 3'-5' exoribonuclease complex
  misc_feature (24)..(386): Homolog of NCBI NO: 14285675 NR Description: Exosome complex exonuclease RRP45 autoantigen 1) (Autoantigen PM/Scl 1) (Polymyositis/scleroderma
  misc_feature (7)..(383): Homolog of NCBI NO: 12847890 NR Description: unnamed protein product [Mus musculus]
  misc_feature (7)..(383): Homolog of NCBI NO: 9506981 NR Description: polymyositis/scleroderma autoantigen 1 [Mus
  misc_feature (7)..(374): Homolog of NCBI NO: 34856829 NR Description: similar to polymyositis scleroderma overlap
  misc_feature (7)..(386): Homolog of NCBI NO: 28172868 NR Description: polymyositis/scleroderma autoantigen 1 [Homo
  misc_feature (7)..(386): Homolog of NCBI NO: 28172864 NR Description: polymyositis/scleroderma autoantigen 1 [Homo
  misc_feature (1)..(308): Homolog of NCBI NO: 21536581 NR Description: nucleolar autoantigen-like protein [Arabidopsis
  misc_feature (1)..(308): Homolog of NCBI NO: 18399822 NR Description: expressed protein
  misc_feature (5)..(397): Homolog of NCBI NO: 15232342 NR Description: nucleolar autoantigen - like protein; protein id:
MDQRWRPTVNEREFIEQALQSDLRVDGRRPFDFHPFDFRKLTISFGREDGSAEVLLGETCVMGYVTAQLVPPYKDRPNEGTLAIFTEFSPMADPAFEPGRPGEAAIELGRVIDRGLRESRAVDMESLCVVAGKHVWAVRVDLHILDNGGNLIDAANIAALAALSTFRRPECTVGGDDGQQVTVHDPEVMDPLPLTIHHLPIAVTFAYFGDGNIMVIDPTYKEEAVMGGRMTATVNSNGDVCAIQKAGGEGVMSSVIMQCLRIASVKAADITSKIKTKVDKYTTDKALQKVKRTPAIVAKEVNVPDVAMKESMHSAMENQTSKAPNDDQQISEDSPAVANDKKHEDVEPVLIESNPEVKSVSNSGSAGESDEVKESRSPESLVDAVKPKHKRKKKQHGKS

SEQ ID NO: 64481 - protein, 338 aa, Triticum aestivum
  peptide (1)..(338): Ceres Seq. ID no. 12618200
  misc_feature (1)..(108): Pfam Name: 3' exoribonuclease family, domain 1 Pfam Description: 3' exoribonuclease family, domain 1
  misc_feature (1)..(227): Homolog of NCBI NO: 19075183 NR Description: putative exosome 3'-5' exoribonuclease complex
  misc_feature (1)..(325): Homolog of NCBI NO: 14285675 NR Description: Exosome complex exonuclease RRP45 autoantigen 1) (Autoantigen PM/Scl 1) (Polymyositis/scleroderma
  misc_feature (1)..(322): Homolog of NCBI NO: 12847890 NR Description: unnamed protein product [Mus musculus]
  misc_feature (1)..(322): Homolog of NCBI NO: 9506981 NR Description: polymyositis/scleroderma autoantigen 1 [Mus
  misc_feature (1)..(313): Homolog of NCBI NO: 34856829 NR Description: similar to polymyositis scleroderma overlap
  misc_feature (1)..(325): Homolog of NCBI NO: 28172868 NR Description: polymyositis/scleroderma autoantigen 1 [Homo
  misc_feature (1)..(325): Homolog of NCBI NO: 28172864 NR Description: polymyositis/scleroderma autoantigen 1 [Homo
  misc_feature (1)..(247): Homolog of NCBI NO: 21536581 NR Description: nucleolar autoantigen-like protein [Arabidopsis
  misc_feature (1)..(247): Homolog of NCBI NO: 18399822 NR Description: expressed protein
  misc_feature (1)..(336): Homolog of NCBI NO: 15232342 NR Description: nucleolar autoantigen - like protein; protein id:
MGYVTAQLVPPYKDRPNEGTLAIFTEFSPMADPAFEPGRPGEAAIELGRVIDRGLRESRAVDMESLCVVAGKHVWAVRVDLHILDNGGNLIDAANIAALAALSTFRRPECTVGGDDGQQVTVHDPEVMDPLPLTIHHLPIAVTFAYFGDGNIMVIDPTYKEEAVMGGRMTATVNSNGDVCAIQKAGGEGVMSSVIMQCLRIASVKAADITSKIKTKVDKYTTDKALQKVKRTPAIVAKEVNVPDVAMKESMHSAMENQTSKAPNDDQQISEDSPAVANDKKHEDVEPVLIESNPEVKSVSNSGSAGESDEVKESRSPESLVDAVKPKHKRKKKQHGKS

SEQ ID NO: 64482 - DNA, 1459 bp, Triticum aestivum
  misc_feature (1)..(1459): Ceres Seq. ID no. 13597740
attttctctcgttgtccatttttccccaaacacgcggacgaaggaatcacccctaaaccctcctctccccgccgccgaagccgacatggccgtccaccacctcctccgccgcgggatctctggtgggtctcccctccaccctctgcgcggcctcctcctcgtatcgcaggagctcgggtggcgtcaggcgagctcggcggcggcgggggacgcagtggctgagctgaggggcgcgcgggaggacgtcaagcagctgctgaaggagaagtcctgccatcccatcctggttcgcttgggttggcatgatgctggtacttacgacaagaacattagtgagtggccccagtgtggtggagctaatggtagcttgaggtttgaaattgagttaaaacatgcggctaatgctggtcttgtgaatgctttgaagcttattcaagccatcaaggacaaatatgcaggtgttacttatgcggatctgtttcagcttgccagtgctacagctgtcgaggaagctggtggccccaaaatccccatgatctatggaagggttgatgtttctgcccctgatcaatgcccaccagaggggagactccctgctgctggtccgccttcacctgctgaacatttgcgagaagtattctacagaatgggcctgaatgacaaggaaattgttgcattgtcaggagcacacacacttggacgatcaagaccagagcgcagcggctggggtaaacctgaaacgaaatacactaaaaatggacctggtgcacctggggggcaatcttggacatcacagtggctcaagtttgataacagctatttcaaggatgtcaaagaacgacgagacgaggaccttctagttctgcctactgatgctgtgctctttgaggattcatcattcaagatttatgctgaaaagtatgctgaggaccaggatacattttttgaagactatgctgaagctcatgctaaattgagcaatcttgggtctaagtttgaccctcctaagggtgtatcactagactagctgatatttgctgctgatgaactgcattttggtgagtgaagatgacaaggctctgtttcttcaaactatttttgaggtgtaacaaattcggatccactgaagcagtattttgagttgtgtgctccattaccagaaataaaagcagcattggacagttcccggaccgaacatttatgatacttacatgttgtatcttcaaggtgatcaaatataaaacaatactaccaggctgttgcccctttgcgatatgtctgaaacagaacggtgcctagcaagcacactatgggatattttatttatctttttgtttgatcnnnaaaaaaaaaaaaaaaaaaaaaaaaaaaaaaaaaaaaaaaaaaaaaaaaaaaaaaaaaaaggaaaaaaaaaaaaaaaaaggtttttcaatcccgccaacctcgagggggggcccgg

SEQ ID NO: 64483 - protein, 341 aa, Triticum aestivum
  peptide (1)..(341): Ceres Seq. ID no. 13597741
  misc_feature (78)..(310): Pfam Name: Peroxidase Pfam Description: Peroxidase
  misc_feature (67)..(341): Homolog of NCBI NO: 25992557 NR Description: thylakoid-bound ascorbate peroxidase [Triticum
  misc_feature (63)..(341): Homolog of NCBI NO: 21039134 NR Description: ascorbate peroxidase [Lycopersicon esculentum]
  misc_feature (63)..(341): Homolog of NCBI NO: 32879783 NR Description: thylakoid-bound ascorbate peroxidase
  misc_feature (67)..(341): Homolog of NCBI NO: 34809902 NR Description: Chain A, Crystal Structure Of Chloroplastic Peroxidase From Tobacco Plants And Structural Insights For Its
  misc_feature (6)..(341): Homolog of NCBI NO: 32879781 NR Description: stromal ascorbate peroxidase
  misc_feature (2)..(341): Homolog of NCBI NO: 7484621 NR Description: L-ascorbate peroxidase (EC 1.11.1.11) precursor -
  misc_feature (2)..(341): Homolog of NCBI NO: 3202026 NR Description: stromal L-ascorbate peroxidase precursor
  misc_feature (8)..(341): Homolog of NCBI NO: 4996604 NR Description: stromal ascorbate peroxidase [Nicotiana tabacum]
  misc_feature (8)..(341): Homolog of NCBI NO: 4996602 NR Description: thylakoid-bound ascorbate peroxidase [Nicotiana
  misc_feature (65)..(341): Homolog of NCBI NO: 24496465 NR Description: stromal ascorbate peroxidase [Retama raetam]
FSLVVHFSPNTRTKESPLNPPLPAAEADMAVHHLLRRGISGGSPLHPLRGLLLVSQELGWRQASSAAAGDAVAELRGAREDVKQLLKEKSCHPILVRLGWHDAGTYDKNISEWPQCGGANGSLRFEIELKHAANAGLVNALKLIQAIKDKYAGVTYADLFQLASATAVEEAGGPKIPMIYGRVDVSAPDQCPPEGRLPAAGPPSPAEHLREVFYRMGLNDKEIVALSGAHTLGRSRPERSGWGKPETKYTKNGPGAPGGQSWTSQWLKFDNSYFKDVKERRDEDLLVLPTDAVLFEDSSFKIYAEKYAEDQDTFFEDYAEAHAKLSNLGSKFDPPKGVSLD

SEQ ID NO: 64484 - protein, 313 aa, Triticum aestivum
  peptide (1)..(313): Ceres Seq. ID no. 13597742
  misc_feature (50)..(282): Pfam Name: Peroxidase Pfam Description: Peroxidase
  misc_feature (39)..(313): Homolog of NCBI NO: 25992557 NR Description: thylakoid-bound ascorbate peroxidase [Triticum
  misc_feature (35)..(313): Homolog of NCBI NO: 21039134 NR Description: ascorbate peroxidase [Lycopersicon esculentum]
  misc_feature (35)..(313): Homolog of NCBI NO: 32879783 NR Description: thylakoid-bound ascorbate peroxidase
  misc_feature (39)..(313): Homolog of NCBI NO: 34809902 NR Description: Chain A, Crystal Structure Of Chloroplastic Peroxidase From Tobacco Plants And Structural Insights For Its
  misc_feature (1)..(313): Homolog of NCBI NO: 32879781 NR Description: stromal ascorbate peroxidase
  misc_feature (1)..(313): Homolog of NCBI NO: 7484621 NR Description: L-ascorbate peroxidase (EC 1.11.1.11) precursor -
  misc_feature (1)..(313): Homolog of NCBI NO: 3202026 NR Description: stromal L-ascorbate peroxidase precursor
  misc_feature (1)..(313): Homolog of NCBI NO: 4996604 NR Description: stromal ascorbate peroxidase [Nicotiana tabacum]
  misc_feature (1)..(313): Homolog of NCBI NO: 4996602 NR Description: thylakoid-bound ascorbate peroxidase [Nicotiana
  misc_feature (37)..(313): Homolog of NCBI NO: 24496465 NR Description: stromal ascorbate peroxidase [Retama raetam]
MAVHHLLRRGISGGSPLHPLRGLLLVSQELGWRQASSAAAGDAVAELRGAREDVKQLLKEKSCHPILVRLGWHDAGTYDKNISEWPQCGGANGSLRFEIELKHAANAGLVNALKLIQAIKDKYAGVTYADLFQLASATAVEEAGGPKIPMIYGRVDVSAPDQCPPEGRLPAAGPPSPAEHLREVFYRMGLNDKEIVALSGAHTLGRSRPERSGWGKPETKYTKNGPGAPGGQSWTSQWLKFDNSYFKDVKERRDEDLLVLPTDAVLFEDSSFKIYAEKYAEDQDTFFEDYAEAHAKLSNLGSKFDPPKGVSLD

SEQ ID NO: 64485 - DNA, 816 bp, Triticum aestivum
  misc_feature (1)..(816): Ceres Seq. ID no. 13597931
accaaaccccaaacccttctccccttttcttccccaacccttccggcggcggcggcggcgcgttggctctcgctccctccccaccgtctccgatggccctcgtcgccggctcctacgagcgcttcatctggggcttctccctcaaggccctcgccgcctccgccgccgaggaggcccagcccctcgcgccgctcttctcctacccggcccacgcggggcccatccgctgcgtggcggccgcgccgcgggcggggctcgcggcctccggcggcgccgacgactccatccgcctctacgacctgcgcgccgccgccgacctcggcccgcttctcgacccctccgccgccgtctccgcgctcgccttccactccatcggccccgtcccgcgcaacctcctcgccgcctccgacgacggcctgctccacctctacgacgccgacggctttgcgctcctcacctcgctccgcgtcttcccgcggggccgcgaggccgccgacgccctcgccgtgcacccctcgggccgggtcgcgctcgccgtcggccgcgccgggggcctctccatggtcaacctcctccgcggccgccgcagcttcacctgccgcctcgagcgcgccgcctccaccgtcgcctacgccgaggacgccgccggcggtgascgttttktkwtkkyykyykwgkwkwaggtywyyktkcatgactccgaggacgccaggatcatattcmatkwgatgccctkmgacataagagggttctcrccttagcwccatcacwagaactsraawttctgggtactgaactgaaaatcattatccatgt

SEQ ID NO: 64486 - protein, 252 aa, Triticum aestivum
  peptide (1)..(252): Ceres Seq. ID no. 15222233
  misc_feature (31)..(239): Homolog of NCBI NO: 25404514 NR Description: hypothetical protein F16G16.2 [imported] -
  misc_feature (31)..(239): Homolog of NCBI NO: 23306444 NR Description: Unknown protein [Arabidopsis thaliana]
  misc_feature (31)..(239): Homolog of NCBI NO: 15217832 NR Description: transducin / WD-40 repeat protein family
  misc_feature (218)..(218): Xaa is any aa, unknown or other
  misc_feature (221)..(221): Xaa is any aa, unknown or other
  misc_feature (222)..(222): Xaa is any aa, unknown or other
  misc_feature (223)..(223): Xaa is any aa, unknown or other
  misc_feature (224)..(224): Xaa is any aa, unknown or other
  misc_feature (225)..(225): Xaa is any aa, unknown or other
  misc_feature (226)..(226): Xaa is any aa, unknown or other
  misc_feature (227)..(227): Xaa is any aa, unknown or other
  misc_feature (228)..(228): Xaa is any aa, unknown or other
  misc_feature (229)..(229): Xaa is any aa, unknown or other
  misc_feature (230)..(230): Xaa is any aa, unknown or other
  misc_feature (241)..(241): Xaa is any aa, unknown or other
  misc_feature (242)..(242): Xaa is any aa, unknown or other
  misc_feature (245)..(245): Xaa is any aa, unknown or other
  misc_feature (251)..(251): Xaa is any aa, unknown or other
QTPNPSPLFFPNPSGGGGGALALAPSPPSPMALVAGSYERFIWGFSLKALAASAAEEAQPLAPLFSYPAHAGPIRCVAAAPRAGLAASGGADDSIRLYDLRAAADLGPLLDPSAAVSALAFHSIGPVPRNLLAASDDGLLHLYDADGFALLTSLRVFPRGREAADALAVHPSGRVALAVGRAGGLSMVNLLRGRRSFTCRLERAASTVAYAEDAAGGXRFXXXXXXXXXXHDSEDARIIFXXMPXDIRGFXP

SEQ ID NO: 64487 - protein, 247 aa, Triticum aestivum
  peptide (1)..(247): Ceres Seq. ID no. 15222234
  misc_feature (26)..(216): Pfam Name: Extensin-like region Pfam Description: Extensin-like region
  misc_feature (1)..(247): Homolog of NCBI NO: 186396 NR Description: mucin
  misc_feature (1)..(216): Homolog of NCBI NO: 15233976 NR Description: leucine-rich repeat extensin family [Arabidopsis
  misc_feature (9)..(215): Homolog of NCBI NO: 20138131 NR Description: Vegetative cell wall protein gp1 precursor
  misc_feature (14)..(217): Homolog of NCBI NO: 20138131 NR Description: Vegetative cell wall protein gp1 precursor
  misc_feature (3)..(216): Homolog of NCBI NO: 20138131 NR Description: Vegetative cell wall protein gp1 precursor
  misc_feature (1)..(247): Homolog of NCBI NO: 188864 NR Description: mucin
  misc_feature (3)..(217): Homolog of NCBI NO: 27375632 NR Description: blr0521 [Bradyrhizobium japonicum]
  misc_feature (3)..(215): Homolog of NCBI NO: 20138131 NR Description: Vegetative cell wall protein gp1 precursor
  misc_feature (8)..(245): Homolog of NCBI NO: 23017082 NR Description: hypothetical protein [Thermobifida fusca]
  misc_feature (3)..(241): Homolog of NCBI NO: 20138131 NR Description: Vegetative cell wall protein gp1 precursor
  misc_feature (219)..(219): Xaa is any aa, unknown or other
  misc_feature (221)..(221): Xaa is any aa, unknown or other
  misc_feature (222)..(222): Xaa is any aa, unknown or other
  misc_feature (223)..(223): Xaa is any aa, unknown or other
  misc_feature (224)..(224): Xaa is any aa, unknown or other
  misc_feature (225)..(225): Xaa is any aa, unknown or other
  misc_feature (226)..(226): Xaa is any aa, unknown or other
  misc_feature (227)..(227): Xaa is any aa, unknown or other
  misc_feature (229)..(229): Xaa is any aa, unknown or other
  misc_feature (230)..(230): Xaa is any aa, unknown or other
  misc_feature (231)..(231): Xaa is any aa, unknown or other
  misc_feature (241)..(241): Xaa is any aa, unknown or other
  misc_feature (242)..(242): Xaa is any aa, unknown or other
  misc_feature (243)..(243): Xaa is any aa, unknown or other
  misc_feature (246)..(246): Xaa is any aa, unknown or other
TKPQTLLPFSSPTLPAAAAARWLSLPPHRLRWPSSPAPTSASSGASPSRPSPPPPPRRPSPSRRSSPTRPTRGPSAAWRPRRGRGSRPPAAPTTPSASTTCAPPPTSARFSTPPPPSPRSPSTPSAPSRATSSPPPTTACSTSTTPTALRSSPRSASSRGAARPPTPSPCTPRAGSRSPSAAPGASPWSTSSAAAAASPAASSAPPPPSPTPRTPPAVXVXXXXXXXRXXXMTPRTPGSYXXXCPXT

SEQ ID NO: 64488 - protein, 222 aa, Triticum aestivum
  peptide (1)..(222): Ceres Seq. ID no. 15222235
  misc_feature (1)..(209): Homolog of NCBI NO: 23306444 NR Description: Unknown protein [Arabidopsis thaliana]
  misc_feature (1)..(209): Homolog of NCBI NO: 25404514 NR Description: hypothetical protein F16G16.2 [imported] -
  misc_feature (1)..(209): Homolog of NCBI NO: 15217832 NR Description: transducin / WD-40 repeat protein family
  misc_feature (188)..(188): Xaa is any aa, unknown or other
  misc_feature (191)..(191): Xaa is any aa, unknown or other
  misc_feature (192)..(192): Xaa is any aa, unknown or other
  misc_feature (193)..(193): Xaa is any aa, unknown or other
  misc_feature (194)..(194): Xaa is any aa, unknown or other
  misc_feature (195)..(195): Xaa is any aa, unknown or other
  misc_feature (196)..(196): Xaa is any aa, unknown or other
  misc_feature (197)..(197): Xaa is any aa, unknown or other
  misc_feature (198)..(198): Xaa is any aa, unknown or other
  misc_feature (199)..(199): Xaa is any aa, unknown or other
  misc_feature (200)..(200): Xaa is any aa, unknown or other
  misc_feature (211)..(211): Xaa is any aa, unknown or other
  misc_feature (212)..(212): Xaa is any aa, unknown or other
  misc_feature (215)..(215): Xaa is any aa, unknown or other
  misc_feature (221)..(221): Xaa is any aa, unknown or other
MALVAGSYERFIWGFSLKALAASAAEEAQPLAPLFSYPAHAGPIRCVAAAPRAGLAASGGADDSIRLYDLRAAADLGPLLDPSAAVSALAFHSIGPVPRNLLAASDDGLLHLYDADGFALLTSLRVFPRGREAADALAVHPSGRVALAVGRAGGLSMVNLLRGRRSFTCRLERAASTVAYAEDAAGGXRFXXXXXXXXXXHDSEDARIIFXXMPXDIRGFXP

SEQ ID NO: 64489 - DNA, 1034 bp, Triticum aestivum
  misc_feature (1)..(1034): Ceres Seq. ID no. 12618176
atagaacatcctaatcgaaaaaatcacccaaccaaccgcctctacaagcgcagcccagatctcggctccttcccttcctcgaaccaagcatcagcaatggcgaccacggcagccgacgccacggccgcggttcccaaggagcagcagcccgccaacggttccgcggccgccaccaccggcggcgagcaggtcacgcgccactccgaggtcggacacaagagcctgctccagagcgacgccctctaccagtacatcctggagacgagcgtgtacccgcgcgagcacgagtgcatgaaggagctccgcgagatcaccgccaaccacccatggaacctgatgacgacgtcggcggacgagggccagttcctcaacatgctgctcaagctcatcggcgccaagaagaccatggagatcggcgtctacaccggctactccctgctcgccaccgcgctcgccatccccgacgacggcaccatcttggccatggacatcaaccgcgagaactacgagctggggctgccgtgcatcgagaaggccggcgtggcgcacaagatcgacttccgcgagggcccggcgctgcccgtcctggacgcgctgctggaggacgaggccaaccacgggaccttcgacttcgtcttcgtggacgccgacaaggacaactacctcaactaccacgagcgcctcatgaagctcgtcaaggtcggcggcctcctcggctacgacaacaccctctggaacggctccgtcgtgctccccgccgacgcccccatgcgcaagtacatccgctactaccgcgacttcgtcctcgagctcaacaaggccctcgccgccgaccagcgcgtcgagatctgccagctccccgtcggcgacggcatcaccctctgccgccgcgccaagtgaaccagagaacccatctccgccgctccgccatagatgccaagaacaagaattaattaattactccccattttgtctttcctgctcgccttctgtactctacatctatcttctgcaattcgtataaagatttctcc

SEQ ID NO: 64490 - protein, 299 aa, Triticum aestivum
  peptide (1)..(299): Ceres Seq. ID no. 12618177
  misc_feature (86)..(297): Pfam Name: O-methyltransferase Pfam Description: O-methyltransferase
  misc_feature (57)..(297): Homolog of NCBI NO: 40795556 NR Description: caffeoyl-CoA-O-methyltransferase [Corchorus
  misc_feature (33)..(299): Homolog of NCBI NO: 37221609 NR Description: caffeoyl-CoA 3-O-methyltransferase 1 [Zea mays]
  misc_feature (33)..(299): Homolog of NCBI NO: 37221603 NR Description: caffeoyl-CoA 3-O-methyltransferase 1 [Zea mays]
  misc_feature (62)..(297): Homolog of NCBI NO: 2511737 NR Description: caffeoyl-CoA 3-O-methyltransferase 5 [Nicotiana
  misc_feature (57)..(297): Homolog of NCBI NO: 30580333 NR Description: Caffeoyl-CoA O-methyltransferase 1
  misc_feature (57)..(297): Homolog of NCBI NO: 3023436 NR Description: Caffeoyl-CoA O-methyltransferase
  misc_feature (33)..(299): Homolog of NCBI NO: 30580384 NR Description: Caffeoyl-CoA O-methyltransferase 2
  misc_feature (33)..(299): Homolog of NCBI NO: 30580385 NR Description: Caffeoyl-CoA O-methyltransferase 1
  misc_feature (33)..(299): Homolog of NCBI NO: 37221545 NR Description: caffeoyl-CoA 3-O-methyltransferase 1 [Zea mays]
  misc_feature (37)..(299): Homolog of NCBI NO: 5091498 NR Description: ESTs AU058067(E20733), AAU058070(E20873) to a region of the predicted gene.~Similar to Populus tremuloides
IEHPNRKNHPTNRLYKRSPDLGSFPSSNQASAMATTAADATAAVPKEQQPANGSAAATTGGEQVTRHSEVGHKSLLQSDALYQYILETSVYPREHECMKELREITANHPWNLMTTSADEGQFLNMLLKLIGAKKTMEIGVYTGYSLLATALAIPDDGTILAMDINRENYELGLPCIEKAGVAHKIDFREGPALPVLDALLEDEANHGTFDFVFVDADKDNYLNYHERLMKLVKVGGLLGYDNTLWNGSVVLPADAPMRKYIRYYRDFVLELNKALAADQRVEICQLPVGDGITLCRRAK

SEQ ID NO: 64491 - protein, 267 aa, Triticum aestivum
  peptide (1)..(267): Ceres Seq. ID no. 12618178
  misc_feature (54)..(265): Pfam Name: O-methyltransferase Pfam Description: O-methyltransferase
  misc_feature (25)..(265): Homolog of NCBI NO: 40795556 NR Description: caffeoyl-CoA-O-methyltransferase [Corchorus
  misc_feature (1)..(267): Homolog of NCBI NO: 37221609 NR Description: caffeoyl-CoA 3-O-methyltransferase 1 [Zea mays]
  misc_feature (1)..(267): Homolog of NCBI NO: 37221603 NR Description: caffeoyl-CoA 3-O-methyltransferase 1 [Zea mays]
  misc_feature (30)..(265): Homolog of NCBI NO: 2511737 NR Description: caffeoyl-CoA 3-O-methyltransferase 5 [Nicotiana
  misc_feature (25)..(265): Homolog of NCBI NO: 30580333 NR Description: Caffeoyl-CoA O-methyltransferase 1
  misc_feature (25)..(265): Homolog of NCBI NO: 3023436 NR Description: Caffeoyl-CoA O-methyltransferase
  misc_feature (1)..(267): Homolog of NCBI NO: 30580384 NR Description: Caffeoyl-CoA O-methyltransferase 2
  misc_feature (1)..(267): Homolog of NCBI NO: 30580385 NR Description: Caffeoyl-CoA O-methyltransferase 1
  misc_feature (1)..(267): Homolog of NCBI NO: 37221545 NR Description: caffeoyl-CoA 3-O-methyltransferase 1 [Zea mays]
  misc_feature (5)..(267): Homolog of NCBI NO: 5091498 NR Description: ESTs AU058067(E20733), AAU058070(E20873) to a region of the predicted gene.~Similar to Populus tremuloides
MATTAADATAAVPKEQQPANGSAAATTGGEQVTRHSEVGHKSLLQSDALYQYILETSVYPREHECMKELREITANHPWNLMTTSADEGQFLNMLLKLIGAKKTMEIGVYTGYSLLATALAIPDDGTILAMDINRENYELGLPCIEKAGVAHKIDFREGPALPVLDALLEDEANHGTFDFVFVDADKDNYLNYHERLMKLVKVGGLLGYDNTLWNGSVVLPADAPMRKYIRYYRDFVLELNKALAADQRVEICQLPVGDGITLCRRAK

SEQ ID NO: 64492 - protein, 208 aa, Triticum aestivum
  peptide (1)..(208): Ceres Seq. ID no. 12618179
  misc_feature (1)..(193): Pfam Name: High molecular weight glutenin subunit Pfam Description: High molecular weight glutenin subunit
MEPDDDVGGRGPVPQHAAQAHRRQEDHGDRRLHRLLPARHRARHPRRRHHLGHGHQPRELRAGAAVHREGRRGAQDRLPRGPGAARPGRAAGGRGQPRDLRLRLRGRRQGQLPQLPRAPHEARQGRRPPRLRQHPLERLRRAPRRRPHAQVHPLLPRLRPRAQQGPRRRPARRDLPAPRRRRHHPLPPRQVNQRTHLRRSAIDAKNKN

SEQ ID NO: 64493 - DNA, 1612 bp, Triticum aestivum
  misc_feature (1)..(1612): Ceres Seq. ID no. 13655506
agaacatcctaatcgaaaattttccgcaagcaagcaagccgtatatgcacgcattatctcttcttcttcttcttcttcttcttcttcttctacctcttcttctccttctccttgtaggtggcagcgcctaccaagctcttttccgccggtgaccattccagtagtccatcacatgggtcaagacgagcgccagcatccagagctgccggacatggagaaggagctctctgccgacgcggtagcctgcgaccactgcagcggcccacaggcggtggtgtactgccgggccgacagcgccaggctctgcctgccgtgcgaccgccacgtgcacgccgccaacgcggtctgctcccgccacctgcgcgccccgctctgcgccgcatgccgcgcaaccggggccgtcttccgccacgccggtcccgaattcctctgctccaactgcgacttcgggaggagccgggacgccgagctgccgctgcacgaccgctgcacagtccaggggtacacgggacgaccctccgcgcacgacctcgccgctcttctcggggtccccgacttcgacaagccctcggccggcaaagccgacgactgttggtgggccatttgggaggagccccaggtgttcagcctggaggatctcatcgtgcccaccacttctagccatggcttccagcccctcgtcacgccgtcctcgcccaagatccacaactcacccgatggaaagaccaacgatgaggtcatacggcagttacgtgagctcgccgaggtcgacatgggcggcggtcagataacacctcgtgaggaggcagagcaagctgctcatctgttgccttccaggacagagtcacagcacaccactggaaatggcgatttcggcacagataacagccatgaggttgcaaccatgccamcccctagttatgagaacggcggatggaacaataacgattatcatgccctaaatggtgcctgcaagaccgagcacgaacaagagcaggctccagcaagctcagctgaagcatgcttgtcatcgtttgttcagatgtcagaactttgccccagcatgagcaatggtagcatgatggacgatggccagcaggcaaatcctggtactggcatgccaatgcaagctttccccaaaagaagtggctttgatgttgttgctggccctgaccgcgacattgtcatttcccgctataaagaaaagaggaggacaagaagattcgacaaacaggtgcgatatgagtcccgcaaagctcgtgcagacagcaggttgaggatcaaggggcgttttgcaaaggcaaatcagagttaagccttgactttgcagtatattttgcatcttggacagaaggaataacactaattaggagtgagtgcagatgatacataaggcgtgaacattttgtttgccttcagttcggcagatggtagttcatgtacaatctgaataatgtatgttgccaacatatgggctatattaatgttttgaggggagttgttcttagtccaacccttgtatatagtttccatctatgaactctgtaaaagtactacaggcaagtgagagtgacagtatgccatttttgcatggtttagtgaattttgtctc

SEQ ID NO: 64494 - protein, 437 aa, Triticum aestivum
  peptide (1)..(437): Ceres Seq. ID no. 15219746
  misc_feature (79)..(124): Pfam Name: B-box zinc finger Pfam Description: B-box zinc finger
  misc_feature (76)..(261): Homolog of NCBI NO: 15217814 NR Description: CONSTANS B-box zinc finger family protein
  misc_feature (391)..(434): Homolog of NCBI NO: 30685731 NR Description: CONSTANS B-box zinc finger family protein
  misc_feature (71)..(196): Homolog of NCBI NO: 30685731 NR Description: CONSTANS B-box zinc finger family protein
  misc_feature (82)..(437): Homolog of NCBI NO: 15238918 NR Description: CONSTANS B-box zinc finger family protein
  misc_feature (391)..(435): Homolog of NCBI NO: 38175538 NR Description: zinc-finger protein C60910-like
  misc_feature (82)..(216): Homolog of NCBI NO: 38175538 NR Description: zinc-finger protein C60910-like
  misc_feature (391)..(434): Homolog of NCBI NO: 15227152 NR Description: CONSTANS B-box zinc finger family protein
  misc_feature (82)..(276): Homolog of NCBI NO: 15227152 NR Description: CONSTANS B-box zinc finger family protein
  misc_feature (58)..(435): Homolog of NCBI NO: 34899270 NR Description: putative zinc-finger protein
  misc_feature (62)..(436): Homolog of NCBI NO: 7522220 NR Description: zinc-finger protein C60910 [imported] - rice
  misc_feature (304)..(304): Xaa is any aa, unknown or other
EHPNRKFSASKQAVYARIISSSSSSSSSSSTSSSPSPCRWQRLPSSFPPVTIPVVHHMGQDERQHPELPDMEKELSADAVACDHCSGPQAVVYCRADSARLCLPCDRHVHAANAVCSRHLRAPLCAACRATGAVFRHAGPEFLCSNCDFGRSRDAELPLHDRCTVQGYTGRPSAHDLAALLGVPDFDKPSAGKADDCWWAIWEEPQVFSLEDLIVPTTSSHGFQPLVTPSSPKIHNSPDGKTNDEVIRQLRELAEVDMGGGQITPREEAEQAAHLLPSRTESQHTTGNGDFGTDNSHEVATMPXPSYENGGWNNNDYHALNGACKTEHEQEQAPASSAEACLSSFVQMSELCPSMSNGSMMDDGQQANPGTGMPMQAFPKRSGFDVVAGPDRDIVISRYKEKRRTRRFDKQVRYESRKARADSRLRIKGRFAKANQS

SEQ ID NO: 64495 - protein, 380 aa, Triticum aestivum
  peptide (1)..(380): Ceres Seq. ID no. 15219747
  misc_feature (22)..(67): Pfam Name: B-box zinc finger Pfam Description: B-box zinc finger
  misc_feature (19)..(204): Homolog of NCBI NO: 15217814 NR Description: CONSTANS B-box zinc finger family protein
  misc_feature (334)..(377): Homolog of NCBI NO: 30685731 NR Description: CONSTANS B-box zinc finger family protein
  misc_feature (14)..(139): Homolog of NCBI NO: 30685731 NR Description: CONSTANS B-box zinc finger family protein
  misc_feature (25)..(380): Homolog of NCBI NO: 15238918 NR Description: CONSTANS B-box zinc finger family protein
  misc_feature (334)..(378): Homolog of NCBI NO: 38175538 NR Description: zinc-finger protein C60910-like
  misc_feature (25)..(159): Homolog of NCBI NO: 38175538 NR Description: zinc-finger protein C60910-like
  misc_feature (334)..(377): Homolog of NCBI NO: 15227152 NR Description: CONSTANS B-box zinc finger family protein
  misc_feature (25)..(219): Homolog of NCBI NO: 15227152 NR Description: CONSTANS B-box zinc finger family protein
  misc_feature (1)..(378): Homolog of NCBI NO: 34899270 NR Description: putative zinc-finger protein
  misc_feature (5)..(379): Homolog of NCBI NO: 7522220 NR Description: zinc-finger protein C60910 [imported] - rice
  misc_feature (247)..(247): Xaa is any aa, unknown or other
MGQDERQHPELPDMEKELSADAVACDHCSGPQAVVYCRADSARLCLPCDRHVHAANAVCSRHLRAPLCAACRATGAVFRHAGPEFLCSNCDFGRSRDAELPLHDRCTVQGYTGRPSAHDLAALLGVPDFDKPSAGKADDCWWAIWEEPQVFSLEDLIVPTTSSHGFQPLVTPSSPKIHNSPDGKTNDEVIRQLRELAEVDMGGGQITPREEAEQAAHLLPSRTESQHTTGNGDFGTDNSHEVATMPXPSYENGGWNNNDYHALNGACKTEHEQEQAPASSAEACLSSFVQMSELCPSMSNGSMMDDGQQANPGTGMPMQAFPKRSGFDVVAGPDRDIVISRYKEKRRTRRFDKQVRYESRKARADSRLRIKGRFAKANQS

SEQ ID NO: 64496 - protein, 367 aa, Triticum aestivum
  peptide (1)..(367): Ceres Seq. ID no. 15219748
  misc_feature (9)..(54): Pfam Name: B-box zinc finger Pfam Description: B-box zinc finger
  misc_feature (6)..(191): Homolog of NCBI NO: 15217814 NR Description: CONSTANS B-box zinc finger family protein
  misc_feature (321)..(364): Homolog of NCBI NO: 30685731 NR Description: CONSTANS B-box zinc finger family protein
  misc_feature (1)..(126): Homolog of NCBI NO: 30685731 NR Description: CONSTANS B-box zinc finger family protein
  misc_feature (12)..(367): Homolog of NCBI NO: 15238918 NR Description: CONSTANS B-box zinc finger family protein
  misc_feature (321)..(365): Homolog of NCBI NO: 38175538 NR Description: zinc-finger protein C60910-like
  misc_feature (12)..(146): Homolog of NCBI NO: 38175538 NR Description: zinc-finger protein C60910-like
  misc_feature (321)..(364): Homolog of NCBI NO: 15227152 NR Description: CONSTANS B-box zinc finger family protein
  misc_feature (12)..(206): Homolog of NCBI NO: 15227152 NR Description: CONSTANS B-box zinc finger family protein
  misc_feature (1)..(365): Homolog of NCBI NO: 34899270 NR Description: putative zinc-finger protein
  misc_feature (1)..(366): Homolog of NCBI NO: 7522220 NR Description: zinc-finger protein C60910 [imported] - rice
  misc_feature (234)..(234): Xaa is any aa, unknown or other
MEKELSADAVACDHCSGPQAVVYCRADSARLCLPCDRHVHAANAVCSRHLRAPLCAACRATGAVFRHAGPEFLCSNCDFGRSRDAELPLHDRCTVQGYTGRPSAHDLAALLGVPDFDKPSAGKADDCWWAIWEEPQVFSLEDLIVPTTSSHGFQPLVTPSSPKIHNSPDGKTNDEVIRQLRELAEVDMGGGQITPREEAEQAAHLLPSRTESQHTTGNGDFGTDNSHEVATMPXPSYENGGWNNNDYHALNGACKTEHEQEQAPASSAEACLSSFVQMSELCPSMSNGSMMDDGQQANPGTGMPMQAFPKRSGFDVVAGPDRDIVISRYKEKRRTRRFDKQVRYESRKARADSRLRIKGRFAKANQS

SEQ ID NO: 64497 - DNA, 1025 bp, Triticum aestivum
  misc_feature (1)..(1025): Ceres Seq. ID no. 13598648
acccatcccaccacattcaagtcgaagaagctcctcgatctccatcactgcaaccagccacttgagctctgaatctttgaagctcagccagttcgccgcgaccaccgagagcctcaagtttcgccatgtcgagcgccggccagaagcagcagcagcagcagcaggcgaagaagccggcggcggcggaggacgtcgagatcaagaaggtcttctcccgcttcgacacggacggcgacggccggatctcgccgtccgagctggcggccgtgtcgcgcgccatcgcgccgccggccaccgagtccgcgcagggccgcgaggtggcgtccatgatggacgagctcgacaccgaccgcgacggctacgtggacctcggcgagttcgccgccttccacggccgcggccgcgaggagcgcgagctcgacgccgagctgcgcgacgccttcgacgtctacgacatcaacggcgacggccgcatctccgtcgccgagctcagcaaggtcctgagccgcatcggcgagggatgcagcaccgaggagtgcgagaagatgatcgcctccgtcgacgtcgacggcgacggctgcgtcggattcgaggagttcaagaagatgatgaccgccggtgacgccggcgcaccacctcaacccgaagcgatcgccgtgcctgacagcaacaaacccaagaaggagtgatacatgtgcttttgcttgtaaaaaaattgtaatccgagggagcgaattagttgtcagtccctgttggccatagtcttctggtctgaaaaaaaatgggaataaggatcaatgtgcaattgccattgtcgtgctgtacctctacgataacggttgtgtgtgcacggtagcagtactagtactagatattttctccgagtatggtcatcttgctacttcattttcacatgaaaatgaagtgccatgttgatgttgaagggtgataagcatccattatcaatgttacttgtaatcgcattcggcaataaatgtattgtcatcttatgatgtttgctattc

SEQ ID NO: 64498 - protein, 206 aa, Triticum aestivum
  peptide (1)..(206): Ceres Seq. ID no. 13598649
PIPPHSSRRSSSISITATSHLSSESLKLSQFAATTESLKFRHVERRPEAAAAAAGEEAGGGGGRRDQEGLLPLRHGRRRPDLAVRAGGRVARHRAAGHRVRAGPRGGVHDGRARHRPRRLRGPRRVRRLPRPRPRGARARRRAARRLRRLRHQRRRPHLRRRAQQGPEPHRRGMQHRGVREDDRLRRRRRRRLRRIRGVQEDDDRR

SEQ ID NO: 64499 - protein, 187 aa, Triticum aestivum; identical to SEQ ID NO: 56090
  peptide (1)..(187): Ceres Seq. ID no. 13598650
  misc_feature (64)..(92): Pfam Name: EF hand Pfam Description: EF hand
  misc_feature (13)..(165): Homolog of NCBI NO: 15221781 NR Description: polcalcin (calcium-binding pollen allergen),
  misc_feature (16)..(174): Homolog of NCBI NO: 6901654 NR Description: calcium-binding protein [Olea europaea]
  misc_feature (15)..(164): Homolog of NCBI NO: 15219514 NR Description: calcium-binding protein, putative [Arabidopsis
  misc_feature (17)..(169): Homolog of NCBI NO: 19386815 NR Description: B1147A04.10 [Oryza sativa (japonica
  misc_feature (24)..(162): Homolog of NCBI NO: 18408502 NR Description: calmodulin-related protein, putative [Arabidopsis
  misc_feature (24)..(162): Homolog of NCBI NO: 21618074 NR Description: calmodulin-related protein [Arabidopsis thaliana]
  misc_feature (1)..(164): Homolog of NCBI NO: 15221030 NR Description: calcium-binding protein, putative [Arabidopsis
  misc_feature (8)..(163): Homolog of NCBI NO: 14589311 NR Description: calcium binding protein [Sesbania rostrata]
  misc_feature (24)..(169): Homolog of NCBI NO: 15240340 NR Description: calmodulin-related protein 2, touch-induced
  misc_feature (1)..(169): Homolog of NCBI NO: 34895640 NR Description: OSJNBa0083M16.33 [Oryza sativa (japonica

SEQ ID NO: 64500 - protein, 120 aa, Triticum aestivum; identical to SEQ ID NO: 56091
  peptide (1)..(120): Ceres Seq. ID no. 13598651
  misc_feature (1)..(25): Pfam Name: EF hand Pfam Description: EF hand
  misc_feature (1)..(98): Homolog of NCBI NO: 15221781 NR Description: polcalcin (calcium-binding pollen allergen),
  misc_feature (1)..(107): Homolog of NCBI NO: 6901654 NR Description: calcium-binding protein [Olea europaea]
  misc_feature (1)..(97): Homolog of NCBI NO: 15219514 NR Description: calcium-binding protein, putative [Arabidopsis
  misc_feature (1)..(102): Homolog of NCBI NO: 19386815 NR Description: B1147A04.10 [Oryza sativa (japonica
  misc_feature (1)..(95): Homolog of NCBI NO: 18408502 NR Description: calmodulin-related protein, putative [Arabidopsis
  misc_feature (1)..(95): Homolog of NCBI NO: 21618074 NR Description: calmodulin-related protein [Arabidopsis thaliana]
  misc_feature (1)..(97): Homolog of NCBI NO: 15221030 NR Description: calcium-binding protein, putative [Arabidopsis
  misc_feature (1)..(96): Homolog of NCBI NO: 14589311 NR Description: calcium binding protein [Sesbania rostrata]
  misc_feature (1)..(102): Homolog of NCBI NO: 15240340 NR Description: calmodulin-related protein 2, touch-induced
  misc_feature (1)..(102): Homolog of NCBI NO: 34895640 NR Description: OSJNBa0083M16.33 [Oryza sativa (japonica

SEQ ID NO: 64501 - DNA, 1248 bp, Triticum aestivum
  misc_feature (1)..(1248): Ceres Seq. ID no. 13597134
acgagaccattacctagaacgtcctaatcgaaaaccatttctcgcatatatttttcttcccgtttcccgattcaagtcagcggttagggttcggagatctcggcgtcgcatcgcggccatggcgacaagcacgcttagcacagtcatggtgagcaatttgtcgctgaaagcagcactaagagatgtaaaggaattcttttccttttctggtgaccttgtgcatgttgaaatgcaaagtggtgacgagctgtctcaagttgcctacattgcttttaaagataagcaaggagctgagacagccatgcttctgacgggtgccacgatagtcgatatggctgtcatcgtaacaccagccactgattatgagctaccagctgatgttttagctgctctagagcccaaagatgcaaagtcctctgctcttgagaaggcagaggacatcgttgggaccatgctggccaaggggttcattcttggtagggatgcgctcgacaaagcaaaagctttagacgagaagcatcagctcacatcaactgcgactgctcgagtatcttcctttgacaagagaatcggtctgagtgagaagatcagcgttggtacttcagttgtaaatgataaagtaaaggaaatggatcagaaatatctagtttccgagaagactaggtcagcacttgcagctgctgaacagggcgtctctactgctggatctgccatcatgaagaacaggtatgtccttactggagcagcatgggtaactggtgccttcagtaaggttgcaaataccgcgaatgatgtcggggcaaaggcgaaggagaaaatagcggctgagcaggagggcaagaccgtagcggccgggcatgcacaagctgacatgtcggacgctcgtgaaaagcccagggatttggatggtgaagtcacaaagatacatgtctctgaaaaccctgaagatatccccatatctaccgctgcagttttccccattacagtagatgattccagcgatgcgtctccaccaccgcctgctactgctcttcccaagaaaccggaacctgcgcagggattgatactatgatgatctggctgatacatgaatgtaaatagacatatgaggtgggttgtttaattcaggctgtagcgttgtggctgctgtattgtgattcacctgtttgaaggttgaaatttatcaggaccgaaagagtttgggatttgtagcagccattttaattgatcaaacaatattatcatgct

SEQ ID NO: 64502 - protein, 356 aa, Triticum aestivum
  peptide (1)..(356): Ceres Seq. ID no. 13597135
  misc_feature (48)..(115): Pfam Name: RNA recognition motif. (a.k.a. RRM, RBD, or RNP domain) Pfam Description: RNA recognition motif. (a.k.a. RRM, RBD, or RNP
  misc_feature (43)..(277): Homolog of NCBI NO: 15237419 NR Description: RNA recognition motif (RRM)-containing protein
  misc_feature (47)..(282): Homolog of NCBI NO: 18071362 NR Description: putative splicing regulatory protein
  misc_feature (40)..(287): Homolog of NCBI NO: 34897896 NR Description: ESTs D15336(C0474),C98053(C0474) correspond to a of the predicted gene.~Similar to Arabidopsis thaliana DNA
  misc_feature (47)..(302): Homolog of NCBI NO: 8809670 NR Description: gene_id:MSD23.5~pir||C71447~similar to unknown
  misc_feature (44)..(302): Homolog of NCBI NO: 30695063 NR Description: RNA recognition motif (RRM)-containing protein
  misc_feature (45)..(352): Homolog of NCBI NO: 7485085 NR Description: hypothetical protein - Arabidopsis thaliana
  misc_feature (44)..(352): Homolog of NCBI NO: 18414951 NR Description: RNA recognition motif (RRM)-containing protein
  misc_feature (45)..(315): Homolog of NCBI NO: 38344181 NR Description: OSJNBa0053K19.20 [Oryza sativa (japonica
  misc_feature (96)..(324): Homolog of NCBI NO: 18542166 NR Description: putative aldose reductase-related protein [Zea
  misc_feature (40)..(356): Homolog of NCBI NO: 38347069 NR Description: OSJNBa0006A01.10 [Oryza sativa (japonica
RDHYLERPNRKPFLAYIFLPVSRFKSAVRVRRSRRRIAAMATSTLSTVMVSNLSLKAALRDVKEFFSFSGDLVHVEMQSGDELSQVAYIAFKDKQGAETAMLLTGATIVDMAVIVTPATDYELPADVLAALEPKDAKSSALEKAEDIVGTMLAKGFILGRDALDKAKALDEKHQLTSTATARVSSFDKRIGLSEKISVGTSVVNDKVKEMDQKYLVSEKTRSALAAAEQGVSTAGSAIMKNRYVLTGAAWVTGAFSKVANTANDVGAKAKEKIAAEQEGKTVAAGHAQADMSDAREKPRDLDGEVTKIHVSENPEDIPISTAAVFPITVDDSSDASPPPPATALPKKPEPAQGLIL

SEQ ID NO: 64503 - protein, 317 aa, Triticum aestivum
  peptide (1)..(317): Ceres Seq. ID no. 13597136
  misc_feature (9)..(76): Pfam Name: RNA recognition motif. (a.k.a. RRM, RBD, or RNP domain) Pfam Description: RNA recognition motif. (a.k.a. RRM, RBD, or RNP
  misc_feature (4)..(238): Homolog of NCBI NO: 15237419 NR Description: RNA recognition motif (RRM)-containing protein
  misc_feature (8)..(243): Homolog of NCBI NO: 18071362 NR Description: putative splicing regulatory protein
  misc_feature (1)..(248): Homolog of NCBI NO: 34897896 NR Description: ESTs D15336(C0474),C98053(C0474) correspond to a of the predicted gene.~Similar to Arabidopsis thaliana DNA
  misc_feature (8)..(263): Homolog of NCBI NO: 8809670 NR Description: gene_id:MSD23.5~pir||C71447~similar to unknown
  misc_feature (5)..(263): Homolog of NCBI NO: 30695063 NR Description: RNA recognition motif (RRM)-containing protein
  misc_feature (6)..(313): Homolog of NCBI NO: 7485085 NR Description: hypothetical protein - Arabidopsis thaliana
  misc_feature (5)..(313): Homolog of NCBI NO: 18414951 NR Description: RNA recognition motif (RRM)-containing protein
  misc_feature (6)..(276): Homolog of NCBI NO: 38344181 NR Description: OSJNBa0053K19.20 [Oryza sativa (japonica
  misc_feature (57)..(285): Homolog of NCBI NO: 18542166 NR Description: putative aldose reductase-related protein [Zea
  misc_feature (1)..(317): Homolog of NCBI NO: 38347069 NR Description: OSJNBa0006A01.10 [Oryza sativa (japonica
MATSTLSTVMVSNLSLKAALRDVKEFFSFSGDLVHVEMQSGDELSQVAYIAFKDKQGAETAMLLTGATIVDMAVIVTPATDYELPADVLAALEPKDAKSSALEKAEDIVGTMLAKGFILGRDALDKAKALDEKHQLTSTATARVSSFDKRIGLSEKISVGTSVVNDKVKEMDQKYLVSEKTRSALAAAEQGVSTAGSAIMKNRYVLTGAAWVTGAFSKVANTANDVGAKAKEKIAAEQEGKTVAAGHAQADMSDAREKPRDLDGEVTKIHVSENPEDIPISTAAVFPITVDDSSDASPPPPATALPKKPEPAQGLIL

SEQ ID NO: 64504 - protein, 308 aa, Triticum aestivum
  peptide (1)..(308): Ceres Seq. ID no. 13597137
  misc_feature (1)..(67): Pfam Name: RNA recognition motif. (a.k.a. RRM, RBD, or RNP domain) Pfam Description: RNA recognition motif. (a.k.a. RRM, RBD, or RNP
  misc_feature (1)..(229): Homolog of NCBI NO: 15237419 NR Description: RNA recognition motif (RRM)-containing protein
  misc_feature (1)..(234): Homolog of NCBI NO: 18071362 NR Description: putative splicing regulatory protein
  misc_feature (1)..(239): Homolog of NCBI NO: 34897896 NR Description: ESTs D15336(C0474),C98053(C0474) correspond to a of the predicted gene.~Similar to Arabidopsis thaliana DNA
  misc_feature (1)..(254): Homolog of NCBI NO: 8809670 NR Description: gene_id:MSD23.5~pir||C71447~similar to unknown
  misc_feature (1)..(254): Homolog of NCBI NO: 30695063 NR Description: RNA recognition motif (RRM)-containing protein
  misc_feature (1)..(304): Homolog of NCBI NO: 7485085 NR Description: hypothetical protein - Arabidopsis thaliana
  misc_feature (1)..(304): Homolog of NCBI NO: 18414951 NR Description: RNA recognition motif (RRM)-containing protein
  misc_feature (1)..(267): Homolog of NCBI NO: 38344181 NR Description: OSJNBa0053K19.20 [Oryza sativa (japonica
  misc_feature (48)..(276): Homolog of NCBI NO: 18542166 NR Description: putative aldose reductase-related protein [Zea
  misc_feature (1)..(308): Homolog of NCBI NO: 38347069 NR Description: OSJNBa0006A01.10 [Oryza sativa (japonica
MVSNLSLKAALRDVKEFFSFSGDLVHVEMQSGDELSQVAYIAFKDKQGAETAMLLTGATIVDMAVIVTPATDYELPADVLAALEPKDAKSSALEKAEDIVGTMLAKGFILGRDALDKAKALDEKHQLTSTATARVSSFDKRIGLSEKISVGTSVVNDKVKEMDQKYLVSEKTRSALAAAEQGVSTAGSAIMKNRYVLTGAAWVTGAFSKVANTANDVGAKAKEKIAAEQEGKTVAAGHAQADMSDAREKPRDLDGEVTKIHVSENPEDIPISTAAVFPITVDDSSDASPPPPATALPKKPEPAQGLIL

SEQ ID NO: 64505 - DNA, 1766 bp, Triticum aestivum
  misc_feature (1)..(1766): Ceres Seq. ID no. 12626166
caactggtcgagccgagaacacctcgtccctgtcgtcgcctccctccctccccgtccgccgttcgttggctcgtctctcttcttacccacctcgctccctccctccctccctcccggaaatcgcaagattttcaccggcttcccgttgacgtttccgccactgcggcagcacaattcgaaaccctcccgcacactcccctggccctcccccttccgtgcctaggcggcaacgctccttctcgcctcccctcccatctcctttataaccgagcgggcggcccctcccgcgtgaggcaccgaggacgggggcagaaccgcagcgcagccgagccgagaccagaccagacgaaccgcgccgagccctaccctcctccaccaccgggtctccctgcgagggcggaggagcgacatggagccggccgagaagaagccgccggcggtgtccgacctcggcgcctgggggatgaacgtcgtcagctccgtcggcctcatcatggccaacaagcagctcatgtcctccgccggctacgccttctccttcgccaccacgttgaccgggttccacttcaccgtcacggcgctcgtcggatggatttccaaggccaccggctactccgcctccaagcacgtccccctctgggagctcgtctggttctcgctcgtcgccaacgcctccatcaccgggatgaacctcagcctcatgctcaactctgtcgggttctatcagatctccaaattgagcatgattccggtggtttgcttgatggaatgggtactcaacagcaagcactacacaaccaaggttatatcagcagtggttgtcgtcgcagcgggcgtcgggatttgcaccgtcaccgatgtggaggtcaatgctaagggcttcatttgtgcttgcgtggctgtgttctgcacgtcgctgcaacagattacaattggctcctttcagaagaagtacaacattgggtcatttgagctgctgagcaaaactgcaccaatacaggcagtgtcacttattatactgggtccctttgtggattactacctaaatgggcgttggctattgaactacagtttttcaacaggggcaactttcttcatactgctttcatgctccttggctgtcttctgcaacatgagccagtatctctgcatcgggcggttctctgcaacctctttccaggtcctgggccacatgaaaacggtgtgcgtgctgatcctcggctgggttctgttcgactcggctctcaccatcaagaacatactcgggatgctgctcgccatcatgggcatggtggtctatagctgggccatggagtctgagaagaaggccacctcggcgatcccgcggaacaagagcgacatgctggacggggaggacgtgcccctcaagtcgagaacgagcggcattccgctgtcctctgatgacctcgaggaaggcccgatgaagagctagcctgtcgctgttattcattcattcttcttggttcttttgtatgtgtttgatccacaatgtccgccagtccagtcctcgaagctatcgacagtcttgttaattttgcctcttgcttgctgggtggagttccatcataggtgatgacgaccccggccggccggcctcggcgtagatgaccaccacttaggaaatttgtcaaggccgatatgggccgagccatggtgattcgtgatggctgttgttatagacgacagcaaattatacttatataatggaatacaggtgttcccccgttgtaaaaaaacgacaagag

SEQ ID NO: 64506 - protein, 347 aa, Triticum aestivum
  peptide (1)..(347): Ceres Seq. ID no. 12626167
  misc_feature (10)..(319): Homolog of NCBI NO: 18420440 NR Description: putative protein
  misc_feature (1)..(319): Homolog of NCBI NO: 15234794 NR Description: hypothetical protein; protein id: At4g09810.1
  misc_feature (1)..(316): Homolog of NCBI NO: 30313364 NR Description: putative transmembrane protein [Oryza sativa]
  misc_feature (35)..(347): Homolog of NCBI NO: 26450366 NR Description: unknown protein [Arabidopsis thaliana]
  misc_feature (2)..(346): Homolog of NCBI NO: 18411172 NR Description: expressed protein
  misc_feature (2)..(346): Homolog of NCBI NO: 15238957 NR Description: putative protein; protein id: At5g42420.1
  misc_feature (1)..(347): Homolog of NCBI NO: 21536703 NR Description: unknown [Arabidopsis thaliana]
  misc_feature (1)..(347): Homolog of NCBI NO: 18394949 NR Description: expressed protein
  misc_feature (1)..(46): Homolog of NCBI NO: 33146838 NR Description: transporter-related-like [Oryza sativa (japonica
  misc_feature (40)..(347): Homolog of NCBI NO: 33146838 NR Description: transporter-related-like [Oryza sativa (japonica
MEPAEKKPPAVSDLGAWGMNVVSSVGLIMANKQLMSSAGYAFSFATTLTGFHFTVTALVGWISKATGYSASKHVPLWELVWFSLVANASITGMNLSLMLNSVGFYQISKLSMIPVVCLMEWVLNSKHYTTKVISAVVVVAAGVGICTVTDVEVNAKGFICACVAVFCTSLQQITIGSFQKKYNIGSFELLSKTAPIQAVSLIILGPFVDYYLNGRWLLNYSFSTGATFFILLSCSLAVFCNMSQYLCIGRFSATSFQVLGHMKTVCVLILGWVLFDSALTIKNILGMLLAIMGMVVYSWAMESEKKATSAIPRNKSDMLDGEDVPLKSRTSGIPLSSDDLEEGPMKS

SEQ ID NO: 64507 - protein, 329 aa, Triticum aestivum
  peptide (1)..(329): Ceres Seq. ID no. 12626168
  misc_feature (1)..(301): Homolog of NCBI NO: 18420440 NR Description: putative protein
  misc_feature (1)..(301): Homolog of NCBI NO: 15234794 NR Description: hypothetical protein; protein id: At4g09810.1
  misc_feature (1)..(298): Homolog of NCBI NO: 30313364 NR Description: putative transmembrane protein [Oryza sativa]
  misc_feature (17)..(329): Homolog of NCBI NO: 26450366 NR Description: unknown protein [Arabidopsis thaliana]
  misc_feature (1)..(328): Homolog of NCBI NO: 18411172 NR Description: expressed protein
  misc_feature (1)..(328): Homolog of NCBI NO: 15238957 NR Description: putative protein; protein id: At5g42420.1
  misc_feature (1)..(329): Homolog of NCBI NO: 21536703 NR Description: unknown [Arabidopsis thaliana]
  misc_feature (1)..(329): Homolog of NCBI NO: 18394949 NR Description: expressed protein
  misc_feature (1)..(28): Homolog of NCBI NO: 33146838 NR Description: transporter-related-like [Oryza sativa (japonica
  misc_feature (22)..(329): Homolog of NCBI NO: 33146838 NR Description: transporter-related-like [Oryza sativa (japonica
MNVVSSVGLIMANKQLMSSAGYAFSFATTLTGFHFTVTALVGWISKATGYSASKHVPLWELVWFSLVANASITGMNLSLMLNSVGFYQISKLSMIPVVCLMEWVLNSKHYTTKVISAVVVVAAGVGICTVTDVEVNAKGFICACVAVFCTSLQQITIGSFQKKYNIGSFELLSKTAPIQAVSLIILGPFVDYYLNGRWLLNYSFSTGATFFILLSCSLAVFCNMSQYLCIGRFSATSFQVLGHMKTVCVLILGWVLFDSALTIKNILGMLLAIMGMVVYSWAMESEKKATSAIPRNKSDMLDGEDVPLKSRTSGIPLSSDDLEEGPMKS

SEQ ID NO: 64508 - protein, 319 aa, Triticum aestivum
  peptide (1)..(319): Ceres Seq. ID no. 12626169
  misc_feature (1)..(291): Homolog of NCBI NO: 18420440 NR Description: putative protein
  misc_feature (1)..(291): Homolog of NCBI NO: 15234794 NR Description: hypothetical protein; protein id: At4g09810.1
  misc_feature (1)..(288): Homolog of NCBI NO: 30313364 NR Description: putative transmembrane protein [Oryza sativa]
  misc_feature (7)..(319): Homolog of NCBI NO: 26450366 NR Description: unknown protein [Arabidopsis thaliana]
  misc_feature (1)..(318): Homolog of NCBI NO: 18411172 NR Description: expressed protein
  misc_feature (1)..(318): Homolog of NCBI NO: 15238957 NR Description: putative protein; protein id: At5g42420.1
  misc_feature (1)..(319): Homolog of NCBI NO: 21536703 NR Description: unknown [Arabidopsis thaliana]
  misc_feature (1)..(319): Homolog of NCBI NO: 18394949 NR Description: expressed protein
  misc_feature (1)..(18): Homolog of NCBI NO: 33146838 NR Description: transporter-related-like [Oryza sativa (japonica
  misc_feature (12)..(319): Homolog of NCBI NO: 33146838 NR Description: transporter-related-like [Oryza sativa (japonica
MANKQLMSSAGYAFSFATTLTGFHFTVTALVGWISKATGYSASKHVPLWELVWFSLVANASITGMNLSLMLNSVGFYQISKLSMIPVVCLMEWVLNSKHYTTKVISAVVVVAAGVGICTVTDVEVNAKGFICACVAVFCTSLQQITIGSFQKKYNIGSFELLSKTAPIQAVSLIILGPFVDYYLNGRWLLNYSFSTGATFFILLSCSLAVFCNMSQYLCIGRFSATSFQVLGHMKTVCVLILGWVLFDSALTIKNILGMLLAIMGMVVYSWAMESEKKATSAIPRNKSDMLDGEDVPLKSRTSGIPLSSDDLEEGPMKS

SEQ ID NO: 64509 - DNA, 1512 bp, Triticum aestivum
  misc_feature (1)..(1512): Ceres Seq. ID no. 13597710
cagtccccgtcccagtcccaatcctaatcccgcccccaccagcggagcggcgtagccgccgcctcggccgccctcggcgcccgcgcctgagagccggcgacgatggcgaaccgcacggaccccctggcccggagcatccacggcaccaaccctcagaacctggtggagaagatcgtgcgggccaagatctaccagagcaactactggaaggagcagtgcttcggcctcacggcggagaccctggtcgacaaggccatggagctcgaccacaccggcggcacccacggcggcaaccgcaggccgacccccttcctctgcctcgccctcaagatgctccagatccagcccgacaaggaaatcgtcgtcgagttcatcaagaacgaggactacaagtatgtccgggttcttggggccttctacctgcgcctcactggcaccgtcgccgacgtttaccagtacctcgagccgctttacaacgactaccgcaagattaggcaaaagctcagcgatggaaaattcacgctgacacacgttgacgaattcattgacgagctcctgaccaaggactatagctgcgacactgccctcccccgcattcagaaaagatggatccttgaagcttctggaactctagaacctagaagaagtgcacttgaagacgattttgatgaagaggaggaagataaggaggatggacagcctatggacgtagacgagcctaacactcgtgaaaaggaccatcttcgtggaaggagccccaccaaagaacgggatagggaaagggagagggacagagacaggaaacacgaaaggcatcacagggaccgagatcatgacagagatcgggatcatgacagggactatggaagaggccgggaaagagatcgagacagagatagaggccgtgaaagagatagagagagggatagggaacgagaccgtcaccggacccgagatgacgattacaaccgagatcgagaccgggatggcagggaaagggaacgccgggacagagaccgtggcaggcacaggagttgctcaaggagcaggagccgggatcggcgtgaaagagaccgtgaagtgggagagctccgtaagaggcgtggccgtggtagtgccagtcctcctcgagggcgtgccgaggatggtccgagggaggagcctaataagaagagaaaggaaaagaaagagaagaagggcagcgggaacggtccagatcctaatgatccagagattatagagatgaacaagctgcgtgcatcgatagggttgggaccactgaagtagtggcacattgctgtaatgtattttgaagctccaagcttaaaaccaacaaaggattagctagcatttttcttttaacactgcaagcttgtcaaaataccctgtaatgtaactttggcggtttggcctgcttttctggctctaccttccgcggtcttttttgcatttttcttgagacacagtgaaggctgatgaaggaaagcatttgatttcaactgtattgtgttg

SEQ ID NO: 64510 - protein, 394 aa, Triticum aestivum
  peptide (1)..(394): Ceres Seq. ID no. 13597711
  misc_feature (1)..(177): Pfam Name: PRP38 family Pfam Description: PRP38 family
  misc_feature (1)..(326): Homolog of NCBI NO: 23481949 NR Description: hypothetical protein [Plasmodium yoelii yoelii]
  misc_feature (1)..(394): Homolog of NCBI NO: 23508527 NR Description: hypothetical protein, conserved [Plasmodium
  misc_feature (10)..(375): Homolog of NCBI NO: 28829361 NR Description: similar to Arabidopsis thaliana (Mouse-ear
  misc_feature (1)..(308): Homolog of NCBI NO: 17559118 NR Description: PRP38 family (38.2 kD) [Caenorhabditis elegans]
  misc_feature (1)..(308): Homolog of NCBI NO: 39593428 NR Description: Hypothetical protein CBG09713 [Caenorhabditis
  misc_feature (1)..(305): Homolog of NCBI NO: 27370014 NR Description: RIKEN cDNA 2410002M20 [Mus musculus]
  misc_feature (1)..(305): Homolog of NCBI NO: 24762236 NR Description: hypothetical protein FLJ14936 [Homo sapiens]
  misc_feature (1)..(334): Homolog of NCBI NO: 22024089 NR Description: CG30342-PA [Drosophila melanogaster]
  misc_feature (1)..(358): Homolog of NCBI NO: 25408716 NR Description: hypothetical protein At2g40650 [imported] -
  misc_feature (1)..(358): Homolog of NCBI NO: 18405463 NR Description: expressed protein [Arabidopsis thaliana]
MANRTDPLARSIHGTNPQNLVEKIVRAKIYQSNYWKEQCFGLTAETLVDKAMELDHTGGTHGGNRRPTPFLCLALKMLQIQPDKEIVVEFIKNEDYKYVRVLGAFYLRLTGTVADVYQYLEPLYNDYRKIRQKLSDGKFTLTHVDEFIDELLTKDYSCDTALPRIQKRWILEASGTLEPRRSALEDDFDEEEEDKEDGQPMDVDEPNTREKDHLRGRSPTKERDRERERDRDRKHERHHRDRDHDRDRDHDRDYGRGRERDRDRDRGRERDRERDRERDRHRTRDDDYNRDRDRDGRERERRDRDRGRHRSCSRSRSRDRRERDREVGELRKRRGRGSASPPRGRAEDGPREEPNKKRKEKKEKKGSGNGPDPNDPEIIEMNKLRASIGLGPLK

SEQ ID NO: 64511 - protein, 343 aa, Triticum aestivum
  peptide (1)..(343): Ceres Seq. ID no. 13597712
  misc_feature (1)..(126): Pfam Name: PRP38 family Pfam Description: PRP38 family
  misc_feature (1)..(275): Homolog of NCBI NO: 23481949 NR Description: hypothetical protein [Plasmodium yoelii yoelii]
  misc_feature (1)..(343): Homolog of NCBI NO: 23508527 NR Description: hypothetical protein, conserved [Plasmodium
  misc_feature (1)..(324): Homolog of NCBI NO: 28829361 NR Description: similar to Arabidopsis thaliana (Mouse-ear
  misc_feature (1)..(257): Homolog of NCBI NO: 17559118 NR Description: PRP38 family (38.2 kD) [Caenorhabditis elegans]
  misc_feature (1)..(257): Homolog of NCBI NO: 39593428 NR Description: Hypothetical protein CBG09713 [Caenorhabditis
  misc_feature (1)..(254): Homolog of NCBI NO: 27370014 NR Description: RIKEN cDNA 2410002M20 [Mus musculus]
  misc_feature (1)..(254): Homolog of NCBI NO: 24762236 NR Description: hypothetical protein FLJ14936 [Homo sapiens]
  misc_feature (1)..(283): Homolog of NCBI NO: 22024089 NR Description: CG30342-PA [Drosophila melanogaster]
  misc_feature (1)..(307): Homolog of NCBI NO: 25408716 NR Description: hypothetical protein At2g40650 [imported] -
  misc_feature (1)..(307): Homolog of NCBI NO: 18405463 NR Description: expressed protein [Arabidopsis thaliana]
MELDHTGGTHGGNRRPTPFLCLALKMLQIQPDKEIVVEFIKNEDYKYVRVLGAFYLRLTGTVADVYQYLEPLYNDYRKIRQKLSDGKFTLTHVDEFIDELLTKDYSCDTALPRIQKRWILEASGTLEPRRSALEDDFDEEEEDKEDGQPMDVDEPNTREKDHLRGRSPTKERDRERERDRDRKHERHHRDRDHDRDRDHDRDYGRGRERDRDRDRGRERDRERDRERDRHRTRDDDYNRDRDRDGRERERRDRDRGRHRSCSRSRSRDRRERDREVGELRKRRGRGSASPPRGRAEDGPREEPNKKRKEKKEKKGSGNGPDPNDPEIIEMNKLRASIGLGPLK

SEQ ID NO: 64512 - protein, 318 aa, Triticum aestivum
  peptide (1)..(318): Ceres Seq. ID no. 13597713
  misc_feature (1)..(101): Pfam Name: PRP38 family Pfam Description: PRP38 family
  misc_feature (1)..(250): Homolog of NCBI NO: 23481949 NR Description: hypothetical protein [Plasmodium yoelii yoelii]
  misc_feature (1)..(318): Homolog of NCBI NO: 23508527 NR Description: hypothetical protein, conserved [Plasmodium
  misc_feature (1)..(299): Homolog of NCBI NO: 28829361 NR Description: similar to Arabidopsis thaliana (Mouse-ear
  misc_feature (1)..(232): Homolog of NCBI NO: 17559118 NR Description: PRP38 family (38.2 kD) [Caenorhabditis elegans]
  misc_feature (1)..(232): Homolog of NCBI NO: 39593428 NR Description: Hypothetical protein CBG09713 [Caenorhabditis
  misc_feature (1)..(229): Homolog of NCBI NO: 27370014 NR Description: RIKEN cDNA 2410002M20 [Mus musculus]
  misc_feature (1)..(229): Homolog of NCBI NO: 24762236 NR Description: hypothetical protein FLJ14936 [Homo sapiens]
  misc_feature (1)..(258): Homolog of NCBI NO: 22024089 NR Description: CG30342-PA [Drosophila melanogaster]
  misc_feature (1)..(282): Homolog of NCBI NO: 25408716 NR Description: hypothetical protein At2g40650 [imported] -
  misc_feature (1)..(282): Homolog of NCBI NO: 18405463 NR Description: expressed protein [Arabidopsis thaliana]
MLQIQPDKEIVVEFIKNEDYKYVRVLGAFYLRLTGTVADVYQYLEPLYNDYRKIRQKLSDGKFTLTHVDEFIDELLTKDYSCDTALPRIQKRWILEASGTLEPRRSALEDDFDEEEEDKEDGQPMDVDEPNTREKDHLRGRSPTKERDRERERDRDRKHERHHRDRDHDRDRDHDRDYGRGRERDRDRDRGRERDRERDRERDRHRTRDDDYNRDRDRDGRERERRDRDRGRHRSCSRSRSRDRRERDREVGELRKRRGRGSASPPRGRAEDGPREEPNKKRKEKKEKKGSGNGPDPNDPEIIEMNKLRASIGLGPLK

SEQ ID NO: 64513 - DNA, 1396 bp, Triticum aestivum
  misc_feature (1)..(1396): Ceres Seq. ID no. 14313471
atctagaagagcctgccagtctttgattcggctcaacaatggagatggtcctcgccgcagcagcaaactgtaccggtgccttgtcgtccaaccaccccaaaacgttcctcaaatcgcgtcgatcctcgctccaaatgcgggcctgcagatcgggccccgacgcgccgctcgccgtgtcgtccgccgccgcgccggaggagccgcgcccggtgcgcctgggcatcatgggctgcggctccatcgcgcgcaaggtcgcgcgctcaatgctgctcgtccccgccgccgacgtggccgccgtcgccagccgctccgagggcaaggcgcgcctcttcgccgccgacaacggccttcggagcggcacgcgcatccacggctcctacgaggcgctcctcgacgacccggacgtcgacgccgtctacatgccgctccccaccagcctccacgtcaagtgggcgaccgccgccgccgagcggggcaagcacctgctcctcgagaagcccaccgcgccctgcgccgccgacctcgagcccatcctcgccgcctgcgaggccaacggcgtccagttcatggactccaccatgtggatgcaccacccccgcactgccaagatgcgtcagctcgtcgccgatcaggacacaatcggagacgtcagatttataaacaccatggtcagctttctagcaaacgaagatttcctccagaatgacatccgggtaaagccagaccttgatggcctgggtgtgcttggtgacatcgggtggtactgcatccgtggaatcctgtgggctgttgactatgagctgcccaagaatgtggttgctctccatcaccctgtcaagaaccaagccggcgtgctccttgcttgcggcgcatcgctctactgggccgacggcaaggtcgccaccttccactgttctttccttaccaacctgaccatggacctcaccgtcgtcggcaccaacggtactattcatgtcaccgacttggtcatcccgtacgaagagaagtctgctccgttcagcgtcgcctccaagacgaacttcgccgaactctctaccggatgggatccacatccgagcaagcatgttgtcaccacggacctaccccaggaggggctcatggtccaggagttctgtaggctggtgcagggcatcagagatgccggtgtcaagcctgaggggaagtggccgggcatcacccgaaagacacagattgtcgtggatgcagtgaaggcttctattgacaatggatttgagtccgtcgatgttgccagctaaatacaacacataactggtgttcccacgttgtatcttcaccatgataaatctatttactgaaataatttgaacgattcttgtcatattgaggacaatattgcaatgatcaagtaagagct

SEQ ID NO: 64514 - protein, 412 aa, Triticum aestivum
  peptide (1)..(412): Ceres Seq. ID no. 14313472
  misc_feature (192)..(305): Pfam Name: Oxidoreductase family, C-terminal alpha/beta domain Pfam Description: Oxidoreductase family, C-terminal alpha/beta
  misc_feature (58)..(330): Homolog of NCBI NO: 22971184 NR Description: hypothetical protein [Chloroflexus aurantiacus]
  misc_feature (59)..(400): Homolog of NCBI NO: 32474689 NR Description: putative oxidoreductase [Pirellula sp.]
  misc_feature (53)..(404): Homolog of NCBI NO: 17549134 NR Description: CONSERVED HYPOTHETICAL PROTEIN [Ralstonia
  misc_feature (54)..(408): Homolog of NCBI NO: 15218937 NR Description: oxidoreductase -related [Arabidopsis thaliana]
  misc_feature (58)..(408): Homolog of NCBI NO: 25518452 NR Description: hypothetical protein F23M19.12 [imported] -
  misc_feature (58)..(408): Homolog of NCBI NO: 18399170 NR Description: expressed protein [Arabidopsis thaliana]
  misc_feature (57)..(406): Homolog of NCBI NO: 7488933 NR Description: protein AX110P - carrot
  misc_feature (78)..(411): Homolog of NCBI NO: 21954073 NR Description: putative AX110P protein [Arabidopsis thaliana]
  misc_feature (58)..(411): Homolog of NCBI NO: 15233990 NR Description: AX110P -related protein [Arabidopsis thaliana]
  misc_feature (50)..(365): Homolog of NCBI NO: 37534168 NR Description: putative oxidoreductase [Oryza sativa (japonica
MEMVLAAAANCTGALSSNHPKTFLKSRRSSLQMRACRSGPDAPLAVSSAAAPEEPRPVRLGIMGCGSIARKVARSMLLVPAADVAAVASRSEGKARLFAADNGLRSGTRIHGSYEALLDDPDVDAVYMPLPTSLHVKWATAAAERGKHLLLEKPTAPCAADLEPILAACEANGVQFMDSTMWMHHPRTAKMRQLVADQDTIGDVRFINTMVSFLANEDFLQNDIRVKPDLDGLGVLGDIGWYCIRGILWAVDYELPKNVVALHHPVKNQAGVLLACGASLYWADGKVATFHCSFLTNLTMDLTVVGTNGTIHVTDLVIPYEEKSAPFSVASKTNFAELSTGWDPHPSKHVVTTDLPQEGLMVQEFCRLVQGIRDAGVKPEGKWPGITRKTQIVVDAVKASIDNGFESVDVAS

SEQ ID NO: 64515 - protein, 410 aa, Triticum aestivum
  peptide (1)..(410): Ceres Seq. ID no. 14313473
  misc_feature (190)..(303): Pfam Name: Oxidoreductase family, C-terminal alpha/beta domain Pfam Description: Oxidoreductase family, C-terminal alpha/beta
  misc_feature (56)..(328): Homolog of NCBI NO: 22971184 NR Description: hypothetical protein [Chloroflexus aurantiacus]
  misc_feature (57)..(398): Homolog of NCBI NO: 32474689 NR Description: putative oxidoreductase [Pirellula sp.]
  misc_feature (51)..(402): Homolog of NCBI NO: 17549134 NR Description: CONSERVED HYPOTHETICAL PROTEIN [Ralstonia
  misc_feature (52)..(406): Homolog of NCBI NO: 15218937 NR Description: oxidoreductase -related [Arabidopsis thaliana]
  misc_feature (56)..(406): Homolog of NCBI NO: 25518452 NR Description: hypothetical protein F23M19.12 [imported] -
  misc_feature (56)..(406): Homolog of NCBI NO: 18399170 NR Description: expressed protein [Arabidopsis thaliana]
  misc_feature (55)..(404): Homolog of NCBI NO: 7488933 NR Description: protein AX110P - carrot
  misc_feature (76)..(409): Homolog of NCBI NO: 21954073 NR Description: putative AX110P protein [Arabidopsis thaliana]
  misc_feature (56)..(409): Homolog of NCBI NO: 15233990 NR Description: AX110P -related protein [Arabidopsis thaliana]
  misc_feature (48)..(363): Homolog of NCBI NO: 37534168 NR Description: putative oxidoreductase [Oryza sativa (japonica
MVLAAAANCTGALSSNHPKTFLKSRRSSLQMRACRSGPDAPLAVSSAAAPEEPRPVRLGIMGCGSIARKVARSMLLVPAADVAAVASRSEGKARLFAADNGLRSGTRIHGSYEALLDDPDVDAVYMPLPTSLHVKWATAAAERGKHLLLEKPTAPCAADLEPILAACEANGVQFMDSTMWMHHPRTAKMRQLVADQDTIGDVRFINTMVSFLANEDFLQNDIRVKPDLDGLGVLGDIGWYCIRGILWAVDYELPKNVVALHHPVKNQAGVLLACGASLYWADGKVATFHCSFLTNLTMDLTVVGTNGTIHVTDLVIPYEEKSAPFSVASKTNFAELSTGWDPHPSKHVVTTDLPQEGLMVQEFCRLVQGIRDAGVKPEGKWPGITRKTQIVVDAVKASIDNGFESVDVAS

SEQ ID NO: 64516 - protein, 380 aa, Triticum aestivum
  peptide (1)..(380): Ceres Seq. ID no. 14313474
  misc_feature (160)..(273): Pfam Name: Oxidoreductase family, C-terminal alpha/beta domain Pfam Description: Oxidoreductase family, C-terminal alpha/beta
  misc_feature (26)..(298): Homolog of NCBI NO: 22971184 NR Description: hypothetical protein [Chloroflexus aurantiacus]
  misc_feature (27)..(368): Homolog of NCBI NO: 32474689 NR Description: putative oxidoreductase [Pirellula sp.]
  misc_feature (21)..(372): Homolog of NCBI NO: 17549134 NR Description: CONSERVED HYPOTHETICAL PROTEIN [Ralstonia
  misc_feature (22)..(376): Homolog of NCBI NO: 15218937 NR Description: oxidoreductase -related [Arabidopsis thaliana]
  misc_feature (26)..(376): Homolog of NCBI NO: 25518452 NR Description: hypothetical protein F23M19.12 [imported] -
  misc_feature (26)..(376): Homolog of NCBI NO: 18399170 NR Description: expressed protein [Arabidopsis thaliana]
  misc_feature (25)..(374): Homolog of NCBI NO: 7488933 NR Description: protein AX110P - carrot
  misc_feature (46)..(379): Homolog of NCBI NO: 21954073 NR Description: putative AX110P protein [Arabidopsis thaliana]
  misc_feature (26)..(379): Homolog of NCBI NO: 15233990 NR Description: AX110P -related protein [Arabidopsis thaliana]
  misc_feature (18)..(333): Homolog of NCBI NO: 37534168 NR Description: putative oxidoreductase [Oryza sativa (japonica
MRACRSGPDAPLAVSSAAAPEEPRPVRLGIMGCGSIARKVARSMLLVPAADVAAVASRSEGKARLFAADNGLRSGTRIHGSYEALLDDPDVDAVYMPLPTSLHVKWATAAAERGKHLLLEKPTAPCAADLEPILAACEANGVQFMDSTMWMHHPRTAKMRQLVADQDTIGDVRFINTMVSFLANEDFLQNDIRVKPDLDGLGVLGDIGWYCIRGILWAVDYELPKNVVALHHPVKNQAGVLLACGASLYWADGKVATFHCSFLTNLTMDLTVVGTNGTIHVTDLVIPYEEKSAPFSVASKTNFAELSTGWDPHPSKHVVTTDLPQEGLMVQEFCRLVQGIRDAGVKPEGKWPGITRKTQIVVDAVKASIDNGFESVDVAS

SEQ ID NO: 64517 - DNA, 1720 bp, Triticum aestivum
  misc_feature (1)..(1720): Ceres Seq. ID no. 15169627
cgaaaacatctcagccccccgcatccattccaccagcgaacagagagcagaagagcaccacacgctcgccatggacacgtggcacatcttcctcggctcgatcctcctcgccatcccgctgatcctactcctccgcggccgcaagggcggccggctccgcgtcccgcccggcccgccgtccttgccggtgctgggcagcgtcgtgtggctgaccaactcgctcgccgacgttgagcccctgctccggcgcctcttcaagcgctacggccccatcgtgtccctgcgcgtggggtcccgcctctccatcttcgtcgccgaccgccgcctggcccacgcggcgctcgttgagcgcggcgccacgctcgcggaccgccccgcgctcccttcgctcaagctgctgggcgagaacaacaacaccatcacgcgcgccagctacgggcctgtctggcgcctcctccgccgcaacctcgtctccgagacgctgcacccgtcccgcgtccgcctcttcgcgcccgcgcgctcctgggtgcgccgcgtgctggccgagaagctgcgtgatgagtcgtcgtccggcggcgcggccgtcgtggagacgttccagtacgccatgttctgcctcctcgtgctcatgtgcttcggtgagcggctcgacgaggccacggtccgcgcgatcgccgccgcccagcgcgaacttctcatctacaggtcgaggaagatggccatcttctccttcctgccgtcggtgaccaagcatctctaccgcgaccgcctccagaccgtgcacgccatgcagcggaggaagaaggacctgttcgtgccgctgatcaacgctcggcgggagtacagaaaactcggcggcgagcccaagaaagagagcgcgttcgagcactcctacgtcgacgccctgctcgacataaagctccccgaggagggaaaccgcccgctcaccgacgacgagatgatcaacctctgttccgagttcctcgacgccgggaccgacaccacctccaccgggctgcagtggatcatggccgagctggtgaagaacccggccatccaggagaagctctacaaagagatcagcgccacgaagggggacgaccaggacgaggtctcggaggaggacgtccacaagatgccgtacctcaaggcggtggtcctcgagggcctccggaagcacccaccggcgcacttcgtgctgccgcacaaggcggcggcggacatggagatcggcggatacctgattcccaagggggcgacgatgaacttcatggtggccgagatgagcagggacgagcgggagtgggagaagccaacggagttcgtgccagagcggttcctgccaggcggcgcgggcgaagcggtggacgtgaccggcaaccgggagatcaagatgatgccgttcggcgtgggccggaggatctgcgccgggctgggcatcgccatgctccacctggagtacttcgtggccaacatggtgagggagttcgagtggcaggaggtcgccggcgaggaggtggacttcgccgagaagaacgagttcaccgtcgtcatgaagaagccgctgcgcccacgcctcgtgccacgaagggcctgagacaaaatccatctccatcagcaagtagtcaaaatcgaccagtagtccactcctatcgcttcggtcgttcttgtttttagtttactccatgttgataatggttaattagttgctgtacgatag

SEQ ID NO: 64518 - protein, 531 aa, Triticum aestivum
  peptide (1)..(531): Ceres Seq. ID no. 15169628
  misc_feature (55)..(528): Pfam Name: Cytochrome P450 Pfam Description: Cytochrome P450
  misc_feature (35)..(531): Homolog of NCBI NO: 27650337 NR Description: putative cytochrome P450 [Solenostemon
  misc_feature (21)..(531): Homolog of NCBI NO: 14488353 NR Description: putative cytochrome P450 [Oryza sativa (japonica
  misc_feature (29)..(531): Homolog of NCBI NO: 5915857 NR Description: Cytochrome P450 98A1
  misc_feature (366)..(531): Homolog of NCBI NO: 15240223 NR Description: cytochrome P450, putative [Arabidopsis thaliana]
  misc_feature (24)..(359): Homolog of NCBI NO: 15240223 NR Description: cytochrome P450, putative [Arabidopsis thaliana]
  misc_feature (27)..(530): Homolog of NCBI NO: 37536034 NR Description: putative cytochrome P450 [Oryza sativa (japonica
  misc_feature (22)..(529): Homolog of NCBI NO: 37536020 NR Description: putative cytochrome P450 [Oryza sativa (japonica
  misc_feature (24)..(523): Homolog of NCBI NO: 37536046 NR Description: putative cytochrome P450 [Oryza sativa (japonica
  misc_feature (24)..(530): Homolog of NCBI NO: 37536054 NR Description: putative cytochrome P450 [Oryza sativa (japonica
  misc_feature (24)..(531): Homolog of NCBI NO: 37536044 NR Description: putative cytochrome P450 [Oryza sativa (japonica
ENISAPRIHSTSEQRAEEHHTLAMDTWHIFLGSILLAIPLILLLRGRKGGRLRVPPGPPSLPVLGSVVWLTNSLADVEPLLRRLFKRYGPIVSLRVGSRLSIFVADRRLAHAALVERGATLADRPALPSLKLLGENNNTITRASYGPVWRLLRRNLVSETLHPSRVRLFAPARSWVRRVLAEKLRDESSSGGAAVVETFQYAMFCLLVLMCFGERLDEATVRAIAAAQRELLIYRSRKMAIFSFLPSVTKHLYRDRLQTVHAMQRRKKDLFVPLINARREYRKLGGEPKKESAFEHSYVDALLDIKLPEEGNRPLTDDEMINLCSEFLDAGTDTTSTGLQWIMAELVKNPAIQEKLYKEISATKGDDQDEVSEEDVHKMPYLKAVVLEGLRKHPPAHFVLPHKAAADMEIGGYLIPKGATMNFMVAEMSRDEREWEKPTEFVPERFLPGGAGEAVDVTGNREIKMMPFGVGRRICAGLGIAMLHLEYFVANMVREFEWQEVAGEEVDFAEKNEFTVVMKKPLRPRLVPRRA

SEQ ID NO: 64519 - protein, 508 aa, Triticum aestivum
  peptide (1)..(508): Ceres Seq. ID no. 15169629
  misc_feature (32)..(505): Pfam Name: Cytochrome P450 Pfam Description: Cytochrome P450
  misc_feature (12)..(508): Homolog of NCBI NO: 27650337 NR Description: putative cytochrome P450 [Solenostemon
  misc_feature (1)..(508): Homolog of NCBI NO: 14488353 NR Description: putative cytochrome P450 [Oryza sativa (japonica
  misc_feature (6)..(508): Homolog of NCBI NO: 5915857 NR Description: Cytochrome P450 98A1
  misc_feature (343)..(508): Homolog of NCBI NO: 15240223 NR Description: cytochrome P450, putative [Arabidopsis thaliana]
  misc_feature (1)..(336): Homolog of NCBI NO: 15240223 NR Description: cytochrome P450, putative [Arabidopsis thaliana]
  misc_feature (4)..(507): Homolog of NCBI NO: 37536034 NR Description: putative cytochrome P450 [Oryza sativa (japonica
  misc_feature (1)..(506): Homolog of NCBI NO: 37536020 NR Description: putative cytochrome P450 [Oryza sativa (japonica
  misc_feature (1)..(500): Homolog of NCBI NO: 37536046 NR Description: putative cytochrome P450 [Oryza sativa (japonica
  misc_feature (1)..(507): Homolog of NCBI NO: 37536054 NR Description: putative cytochrome P450 [Oryza sativa (japonica
  misc_feature (1)..(508): Homolog of NCBI NO: 37536044 NR Description: putative cytochrome P450 [Oryza sativa (japonica
MDTWHIFLGSILLAIPLILLLRGRKGGRLRVPPGPPSLPVLGSVVWLTNSLADVEPLLRRLFKRYGPIVSLRVGSRLSIFVADRRLAHAALVERGATLADRPALPSLKLLGENNNTITRASYGPVWRLLRRNLVSETLHPSRVRLFAPARSWVRRVLAEKLRDESSSGGAAVVETFQYAMFCLLVLMCFGERLDEATVRAIAAAQRELLIYRSRKMAIFSFLPSVTKHLYRDRLQTVHAMQRRKKDLFVPLINARREYRKLGGEPKKESAFEHSYVDALLDIKLPEEGNRPLTDDEMINLCSEFLDAGTDTTSTGLQWIMAELVKNPAIQEKLYKEISATKGDDQDEVSEEDVHKMPYLKAVVLEGLRKHPPAHFVLPHKAAADMEIGGYLIPKGATMNFMVAEMSRDEREWEKPTEFVPERFLPGGAGEAVDVTGNREIKMMPFGVGRRICAGLGIAMLHLEYFVANMVREFEWQEVAGEEVDFAEKNEFTVVMKKPLRPRLVPRRA

SEQ ID NO: 64520 - protein, 329 aa, Triticum aestivum
  peptide (1)..(329): Ceres Seq. ID no. 15169630
  misc_feature (1)..(326): Pfam Name: Cytochrome P450 Pfam Description: Cytochrome P450
  misc_feature (1)..(329): Homolog of NCBI NO: 27650337 NR Description: putative cytochrome P450 [Solenostemon
  misc_feature (1)..(329): Homolog of NCBI NO: 14488353 NR Description: putative cytochrome P450 [Oryza sativa (japonica
  misc_feature (1)..(329): Homolog of NCBI NO: 5915857 NR Description: Cytochrome P450 98A1
  misc_feature (164)..(329): Homolog of NCBI NO: 15240223 NR Description: cytochrome P450, putative [Arabidopsis thaliana]
  misc_feature (1)..(157): Homolog of NCBI NO: 15240223 NR Description: cytochrome P450, putative [Arabidopsis thaliana]
  misc_feature (1)..(328): Homolog of NCBI NO: 37536034 NR Description: putative cytochrome P450 [Oryza sativa (japonica
  misc_feature (1)..(327): Homolog of NCBI NO: 37536020 NR Description: putative cytochrome P450 [Oryza sativa (japonica
  misc_feature (1)..(321): Homolog of NCBI NO: 37536046 NR Description: putative cytochrome P450 [Oryza sativa (japonica
  misc_feature (1)..(328): Homolog of NCBI NO: 37536054 NR Description: putative cytochrome P450 [Oryza sativa (japonica
  misc_feature (1)..(329): Homolog of NCBI NO: 37536044 NR Description: putative cytochrome P450 [Oryza sativa (japonica
MFCLLVLMCFGERLDEATVRAIAAAQRELLIYRSRKMAIFSFLPSVTKHLYRDRLQTVHAMQRRKKDLFVPLINARREYRKLGGEPKKESAFEHSYVDALLDIKLPEEGNRPLTDDEMINLCSEFLDAGTDTTSTGLQWIMAELVKNPAIQEKLYKEISATKGDDQDEVSEEDVHKMPYLKAVVLEGLRKHPPAHFVLPHKAAADMEIGGYLIPKGATMNFMVAEMSRDEREWEKPTEFVPERFLPGGAGEAVDVTGNREIKMMPFGVGRRICAGLGIAMLHLEYFVANMVREFEWQEVAGEEVDFAEKNEFTVVMKKPLRPRLVPRRA

SEQ ID NO: 64521 - DNA, 675 bp, Triticum aestivum
  misc_feature (1)..(675): Ceres Seq. ID no. 12585873
aaaaaatttcacttttcccgtctccatctcactcagcggcggctgtgggcaacagaaccctagcgagtgaggcgggggcgcggtgcagcgccgcctcctccctccctcccaatctcctccctcgtctccctccctcccagtctcttttccgtccatggacagtggccgtgccgactaggtgagtggtggcagcgccatggagcgcggccgcacaacttcgatgtcggggaggagatgaggaggttcgtgatccctacggagtacctcgggcactgggcgttcgaggagctgctcagggaggccgaggaggagttcgggttccggcacgagggcgccctgcggattccctgtgacgtggaggtgttcgaaggcatcctgaggcttgtgggcgggaagaaggaggccgtgtcctactgctcttcttcggagcatgggatcttgtgcacatgatggtggtggccacttgttttctgtcgtccatttgttcccattcttggttcttggttcttctgagggggaataggaggaagggttcatcttctatgagctttacttgttccattattggttctcgattctttgaaggagaagaggaggaagagtccgtcgtctacaagagagcttcgatgagcttcacagttttacaagaggatgaaacgaaggagtcacatcttt

SEQ ID NO: 64522 - protein, 76 aa, Triticum aestivum
  peptide (1)..(76): Ceres Seq. ID no. 12585874
MMVVATCFLSSICSHSWFLVLLRGNRRKGSSSMSFTCSIIGSRFFEGEEEEESVVYKRASMSFTVLQEDETKESHL

SEQ ID NO: 64523 - protein, 75 aa, Triticum aestivum
  peptide (1)..(75): Ceres Seq. ID no. 12585875
MVVATCFLSSICSHSWFLVLLRGNRRKGSSSMSFTCSIIGSRFFEGEEEEESVVYKRASMSFTVLQEDETKESHL

SEQ ID NO: 64524 - protein, 71 aa, Triticum aestivum
  peptide (1)..(71): Ceres Seq. ID no. 12585876
  misc_feature (1)..(51): Pfam Name: Auxin responsive protein Pfam Description: Auxin responsive protein
  misc_feature (1)..(48): Homolog of NCBI NO: 24943206 NR Description: auxin-regulated protein [Phaseolus vulgaris]
  misc_feature (1)..(49): Homolog of NCBI NO: 30687983 NR Description: auxin-induced (indole-3-acetic acid induced)
  misc_feature (1)..(51): Homolog of NCBI NO: 21553798 NR Description: unknown [Arabidopsis thaliana]
  misc_feature (1)..(51): Homolog of NCBI NO: 15229222 NR Description: indole-3-acetic acid induced protein, related
  misc_feature (1)..(65): Homolog of NCBI NO: 15235917 NR Description: auxin induced protein-related; protein id:
  misc_feature (1)..(56): Homolog of NCBI NO: 15224133 NR Description: auxin-induced protein-related; protein id:
  misc_feature (1)..(62): Homolog of NCBI NO: 38567890 NR Description: OSJNBa0060N03.10 [Oryza sativa (japonica
  misc_feature (1)..(70): Homolog of NCBI NO: 6906857 NR Description: unknown [Zea mays]
MRRFVIPTEYLGHWAFEELLREAEEEFGFRHEGALRIPCDVEVFEGILRLVGGKKEAVSYCSSSEHGILCT

SEQ ID NO: 64525 - DNA, 1319 bp, Triticum aestivum
  misc_feature (1)..(1319): Ceres Seq. ID no. 15176854
atttcctcctccaccccagtagtagagatcatggcgaggagcgcgcgctcgatggcgttctttgtgctcgtcgccgtggccgtccgagccatctccgccgtcaccgacgggctgttgcccaacggggacttcgcgcaggggccggacaggtcggagatgaacggcacggtggtgaccgcgcgccacgccataccgcgctgggagatctccgggttcgtggagtacatcgcgcccgggcacagggaggaggacatgatcctgccgttgccgcccggcgcgtcggccgtgcggctgggcaacgacgccaccatccggcagcagctcaacgtcagccgccacatgttctattccgtctccttcatggccgcgcggtcgtgcgcccaggccgagaagctcaacgtgtcggtcgaccccgagttcggcctgctcccgatccagaccgtgtacaccagcaccggctgggacacctactcctgggccttcaaggccaggcacggcaccgggtggctgaccatccacaacaccggcgtcgaggaggacccggcgtgcggccccctcctgatcgccgtcgccatcaagaccctctacgccccccaccacaccaagggtaacatgctgaggaacggggacttcgagcaggggccgtacatcttccccggcacccggtggggcgtgctggtgccgccgatcacggaggacgtgcactcgccgctgtcgggctggactgtcatgtcggacaccaaggtggtcaagtacgtggacgcgccgcaccacgcggtgccgcggggcgcgcgcgccgtggagctggtggccggccgggagagcgcgctggtgcaggaggtgcgcaccgtgccggggcggacgtacaggctctccttcgccgtgggggacgccgccaacggctgcagcgggtccctggtggtggaggcgtacgcggggcgggggaccctgagggtgccctatgagtccctcggcacgggcggctccacgcccgcggcgctcgagttcacggccgtcgccaacgagacgcgcgtggtgttccagagctccagccacctcatgaagtccgacgccacgctgtgcgggcccgtcgtcgacgacgtctccctcgtcccggtgcgcgtgcacgctgcccgccggctgcgtttgtagcggatatctatcttttttgcagtagtttcggagttcgttgcgtttgtaccggccggcattcggtgcgccctgtgtctgaccgccgcgctggaggccttacgtgtctcgttagtcgcgtgtctgggtgacacaatatataacagtctccgtgaacggagacttcaacc

SEQ ID NO: 64526 - protein, 383 aa, Triticum aestivum
  peptide (1)..(383): Ceres Seq. ID no. 15176855
  misc_feature (53)..(374): Pfam Name: Protein of unknown function, DUF642 Pfam Description: Protein of unknown function, DUF642
  misc_feature (232)..(312): Homolog of NCBI NO: 34899562 NR Description: OJ1606_D04.1 [Oryza sativa (japonica
  misc_feature (203)..(312): Homolog of NCBI NO: 34902166 NR Description: Hypothetical protein [Oryza sativa (japonica
  misc_feature (153)..(368): Homolog of NCBI NO: 34913458 NR Description: P0702H08.18 [Oryza sativa (japonica
  misc_feature (10)..(373): Homolog of NCBI NO: 15220093 NR Description: expressed protein [Arabidopsis thaliana]
  misc_feature (15)..(381): Homolog of NCBI NO: 38345423 NR Description: OSJNBb0091E11.14 [Oryza sativa (japonica
  misc_feature (11)..(383): Homolog of NCBI NO: 38345427 NR Description: OSJNBb0091E11.18 [Oryza sativa (japonica
  misc_feature (22)..(383): Homolog of NCBI NO: 34912572 NR Description: P0410E03.24 [Oryza sativa (japonica
  misc_feature (11)..(383): Homolog of NCBI NO: 38345426 NR Description: OSJNBb0091E11.17 [Oryza sativa (japonica
  misc_feature (11)..(379): Homolog of NCBI NO: 38345428 NR Description: OSJNBb0091E11.19 [Oryza sativa (japonica
ISSSTPVVEIMARSARSMAFFVLVAVAVRAISAVTDGLLPNGDFAQGPDRSEMNGTVVTARHAIPRWEISGFVEYIAPGHREEDMILPLPPGASAVRLGNDATIRQQLNVSRHMFYSVSFMAARSCAQAEKLNVSVDPEFGLLPIQTVYTSTGWDTYSWAFKARHGTGWLTIHNTGVEEDPACGPLLIAVAIKTLYAPHHTKGNMLRNGDFEQGPYIFPGTRWGVLVPPITEDVHSPLSGWTVMSDTKVVKYVDAPHHAVPRGARAVELVAGRESALVQEVRTVPGRTYRLSFAVGDAANGCSGSLVVEAYAGRGTLRVPYESLGTGGSTPAALEFTAVANETRVVFQSSSHLMKSDATLCGPVVDDVSLVPVRVHAARRLRL

SEQ ID NO: 64527 - protein, 373 aa, Triticum aestivum
  peptide (1)..(373): Ceres Seq. ID no. 15176856
  misc_feature (43)..(364): Pfam Name: Protein of unknown function, DUF642 Pfam Description: Protein of unknown function, DUF642
  misc_feature (222)..(302): Homolog of NCBI NO: 34899562 NR Description: OJ1606_D04.1 [Oryza sativa (japonica
  misc_feature (193)..(302): Homolog of NCBI NO: 34902166 NR Description: Hypothetical protein [Oryza sativa (japonica
  misc_feature (143)..(358): Homolog of NCBI NO: 34913458 NR Description: P0702H08.18 [Oryza sativa (japonica
  misc_feature (1)..(363): Homolog of NCBI NO: 15220093 NR Description: expressed protein [Arabidopsis thaliana]
  misc_feature (5)..(371): Homolog of NCBI NO: 38345423 NR Description: OSJNBb0091E11.14 [Oryza sativa (japonica
  misc_feature (1)..(373): Homolog of NCBI NO: 38345427 NR Description: OSJNBb0091E11.18 [Oryza sativa (japonica
  misc_feature (12)..(373): Homolog of NCBI NO: 34912572 NR Description: P0410E03.24 [Oryza sativa (japonica
  misc_feature (1)..(373): Homolog of NCBI NO: 38345426 NR Description: OSJNBb0091E11.17 [Oryza sativa (japonica
  misc_feature (1)..(369): Homolog of NCBI NO: 38345428 NR Description: OSJNBb0091E11.19 [Oryza sativa (japonica
MARSARSMAFFVLVAVAVRAISAVTDGLLPNGDFAQGPDRSEMNGTVVTARHAIPRWEISGFVEYIAPGHREEDMILPLPPGASAVRLGNDATIRQQLNVSRHMFYSVSFMAARSCAQAEKLNVSVDPEFGLLPIQTVYTSTGWDTYSWAFKARHGTGWLTIHNTGVEEDPACGPLLIAVAIKTLYAPHHTKGNMLRNGDFEQGPYIFPGTRWGVLVPPITEDVHSPLSGWTVMSDTKVVKYVDAPHHAVPRGARAVELVAGRESALVQEVRTVPGRTYRLSFAVGDAANGCSGSLVVEAYAGRGTLRVPYESLGTGGSTPAALEFTAVANETRVVFQSSSHLMKSDATLCGPVVDDVSLVPVRVHAARRLRL

SEQ ID NO: 64528 - protein, 366 aa, Triticum aestivum
  peptide (1)..(366): Ceres Seq. ID no. 15176857
  misc_feature (36)..(357): Pfam Name: Protein of unknown function, DUF642 Pfam Description: Protein of unknown function, DUF642
  misc_feature (215)..(295): Homolog of NCBI NO: 34899562 NR Description: OJ1606_D04.1 [Oryza sativa (japonica
  misc_feature (186)..(295): Homolog of NCBI NO: 34902166 NR Description: Hypothetical protein [Oryza sativa (japonica
  misc_feature (136)..(351): Homolog of NCBI NO: 34913458 NR Description: P0702H08.18 [Oryza sativa (japonica
  misc_feature (1)..(356): Homolog of NCBI NO: 15220093 NR Description: expressed protein [Arabidopsis thaliana]
  misc_feature (1)..(364): Homolog of NCBI NO: 38345423 NR Description: OSJNBb0091E11.14 [Oryza sativa (japonica
  misc_feature (1)..(366): Homolog of NCBI NO: 38345427 NR Description: OSJNBb0091E11.18 [Oryza sativa (japonica
  misc_feature (5)..(366): Homolog of NCBI NO: 34912572 NR Description: P0410E03.24 [Oryza sativa (japonica
  misc_feature (1)..(366): Homolog of NCBI NO: 38345426 NR Description: OSJNBb0091E11.17 [Oryza sativa (japonica
  misc_feature (1)..(362): Homolog of NCBI NO: 38345428 NR Description: OSJNBb0091E11.19 [Oryza sativa (japonica
MAFFVLVAVAVRAISAVTDGLLPNGDFAQGPDRSEMNGTVVTARHAIPRWEISGFVEYIAPGHREEDMILPLPPGASAVRLGNDATIRQQLNVSRHMFYSVSFMAARSCAQAEKLNVSVDPEFGLLPIQTVYTSTGWDTYSWAFKARHGTGWLTIHNTGVEEDPACGPLLIAVAIKTLYAPHHTKGNMLRNGDFEQGPYIFPGTRWGVLVPPITEDVHSPLSGWTVMSDTKVVKYVDAPHHAVPRGARAVELVAGRESALVQEVRTVPGRTYRLSFAVGDAANGCSGSLVVEAYAGRGTLRVPYESLGTGGSTPAALEFTAVANETRVVFQSSSHLMKSDATLCGPVVDDVSLVPVRVHAARRLRL

SEQ ID NO: 64529 - DNA, 1052 bp, Triticum aestivum
  misc_feature (1)..(1052): Ceres Seq. ID no. 14302082
ctgtctctccctgctctctgtttctccgctcctcccagatccgcgcgtgcgttcctgttcacgttcctttccggcggcgtcgtcgtcttcctccagattcgactcgacgatttcccaagcgataatggcggaggaggggcacaaggtggtgctcaacgtgtacgacctcagcaacggcctggcgcgccagctctccacctccttcctcggcaagcccatcgaggccatatggcacacgggcgtggtggtgtacggcaacgagtacttcttcgggggcgggatccaggcggcgccggcgggggccacgcagtacggccgccccgtgcgggtcgtcgacctgggcgtcacccacctcccccgcgaggtcttcgaggactacctccgcgacatcgcgccgcgctacaccgccgccacctacagcctgctcacccacaactgcaacaactttagcaacgaggtcgcgcagttcctcgtcggcgccgggatccccgactacatcctcaacctgcccaacgaggtcatgtccagccccatgggcgccatgatcatgcccatgatccagaacctcgaggccacgctcaggaacaacgccgcgccccagaccacccagttcgtgcccacgccggcctctgtctccgtgccgcagccggtggcttcggccgacaaaacccctagttctacagcagctgccgctgctagtgcggcacctgttggctcttcttccaagaaagaagaagagaagaagatcgagaagcagactccagagaaagccgccgcggcagctccggctatggctgaccctctcgggagcatgagggggaaggtgcaggaggaggtgatgagggagtttgcggcgctcatggccagtgggacactgcgggcgagcgaggccgcggcgctggccatgcgccgggtcatggagcgccacggtgacggcgccagtatgcaggcctagtggcctgaaactattttacacacgttcgatctttgatgcaattgcaaactgatgcttacttgtattgcagcatgaaactcaattttatttgtctgac

SEQ ID NO: 64530 - protein, 317 aa, Triticum aestivum
  peptide (1)..(317): Ceres Seq. ID no. 14302083
  misc_feature (47)..(170): Pfam Name: Eukaryotic protein of unknown function (DUF862) Pfam Description: Eukaryotic protein of unknown function (DUF862)
  misc_feature (49)..(253): Homolog of NCBI NO: 23508869 NR Description: hypothetical protein [Plasmodium falciparum 3D7]
  misc_feature (49)..(210): Homolog of NCBI NO: 40738408 NR Description: hypothetical protein AN6915.2 [Aspergillus
  misc_feature (47)..(190): Homolog of NCBI NO: 34867307 NR Description: similar to D15Wsu75e protein [Rattus norvegicus]
  misc_feature (47)..(190): Homolog of NCBI NO: 20162548 NR Description: D15Wsu75e protein [Mus musculus]
  misc_feature (48)..(282): Homolog of NCBI NO: 29246854 NR Description: GLP_191_9337_10773 [Giardia lamblia ATCC 50803]
  misc_feature (47)..(190): Homolog of NCBI NO: 14779199 NR Description: similar to DNA segment, Chr 15, Wayne State
  misc_feature (49)..(189): Homolog of NCBI NO: 37589651 NR Description: Unknown (protein for MGC:73066) [Danio rerio]
  misc_feature (47)..(196): Homolog of NCBI NO: 28277916 NR Description: Similar to DNA segment, Chr 15, Wayne State
  misc_feature (38)..(310): Homolog of NCBI NO: 37535296 NR Description: unknown protein [Oryza sativa (japonica
  misc_feature (42)..(310): Homolog of NCBI NO: 15231383 NR Description: expressed protein [Arabidopsis thaliana]
CLSLLSVSPLLPDPRVRSCSRSFPAASSSSSRFDSTISQAIMAEEGHKVVLNVYDLSNGLARQLSTSFLGKPIEAIWHTGVVVYGNEYFFGGGIQAAPAGATQYGRPVRVVDLGVTHLPREVFEDYLRDIAPRYTAATYSLLTHNCNNFSNEVAQFLVGAGIPDYILNLPNEVMSSPMGAMIMPMIQNLEATLRNNAAPQTTQFVPTPASVSVPQPVASADKTPSSTAAAAASAAPVGSSSKKEEEKKIEKQTPEKAAAAAPAMADPLGSMRGKVQEEVMREFAALMASGTLRASEAAALAMRRVMERHGDGASMQA

SEQ ID NO: 64531 - protein, 276 aa, Triticum aestivum
  peptide (1)..(276): Ceres Seq. ID no. 14302084
  misc_feature (6)..(129): Pfam Name: Eukaryotic protein of unknown function (DUF862) Pfam Description: Eukaryotic protein of unknown function (DUF862)
  misc_feature (8)..(212): Homolog of NCBI NO: 23508869 NR Description: hypothetical protein [Plasmodium falciparum 3D7]
  misc_feature (8)..(169): Homolog of NCBI NO: 40738408 NR Description: hypothetical protein AN6915.2 [Aspergillus
  misc_feature (6)..(149): Homolog of NCBI NO: 34867307 NR Description: similar to D15Wsu75e protein [Rattus norvegicus]
  misc_feature (6)..(149): Homolog of NCBI NO: 20162548 NR Description: D15Wsu75e protein [Mus musculus]
  misc_feature (7)..(241): Homolog of NCBI NO: 29246854 NR Description: GLP_191_9337_10773 [Giardia lamblia ATCC 50803]
  misc_feature (6)..(149): Homolog of NCBI NO: 14779199 NR Description: similar to DNA segment, Chr 15, Wayne State
  misc_feature (8)..(148): Homolog of NCBI NO: 37589651 NR Description: Unknown (protein for MGC:73066) [Danio rerio]
  misc_feature (6)..(155): Homolog of NCBI NO: 28277916 NR Description: Similar to DNA segment, Chr 15, Wayne State
  misc_feature (1)..(269): Homolog of NCBI NO: 37535296 NR Description: unknown protein [Oryza sativa (japonica
  misc_feature (1)..(269): Homolog of NCBI NO: 15231383 NR Description: expressed protein [Arabidopsis thaliana]
MAEEGHKVVLNVYDLSNGLARQLSTSFLGKPIEAIWHTGVVVYGNEYFFGGGIQAAPAGATQYGRPVRVVDLGVTHLPREVFEDYLRDIAPRYTAATYSLLTHNCNNFSNEVAQFLVGAGIPDYILNLPNEVMSSPMGAMIMPMIQNLEATLRNNAAPQTTQFVPTPASVSVPQPVASADKTPSSTAAAAASAAPVGSSSKKEEEKKIEKQTPEKAAAAAPAMADPLGSMRGKVQEEVMREFAALMASGTLRASEAAALAMRRVMERHGDGASMQA

SEQ ID NO: 64532 - DNA, 922 bp, Triticum aestivum
  misc_feature (1)..(922): Ceres Seq. ID no. 12616626
tcccccgatccaaatccgaaatttttcccctccccgcagcccgctccctcctccgcgcccgcactgtagcccgagcgctcggctccaccgccgtgggctgtagccgccgtcgctgccatggcgaacgacgggtcccccaagtccggtgacatcccgccctaccccgagatgattctcgcggcgatcgaggcgctgggcgacaagaacggctcgagcaagtccgccatctccagctacatcgaggagaagtacgagggcctcccctcggcgcacgcctccctcctcacggccaacctcgccagcatgaaggaggccggcaagctcgccttcgtcaagaacaactacctcaaggctgacgctccctccgccaccccggcaaagcgcggccgcggccgcccgcctaaggaccctaacgcgccgcccaagccgaaggctgcgcccaaggaccccaacacgcccaagcgcggccggggccgcccgcccaaggctaaggatcccatggccgacgccgtcaaggatgccgtcgccaaggcgaccaccggcatgccccggggccgcggccgcccgccgggtccctcctcggccaagaaggccaaggtcgccaaggaggctgcctctccggctcccgcggacggctccgctcctgccaagcgtggccgtgggcgcccacgcaaggtggcggtgtgaggcctgcgtgctgatgcctttcggtctgtgtatctcgctgtggttgcgacggtggtaagctcctaggtgtgaccgtgcttcttcgatttgtgctccgtactaattgttccgtcggcttagttgctcagtatgtgttgtaacctaatcgagatgagtgtgcacaatggatggatggatgtttttagcttcggttgtagttgactgtgctgctgtgagtgaacatgttcattttttt

SEQ ID NO: 64533 - protein, 189 aa, Triticum aestivum; identical to SEQ ID NO: 55791
  peptide (1)..(189): Ceres Seq. ID no. 12616627
  misc_feature (11)..(80): Pfam Name: linker histone H1 and H5 family Pfam Description: linker histone H1 and H5 family
  misc_feature (9)..(187): Homolog of NCBI NO: 15223947 NR Description: linker histone protein, putative
  misc_feature (9)..(187): Homolog of NCBI NO: 1808590 NR Description: HMG-I/Y [Arabidopsis thaliana]
  misc_feature (1)..(186): Homolog of NCBI NO: 6651027 NR Description: high mobility group protein I/Y [Brassica napus]
  misc_feature (1)..(151): Homolog of NCBI NO: 629769 NR Description: histone-like DNA-binding protein PF 1 - oat
  misc_feature (2)..(188): Homolog of NCBI NO: 25553691 NR Description: P0479C08.8 [Oryza sativa (japonica
  misc_feature (2)..(187): Homolog of NCBI NO: 7439646 NR Description: DNA binding protein PF1 - rice
  misc_feature (1)..(187): Homolog of NCBI NO: 4585621 NR Description: HMGI/Y protein [Zea mays]
  misc_feature (1)..(187): Homolog of NCBI NO: 9837562 NR Description: high mobility group I/Y-2 [Zea mays]
  misc_feature (1)..(187): Homolog of NCBI NO: 11544762 NR Description: HMGI/Y protein [Zea mays]
  misc_feature (1)..(188): Homolog of NCBI NO: 20502966 NR Description: HMG-I/Y protein HMGa [Triticum aestivum]

SEQ ID NO: 64534 - protein, 172 aa, Triticum aestivum; identical to SEQ ID NO: 55792
  peptide (1)..(172): Ceres Seq. ID no. 12616628
  misc_feature (1)..(63): Pfam Name: linker histone H1 and H5 family Pfam Description: linker histone H1 and H5 family
  misc_feature (1)..(170): Homolog of NCBI NO: 15223947 NR Description: linker histone protein, putative
  misc_feature (1)..(170): Homolog of NCBI NO: 1808590 NR Description: HMG-I/Y [Arabidopsis thaliana]
  misc_feature (1)..(169): Homolog of NCBI NO: 6651027 NR Description: high mobility group protein I/Y [Brassica napus]
  misc_feature (1)..(134): Homolog of NCBI NO: 629769 NR Description: histone-like DNA-binding protein PF 1 - oat
  misc_feature (1)..(171): Homolog of NCBI NO: 25553691 NR Description: P0479C08.8 [Oryza sativa (japonica
  misc_feature (1)..(170): Homolog of NCBI NO: 7439646 NR Description: DNA binding protein PF1 - rice
  misc_feature (1)..(170): Homolog of NCBI NO: 4585621 NR Description: HMGI/Y protein [Zea mays]
  misc_feature (1)..(170): Homolog of NCBI NO: 9837562 NR Description: high mobility group I/Y-2 [Zea mays]
  misc_feature (1)..(170): Homolog of NCBI NO: 11544762 NR Description: HMGI/Y protein [Zea mays]
  misc_feature (1)..(171): Homolog of NCBI NO: 20502966 NR Description: HMG-I/Y protein HMGa [Triticum aestivum]

SEQ ID NO: 64535 - protein, 127 aa, Triticum aestivum; identical to SEQ ID NO: 55793
  peptide (1)..(127): Ceres Seq. ID no. 12616629
  misc_feature (1)..(125): Homolog of NCBI NO: 15223947 NR Description: linker histone protein, putative
  misc_feature (1)..(125): Homolog of NCBI NO: 1808590 NR Description: HMG-I/Y [Arabidopsis thaliana]
  misc_feature (1)..(124): Homolog of NCBI NO: 6651027 NR Description: high mobility group protein I/Y [Brassica napus]
  misc_feature (1)..(89): Homolog of NCBI NO: 629769 NR Description: histone-like DNA-binding protein PF 1 - oat
  misc_feature (1)..(126): Homolog of NCBI NO: 25553691 NR Description: P0479C08.8 [Oryza sativa (japonica
  misc_feature (1)..(125): Homolog of NCBI NO: 7439646 NR Description: DNA binding protein PF1 - rice
  misc_feature (1)..(125): Homolog of NCBI NO: 4585621 NR Description: HMGI/Y protein [Zea mays]
  misc_feature (1)..(125): Homolog of NCBI NO: 9837562 NR Description: high mobility group I/Y-2 [Zea mays]
  misc_feature (1)..(125): Homolog of NCBI NO: 11544762 NR Description: HMGI/Y protein [Zea mays]
  misc_feature (1)..(126): Homolog of NCBI NO: 20502966 NR Description: HMG-I/Y protein HMGa [Triticum aestivum]

SEQ ID NO: 64536 - DNA, 1044 bp, Triticum aestivum
  misc_feature (1)..(1044): Ceres Seq. ID no. 13584819
aatcgaaaactctcggtctcgctagggttttgggattttagcctccagcgccgccgccgccgccccccagcgaattcgacaagcccccgagctcgccggatccgatggccgtcacgttctccgacctccacaccgccgacgggctcaaggccctcgaggcgcacctcgccggcaagacctacatctccggcgatgggatcaccaaggacgacgtcaaggtgttcgcggcggtgcccgtgaagcccagcgccgagttcccgaacgctgcccgctggtatgacaccgtcgccgcggctgttgcttcaaggttccctggccagtcctctggggtgagtgcatcatcggctcctgctgcagctgctcctgccgcttccaaggatgaagacgacgatgatgacatggatctgtttggcgatgagaccgaggaggacaagaaagctgcagctgagcgtgaggctgccaagcctgcaaagaagaaagaaagtggcaaatcctctgtcctcatggatatcaagccatgggacgatgagactgacatgaagaagttggaggaggctgtccgcagtgttcaaatggagggtctcacctggggtgcatctaagcttatgcccgtgggttatggcatcaagaagctccagatcatgctgacgatcattgacgacctcgtgtctgtcgacactcttattgaggaagtgctctgcgagacgcccatcaacgagtatgtccagtcgtgtgacatcgttgccttcaacaagatctagaatctttgttcacccacttgttgctgctggattcttggtactgggatctgtcgatctggaaaacattattgtcgtcccatttagttacccctcttacagaaatgctactggttttgtttttgagtgatgccctggtcttgaatgtctgctacctttaaatagttgaactgctgagcggtttgtaatggcgaaacatctatcatgtggagtaaaatcagtctttgataaaaaaaaaaaaaaaaaagcttatcgataccgtcgacctcgagggggggcccggtac

SEQ ID NO: 64537 - protein, 218 aa, Triticum aestivum
  peptide (1)..(218): Ceres Seq. ID no. 13584820
  misc_feature (129)..(218): Pfam Name: EF-1 guanine nucleotide exchange domain Pfam Description: EF-1 guanine nucleotide exchange domain
  misc_feature (1)..(218): Homolog of NCBI NO: 3894214 NR Description: elongation factor 1 beta 2
  misc_feature (1)..(218): Homolog of NCBI NO: 38232568 NR Description: translational elongation factor 1 subunit Bbeta
  misc_feature (20)..(218): Homolog of NCBI NO: 27754711 NR Description: putative elongation factor 1B alpha-subunit
  misc_feature (1)..(218): Homolog of NCBI NO: 6015063 NR Description: ELONGATION FACTOR 1-BETA (EF-1-BETA)
  misc_feature (1)..(218): Homolog of NCBI NO: 15239877 NR Description: elongation factor 1B alpha-subunit
  misc_feature (1)..(218): Homolog of NCBI NO: 30687350 NR Description: elongation factor 1B alpha-subunit [Arabidopsis
  misc_feature (1)..(218): Homolog of NCBI NO: 34899162 NR Description: putative translation elongation factor eEF-1
  misc_feature (1)..(218): Homolog of NCBI NO: 232031 NR Description: ELONGATION FACTOR 1-BETA' (EF-1-BETA')
  misc_feature (1)..(218): Homolog of NCBI NO: 38175744 NR Description: putative translation elongation factor eEF-1
  misc_feature (1)..(218): Homolog of NCBI NO: 232033 NR Description: ELONGATION FACTOR 1-BETA' (EF-1-BETA')
MAVTFSDLHTADGLKALEAHLAGKTYISGDGITKDDVKVFAAVPVKPSAEFPNAARWYDTVAAAVASRFPGQSSGVSASSAPAAAAPAASKDEDDDDDMDLFGDETEEDKKAAAEREAAKPAKKKESGKSSVLMDIKPWDDETDMKKLEEAVRSVQMEGLTWGASKLMPVGYGIKKLQIMLTIIDDLVSVDTLIEEVLCETPINEYVQSCDIVAFNKI

SEQ ID NO: 64538 - protein, 120 aa, Triticum aestivum
  peptide (1)..(120): Ceres Seq. ID no. 13584821
  misc_feature (31)..(120): Pfam Name: EF-1 guanine nucleotide exchange domain Pfam Description: EF-1 guanine nucleotide exchange domain
  misc_feature (1)..(120): Homolog of NCBI NO: 3894214 NR Description: elongation factor 1 beta 2
  misc_feature (1)..(120): Homolog of NCBI NO: 38232568 NR Description: translational elongation factor 1 subunit Bbeta
  misc_feature (1)..(120): Homolog of NCBI NO: 27754711 NR Description: putative elongation factor 1B alpha-subunit
  misc_feature (1)..(120): Homolog of NCBI NO: 6015063 NR Description: ELONGATION FACTOR 1-BETA (EF-1-BETA)
  misc_feature (1)..(120): Homolog of NCBI NO: 15239877 NR Description: elongation factor 1B alpha-subunit
  misc_feature (1)..(120): Homolog of NCBI NO: 30687350 NR Description: elongation factor 1B alpha-subunit [Arabidopsis
  misc_feature (1)..(120): Homolog of NCBI NO: 34899162 NR Description: putative translation elongation factor eEF-1
  misc_feature (1)..(120): Homolog of NCBI NO: 232031 NR Description: ELONGATION FACTOR 1-BETA' (EF-1-BETA')
  misc_feature (1)..(120): Homolog of NCBI NO: 38175744 NR Description: putative translation elongation factor eEF-1
  misc_feature (1)..(120): Homolog of NCBI NO: 232033 NR Description: ELONGATION FACTOR 1-BETA' (EF-1-BETA')
MDLFGDETEEDKKAAAEREAAKPAKKKESGKSSVLMDIKPWDDETDMKKLEEAVRSVQMEGLTWGASKLMPVGYGIKKLQIMLTIIDDLVSVDTLIEEVLCETPINEYVQSCDIVAFNKI

SEQ ID NO: 64539 - DNA, 757 bp, Triticum aestivum
  misc_feature (1)..(757): Ceres Seq. ID no. 12618180
attttggatactagtgttggtctcagagtcctccaccccggacctctctgttcaccgcacacgatcagcagaggcagcggcaaggaagatgacgacgacgacaaggaggagacccttgaaggtccctgagatggcgctgagggtgtgcgtgatccccctcgccttggcctccctgtgggagatggccaccaacaagcaagctaatgacacctacggagagatcagcttctccaacctctccggcttcaagtatttagttttcattaacgctgtcactgccgcctattccgtggtctccatcctgatgtcatccttcaagtccctcgctcgctatgattggctcattttcctcctggatcaggcggcggcgtacctgctggtgacatcgtgctcggcggcggcggagctggtgtacctggcgatggagggcgaccgggaggtgtcgtggggcgaggtgtgctcctacttcggtcggttctgcggcagggccaccgtgtccgtggcgctgcaggccgccgcgctgctctgcttcgtcgcgctctccctcgtctccgccttccgggtcttccgcgagttcgacgcccctggtgctcatgttgattgctcgggggactctgactccaagcaggaaggtagaggatgatccatcatgaacaatcgctgatatttggaccatcttttatgtgtcaatggttgacgatggcgatgcgtccttggttttctttacgaatgctgatttcggggggagaaatgttgt

SEQ ID NO: 64540 - protein, 213 aa, Triticum aestivum
  peptide (1)..(213): Ceres Seq. ID no. 12618181
  misc_feature (39)..(174): Pfam Name: Domain of unknown function (DUF588) Pfam Description: Domain of unknown function (DUF588)
  misc_feature (37)..(190): Homolog of NCBI NO: 21617945 NR Description: unknown [Arabidopsis thaliana]
  misc_feature (37)..(190): Homolog of NCBI NO: 18403948 NR Description: expressed protein
  misc_feature (37)..(213): Homolog of NCBI NO: 25408415 NR Description: hypothetical protein At2g35760 [imported] -
  misc_feature (37)..(195): Homolog of NCBI NO: 15231842 NR Description: unknown protein; protein id: At3g14380.1
  misc_feature (71)..(195): Homolog of NCBI NO: 14030504 NR Description: salicylic acid-induced fragment 1 protein
  misc_feature (7)..(195): Homolog of NCBI NO: 18394453 NR Description: expressed protein
  misc_feature (7)..(195): Homolog of NCBI NO: 17380964 NR Description: unknown protein [Arabidopsis thaliana]
  misc_feature (39)..(195): Homolog of NCBI NO: 16973324 NR Description: hypothetical protein [Gossypium hirsutum]
  misc_feature (35)..(195): Homolog of NCBI NO: 38344646 NR Description: OSJNBa0094P09.18 [Oryza sativa (japonica
  misc_feature (14)..(195): Homolog of NCBI NO: 15240435 NR Description: putative protein; protein id: At5g54980.1
FWILVLVSESSTPDLSVHRTRSAEAAARKMTTTTRRRPLKVPEMALRVCVIPLALASLWEMATNKQANDTYGEISFSNLSGFKYLVFINAVTAAYSVVSILMSSFKSLARYDWLIFLLDQAAAYLLVTSCSAAAELVYLAMEGDREVSWGEVCSYFGRFCGRATVSVALQAAALLCFVALSLVSAFRVFREFDAPGAHVDCSGDSDSKQEGRG

SEQ ID NO: 64541 - protein, 184 aa, Triticum aestivum
  peptide (1)..(184): Ceres Seq. ID no. 12618182
  misc_feature (10)..(145): Pfam Name: Domain of unknown function (DUF588) Pfam Description: Domain of unknown function (DUF588)
  misc_feature (8)..(161): Homolog of NCBI NO: 21617945 NR Description: unknown [Arabidopsis thaliana]
  misc_feature (8)..(161): Homolog of NCBI NO: 18403948 NR Description: expressed protein
  misc_feature (8)..(184): Homolog of NCBI NO: 25408415 NR Description: hypothetical protein At2g35760 [imported] -
  misc_feature (8)..(166): Homolog of NCBI NO: 15231842 NR Description: unknown protein; protein id: At3g14380.1
  misc_feature (42)..(166): Homolog of NCBI NO: 14030504 NR Description: salicylic acid-induced fragment 1 protein
  misc_feature (1)..(166): Homolog of NCBI NO: 18394453 NR Description: expressed protein
  misc_feature (1)..(166): Homolog of NCBI NO: 17380964 NR Description: unknown protein [Arabidopsis thaliana]
  misc_feature (10)..(166): Homolog of NCBI NO: 16973324 NR Description: hypothetical protein [Gossypium hirsutum]
  misc_feature (6)..(166): Homolog of NCBI NO: 38344646 NR Description: OSJNBa0094P09.18 [Oryza sativa (japonica
  misc_feature (1)..(166): Homolog of NCBI NO: 15240435 NR Description: putative protein; protein id: At5g54980.1
MTTTTRRRPLKVPEMALRVCVIPLALASLWEMATNKQANDTYGEISFSNLSGFKYLVFINAVTAAYSVVSILMSSFKSLARYDWLIFLLDQAAAYLLVTSCSAAAELVYLAMEGDREVSWGEVCSYFGRFCGRATVSVALQAAALLCFVALSLVSAFRVFREFDAPGAHVDCSGDSDSKQEGRG

SEQ ID NO: 64542 - protein, 170 aa, Triticum aestivum
  peptide (1)..(170): Ceres Seq. ID no. 12618183
  misc_feature (1)..(131): Pfam Name: Domain of unknown function (DUF588) Pfam Description: Domain of unknown function (DUF588)
  misc_feature (1)..(147): Homolog of NCBI NO: 21617945 NR Description: unknown [Arabidopsis thaliana]
  misc_feature (1)..(147): Homolog of NCBI NO: 18403948 NR Description: expressed protein
  misc_feature (1)..(170): Homolog of NCBI NO: 25408415 NR Description: hypothetical protein At2g35760 [imported] -
  misc_feature (1)..(152): Homolog of NCBI NO: 15231842 NR Description: unknown protein; protein id: At3g14380.1
  misc_feature (28)..(152): Homolog of NCBI NO: 14030504 NR Description: salicylic acid-induced fragment 1 protein
  misc_feature (1)..(152): Homolog of NCBI NO: 18394453 NR Description: expressed protein
  misc_feature (1)..(152): Homolog of NCBI NO: 17380964 NR Description: unknown protein [Arabidopsis thaliana]
  misc_feature (1)..(152): Homolog of NCBI NO: 16973324 NR Description: hypothetical protein [Gossypium hirsutum]
  misc_feature (1)..(152): Homolog of NCBI NO: 38344646 NR Description: OSJNBa0094P09.18 [Oryza sativa (japonica
  misc_feature (1)..(152): Homolog of NCBI NO: 15240435 NR Description: putative protein; protein id: At5g54980.1
MALRVCVIPLALASLWEMATNKQANDTYGEISFSNLSGFKYLVFINAVTAAYSVVSILMSSFKSLARYDWLIFLLDQAAAYLLVTSCSAAAELVYLAMEGDREVSWGEVCSYFGRFCGRATVSVALQAAALLCFVALSLVSAFRVFREFDAPGAHVDCSGDSDSKQEGRG

SEQ ID NO: 64543 - DNA, 1063 bp, Triticum aestivum
  misc_feature (1)..(1063): Ceres Seq. ID no. 12617472
aaaaccactacagcgtagtgagcggcccagatcagccgaagtcagccggcaagctccacgggaaaccctagctactcccggccggccgccgccgccgcgtctgccgtccacgctccacccgcgggagctcgcctcctcctccacccgctacccctcgaggccactccggacggccatggcgcagagggccgcgggcggccttctccgacggtccatcgggctcgcgccgccgacaaccgcgagggccctgagcaccagcgccaccacgccggccgcggcggcagagggagaggcggcggccaaggcgaggaggaacaagaagaagaacctgttcgacgtggcgcagttcctgccggactggggcgtcggctacagggttgccaagaccacctggcgcgacgtctcctaccagatcaccaagatcaacctctacaaggatggccgccacgggaaggcgtgggggattcggcacaaggccggcgtgcaagcagccgatgctccgataagaatcagcggggttaacaaacgtggttggaagtacataaaggcgtcgttgcaagatatccctggagcagagccgccagccgtcaccgctgcttagtcagttacccggctagatatttatttagcaggtggcaaaactggtccctgtagaagcttagtgctgaaactattcagaaggttgactgatctaccatctccatcatttcataattctcctttgtctctgcaagtgttttttttttgacccggaacaattcattccattactaaactggctcagcaatgtctctgcaaggggttaaacataggtgaaagggttttagcgcgggcgtgaggccaggttgtcgtggcctccatgcttgttactgaagctaaagatgatgtagcgtcaattttttttttttggttttttctttttgcaatgcctcatttccatcagaagcaagcgcttcaccaacaatgagaatcgatcataaggtgattctcgccatcgaagccgaggacactgcgttcctagaatgcaaattatgatcccgtgtaataaaagttttctcttgcg

SEQ ID NO: 64544 - protein, 199 aa, Triticum aestivum
  peptide (1)..(199): Ceres Seq. ID no. 12617473
  misc_feature (83)..(199): Homolog of NCBI NO: 18423383 NR Description: expressed protein
  misc_feature (71)..(199): Homolog of NCBI NO: 15237795 NR Description: putative protein
KPLQRSERPRSAEVSRQAPRETLATPGRPPPPRLPSTLHPRELASSSTRYPSRPLRTAMAQRAAGGLLRRSIGLAPPTTARALSTSATTPAAAAEGEAAAKARRNKKKNLFDVAQFLPDWGVGYRVAKTTWRDVSYQITKINLYKDGRHGKAWGIRHKAGVQAADAPIRISGVNKRGWKYIKASLQDIPGAEPPAVTAA

SEQ ID NO: 64545 - protein, 141 aa, Triticum aestivum
  peptide (1)..(141): Ceres Seq. ID no. 12617474
  misc_feature (25)..(141): Homolog of NCBI NO: 18423383 NR Description: expressed protein
  misc_feature (13)..(141): Homolog of NCBI NO: 15237795 NR Description: putative protein
MAQRAAGGLLRRSIGLAPPTTARALSTSATTPAAAAEGEAAAKARRNKKKNLFDVAQFLPDWGVGYRVAKTTWRDVSYQITKINLYKDGRHGKAWGIRHKAGVQAADAPIRISGVNKRGWKYIKASLQDIPGAEPPAVTAA

SEQ ID NO: 64546 - DNA, 961 bp, Triticum aestivum
  misc_feature (1)..(961): Ceres Seq. ID no. 13585404
ctatcctctctctctctccagcatcctctttctctccttcctcccatggagtcggcatagccactagccggttctgcccgttgagagcgctcatataccctccacacctccagatctgtggcctgttgtagtctctgcctcctcagaacaacaagcccccgcagccgcgcccggatcggatggacaccgccatgcaccccgccggcgccgacgacggcggcctcgccgacccgctcaccggcaacgcgggcacaggcaccgagggcattatttgtggtatgccagacttcaagatgggtggaaagaggggcgatgaatctgcccctactgatgctggtgatgaagacggcgaagatgatgacggggatgaggatggtgacttcgcggagggcgaagaggaaatctcggaaggagaggagtatgacaaccccaaggccagtgacgccaagaagaaacaaataggcgagggtgaggagaatggcgaggatgatgaggaagaacaagaggagcaggagggtggaggaggtgacgacgatgatgatgacgacgacaacgacgatgacaatgaggacgacgacgatgatgacgatgatgtcgctgctgaagacgatggagatggagtagaagaggaggatgatgacgatgatgaggaggaggacgatgaggactcgctccagcccccgaagaagaggaagaagtgaagcccttcgacgcggctgctttagtcaccatgcgacgagatgtgcctgtccttcactgtgttctggaaactttccttagagttaaaaatgcccccacacgatcacaatgtgtgggcttgtaggagcgattagagggaactttgttgtcaccgttgctttgcttctgtggagttgatcgaacagatgtttcgctaacataattgtacctgagtggcgaaagcctcaagatttgaatatgtcagtcaactctttttatctcc

SEQ ID NO: 64547 - protein, 173 aa, Triticum aestivum
  peptide (1)..(173): Ceres Seq. ID no. 13585405
  misc_feature (46)..(163): Pfam Name: Chromadorea ALT protein Pfam Description: Chromadorea ALT protein
  misc_feature (45)..(163): Homolog of NCBI NO: 35210494 NR Description: aspartic acid-rich protein aspolin2 [Theragra
  misc_feature (45)..(163): Homolog of NCBI NO: 35210494 NR Description: aspartic acid-rich protein aspolin2 [Theragra
  misc_feature (45)..(163): Homolog of NCBI NO: 35210492 NR Description: aspartic acid-rich protein aspolin1 [Theragra
  misc_feature (45)..(163): Homolog of NCBI NO: 35210494 NR Description: aspartic acid-rich protein aspolin2 [Theragra
  misc_feature (45)..(163): Homolog of NCBI NO: 35210492 NR Description: aspartic acid-rich protein aspolin1 [Theragra
  misc_feature (44)..(163): Homolog of NCBI NO: 35210494 NR Description: aspartic acid-rich protein aspolin2 [Theragra
  misc_feature (44)..(163): Homolog of NCBI NO: 35210492 NR Description: aspartic acid-rich protein aspolin1 [Theragra
  misc_feature (45)..(163): Homolog of NCBI NO: 35210494 NR Description: aspartic acid-rich protein aspolin2 [Theragra
  misc_feature (45)..(163): Homolog of NCBI NO: 35210492 NR Description: aspartic acid-rich protein aspolin1 [Theragra
  misc_feature (8)..(173): Homolog of NCBI NO: 39545744 NR Description: OSJNBb0034I13.8 [Oryza sativa (japonica
MDTAMHPAGADDGGLADPLTGNAGTGTEGIICGMPDFKMGGKRGDESAPTDAGDEDGEDDDGDEDGDFAEGEEEISEGEEYDNPKASDAKKKQIGEGEENGEDDEEEQEEQEGGGGDDDDDDDDNDDDNEDDDDDDDDVAAEDDGDGVEEEDDDDDEEEDDEDSLQPPKKRKK

SEQ ID NO: 64548 - protein, 169 aa, Triticum aestivum
  peptide (1)..(169): Ceres Seq. ID no. 13585406
  misc_feature (42)..(159): Pfam Name: Chromadorea ALT protein Pfam Description: Chromadorea ALT protein
  misc_feature (41)..(159): Homolog of NCBI NO: 35210494 NR Description: aspartic acid-rich protein aspolin2 [Theragra
  misc_feature (41)..(159): Homolog of NCBI NO: 35210494 NR Description: aspartic acid-rich protein aspolin2 [Theragra
  misc_feature (41)..(159): Homolog of NCBI NO: 35210492 NR Description: aspartic acid-rich protein aspolin1 [Theragra
  misc_feature (41)..(159): Homolog of NCBI NO: 35210494 NR Description: aspartic acid-rich protein aspolin2 [Theragra
  misc_feature (41)..(159): Homolog of NCBI NO: 35210492 NR Description: aspartic acid-rich protein aspolin1 [Theragra
  misc_feature (40)..(159): Homolog of NCBI NO: 35210494 NR Description: aspartic acid-rich protein aspolin2 [Theragra
  misc_feature (40)..(159): Homolog of NCBI NO: 35210492 NR Description: aspartic acid-rich protein aspolin1 [Theragra
  misc_feature (41)..(159): Homolog of NCBI NO: 35210494 NR Description: aspartic acid-rich protein aspolin2 [Theragra
  misc_feature (41)..(159): Homolog of NCBI NO: 35210492 NR Description: aspartic acid-rich protein aspolin1 [Theragra
  misc_feature (4)..(169): Homolog of NCBI NO: 39545744 NR Description: OSJNBb0034I13.8 [Oryza sativa (japonica
MHPAGADDGGLADPLTGNAGTGTEGIICGMPDFKMGGKRGDESAPTDAGDEDGEDDDGDEDGDFAEGEEEISEGEEYDNPKASDAKKKQIGEGEENGEDDEEEQEEQEGGGGDDDDDDDDNDDDNEDDDDDDDDVAAEDDGDGVEEEDDDDDEEEDDEDSLQPPKKRKK

SEQ ID NO: 64549 - protein, 140 aa, Triticum aestivum
  peptide (1)..(140): Ceres Seq. ID no. 13585407
  misc_feature (13)..(130): Pfam Name: Chromadorea ALT protein Pfam Description: Chromadorea ALT protein
  misc_feature (12)..(130): Homolog of NCBI NO: 35210494 NR Description: aspartic acid-rich protein aspolin2 [Theragra
  misc_feature (12)..(130): Homolog of NCBI NO: 35210494 NR Description: aspartic acid-rich protein aspolin2 [Theragra
  misc_feature (12)..(130): Homolog of NCBI NO: 35210492 NR Description: aspartic acid-rich protein aspolin1 [Theragra
  misc_feature (12)..(130): Homolog of NCBI NO: 35210494 NR Description: aspartic acid-rich protein aspolin2 [Theragra
  misc_feature (12)..(130): Homolog of NCBI NO: 35210492 NR Description: aspartic acid-rich protein aspolin1 [Theragra
  misc_feature (11)..(130): Homolog of NCBI NO: 35210494 NR Description: aspartic acid-rich protein aspolin2 [Theragra
  misc_feature (11)..(130): Homolog of NCBI NO: 35210492 NR Description: aspartic acid-rich protein aspolin1 [Theragra
  misc_feature (12)..(130): Homolog of NCBI NO: 35210494 NR Description: aspartic acid-rich protein aspolin2 [Theragra
  misc_feature (12)..(130): Homolog of NCBI NO: 35210492 NR Description: aspartic acid-rich protein aspolin1 [Theragra
  misc_feature (1)..(140): Homolog of NCBI NO: 39545744 NR Description: OSJNBb0034I13.8 [Oryza sativa (japonica
MPDFKMGGKRGDESAPTDAGDEDGEDDDGDEDGDFAEGEEEISEGEEYDNPKASDAKKKQIGEGEENGEDDEEEQEEQEGGGGDDDDDDDDNDDDNEDDDDDDDDVAAEDDGDGVEEEDDDDDEEEDDEDSLQPPKKRKK

SEQ ID NO: 64550 - DNA, 921 bp, Triticum aestivum
  misc_feature (1)..(921): Ceres Seq. ID no. 12617475
cccttggaatggttacacaacttccctcacaggatgagacttctatcagcaagaaacaactcctggcacgtcttgatgtttgcatgggcggaagggttgctgaagagcttatatttggggaagaaaatgttactactggtgccagaaatgatcttcatactgcaacagagctcgcccagtatatggtatcaaactgtgggatgagtaatgctattggtcctgtgcatgtaaaagaacgaccaagtgttgacatgcaatcaagaatagatgcagaggtgggcagactcctaagagaagcttatgaacgggtgacacatttactgaagaagcatgagaagcaattacatgctttagcgaatgctctgctggagcgtgaaactctgacggcagatgagatcaacaaagtagttcatccctaccaagaagaaccacagcttcccttccaagaagaagcctttgcgctaacttagacatattaccttttgttgcatcaaggtggtagtttcgactgtaaatccgtgtacagtaattggaaagtcattactcaccattttgcgaagtggggtaaacttgggtgcatttccttctcggcaccattaggctggcatgcaggaaattgaaagatgagattatcggagggtgttgcatgattgtgagctattgacatatctgtgacgcggcgagactcaccagcgcctgccttttacccaacatgaagcccctgagctgagaagtgcatcacgcttggtttagatagggaagcaatacagatgtgacattgcatattttggattctagattatttcttcttttcaattctatgcctcgccattgtttaaaggaaaccgtacatataactgtctcattctattgcgtcgtaacatgttacgcggatgtggtcaattattagttggcatgttc

SEQ ID NO: 64551 - protein, 155 aa, Triticum aestivum
  peptide (1)..(155): Ceres Seq. ID no. 12617476
  misc_feature (1)..(135): Pfam Name: Peptidase family M41 Pfam Description: Peptidase family M41
  misc_feature (1)..(136): Homolog of NCBI NO: 19076014 NR Description: putative metallopeptidase [Schizosaccharomyces
  misc_feature (1)..(136): Homolog of NCBI NO: 34914296 NR Description: putative FtsH protease [Oryza sativa (japonica
  misc_feature (1)..(136): Homolog of NCBI NO: 30526336 NR Description: putative FtsH protease [Lycopersicon esculentum]
  misc_feature (1)..(151): Homolog of NCBI NO: 34914298 NR Description: putative FtsH protease [Oryza sativa (japonica
  misc_feature (94)..(154): Homolog of NCBI NO: 34912242 NR Description: P0710A02.1 [Oryza sativa (japonica
  misc_feature (1)..(62): Homolog of NCBI NO: 34912242 NR Description: P0710A02.1 [Oryza sativa (japonica
  misc_feature (1)..(136): Homolog of NCBI NO: 18401040 NR Description: FtsH protease, putative; protein id: At2g26140.1
  misc_feature (1)..(136): Homolog of NCBI NO: 7488430 NR Description: probable YME1 ATP-dependant proteinase
  misc_feature (1)..(150): Homolog of NCBI NO: 18423480 NR Description: FtsH protease, putative
  misc_feature (31)..(155): Homolog of NCBI NO: 34912722 NR Description: putative cell division protein FtsH protease-like
LGMVTQLPSQDETSISKKQLLARLDVCMGGRVAEELIFGEENVTTGARNDLHTATELAQYMVSNCGMSNAIGPVHVKERPSVDMQSRIDAEVGRLLREAYERVTHLLKKHEKQLHALANALLERETLTADEINKVVHPYQEEPQLPFQEEAFALT

SEQ ID NO: 64552 - protein, 153 aa, Triticum aestivum
  peptide (1)..(153): Ceres Seq. ID no. 12617477
  misc_feature (1)..(133): Pfam Name: Peptidase family M41 Pfam Description: Peptidase family M41
  misc_feature (1)..(134): Homolog of NCBI NO: 19076014 NR Description: putative metallopeptidase [Schizosaccharomyces
  misc_feature (1)..(134): Homolog of NCBI NO: 34914296 NR Description: putative FtsH protease [Oryza sativa (japonica
  misc_feature (1)..(134): Homolog of NCBI NO: 30526336 NR Description: putative FtsH protease [Lycopersicon esculentum]
  misc_feature (1)..(149): Homolog of NCBI NO: 34914298 NR Description: putative FtsH protease [Oryza sativa (japonica
  misc_feature (92)..(152): Homolog of NCBI NO: 34912242 NR Description: P0710A02.1 [Oryza sativa (japonica
  misc_feature (1)..(60): Homolog of NCBI NO: 34912242 NR Description: P0710A02.1 [Oryza sativa (japonica
  misc_feature (1)..(134): Homolog of NCBI NO: 18401040 NR Description: FtsH protease, putative; protein id: At2g26140.1
  misc_feature (1)..(134): Homolog of NCBI NO: 7488430 NR Description: probable YME1 ATP-dependant proteinase
  misc_feature (1)..(148): Homolog of NCBI NO: 18423480 NR Description: FtsH protease, putative
  misc_feature (29)..(153): Homolog of NCBI NO: 34912722 NR Description: putative cell division protein FtsH protease-like
MVTQLPSQDETSISKKQLLARLDVCMGGRVAEELIFGEENVTTGARNDLHTATELAQYMVSNCGMSNAIGPVHVKERPSVDMQSRIDAEVGRLLREAYERVTHLLKKHEKQLHALANALLERETLTADEINKVVHPYQEEPQLPFQEEAFALT

SEQ ID NO: 64553 - protein, 128 aa, Triticum aestivum
  peptide (1)..(128): Ceres Seq. ID no. 12617478
  misc_feature (1)..(108): Pfam Name: Peptidase family M41 Pfam Description: Peptidase family M41
  misc_feature (1)..(109): Homolog of NCBI NO: 19076014 NR Description: putative metallopeptidase [Schizosaccharomyces
  misc_feature (1)..(109): Homolog of NCBI NO: 34914296 NR Description: putative FtsH protease [Oryza sativa (japonica
  misc_feature (1)..(109): Homolog of NCBI NO: 30526336 NR Description: putative FtsH protease [Lycopersicon esculentum]
  misc_feature (1)..(124): Homolog of NCBI NO: 34914298 NR Description: putative FtsH protease [Oryza sativa (japonica
  misc_feature (67)..(127): Homolog of NCBI NO: 34912242 NR Description: P0710A02.1 [Oryza sativa (japonica
  misc_feature (1)..(35): Homolog of NCBI NO: 34912242 NR Description: P0710A02.1 [Oryza sativa (japonica
  misc_feature (1)..(109): Homolog of NCBI NO: 18401040 NR Description: FtsH protease, putative; protein id: At2g26140.1
  misc_feature (1)..(109): Homolog of NCBI NO: 7488430 NR Description: probable YME1 ATP-dependant proteinase
  misc_feature (1)..(123): Homolog of NCBI NO: 18423480 NR Description: FtsH protease, putative
  misc_feature (4)..(128): Homolog of NCBI NO: 34912722 NR Description: putative cell division protein FtsH protease-like
MGGRVAEELIFGEENVTTGARNDLHTATELAQYMVSNCGMSNAIGPVHVKERPSVDMQSRIDAEVGRLLREAYERVTHLLKKHEKQLHALANALLERETLTADEINKVVHPYQEEPQLPFQEEAFALT

SEQ ID NO: 64554 - DNA, 849 bp, Triticum aestivum
  misc_feature (1)..(849): Ceres Seq. ID no. 13598517
gtattcttccccgagcgagtggcgcacctctggaattgttttctgttttctcctccccacaatgtccatctccgggaacggccacctccccgccgccgccgcctccaccggcctgccggaccactcctccgcctccgcgtcagactccgaggccgagggagacgccgactacctccccatctccggcgccgcctcggacaccgacagcgaccccgaccccgatctcgcatctcaccgccgcctcgacgcggtcgacaacggcgtctccgagctggatatcgcctccgacgacgaagaaagcgacgaagaagaaggcacgggcgcgacggaggccgcggcctccttggacgacgagcgtaggcggcgcgcccagctgcccgcgggcgccgcggcccggatcgtggacgcgatgcgcggcgtggcgttccccggcgcgccgccgccctgggcgggcgccgtccccgacgagcagtggctcgagcgcctccgctccctccgcggcggccgcgactagacagagcagatgagttctcgacccacagatcactgtgagttgtgagagcttctgatccgcctttgtactgaaggaacattcctgtatcgccatagatccagtagaattgcctctcgctgcttcggaatgaaactcgtgcgcagatcatcgccgatgagatcagtgatcaacactggacgctgttcttgtgtatggattttatggaggtttggtttttttttcgaaaaaaaaaaaaaaaaaaaaaaaaaaaaaaaaaaaaaaaaaaaaaaaaaaaaaaaaagaaaaaaaaaaaaaaaaaggcttatcaataccgtcaacctcaagggggggcccgg

SEQ ID NO: 64555 - protein, 174 aa, Triticum aestivum
  peptide (1)..(174): Ceres Seq. ID no. 13598518
  misc_feature (26)..(170): Pfam Name: Mucin-like glycoprotein Pfam Description: Mucin-like glycoprotein
  misc_feature (14)..(165): Homolog of NCBI NO: 9630030 NR Description: unknown [Orgyia pseudotsugata multicapsid
  misc_feature (19)..(131): Homolog of NCBI NO: 15320736 NR Description: unknown [Epiphyas postvittana
  misc_feature (22)..(174): Homolog of NCBI NO: 188864 NR Description: mucin
  misc_feature (18)..(123): Homolog of NCBI NO: 15320736 NR Description: unknown [Epiphyas postvittana
  misc_feature (17)..(169): Homolog of NCBI NO: 27375632 NR Description: blr0521 [Bradyrhizobium japonicum]
  misc_feature (23)..(174): Homolog of NCBI NO: 7949115 NR Description: Ser/Arg-related nuclear matrix protein
  misc_feature (19)..(165): Homolog of NCBI NO: 30387315 NR Description: unknown [Choristoneura fumiferana MNPV]
  misc_feature (3)..(174): Homolog of NCBI NO: 9630030 NR Description: unknown [Orgyia pseudotsugata multicapsid
  misc_feature (19)..(131): Homolog of NCBI NO: 30387315 NR Description: unknown [Choristoneura fumiferana MNPV]
  misc_feature (18)..(165): Homolog of NCBI NO: 27375632 NR Description: blr0521 [Bradyrhizobium japonicum]
ILPRASGAPLELFSVFSSPQCPSPGTATSPPPPPPPACRTTPPPPRQTPRPRETPTTSPSPAPPRTPTATPTPISHLTAASTRSTTASPSWISPPTTKKATKKKARARRRPRPPWTTSVGGAPSCPRAPRPGSWTRCAAWRSPARRRPGRAPSPTSSGSSASAPSAAAATRQSR

SEQ ID NO: 64556 - protein, 170 aa, Triticum aestivum
  peptide (1)..(170): Ceres Seq. ID no. 13598519
  misc_feature (40)..(166): Homolog of NCBI NO: 25406950 NR Description: hypothetical protein [imported] - Arabidopsis
  misc_feature (40)..(166): Homolog of NCBI NO: 18390712 NR Description: expressed protein [Arabidopsis thaliana]
  misc_feature (21)..(148): Homolog of NCBI NO: 34914208 NR Description: OSJNBb0049O23.17 [Oryza sativa (japonica
YSSPSEWRTSGIVFCFLLPTMSISGNGHLPAAAASTGLPDHSSASASDSEAEGDADYLPISGAASDTDSDPDPDLASHRRLDAVDNGVSELDIASDDEESDEEEGTGATEAAASLDDERRRRAQLPAGAAARIVDAMRGVAFPGAPPPWAGAVPDEQWLERLRSLRGGRD

SEQ ID NO: 64557 - protein, 150 aa, Triticum aestivum
  peptide (1)..(150): Ceres Seq. ID no. 13598520
  misc_feature (20)..(146): Homolog of NCBI NO: 25406950 NR Description: hypothetical protein [imported] - Arabidopsis
  misc_feature (20)..(146): Homolog of NCBI NO: 18390712 NR Description: expressed protein [Arabidopsis thaliana]
  misc_feature (1)..(128): Homolog of NCBI NO: 34914208 NR Description: OSJNBb0049O23.17 [Oryza sativa (japonica
MSISGNGHLPAAAASTGLPDHSSASASDSEAEGDADYLPISGAASDTDSDPDPDLASHRRLDAVDNGVSELDIASDDEESDEEEGTGATEAAASLDDERRRRAQLPAGAAARIVDAMRGVAFPGAPPPWAGAVPDEQWLERLRSLRGGRD

SEQ ID NO: 64558 - DNA, 982 bp, Triticum aestivum
  misc_feature (1)..(982): Ceres Seq. ID no. 12598739
gaagaaatcagatcaaagggggaaggaagcgaggcacagggcaccgcactgctccacttcgccttctcctccaagccacgaactccggcgactccaccacaagcccccgagcagcccgccctctccgaccaccgccatgtcgaggcgcggcgactgggtctacgagaacaacggcgggacctgcgtggccatcgccggcgcggactactgcgtggtcgccgccgacacccgcctctccgtcggatacaacatcctcacgcgcgagcactccaagatctgcgagctggccgataaatgtgtaatagcatcttctggcttccaaggtgacatcaaagctctacagaagaacttagctgccagggaactgctataccagcaccagcacaataaaaggatgagctgcccagcaatggcacaattgctctccaacaccctgtactacaagcgattcttcccatactatgctttcaacgtgcttggtgggcttgacagtgaagggaaaggatgtgtctactcatatgatgctgttgggtcctacgagaggaccggttacagtgctcagggatcaggatctaccttgatcatgccagtgctggacaaccagctaaaatcacctagtccactattagttcctgcaagagatgctgtcacccctttgtccgagtcagaggcggtcgacctagttaaggatgtctttgcatctgcaactgagagggacatctacaccggggacaaggtggagattgtagtcatcaacaaagctgggactaggcgcgagtacatcgagttgaggaaggactaagtttgcgccgcggttgccatttgcttccctagatatagggaattattatgcccagagctgctacttgatagaaacacccgtgcttgctttgcttccgtgatgatgtaccaggatcgacccagcttgctttgttaaactactttgttgtttcatgcatatgagatgctgagctatttgttg

SEQ ID NO: 64559 - protein, 266 aa, Triticum aestivum
  peptide (1)..(266): Ceres Seq. ID no. 12598740
  misc_feature (55)..(251): Pfam Name: Proteasome A-type and B-type Pfam Description: Proteasome A-type and B-type
  misc_feature (54)..(266): Homolog of NCBI NO: 12653473 NR Description: proteasome (prosome, macropain) subunit, beta
  misc_feature (54)..(266): Homolog of NCBI NO: 4506193 NR Description: proteasome beta 1 subunit
  misc_feature (54)..(266): Homolog of NCBI NO: 17380207 NR Description: Proteasome subunit beta type 1-A (20S proteasome
  misc_feature (54)..(266): Homolog of NCBI NO: 17380206 NR Description: Proteasome subunit beta type 1-B (20S proteasome
  misc_feature (54)..(266): Homolog of NCBI NO: 28829610 NR Description: similar to Petunia hybrida (Petunia). Proteasome beta type 1 (EC 3.4.99.46) (20S proteasome alpha subunit F) (20S
  misc_feature (54)..(243): Homolog of NCBI NO: 14594933 NR Description: putative beta6 proteasome subunit [Nicotiana
  misc_feature (48)..(266): Homolog of NCBI NO: 15232965 NR Description: 20S proteasome beta subunit F1 (PBF1)
  misc_feature (44)..(266): Homolog of NCBI NO: 600387 NR Description: proteosome subunit [Arabidopsis thaliana]
  misc_feature (48)..(266): Homolog of NCBI NO: 17380185 NR Description: Proteasome subunit beta type 1 (20S proteasome
  misc_feature (46)..(266): Homolog of NCBI NO: 17380182 NR Description: Proteasome subunit beta type 1 (20S proteasome
KKSDQRGKEARHRAPHCSTSPSPPSHELRRLHHKPPSSPPSPTTAMSRRGDWVYENNGGTCVAIAGADYCVVAADTRLSVGYNILTREHSKICELADKCVIASSGFQGDIKALQKNLAARELLYQHQHNKRMSCPAMAQLLSNTLYYKRFFPYYAFNVLGGLDSEGKGCVYSYDAVGSYERTGYSAQGSGSTLIMPVLDNQLKSPSPLLVPARDAVTPLSESEAVDLVKDVFASATERDIYTGDKVEIVVINKAGTRREYIELRKD

SEQ ID NO: 64560 - protein, 221 aa, Triticum aestivum
  peptide (1)..(221): Ceres Seq. ID no. 12598741
  misc_feature (10)..(206): Pfam Name: Proteasome A-type and B-type Pfam Description: Proteasome A-type and B-type
  misc_feature (9)..(221): Homolog of NCBI NO: 12653473 NR Description: proteasome (prosome, macropain) subunit, beta
  misc_feature (9)..(221): Homolog of NCBI NO: 4506193 NR Description: proteasome beta 1 subunit
  misc_feature (9)..(221): Homolog of NCBI NO: 17380207 NR Description: Proteasome subunit beta type 1-A (20S proteasome
  misc_feature (9)..(221): Homolog of NCBI NO: 17380206 NR Description: Proteasome subunit beta type 1-B (20S proteasome
  misc_feature (9)..(221): Homolog of NCBI NO: 28829610 NR Description: similar to Petunia hybrida (Petunia). Proteasome beta type 1 (EC 3.4.99.46) (20S proteasome alpha subunit F) (20S
  misc_feature (9)..(198): Homolog of NCBI NO: 14594933 NR Description: putative beta6 proteasome subunit [Nicotiana
  misc_feature (3)..(221): Homolog of NCBI NO: 15232965 NR Description: 20S proteasome beta subunit F1 (PBF1)
  misc_feature (1)..(221): Homolog of NCBI NO: 600387 NR Description: proteosome subunit [Arabidopsis thaliana]
  misc_feature (3)..(221): Homolog of NCBI NO: 17380185 NR Description: Proteasome subunit beta type 1 (20S proteasome
  misc_feature (1)..(221): Homolog of NCBI NO: 17380182 NR Description: Proteasome subunit beta type 1 (20S proteasome
MSRRGDWVYENNGGTCVAIAGADYCVVAADTRLSVGYNILTREHSKICELADKCVIASSGFQGDIKALQKNLAARELLYQHQHNKRMSCPAMAQLLSNTLYYKRFFPYYAFNVLGGLDSEGKGCVYSYDAVGSYERTGYSAQGSGSTLIMPVLDNQLKSPSPLLVPARDAVTPLSESEAVDLVKDVFASATERDIYTGDKVEIVVINKAGTRREYIELRKD

SEQ ID NO: 64561 - protein, 135 aa, Triticum aestivum
  peptide (1)..(135): Ceres Seq. ID no. 12598742
  misc_feature (1)..(120): Pfam Name: Proteasome A-type and B-type Pfam Description: Proteasome A-type and B-type
  misc_feature (1)..(135): Homolog of NCBI NO: 12653473 NR Description: proteasome (prosome, macropain) subunit, beta
  misc_feature (1)..(135): Homolog of NCBI NO: 4506193 NR Description: proteasome beta 1 subunit
  misc_feature (1)..(135): Homolog of NCBI NO: 17380207 NR Description: Proteasome subunit beta type 1-A (20S proteasome
  misc_feature (1)..(135): Homolog of NCBI NO: 17380206 NR Description: Proteasome subunit beta type 1-B (20S proteasome
  misc_feature (1)..(135): Homolog of NCBI NO: 28829610 NR Description: similar to Petunia hybrida (Petunia). Proteasome beta type 1 (EC 3.4.99.46) (20S proteasome alpha subunit F) (20S
  misc_feature (1)..(112): Homolog of NCBI NO: 14594933 NR Description: putative beta6 proteasome subunit [Nicotiana
  misc_feature (1)..(135): Homolog of NCBI NO: 15232965 NR Description: 20S proteasome beta subunit F1 (PBF1)
  misc_feature (1)..(135): Homolog of NCBI NO: 600387 NR Description: proteosome subunit [Arabidopsis thaliana]
  misc_feature (1)..(135): Homolog of NCBI NO: 17380185 NR Description: Proteasome subunit beta type 1 (20S proteasome
  misc_feature (1)..(135): Homolog of NCBI NO: 17380182 NR Description: Proteasome subunit beta type 1 (20S proteasome
MSCPAMAQLLSNTLYYKRFFPYYAFNVLGGLDSEGKGCVYSYDAVGSYERTGYSAQGSGSTLIMPVLDNQLKSPSPLLVPARDAVTPLSESEAVDLVKDVFASATERDIYTGDKVEIVVINKAGTRREYIELRKD

SEQ ID NO: 64562 - DNA, 1157 bp, Triticum aestivum
  misc_feature (1)..(1157): Ceres Seq. ID no. 13579986
aggattggagaaaagcagagtgggccgacgtcgtcgccctccgcaggtcaagctcggcagctccagctccacctcgaaaccgaagccgccgccgccgccgccggcagcggaggaggaggaggaggaggagggagatggcgtcgggcctggtgacggaggacgtgacggtggggcggctggtccggatccggcgcacggtgatgcacatgctgcgcgaccggggctacctggtggtggagcacgagctgtccatgacccgccgcgacttccagcgcaagtacggcgagtccttccaccgcgaggacatgctcatcaacaagtgcaagaagaacgaccccaacgaccagatatacgtgttcttcccgaacgacgagaaggtggggatgaagcacatcaagaagtacgtcgaaatgatgaacgccgagaaagtctccagggctatattggtcgtgcagcagaacctcaccccatttgcaaaatcgtttctccaagaactggagccaaagatccacttggaggttttccaggacgcggaaatgcttataaatatcaaggaacatgttcttgttccggagcatcaagtgcttgctaatgaggaaaagaagacgttattggcgcggtacactttaaaggaaactcagctaccaagaatacagattacagatcccattgcgaggtactacggcctcaaacgagggcaggtggtgaagatcatcaggcccagcgagacagccggcagatacgtcacatatcgctatgttgtatgacagtacacaagtgaggtgaaggtcaaggaacctaaaacatggtgatttttgcagttacacacgacacacatacccattcgcttggagaaaaacggcatcgcttcaagcaaccattcttaaggatcgcatgcctgttacgtaaaaggattcttaataagctgagtgtatggagcataagcaaaatcctcatgttgtaccattgtttcgtgaactttatagaacatacagaaccgaaactagtgtgctgagagcaatgaaaggctctgcagttctggctgctacatcatttgaacgaaccattcttgaaactccatgattctggtcctgacgttgtgtgagtgtgtgtgtgtggtggtgatatgcgtgatgaacttgtttgcaatatacccc

SEQ ID NO: 64563 - protein, 254 aa, Triticum aestivum
  peptide (1)..(254): Ceres Seq. ID no. 13579987
  misc_feature (181)..(254): Pfam Name: RNA polymerase Rpb5, C-terminal domain Pfam Description: RNA polymerase Rpb5, C-terminal domain
  misc_feature (58)..(253): Homolog of NCBI NO: 19922004 NR Description: CG11979-PA [Drosophila melanogaster]
  misc_feature (58)..(253): Homolog of NCBI NO: 2896797 NR Description: RPB5_Human [Homo sapiens]
  misc_feature (49)..(254): Homolog of NCBI NO: 39595790 NR Description: Hypothetical protein CBG12745 [Caenorhabditis
  misc_feature (58)..(253): Homolog of NCBI NO: 14589951 NR Description: DNA directed RNA polymerase II polypeptide E
  misc_feature (58)..(253): Homolog of NCBI NO: 2135016 NR Description: DNA-directed RNA polymerase (EC 2.7.7.6) II 23K
  misc_feature (58)..(253): Homolog of NCBI NO: 28497750 NR Description: polymerase (RNA) II (DNA directed) polypeptide E
  misc_feature (58)..(253): Homolog of NCBI NO: 1173134 NR Description: DNA-directed RNA polymerase II 23 kDa polypeptide
  misc_feature (49)..(254): Homolog of NCBI NO: 17507947 NR Description: RNA polymerase Rpb5, N-terminal domain and RNA
  misc_feature (49)..(254): Homolog of NCBI NO: 38344231 NR Description: OJ991113_30.8 [Oryza sativa (japonica
  misc_feature (49)..(254): Homolog of NCBI NO: 15228724 NR Description: DNA-directed RNA polymerase (RNA polymerase),
DWRKAEWADVVALRRSSSAAPAPPRNRSRRRRRRQRRRRRRRREMASGLVTEDVTVGRLVRIRRTVMHMLRDRGYLVVEHELSMTRRDFQRKYGESFHREDMLINKCKKNDPNDQIYVFFPNDEKVGMKHIKKYVEMMNAEKVSRAILVVQQNLTPFAKSFLQELEPKIHLEVFQDAEMLINIKEHVLVPEHQVLANEEKKTLLARYTLKETQLPRIQITDPIARYYGLKRGQVVKIIRPSETAGRYVTYRYVV

SEQ ID NO: 64564 - protein, 210 aa, Triticum aestivum
  peptide (1)..(210): Ceres Seq. ID no. 13579988
  misc_feature (137)..(210): Pfam Name: RNA polymerase Rpb5, C-terminal domain Pfam Description: RNA polymerase Rpb5, C-terminal domain
  misc_feature (14)..(209): Homolog of NCBI NO: 19922004 NR Description: CG11979-PA [Drosophila melanogaster]
  misc_feature (14)..(209): Homolog of NCBI NO: 2896797 NR Description: RPB5_Human [Homo sapiens]
  misc_feature (5)..(210): Homolog of NCBI NO: 39595790 NR Description: Hypothetical protein CBG12745 [Caenorhabditis
  misc_feature (14)..(209): Homolog of NCBI NO: 14589951 NR Description: DNA directed RNA polymerase II polypeptide E
  misc_feature (14)..(209): Homolog of NCBI NO: 2135016 NR Description: DNA-directed RNA polymerase (EC 2.7.7.6) II 23K
  misc_feature (14)..(209): Homolog of NCBI NO: 28497750 NR Description: polymerase (RNA) II (DNA directed) polypeptide E
  misc_feature (14)..(209): Homolog of NCBI NO: 1173134 NR Description: DNA-directed RNA polymerase II 23 kDa polypeptide
  misc_feature (5)..(210): Homolog of NCBI NO: 17507947 NR Description: RNA polymerase Rpb5, N-terminal domain and RNA
  misc_feature (5)..(210): Homolog of NCBI NO: 38344231 NR Description: OJ991113_30.8 [Oryza sativa (japonica
  misc_feature (5)..(210): Homolog of NCBI NO: 15228724 NR Description: DNA-directed RNA polymerase (RNA polymerase),
MASGLVTEDVTVGRLVRIRRTVMHMLRDRGYLVVEHELSMTRRDFQRKYGESFHREDMLINKCKKNDPNDQIYVFFPNDEKVGMKHIKKYVEMMNAEKVSRAILVVQQNLTPFAKSFLQELEPKIHLEVFQDAEMLINIKEHVLVPEHQVLANEEKKTLLARYTLKETQLPRIQITDPIARYYGLKRGQVVKIIRPSETAGRYVTYRYVV

SEQ ID NO: 64565 - protein, 196 aa, Triticum aestivum
  peptide (1)..(196): Ceres Seq. ID no. 13579989
GLEKSRVGRRRRPPQVKLGSSSSTSKPKPPPPPPAAEEEEEEEGDGVGPGDGGRDGGAAGPDPAHGDAHAARPGLPGGGARAVHDPPRLPAQVRRVLPPRGHAHQQVQEERPQRPDIRVLPERREGGDEAHQEVRRNDERRESLQGYIGRAAEPHPICKIVSPRTGAKDPLGGFPGRGNAYKYQGTCSCSGASSAC

SEQ ID NO: 64566 - DNA, 1164 bp, Triticum aestivum
  misc_feature (1)..(1164): Ceres Seq. ID no. 15173077
atcatccacacatacgaacacacacaacattgtcatttagttgttcttgcttgctgctgctgaaatacctgcatgctagcatcccctgctcagaagaaacagaggtctggaggtctgtcttttcatcctggttttgttattggttcgtcgaggagaagatagtttcttggaggtgcaagctaggcgctgaggaggtcggacatggaggatgtggccaagttcttgtttgggatttccgggaatgtcattgctctatttctcttcctatccccggtgcctactttctggaggatcattcggaacaaatccacagaggaattctccggggtgccatacaacatgacgctcctcaactgcctcctctccgcctggtacgggctgccgttcgtgtccccgaacaacgtcctggtgtcgacgatcaacggcgtgggcgcggcgatcgagacggtgtacgtggtgatcttcctcgtcttcgcgtcgaacaagaaggcgaggctccggacgctcggcctggcgtcggccgtcgcgacggtgttcgcggtcgtggcgctcgtctcgatgctcgtcctgcacggcccggcacgcaagctcctcgccggcctcgccatgaccgtcttctccatctgcatgtacgcctcgcccctctccatcatgaggatggtgatcaagacgaagagcgtggagtacatgccgttcctgctgtcgctggcggtgttcctgtgcggcacgtcgtggttcatttacggcttgctcggccacgacctcttcgtcacgatccccaacgggtgcgggagcgtcctgggcgccgcgcagctcatcctttacgccatctaccggaacaacaagggcaacgccgcggccggcgctggcaagctacagggcgacgacgtggagatgtccgtcgacggcaggaacggcaaggtcgccgatagcgacgatcgcggtgcggcggggtcgacgaagaccggcaagatggtcggccaggtttagctagatcggtcgaagatcagccatattatgtgctttttctaccagtatcttgttactgcaagaatcccgcgtgttggccttgcgtaattagccaatataggactagcctttaattgccaccttgtacctgtttgtaagctatgtattgcatacgtgtactaatgtctcaagctg

SEQ ID NO: 64567 - protein, 309 aa, Triticum aestivum
  peptide (1)..(309): Ceres Seq. ID no. 15173078
HPHIRTHTTLSFSCSCLLLLKYLHASIPCSEETEVWRSVFSSWFCYWFVEEKIVSWRCKLGAEEVGHGGCGQVLVWDFRECHCSISLPIPGAYFLEDHSEQIHRGILRGAIQHDAPQLPPLRLVRAAVRVPEQRPGVDDQRRGRGDRDGVRGDLPRLRVEQEGEAPDARPGVGRRDGVRGRGARLDARPARPGTQAPRRPRHDRLLHLHVRLAPLHHEDGDQDEERGVHAVPAVAGGVPVRHVVVHLRLARPRPLRHDPQRVRERPGRRAAHPLRHLPEQQGQRRGRRWQATGRRRGDVRRRQERQGRR

SEQ ID NO: 64568 - protein, 262 aa, Triticum aestivum
  peptide (1)..(262): Ceres Seq. ID no. 15173079
  misc_feature (7)..(95): Pfam Name: MtN3/saliva family Pfam Description: MtN3/saliva family
  misc_feature (7)..(214): Homolog of NCBI NO: 15240040 NR Description: nodulin MtN3 family protein [Arabidopsis
  misc_feature (3)..(215): Homolog of NCBI NO: 15234863 NR Description: nodulin MtN3 family protein [Arabidopsis
  misc_feature (1)..(211): Homolog of NCBI NO: 18421965 NR Description: nodulin MtN3 family protein [Arabidopsis
  misc_feature (4)..(214): Homolog of NCBI NO: 18400517 NR Description: nodulin MtN3 family protein [Arabidopsis
  misc_feature (8)..(215): Homolog of NCBI NO: 18413388 NR Description: nodulin MtN3 family protein [Arabidopsis
  misc_feature (3)..(252): Homolog of NCBI NO: 34912462 NR Description: MtN3-like protein [Oryza sativa (japonica
  misc_feature (3)..(211): Homolog of NCBI NO: 34912454 NR Description: P0681B11.31 [Oryza sativa (japonica
  misc_feature (47)..(243): Homolog of NCBI NO: 25518644 NR Description: hypothetical protein F24J8.9 - Arabidopsis
  misc_feature (3)..(243): Homolog of NCBI NO: 18394992 NR Description: nodulin MtN3 family protein [Arabidopsis
  misc_feature (1)..(262): Homolog of NCBI NO: 34907420 NR Description: P0018C10.36 [Oryza sativa (japonica
MEDVAKFLFGISGNVIALFLFLSPVPTFWRIIRNKSTEEFSGVPYNMTLLNCLLSAWYGLPFVSPNNVLVSTINGVGAAIETVYVVIFLVFASNKKARLRTLGLASAVATVFAVVALVSMLVLHGPARKLLAGLAMTVFSICMYASPLSIMRMVIKTKSVEYMPFLLSLAVFLCGTSWFIYGLLGHDLFVTIPNGCGSVLGAAQLILYAIYRNNKGNAAAGAGKLQGDDVEMSVDGRNGKVADSDDRGAAGSTKTGKMVGQV

SEQ ID NO: 64569 - protein, 216 aa, Triticum aestivum
  peptide (1)..(216): Ceres Seq. ID no. 15173080
  misc_feature (1)..(168): Homolog of NCBI NO: 15240040 NR Description: nodulin MtN3 family protein [Arabidopsis
  misc_feature (1)..(169): Homolog of NCBI NO: 15234863 NR Description: nodulin MtN3 family protein [Arabidopsis
  misc_feature (1)..(165): Homolog of NCBI NO: 18421965 NR Description: nodulin MtN3 family protein [Arabidopsis
  misc_feature (1)..(168): Homolog of NCBI NO: 18400517 NR Description: nodulin MtN3 family protein [Arabidopsis
  misc_feature (1)..(169): Homolog of NCBI NO: 18413388 NR Description: nodulin MtN3 family protein [Arabidopsis
  misc_feature (1)..(206): Homolog of NCBI NO: 34912462 NR Description: MtN3-like protein [Oryza sativa (japonica
  misc_feature (1)..(165): Homolog of NCBI NO: 34912454 NR Description: P0681B11.31 [Oryza sativa (japonica
  misc_feature (1)..(197): Homolog of NCBI NO: 25518644 NR Description: hypothetical protein F24J8.9 - Arabidopsis
  misc_feature (1)..(197): Homolog of NCBI NO: 18394992 NR Description: nodulin MtN3 family protein [Arabidopsis
  misc_feature (1)..(216): Homolog of NCBI NO: 34907420 NR Description: P0018C10.36 [Oryza sativa (japonica
MTLLNCLLSAWYGLPFVSPNNVLVSTINGVGAAIETVYVVIFLVFASNKKARLRTLGLASAVATVFAVVALVSMLVLHGPARKLLAGLAMTVFSICMYASPLSIMRMVIKTKSVEYMPFLLSLAVFLCGTSWFIYGLLGHDLFVTIPNGCGSVLGAAQLILYAIYRNNKGNAAAGAGKLQGDDVEMSVDGRNGKVADSDDRGAAGSTKTGKMVGQV

SEQ ID NO: 64570 - DNA, 927 bp, Triticum aestivum
  misc_feature (1)..(927): Ceres Seq. ID no. 15226980
atttccattcgcatccccggctagccaaccctgttctcccgctcgcgcatctcaggctcctgcgttgcaggaaggaactcactcaagtatggacgccctctcctgctttgcgccgcctgcgatgctctcccggtcctttgcggacgcggccatcgcgcgcgcgctccacttctctccctcggccggctgctcccccgtcccggagccgtccatcgtcgccgacctcggcgcctgcagcgcggcagccacgacggcctcgtcctcctcctgcggccccgtggcgatgcttcccccggcggcaccgtccgcgcgttgcaggctgggacccgcgggcggccgcgcggggaagcgccggccgcggccgtccaagcgcgtgcccaccacgtacataaacaccgacgcggcaaccttccgtctcatggtgcagcacgtcaccggcgccgaggccgagccgcaggtcgacgccgacgccggcctcggtgtcctcctgtcgcccttcgactttgatcacttgctaccgtcggaccctgcggcggccgcggcccaagtcgccgcgtacgcccttccggcggcggcggcagagcagccgtgcttcccgacgctggactcgtggaacgtcatgtacgacaagaactaggtgactttgggtcgaaactgaagctctaggctctgtataaacatcatgcagcaagatgaaggcgccgttgcgtctggcttgtgatgtattgctccctttggtcgttgcagagcagtaggagaggattagagatgtagtagtagtgctgtatgcaagtgcgagtaccaccagactaccagtatagcacgcactagcagtgtaggaatgcagaggtgctccttggtctcctcgccggttgcactcgctgcttcaacttaggtagttcaatctgcctgttcttggttcttgcc

SEQ ID NO: 64571 - protein, 211 aa, Triticum aestivum
  peptide (1)..(211): Ceres Seq. ID no. 15226981
  misc_feature (123)..(151): Pfam Name: VQ motif Pfam Description: VQ motif
  misc_feature (83)..(205): Homolog of NCBI NO: 18403283 NR Description: expressed protein [Arabidopsis thaliana]
  misc_feature (82)..(209): Homolog of NCBI NO: 22324429 NR Description: unknown protein [Oryza sativa (japonica
FPFASPASQPCSPARASQAPALQEGTHSSMDALSCFAPPAMLSRSFADAAIARALHFSPSAGCSPVPEPSIVADLGACSAAATTASSSSCGPVAMLPPAAPSARCRLGPAGGRAGKRRPRPSKRVPTTYINTDAATFRLMVQHVTGAEAEPQVDADAGLGVLLSPFDFDHLLPSDPAAAAAQVAAYALPAAAAEQPCFPTLDSWNVMYDKN

SEQ ID NO: 64572 - protein, 182 aa, Triticum aestivum
  peptide (1)..(182): Ceres Seq. ID no. 15226982
  misc_feature (94)..(122): Pfam Name: VQ motif Pfam Description: VQ motif
  misc_feature (54)..(176): Homolog of NCBI NO: 18403283 NR Description: expressed protein [Arabidopsis thaliana]
  misc_feature (53)..(180): Homolog of NCBI NO: 22324429 NR Description: unknown protein [Oryza sativa (japonica
MDALSCFAPPAMLSRSFADAAIARALHFSPSAGCSPVPEPSIVADLGACSAAATTASSSSCGPVAMLPPAAPSARCRLGPAGGRAGKRRPRPSKRVPTTYINTDAATFRLMVQHVTGAEAEPQVDADAGLGVLLSPFDFDHLLPSDPAAAAAQVAAYALPAAAAEQPCFPTLDSWNVMYDKN

SEQ ID NO: 64573 - protein, 171 aa, Triticum aestivum
  peptide (1)..(171): Ceres Seq. ID no. 15226983
  misc_feature (83)..(111): Pfam Name: VQ motif Pfam Description: VQ motif
  misc_feature (43)..(165): Homolog of NCBI NO: 18403283 NR Description: expressed protein [Arabidopsis thaliana]
  misc_feature (42)..(169): Homolog of NCBI NO: 22324429 NR Description: unknown protein [Oryza sativa (japonica
MLSRSFADAAIARALHFSPSAGCSPVPEPSIVADLGACSAAATTASSSSCGPVAMLPPAAPSARCRLGPAGGRAGKRRPRPSKRVPTTYINTDAATFRLMVQHVTGAEAEPQVDADAGLGVLLSPFDFDHLLPSDPAAAAAQVAAYALPAAAAEQPCFPTLDSWNVMYDKN

SEQ ID NO: 64574 - DNA, 809 bp, Triticum aestivum
  misc_feature (1)..(809): Ceres Seq. ID no. 15173178
aaaacacgcattctcgccactggcaggctctctccctaacgccaggcccactgctaactcttcccacccttctcttctccatcacgagcgccggcggcggctggtagagaggcgagccgagaggtgcggctacgagcggaagaggcgaggagctcgagcgagcgatggggcggaggatcctcaacgacgcgctgcgcacgatggtgaacgcggagcggcgggggaaggcgacggcgcaactccagcccatctccggcgtcatgatctccttccttaacatcatgaagcaccgaggttacataaaaaatttcgaggtctttgatccacatagggttggaaaaatcaccgtggaacttcagggaaggattaaagattgcaaagctctcacttacaggcaggacctcagagctacggaaatagaaaaatacagaactaggatgcttccaacacggcagtggggctatgttgtggtgaccaccccaaatggcgttttagatcacgaggaagcaattaggcagaatgtgggtggccaggtcctcggttacttccattgagaaggaaaacacagttatcccatgctgagtcagctctgggttgcattttattttgttatgatgactgaagtcattttattttgacatttagagcttgctgcttttgttcatggccagcagaaaatgcgattacatctcagaagtatgtctcgcaacactgacataaatattgtaatccttctttgggacaggtatttctgtaggtgtaatacacccatgtacttcgagatacacgagtaaagctctagtttgagc

SEQ ID NO: 64575 - protein, 129 aa, Triticum aestivum
  peptide (1)..(129): Ceres Seq. ID no. 15173179
  misc_feature (6)..(129): Pfam Name: Ribosomal protein S8 Pfam Description: Ribosomal protein S8
  misc_feature (5)..(129): Homolog of NCBI NO: 2130985 NR Description: r-protein BnS15a [Brassica napus]
  misc_feature (5)..(129): Homolog of NCBI NO: 15231316 NR Description: 40S ribosomal protein S15A (RPS15aD) [Arabidopsis
  misc_feature (5)..(129): Homolog of NCBI NO: 6683481 NR Description: wrp15a [Citrullus lanatus]
  misc_feature (1)..(129): Homolog of NCBI NO: 15225502 NR Description: 40S ribosomal protein S15A (RPS15aC) [Arabidopsis
  misc_feature (5)..(129): Homolog of NCBI NO: 15223001 NR Description: 40S ribosomal protein S15A (RPS15aA) [Arabidopsis
  misc_feature (5)..(129): Homolog of NCBI NO: 133793 NR Description: 40S RIBOSOMAL PROTEIN S15A (PPCB8)
  misc_feature (5)..(129): Homolog of NCBI NO: 13560779 NR Description: cytoplasmic ribosomal protein S15a [Daucus carota]
  misc_feature (5)..(129): Homolog of NCBI NO: 28411802 NR Description: ribosomal protein S15 [Oryza sativa (japonica
  misc_feature (1)..(129): Homolog of NCBI NO: 15224834 NR Description: 40S ribosomal protein S15A (RPS15aB) [Arabidopsis
  misc_feature (1)..(129): Homolog of NCBI NO: 15233571 NR Description: 40S ribosomal protein S15A (RPS15aE) [Arabidopsis
MGRRILNDALRTMVNAERRGKATAQLQPISGVMISFLNIMKHRGYIKNFEVFDPHRVGKITVELQGRIKDCKALTYRQDLRATEIEKYRTRMLPTRQWGYVVVTTPNGVLDHEEAIRQNVGGQVLGYFH

SEQ ID NO: 64576 - protein, 117 aa, Triticum aestivum
  peptide (1)..(117): Ceres Seq. ID no. 15173180
  misc_feature (1)..(117): Pfam Name: Ribosomal protein S8 Pfam Description: Ribosomal protein S8
  misc_feature (1)..(117): Homolog of NCBI NO: 2130985 NR Description: r-protein BnS15a [Brassica napus]
  misc_feature (1)..(117): Homolog of NCBI NO: 15231316 NR Description: 40S ribosomal protein S15A (RPS15aD) [Arabidopsis
  misc_feature (1)..(117): Homolog of NCBI NO: 6683481 NR Description: wrp15a [Citrullus lanatus]
  misc_feature (1)..(117): Homolog of NCBI NO: 15225502 NR Description: 40S ribosomal protein S15A (RPS15aC) [Arabidopsis
  misc_feature (1)..(117): Homolog of NCBI NO: 15223001 NR Description: 40S ribosomal protein S15A (RPS15aA) [Arabidopsis
  misc_feature (1)..(117): Homolog of NCBI NO: 133793 NR Description: 40S RIBOSOMAL PROTEIN S15A (PPCB8)
  misc_feature (1)..(117): Homolog of NCBI NO: 13560779 NR Description: cytoplasmic ribosomal protein S15a [Daucus carota]
  misc_feature (1)..(117): Homolog of NCBI NO: 28411802 NR Description: ribosomal protein S15 [Oryza sativa (japonica
  misc_feature (1)..(117): Homolog of NCBI NO: 15224834 NR Description: 40S ribosomal protein S15A (RPS15aB) [Arabidopsis
  misc_feature (1)..(117): Homolog of NCBI NO: 15233571 NR Description: 40S ribosomal protein S15A (RPS15aE) [Arabidopsis
MVNAERRGKATAQLQPISGVMISFLNIMKHRGYIKNFEVFDPHRVGKITVELQGRIKDCKALTYRQDLRATEIEKYRTRMLPTRQWGYVVVTTPNGVLDHEEAIRQNVGGQVLGYFH

SEQ ID NO: 64577 - protein, 97 aa, Triticum aestivum
  peptide (1)..(97): Ceres Seq. ID no. 15173181
  misc_feature (1)..(97): Pfam Name: Ribosomal protein S8 Pfam Description: Ribosomal protein S8
  misc_feature (1)..(97): Homolog of NCBI NO: 2130985 NR Description: r-protein BnS15a [Brassica napus]
  misc_feature (1)..(97): Homolog of NCBI NO: 15231316 NR Description: 40S ribosomal protein S15A (RPS15aD) [Arabidopsis
  misc_feature (1)..(97): Homolog of NCBI NO: 6683481 NR Description: wrp15a [Citrullus lanatus]
  misc_feature (1)..(97): Homolog of NCBI NO: 15225502 NR Description: 40S ribosomal protein S15A (RPS15aC) [Arabidopsis
  misc_feature (1)..(97): Homolog of NCBI NO: 15223001 NR Description: 40S ribosomal protein S15A (RPS15aA) [Arabidopsis
  misc_feature (1)..(97): Homolog of NCBI NO: 133793 NR Description: 40S RIBOSOMAL PROTEIN S15A (PPCB8)
  misc_feature (1)..(97): Homolog of NCBI NO: 13560779 NR Description: cytoplasmic ribosomal protein S15a [Daucus carota]
  misc_feature (1)..(97): Homolog of NCBI NO: 28411802 NR Description: ribosomal protein S15 [Oryza sativa (japonica
  misc_feature (1)..(97): Homolog of NCBI NO: 15224834 NR Description: 40S ribosomal protein S15A (RPS15aB) [Arabidopsis
  misc_feature (1)..(97): Homolog of NCBI NO: 15233571 NR Description: 40S ribosomal protein S15A (RPS15aE) [Arabidopsis
MISFLNIMKHRGYIKNFEVFDPHRVGKITVELQGRIKDCKALTYRQDLRATEIEKYRTRMLPTRQWGYVVVTTPNGVLDHEEAIRQNVGGQVLGYFH

SEQ ID NO: 64578 - DNA, 1045 bp, Triticum aestivum
  misc_feature (1)..(1045): Ceres Seq. ID no. 13597213
attctcatttcccctgcttccagaacaccaccactccccacggacgactcttctcgccgcgcaaaccctagctagctaaatctcccatggcgacggcgaggctgcgatccgcgtcggcgtcctccctccgcgggatcctcctccgccactgctccgcgcccccgcgcgccgtctcagattttcaggttcctggatctgcaacatggaggcatttctcaacatgcaggcctaaccctcttgcaaaagggaacagctttggctcaatggcttctctgtacagccagacaagatgggcttctcaagccactgctgtgaaagaaactgaccccagtggcggcaagataagcattgggcccaaatccaagcagatcaaggaggaggacaaagatgatggactggtttatcagggaccgatatcatcaaccatcaagaaagtgaagcttctgtccctgtccacctgctgcctctctgtgtcgctaggccctgtcataacgttcatgacttcgcccgacatgaatgtgatcctcaagggaggagtcgcatccaccgtgatcttcctcagtgccacaacaaccgcagccctgcactggttcgtgagcccctacatccacaagctgagatggaggcagggttcagatagcttcgaggcggagataatgtcatggctggctacacccctgaagaagacgatcaagtttgctgacatcaggcccgcagagactaaccggcctttcgtcaccttcagggccgacgggaacttctacttcgtcgacgccgaccacttccccaacaaggccttgctggagaggctcacgcctaagctccccaacgagtccgcgttcaagaacttgtgatggaagctactgttttgcccgcattcgtgctcttgaacctggctgagctatcgagtcctttttcctgtagctaatacttgtgagaatttgtggtataaggtatcgccgttgtttttagttcagtacggagatttgtgaatcgctggcgtggaatatttttaactcctggacgattttgaataagtagcagc

SEQ ID NO: 64579 - protein, 255 aa, Triticum aestivum
  peptide (1)..(255): Ceres Seq. ID no. 13597214
  misc_feature (65)..(255): Homolog of NCBI NO: 18403955 NR Description: expressed protein [Arabidopsis thaliana]
  misc_feature (1)..(255): Homolog of NCBI NO: 29126334 NR Description: unknown protein [Oryza sativa (japonica
MATARLRSASASSLRGILLRHCSAPPRAVSDFQVPGSATWRHFSTCRPNPLAKGNSFGSMASLYSQTRWASQATAVKETDPSGGKISIGPKSKQIKEEDKDDGLVYQGPISSTIKKVKLLSLSTCCLSVSLGPVITFMTSPDMNVILKGGVASTVIFLSATTTAALHWFVSPYIHKLRWRQGSDSFEAEIMSWLATPLKKTIKFADIRPAETNRPFVTFRADGNFYFVDADHFPNKALLERLTPKLPNESAFKNL

SEQ ID NO: 64580 - protein, 196 aa, Triticum aestivum
  peptide (1)..(196): Ceres Seq. ID no. 13597215
  misc_feature (6)..(196): Homolog of NCBI NO: 18403955 NR Description: expressed protein [Arabidopsis thaliana]
  misc_feature (1)..(196): Homolog of NCBI NO: 29126334 NR Description: unknown protein [Oryza sativa (japonica
MASLYSQTRWASQATAVKETDPSGGKISIGPKSKQIKEEDKDDGLVYQGPISSTIKKVKLLSLSTCCLSVSLGPVITFMTSPDMNVILKGGVASTVIFLSATTTAALHWFVSPYIHKLRWRQGSDSFEAEIMSWLATPLKKTIKFADIRPAETNRPFVTFRADGNFYFVDADHFPNKALLERLTPKLPNESAFKNL

SEQ ID NO: 64581 - DNA, 690 bp, Triticum aestivum
  misc_feature (1)..(690): Ceres Seq. ID no. 12617479
cgattctccgctcgcctgctctgctccgccgcctctctggaaaaaaacacacaggtggcactgaataatagacaaggatggcttctactggcgtgaaagatttctaccggcagaagaagaaaggaggtgttggcaaaacttcagcatcttctaagaagaaaacacagaattacactggaggggcctctgttggggcctcaaataaggctcagacagcagcactaatttctcacggatccttagacctcagagatgatttcagtgagcaagaggagcagctgcggcagtttgacatggacatgaagtttggcccgtgcatcggtgtcaaccggcttcagcgctgggagcgtgcttccgccatgggcctccagccaccgccccaccttcgtgatctcctagcgcgcgcctcctccggaaacaaccgcaacaacggcggcccctcccctgaatgcctctgggagggtaagatctagaatcaaatttcttccgccgcaagtgctccttggcaacctagcatggcttgcctactgtagtctgaaactctgagcccgttttaccacgcggaactcctgctgttgcaccgtatccttggttgtttgcttatcagatgttgctacctcaactcctgcgagtgtcatcttcagtttgccgaaaaaaaaaaaaaaaaaagcttatcgataccgtcgacct

SEQ ID NO: 64582 - protein, 131 aa, Triticum aestivum
  peptide (1)..(131): Ceres Seq. ID no. 12617480
  misc_feature (42)..(107): Homolog of NCBI NO: 21312396 NR Description: small subunit DNA polymerase delta p12
  misc_feature (42)..(107): Homolog of NCBI NO: 34861401 NR Description: similar to DNA polymerase delta subunit 4 (DNA
  misc_feature (58)..(116): Homolog of NCBI NO: 10863969 NR Description: polymerase (DNA-directed), delta 4
  misc_feature (64)..(131): Homolog of NCBI NO: 34905320 NR Description: OJ9990_A01.8 [Oryza sativa (japonica
  misc_feature (1)..(131): Homolog of NCBI NO: 21594051 NR Description: unknown [Arabidopsis thaliana]
  misc_feature (1)..(131): Homolog of NCBI NO: 18391073 NR Description: Expressed protein
MASTGVKDFYRQKKKGGVGKTSASSKKKTQNYTGGASVGASNKAQTAALISHGSLDLRDDFSEQEEQLRQFDMDMKFGPCIGVNRLQRWERASAMGLQPPPHLRDLLARASSGNNRNNGGPSPECLWEGKI

SEQ ID NO: 64583 - DNA, 704 bp, Triticum aestivum
  misc_feature (1)..(704): Ceres Seq. ID no. 13655766
gataggaacaggcggaaccgtagacgaagcctcggacggaacgatacagagaagcctcggaaggggagcgatcggaaggggagggcggagagatggggatccggttcgtgctgctggtgaacaagcaggggcagacgcggctggcgcagtactacgagcacctctccctcgacgagcgccgcgccctcgagggcgagatcgtccgcaagtgcctcgcccgcaccgaccagcagtgctctttcgtggagcaccggaactacaaggtcgtctaccggcgctacgcctccctcttcttcctcgtcggcgtcgacaacgatgagaatgagttagccatccttgaattcatacatcttctcgtggaaaccatggaccgtcactttggcaacgtgtgtgagcttgacatcatgttccatctggagaaagtccacttcatgcttgaagagatggtgatgaatggttgcatcgtggagacgagcaaacagaacatattggcgcccatccagcttatggagaaaacctcgtaaatagtgtgtgaactcaagagcgcctaggtgatgcttagcctcttcctcccgccttcaccatagattcccccgttgtgtgaggagaaatgccgaacaactgctgtatgcatgggtggctgtgttcacccgactggaaaatgtgaaatgttctgtaatgttgaaaatgaagaccccatcatt

SEQ ID NO: 64584 - protein, 143 aa, Triticum aestivum
  peptide (1)..(143): Ceres Seq. ID no. 13655767
  misc_feature (2)..(143): Pfam Name: Clathrin adaptor complex small chain Pfam Description: Clathrin adaptor complex small chain
  misc_feature (3)..(142): Homolog of NCBI NO: 37544043 NR Description: similar to adaptor-related protein complex 1
  misc_feature (1)..(136): Homolog of NCBI NO: 19114322 NR Description: putative clathrin-associated protein (AP)
  misc_feature (3)..(141): Homolog of NCBI NO: 26788038 NR Description: SI:dZ234G15.5 (novel protein similar to human
  misc_feature (3)..(143): Homolog of NCBI NO: 17998681 NR Description: adaptor-related protein complex AP-4, sigma 1
  misc_feature (3)..(143): Homolog of NCBI NO: 13431288 NR Description: Adapter-related protein complex 4 sigma 1 subunit
  misc_feature (3)..(143): Homolog of NCBI NO: 23482798 NR Description: putative clathrin assembly protein [Plasmodium
  misc_feature (3)..(143): Homolog of NCBI NO: 23510210 NR Description: clathrin assembly protein, putative [Plasmodium
  misc_feature (1)..(141): Homolog of NCBI NO: 15224841 NR Description: clathrin assembly protein -related [Arabidopsis
  misc_feature (1)..(143): Homolog of NCBI NO: 37533546 NR Description: putative clathrin assembly protein
  misc_feature (1)..(143): Homolog of NCBI NO: 40253273 NR Description: putative clathrin coat assembly protein AP17
MGIRFVLLVNKQGQTRLAQYYEHLSLDERRALEGEIVRKCLARTDQQCSFVEHRNYKVVYRRYASLFFLVGVDNDENELAILEFIHLLVETMDRHFGNVCELDIMFHLEKVHFMLEEMVMNGCIVETSKQNILAPIQLMEKTS

SEQ ID NO: 64585 - protein, 105 aa, Triticum aestivum
  peptide (1)..(105): Ceres Seq. ID no. 13655768
IGTGGTVDEASDGTIQRSLGRGAIGRGGRRDGDPVRAAGEQAGADAAGAVLRAPLPRRAPRPRGRDRPQVPRPHRPAVLFRGAPELQGRLPALRLPLLPRRRRQR

SEQ ID NO: 64586 - DNA, 1334 bp, Triticum aestivum
  misc_feature (1)..(1334): Ceres Seq. ID no. 13598735
cccccctcccgttcsaacawwattgcaagcgattgcwgccaaacaggtcgatttcgaccgatctcctccgcatatgtggttctctgctgcccttgccgcttctcctcccacccaccttgtcctcgcgcgcacggggaaacgacgccggtgagatggctcctccccgcacggtgatctgcgtgggtgacgtccacggctacatctccaagctggagagcctgtgggcgaacctccagtccgcgctccccgccgacgccttcgccgccgcgctcgtcatcttcctcggggactacaacgaccgcggcccggacacccgccgcgtcctcgacttcctcctcgcgctcccggcccgccacccggctcagcgccacgtcttcctctgcggcaaccacgacctcgccttcgccgccttcgtcggagcgctgccgccgccccccgacggttcccctttcgccgccacctgggaccaatacatcgacaatgaggcccacgagggctggttccgcgggccggggcacgaggatatgcacgtgcaggggaggagatggggcggcgtcatcaaggagaggtggaaccccaagaagggcctcccgtacaagggctctatctacgatgcgcagcccaccttcgagtcctacggcgtcgcccatggatcaccagatctcatgaaagctgtgcctgaggagcacaagaagtttctgcatgacttggtttgggtccatgaagaggaagacgttcgtattgatacagatggaggccagattctatgcaaactgatcgcggttcatgccggcctggaaaagtccttggatttgaatgagcagcttagagttttgagaactagagacacaagggtgccaaaagttcaaatgcttagcgggaggcaggatgtttggaacataccacaggatctggccggcaagcagaccatcgttgtaagtgggcatcatgggaagctccacgtggacggtctcaggttcatcatcgacgaaggtggcgggtacgcagataaacctatagcggccgttgttttcccttcaaagtgatcaggagcacagagggaacggcctcccagaattaatctagacaccatcggaaatgcaagatatttttttttgttactgtcgtaacatgagcaattggacgactggtatgthcatctgccaaaatggagtataatatttcaaaaaacacagaattggggttttaatgtataatgtcgaggaaataagtcaaaaaaaaaaaaaaaaaaaaaaaaaaaaaaaaaaaaaaaaaaaaataaaaaaaaaaaaaaaaaagcttatcgataccgtcracctcragggggggcccgg

SEQ ID NO: 64587 - protein, 347 aa, Triticum aestivum
  peptide (1)..(347): Ceres Seq. ID no. 15222412
  misc_feature (55)..(319): Pfam Name: Calcineurin-like phosphoesterase Pfam Description: Calcineurin-like phosphoesterase
  misc_feature (37)..(138): Homolog of NCBI NO: 17937249 NR Description: serine/threonine protein phosphatase I
  misc_feature (60)..(147): Homolog of NCBI NO: 13475753 NR Description: serine/threonine protein phosphatase
  misc_feature (208)..(347): Homolog of NCBI NO: 19424085 NR Description: unknown protein [Arabidopsis thaliana]
  misc_feature (54)..(347): Homolog of NCBI NO: 18398696 NR Description: calcineurin-like phosphoesterase family
  misc_feature (54)..(347): Homolog of NCBI NO: 6143880 NR Description: unknown protein [Arabidopsis thaliana]
  misc_feature (54)..(347): Homolog of NCBI NO: 21618122 NR Description: unknown [Arabidopsis thaliana]
  misc_feature (54)..(347): Homolog of NCBI NO: 18398699 NR Description: calcineurin-like phosphoesterase family
  misc_feature (53)..(347): Homolog of NCBI NO: 38347604 NR Description: OSJNBa0042I15.17 [Oryza sativa (japonica
  misc_feature (5)..(5): Xaa is any aa, unknown or other
  misc_feature (6)..(6): Xaa is any aa, unknown or other
  misc_feature (7)..(7): Xaa is any aa, unknown or other
  misc_feature (12)..(12): Xaa is any aa, unknown or other
PLPFXXXCKRLXPNRSISTDLLRICGSLLPLPLLLPPTLSSRARGNDAGEMAPPRTVICVGDVHGYISKLESLWANLQSALPADAFAAALVIFLGDYNDRGPDTRRVLDFLLALPARHPAQRHVFLCGNHDLAFAAFVGALPPPPDGSPFAATWDQYIDNEAHEGWFRGPGHEDMHVQGRRWGGVIKERWNPKKGLPYKGSIYDAQPTFESYGVAHGSPDLMKAVPEEHKKFLHDLVWVHEEEDVRIDTDGGQILCKLIAVHAGLEKSLDLNEQLRVLRTRDTRVPKVQMLSGRQDVWNIPQDLAGKQTIVVSGHHGKLHVDGLRFIIDEGGGYADKPIAAVVFPSK

SEQ ID NO: 64588 - protein, 297 aa, Triticum aestivum
  peptide (1)..(297): Ceres Seq. ID no. 15222413
  misc_feature (5)..(269): Pfam Name: Calcineurin-like phosphoesterase Pfam Description: Calcineurin-like phosphoesterase
  misc_feature (1)..(88): Homolog of NCBI NO: 17937249 NR Description: serine/threonine protein phosphatase I
  misc_feature (10)..(97): Homolog of NCBI NO: 13475753 NR Description: serine/threonine protein phosphatase
  misc_feature (158)..(297): Homolog of NCBI NO: 19424085 NR Description: unknown protein [Arabidopsis thaliana]
  misc_feature (4)..(297): Homolog of NCBI NO: 18398696 NR Description: calcineurin-like phosphoesterase family
  misc_feature (4)..(297): Homolog of NCBI NO: 6143880 NR Description: unknown protein [Arabidopsis thaliana]
  misc_feature (4)..(297): Homolog of NCBI NO: 21618122 NR Description: unknown [Arabidopsis thaliana]
  misc_feature (4)..(297): Homolog of NCBI NO: 18398699 NR Description: calcineurin-like phosphoesterase family
  misc_feature (3)..(297): Homolog of NCBI NO: 38347604 NR Description: OSJNBa0042I15.17 [Oryza sativa (japonica
MAPPRTVICVGDVHGYISKLESLWANLQSALPADAFAAALVIFLGDYNDRGPDTRRVLDFLLALPARHPAQRHVFLCGNHDLAFAAFVGALPPPPDGSPFAATWDQYIDNEAHEGWFRGPGHEDMHVQGRRWGGVIKERWNPKKGLPYKGSIYDAQPTFESYGVAHGSPDLMKAVPEEHKKFLHDLVWVHEEEDVRIDTDGGQILCKLIAVHAGLEKSLDLNEQLRVLRTRDTRVPKVQMLSGRQDVWNIPQDLAGKQTIVVSGHHGKLHVDGLRFIIDEGGGYADKPIAAVVFPSK

SEQ ID NO: 64589 - protein, 173 aa, Triticum aestivum
  peptide (1)..(173): Ceres Seq. ID no. 15222414
  misc_feature (1)..(145): Pfam Name: Calcineurin-like phosphoesterase Pfam Description: Calcineurin-like phosphoesterase
  misc_feature (34)..(173): Homolog of NCBI NO: 19424085 NR Description: unknown protein [Arabidopsis thaliana]
  misc_feature (1)..(173): Homolog of NCBI NO: 18398696 NR Description: calcineurin-like phosphoesterase family
  misc_feature (1)..(173): Homolog of NCBI NO: 6143880 NR Description: unknown protein [Arabidopsis thaliana]
  misc_feature (1)..(173): Homolog of NCBI NO: 21618122 NR Description: unknown [Arabidopsis thaliana]
  misc_feature (1)..(173): Homolog of NCBI NO: 18398699 NR Description: calcineurin-like phosphoesterase family
  misc_feature (1)..(173): Homolog of NCBI NO: 38347604 NR Description: OSJNBa0042I15.17 [Oryza sativa (japonica
MHVQGRRWGGVIKERWNPKKGLPYKGSIYDAQPTFESYGVAHGSPDLMKAVPEEHKKFLHDLVWVHEEEDVRIDTDGGQILCKLIAVHAGLEKSLDLNEQLRVLRTRDTRVPKVQMLSGRQDVWNIPQDLAGKQTIVVSGHHGKLHVDGLRFIIDEGGGYADKPIAAVVFPSK

SEQ ID NO: 64590 - DNA, 657 bp, Triticum aestivum
  misc_feature (1)..(657): Ceres Seq. ID no. 12598184
gaaaaaaaaatcccaaacccaaagcactagctatattactctagcacaccacacaatcacaatggcatgcaaagctgccatcttcgtcgcgctgagcctcctcctctccgccgtcgccgccaacggctgcggaagcacctattgccaaccgccggtcgtcgtgccgacaccacccgtcgtcgttccgccgccataccatggaggaggagggcacggccacggccacggccacggagggcagtgctccatcaacgtgctcaacctgagggtgtgcgccaacgttctcggtggactgctcggcctcaagatcggcgttccggcgcgcgaccagtgctgcccgctgctccaggggttggccgacctcgacgccgccgtctgcctctgcaccgccgtcagggccaacatcctcggcctccacctcaacgtgcctgtggacatcagcctcctcctcaaccactgcggcaagacgtgcccgtctggtttcatttgcccagcccattaacggacgtattgttgcatgggctccgaataagatttgccttccgtactttgtttttttatttcatcaaatgtggatctgttccactcccacatttcaattgtgtaaccagtactacttttgttttttggcaaacagagcatatactcttcgtattg

SEQ ID NO: 64591 - protein, 197 aa, Triticum aestivum
  peptide (1)..(197): Ceres Seq. ID no. 12598185
MQSCHLRRAEPPPLRRRRQRLRKHLLPTAGRRADTTRRRSAAIPWRRRARPRPRPRRAVLHQRAQPEGVRQRSRWTARPQDRRSGARPVLPAAPGVGRPRRRRLPLHRRQGQHPRPPPQRACGHQPPPQPLRQDVPVWFHLPSPLTDVLLHGLRIRFAFRTLFFYFIKCGSVPLPHFNCVTSTTFVFWQTEHILFVL

SEQ ID NO: 64592 - protein, 166 aa, Triticum aestivum
  peptide (1)..(166): Ceres Seq. ID no. 12598186
  misc_feature (81)..(163): Pfam Name: Protease inhibitor/seed storage/LTP family Pfam Description: Protease inhibitor/seed storage/LTP family
  misc_feature (67)..(163): Homolog of NCBI NO: 7489138 NR Description: glycine-rich protein 16K - common tobacco
  misc_feature (21)..(164): Homolog of NCBI NO: 399204 NR Description: CORTICAL CELL DELINEATING PROTEIN PRECURSOR
  misc_feature (26)..(164): Homolog of NCBI NO: 39748092 NR Description: lipid transfer protein-like protein
  misc_feature (21)..(164): Homolog of NCBI NO: 2226329 NR Description: physical impedance induced protein [Zea mays]
  misc_feature (24)..(163): Homolog of NCBI NO: 37536712 NR Description: putative lipid transfer protein
  misc_feature (26)..(163): Homolog of NCBI NO: 37533214 NR Description: putative lipid tranfer protein
  misc_feature (21)..(163): Homolog of NCBI NO: 37533212 NR Description: putative lipid transfer protein
  misc_feature (22)..(163): Homolog of NCBI NO: 37536702 NR Description: putative lipid transfer protein
  misc_feature (22)..(163): Homolog of NCBI NO: 1084460 NR Description: RCc2 protein - rice
  misc_feature (24)..(163): Homolog of NCBI NO: 37536704 NR Description: putative lipid transfer protein
KKKSQTQSTSYITLAHHTITMACKAAIFVALSLLLSAVAANGCGSTYCQPPVVVPTPPVVVPPPYHGGGGHGHGHGHGGQCSINVLNLRVCANVLGGLLGLKIGVPARDQCCPLLQGLADLDAAVCLCTAVRANILGLHLNVPVDISLLLNHCGKTCPSGFICPAH

SEQ ID NO: 64593 - protein, 146 aa, Triticum aestivum
  peptide (1)..(146): Ceres Seq. ID no. 12598187
  misc_feature (61)..(143): Pfam Name: Protease inhibitor/seed storage/LTP family Pfam Description: Protease inhibitor/seed storage/LTP family
  misc_feature (47)..(143): Homolog of NCBI NO: 7489138 NR Description: glycine-rich protein 16K - common tobacco
  misc_feature (1)..(144): Homolog of NCBI NO: 399204 NR Description: CORTICAL CELL DELINEATING PROTEIN PRECURSOR
  misc_feature (6)..(144): Homolog of NCBI NO: 39748092 NR Description: lipid transfer protein-like protein
  misc_feature (1)..(144): Homolog of NCBI NO: 2226329 NR Description: physical impedance induced protein [Zea mays]
  misc_feature (4)..(143): Homolog of NCBI NO: 37536712 NR Description: putative lipid transfer protein
  misc_feature (6)..(143): Homolog of NCBI NO: 37533214 NR Description: putative lipid tranfer protein
  misc_feature (1)..(143): Homolog of NCBI NO: 37533212 NR Description: putative lipid transfer protein
  misc_feature (2)..(143): Homolog of NCBI NO: 37536702 NR Description: putative lipid transfer protein
  misc_feature (2)..(143): Homolog of NCBI NO: 1084460 NR Description: RCc2 protein - rice
  misc_feature (4)..(143): Homolog of NCBI NO: 37536704 NR Description: putative lipid transfer protein
MACKAAIFVALSLLLSAVAANGCGSTYCQPPVVVPTPPVVVPPPYHGGGGHGHGHGHGGQCSINVLNLRVCANVLGGLLGLKIGVPARDQCCPLLQGLADLDAAVCLCTAVRANILGLHLNVPVDISLLLNHCGKTCPSGFICPAH

SEQ ID NO: 64594 - DNA, 1152 bp, Triticum aestivum
  misc_feature (1)..(1152): Ceres Seq. ID no. 12626061
ccctcccctcccctcccctccgagcgagctcccgagcagcagcggcggccggcctccctccccctctccctcgcgcgcgccccagccgctcgcgccggtccgcccctccccctccagcggcgtcggcggaaggcattgcgccgagcagtcatcacagtccaagacaatggttgcacaagcctttaccgtcgatttggataagcctcttgtatttcaggttggtcatctggaggaacagtatcaagactgggttcaccagccaattgttagcaaggaggggccacggttttttgccaatgatgtattggagttcttaacacgtacgaaatggtgggcagttcctctcatttggttgcctgttgtttgctggtgcctgaatacatcgatccaaatgggccacacagttccagaagtagcgctgatggttgtggcaggaatatttatctggacactggttgaatacgtgctacatcggtacctgttccacatagatactaaaagttactggacaaacacggctcattatcttctgcatggatgccatcacaagcatccaatggatgggcttcgacttgtatttccaccaactgccgcagccatcttgtgctatccgttctggaattttgtcaagctcttcacaactacaactaccactcctggcgtgtttggaggtggcctgttgggttacgtgatctatgattgcacacactactacctgcatcacgcccacccttcattcgatccagcaaaatatctcaagaaataccatctgaaccatcacttcagaatccaaaacaagggctttggaataacatcaaccctgtgggaccatgtgtttggaacgctgccttcaacgaaaaccgccggcaagagctcttgagttgttgtaccgccttgcagtgcgagaatcaagactgtccaatggttgataacggattgaacggacggatgaacaaacaattaatcggagacgtcactgaagtgcttacatcctcactgatgtgtcgcgaatagagtggttccagacttgagcatatgttgtcatgtgtacagaggtttttctatctaaatagtatagcaccagcgtcgttcatttgtggctgttggtggccagtataatttttgggacaaattaagtaattgcattgcttg

SEQ ID NO: 64595 - protein, 292 aa, Triticum aestivum
  peptide (1)..(292): Ceres Seq. ID no. 12626062
  misc_feature (141)..(283): Pfam Name: Fatty acid hydroxylase Pfam Description: Fatty acid hydroxylase
  misc_feature (63)..(286): Homolog of NCBI NO: 40746791 NR Description: hypothetical protein AN0918.2 [Aspergillus
  misc_feature (63)..(281): Homolog of NCBI NO: 18447515 NR Description: RE63157p [Drosophila melanogaster]
  misc_feature (69)..(282): Homolog of NCBI NO: 39589620 NR Description: Hypothetical protein CBG12227 [Caenorhabditis
  misc_feature (69)..(282): Homolog of NCBI NO: 17505701 NR Description: Fatty acid hydroxylase (36.3 kD) [Caenorhabditis
  misc_feature (63)..(281): Homolog of NCBI NO: 6323928 NR Description: Required for the hydroxylation of the very long
  misc_feature (52)..(164): Homolog of NCBI NO: 32766618 NR Description: Unknown (protein for IMAGE:6878212) [Xenopus
  misc_feature (141)..(286): Homolog of NCBI NO: 32766618 NR Description: Unknown (protein for IMAGE:6878212) [Xenopus
  misc_feature (56)..(292): Homolog of NCBI NO: 15233426 NR Description: fatty acid hydroxylase - like protein
  misc_feature (56)..(290): Homolog of NCBI NO: 15226828 NR Description: fatty acid hydroxylase (FAH1)
  misc_feature (56)..(292): Homolog of NCBI NO: 34897078 NR Description: putative fatty acid hydroxylase
PPLPSPPSELPSSSGGRPPSPSPSRAPQPLAPVRPSPSSGVGGRHCAEQSSQSKTMVAQAFTVDLDKPLVFQVGHLEEQYQDWVHQPIVSKEGPRFFANDVLEFLTRTKWWAVPLIWLPVVCWCLNTSIQMGHTVPEVALMVVAGIFIWTLVEYVLHRYLFHIDTKSYWTNTAHYLLHGCHHKHPMDGLRLVFPPTAAAILCYPFWNFVKLFTTTTTTPGVFGGGLLGYVIYDCTHYYLHHAHPSFDPAKYLKKYHLNHHFRIQNKGFGITSTLWDHVFGTLPSTKTAGKSS

SEQ ID NO: 64596 - protein, 237 aa, Triticum aestivum
  peptide (1)..(237): Ceres Seq. ID no. 12626063
  misc_feature (86)..(228): Pfam Name: Fatty acid hydroxylase Pfam Description: Fatty acid hydroxylase
  misc_feature (8)..(231): Homolog of NCBI NO: 40746791 NR Description: hypothetical protein AN0918.2 [Aspergillus
  misc_feature (8)..(226): Homolog of NCBI NO: 18447515 NR Description: RE63157p [Drosophila melanogaster]
  misc_feature (14)..(227): Homolog of NCBI NO: 39589620 NR Description: Hypothetical protein CBG12227 [Caenorhabditis
  misc_feature (14)..(227): Homolog of NCBI NO: 17505701 NR Description: Fatty acid hydroxylase (36.3 kD) [Caenorhabditis
  misc_feature (8)..(226): Homolog of NCBI NO: 6323928 NR Description: Required for the hydroxylation of the very long
  misc_feature (1)..(109): Homolog of NCBI NO: 32766618 NR Description: Unknown (protein for IMAGE:6878212) [Xenopus
  misc_feature (86)..(231): Homolog of NCBI NO: 32766618 NR Description: Unknown (protein for IMAGE:6878212) [Xenopus
  misc_feature (1)..(237): Homolog of NCBI NO: 15233426 NR Description: fatty acid hydroxylase - like protein
  misc_feature (1)..(235): Homolog of NCBI NO: 15226828 NR Description: fatty acid hydroxylase (FAH1)
  misc_feature (1)..(237): Homolog of NCBI NO: 34897078 NR Description: putative fatty acid hydroxylase
MVAQAFTVDLDKPLVFQVGHLEEQYQDWVHQPIVSKEGPRFFANDVLEFLTRTKWWAVPLIWLPVVCWCLNTSIQMGHTVPEVALMVVAGIFIWTLVEYVLHRYLFHIDTKSYWTNTAHYLLHGCHHKHPMDGLRLVFPPTAAAILCYPFWNFVKLFTTTTTTPGVFGGGLLGYVIYDCTHYYLHHAHPSFDPAKYLKKYHLNHHFRIQNKGFGITSTLWDHVFGTLPSTKTAGKSS

SEQ ID NO: 64597 - protein, 162 aa, Triticum aestivum
  peptide (1)..(162): Ceres Seq. ID no. 12626064
  misc_feature (11)..(153): Pfam Name: Fatty acid hydroxylase Pfam Description: Fatty acid hydroxylase
  misc_feature (1)..(156): Homolog of NCBI NO: 40746791 NR Description: hypothetical protein AN0918.2 [Aspergillus
  misc_feature (1)..(151): Homolog of NCBI NO: 18447515 NR Description: RE63157p [Drosophila melanogaster]
  misc_feature (1)..(152): Homolog of NCBI NO: 39589620 NR Description: Hypothetical protein CBG12227 [Caenorhabditis
  misc_feature (1)..(152): Homolog of NCBI NO: 17505701 NR Description: Fatty acid hydroxylase (36.3 kD) [Caenorhabditis
  misc_feature (1)..(151): Homolog of NCBI NO: 6323928 NR Description: Required for the hydroxylation of the very long
  misc_feature (1)..(34): Homolog of NCBI NO: 32766618 NR Description: Unknown (protein for IMAGE:6878212) [Xenopus
  misc_feature (11)..(156): Homolog of NCBI NO: 32766618 NR Description: Unknown (protein for IMAGE:6878212) [Xenopus
  misc_feature (1)..(162): Homolog of NCBI NO: 15233426 NR Description: fatty acid hydroxylase - like protein
  misc_feature (1)..(160): Homolog of NCBI NO: 15226828 NR Description: fatty acid hydroxylase (FAH1)
  misc_feature (1)..(162): Homolog of NCBI NO: 34897078 NR Description: putative fatty acid hydroxylase
MGHTVPEVALMVVAGIFIWTLVEYVLHRYLFHIDTKSYWTNTAHYLLHGCHHKHPMDGLRLVFPPTAAAILCYPFWNFVKLFTTTTTTPGVFGGGLLGYVIYDCTHYYLHHAHPSFDPAKYLKKYHLNHHFRIQNKGFGITSTLWDHVFGTLPSTKTAGKSS

SEQ ID NO: 64598 - DNA, 1208 bp, Triticum aestivum
  misc_feature (1)..(1208): Ceres Seq. ID no. 13597809
cccaaccccccagacccaccgccacccaccaaaacacggactcctctcgctcgctcgctcgccgccgccggctgctgctccgcgcggccgtcgccgggcgtgcttcagtcagctcgcgcccctcctcgtgagctcgaaatacctcaagatgtcggagcattctgagagcaaggctgaaaagctcatgggcaacatcatggatactattgctgacaggctccccaagcagaagtctgacaatatcatgagcaacatcatggataccatttctgacaagctccctaagcagaggtctggccgtttcgatccaggctcagtcgctgatgtgaagaacaagatgtttggtcgtcagaggtccctccatggagttttgggtggcggaaagtctgctgatgtgttgttatggaggaacaagaagatatcttccagtgttttgggtctcgcaacagctatctgggttttcttcgagtggcttgattaccacttcttgacaatcatttcatttgcccttgttattggaatggtggttcagtttgtttggtccaacttctcaaggtcttctgaaataccccgggttaagttgccagaggacctgtttgtgaacattgctgttgccatcggtgcccaagtaaacaagttccttggtttccttcaagatgtgtcttgtgaaagaaacttgaagcattttgtattggcaattgttggattgtgggctgcttctgtagctgggagctggttcaacttcctgactgtcatttacattgggtttgtctgcgcgcacacgctccctgtgctgtacgagaagtacgaggaccaggtcgacgacttcctctacagcatcctgggcctgctccgagagcagtaccagaaactcgacagcggcgtcctgagcaggataccctccaagaggaacaagaagagcgagtagattgattagatcagatggacactcatgatttatcgagtgaaatcccagctattatttattctgcctagtttgtgtgctgcagacctgtagtgtgtctcaactatcatgtgagagaatgtgtgctcaagtgcttcctgaacggaacgctggtttaaattcaaccgcgacgcatgcgtctgttgtcccatttattattagtgggatgctgctcaacaaactggtgagaccagaagttgtatgcatatattggaaattgagctgaaatccgctgtgctttgtc

SEQ ID NO: 64599 - protein, 308 aa, Triticum aestivum
  peptide (1)..(308): Ceres Seq. ID no. 15222200
  misc_feature (64)..(308): Homolog of NCBI NO: 15237093 NR Description: expressed protein [Arabidopsis thaliana]
  misc_feature (79)..(302): Homolog of NCBI NO: 15222616 NR Description: expressed protein [Arabidopsis thaliana]
  misc_feature (64)..(308): Homolog of NCBI NO: 15236556 NR Description: expressed protein [Arabidopsis thaliana]
  misc_feature (112)..(300): Homolog of NCBI NO: 34904202 NR Description: P0492F05.25 [Oryza sativa (japonica
  misc_feature (50)..(300): Homolog of NCBI NO: 34909318 NR Description: OSJNBb0021A09.5 [Oryza sativa (japonica
  misc_feature (76)..(300): Homolog of NCBI NO: 18406991 NR Description: expressed protein [Arabidopsis thaliana]
  misc_feature (79)..(301): Homolog of NCBI NO: 18398810 NR Description: expressed protein [Arabidopsis thaliana]
  misc_feature (62)..(301): Homolog of NCBI NO: 30681227 NR Description: expressed protein [Arabidopsis thaliana]
  misc_feature (80)..(308): Homolog of NCBI NO: 34899590 NR Description: hypothetical protein~similar to Oryza sativa
  misc_feature (78)..(308): Homolog of NCBI NO: 34897094 NR Description: unknown protein [Oryza sativa (japonica
PTPQTHRHPPKHGLLSLARSPPPAAAPRGRRRACFSQLAPLLVSSKYLKMSEHSESKAEKLMGNIMDTIADRLPKQKSDNIMSNIMDTISDKLPKQRSGRFDPGSVADVKNKMFGRQRSLHGVLGGGKSADVLLWRNKKISSSVLGLATAIWVFFEWLDYHFLTIISFALVIGMVVQFVWSNFSRSSEIPRVKLPEDLFVNIAVAIGAQVNKFLGFLQDVSCERNLKHFVLAIVGLWAASVAGSWFNFLTVIYIGFVCAHTLPVLYEKYEDQVDDFLYSILGLLREQYQKLDSGVLSRIPSKRNKKSE

SEQ ID NO: 64600 - protein, 259 aa, Triticum aestivum
  peptide (1)..(259): Ceres Seq. ID no. 15222201
  misc_feature (15)..(259): Homolog of NCBI NO: 15237093 NR Description: expressed protein [Arabidopsis thaliana]
  misc_feature (30)..(253): Homolog of NCBI NO: 15222616 NR Description: expressed protein [Arabidopsis thaliana]
  misc_feature (15)..(259): Homolog of NCBI NO: 15236556 NR Description: expressed protein [Arabidopsis thaliana]
  misc_feature (63)..(251): Homolog of NCBI NO: 34904202 NR Description: P0492F05.25 [Oryza sativa (japonica
  misc_feature (1)..(251): Homolog of NCBI NO: 34909318 NR Description: OSJNBb0021A09.5 [Oryza sativa (japonica
  misc_feature (27)..(251): Homolog of NCBI NO: 18406991 NR Description: expressed protein [Arabidopsis thaliana]
  misc_feature (30)..(252): Homolog of NCBI NO: 18398810 NR Description: expressed protein [Arabidopsis thaliana]
  misc_feature (13)..(252): Homolog of NCBI NO: 30681227 NR Description: expressed protein [Arabidopsis thaliana]
  misc_feature (31)..(259): Homolog of NCBI NO: 34899590 NR Description: hypothetical protein~similar to Oryza sativa
  misc_feature (29)..(259): Homolog of NCBI NO: 34897094 NR Description: unknown protein [Oryza sativa (japonica
MSEHSESKAEKLMGNIMDTIADRLPKQKSDNIMSNIMDTISDKLPKQRSGRFDPGSVADVKNKMFGRQRSLHGVLGGGKSADVLLWRNKKISSSVLGLATAIWVFFEWLDYHFLTIISFALVIGMVVQFVWSNFSRSSEIPRVKLPEDLFVNIAVAIGAQVNKFLGFLQDVSCERNLKHFVLAIVGLWAASVAGSWFNFLTVIYIGFVCAHTLPVLYEKYEDQVDDFLYSILGLLREQYQKLDSGVLSRIPSKRNKKSE

SEQ ID NO: 64601 - protein, 247 aa, Triticum aestivum
  peptide (1)..(247): Ceres Seq. ID no. 15222202
  misc_feature (3)..(247): Homolog of NCBI NO: 15237093 NR Description: expressed protein [Arabidopsis thaliana]
  misc_feature (18)..(241): Homolog of NCBI NO: 15222616 NR Description: expressed protein [Arabidopsis thaliana]
  misc_feature (3)..(247): Homolog of NCBI NO: 15236556 NR Description: expressed protein [Arabidopsis thaliana]
  misc_feature (51)..(239): Homolog of NCBI NO: 34904202 NR Description: P0492F05.25 [Oryza sativa (japonica
  misc_feature (1)..(239): Homolog of NCBI NO: 34909318 NR Description: OSJNBb0021A09.5 [Oryza sativa (japonica
  misc_feature (15)..(239): Homolog of NCBI NO: 18406991 NR Description: expressed protein [Arabidopsis thaliana]
  misc_feature (18)..(240): Homolog of NCBI NO: 18398810 NR Description: expressed protein [Arabidopsis thaliana]
  misc_feature (1)..(240): Homolog of NCBI NO: 30681227 NR Description: expressed protein [Arabidopsis thaliana]
  misc_feature (19)..(247): Homolog of NCBI NO: 34899590 NR Description: hypothetical protein~similar to Oryza sativa
  misc_feature (17)..(247): Homolog of NCBI NO: 34897094 NR Description: unknown protein [Oryza sativa (japonica
MGNIMDTIADRLPKQKSDNIMSNIMDTISDKLPKQRSGRFDPGSVADVKNKMFGRQRSLHGVLGGGKSADVLLWRNKKISSSVLGLATAIWVFFEWLDYHFLTIISFALVIGMVVQFVWSNFSRSSEIPRVKLPEDLFVNIAVAIGAQVNKFLGFLQDVSCERNLKHFVLAIVGLWAASVAGSWFNFLTVIYIGFVCAHTLPVLYEKYEDQVDDFLYSILGLLREQYQKLDSGVLSRIPSKRNKKSE

SEQ ID NO: 64602 - DNA, 1171 bp, Triticum aestivum
  misc_feature (1)..(1171): Ceres Seq. ID no. 13662721
gaatatacggttacacccacaagcttcccctgcacacacgcgaccaactcttacgccgccgccgccgccgccggcggagagatggactcccggggcttcgattccacgggccgcgagttttccagcgccacggagatgtgggcccaggagatcggcgccaccgcctccgcctcggcctccgaagtccctccgggcgccgccgccgcggctccaagcaatggggacgccggcgaggaggcgggcggagaagggaagcgcgaggagtggtactccaaaggaatcgcctactggcagggcgtggaggcgtcgaccgagggcgtcctgggagggtacgggtgcgtcaacgacgccgacgtcaagggcagcgccgccttcctccgccctctcctcaccgagcgattcggcgccgcgaagcgccatcttgtcgcgcttgattgtggctcgggcatcgggcgggttacaaagaattttcttatcaagcatttcaatgaggttgatctcgttgagccagtagcccattttctagaagcggcacgggaaaatcttagtagctgtatggatgtagagcaggatacgcataaggctgcaaacttttattgtacacctcttcaggacttcactcctgaggaaggaagatatgatgtgatatggatccagtggtgcatagggcaacttactgatgatgattttatttcattttttaaccgcgcaaaggttgggctcaaaccagatggtttttttgttctgaaagagaacattgcaaaaaatggatttgttttagacaaggaggataacagtgtcactaggtctgatgcatatttcagggagctatttaacaagtgtggattgtatatccacagcatcaagaaccaaaaggagctaccagaggaactatttgctgtcagaatgtacgcattggtgaccagccagccaaaggtcacaaaaaatggcaagagagggcggcctaaaaattcaccccgtataatccgctcttgaaggggggactattgtgccagcgtattgtctggcaatgtactgttgttcacttgtttctagtcgcaatttagctcggtctacattttgttttgagcatgctgtctttttcagagatcaaatccactagttgctgtcgaaacttaatgcatatggcatctagcaccttttgattctg

SEQ ID NO: 64603 - protein, 331 aa, Triticum aestivum
  peptide (1)..(331): Ceres Seq. ID no. 13662722
  misc_feature (85)..(307): Pfam Name: Eukaryotic protein of unknown function (DUF858) Pfam Description: Eukaryotic protein of unknown function (DUF858)
  misc_feature (90)..(311): Homolog of NCBI NO: 39594796 NR Description: Hypothetical protein CBG17371 [Caenorhabditis
  misc_feature (66)..(305): Homolog of NCBI NO: 24652235 NR Description: CG1675-PA [Drosophila melanogaster]
  misc_feature (87)..(306): Homolog of NCBI NO: 7661528 NR Description: AD-003 protein [Homo sapiens]
  misc_feature (87)..(307): Homolog of NCBI NO: 19115139 NR Description: Putative S-adenosylmethionine-dependent
  misc_feature (87)..(306): Homolog of NCBI NO: 12655091 NR Description: AD-003 protein [Homo sapiens]
  misc_feature (87)..(306): Homolog of NCBI NO: 24528555 NR Description: RIKEN cDNA 2610205E22 [Mus musculus]
  misc_feature (90)..(306): Homolog of NCBI NO: 6319738 NR Description: Hypothetical ORF; Ybr261cp [Saccharomyces
  misc_feature (90)..(306): Homolog of NCBI NO: 6523567 NR Description: hypothetical protein [Zygosaccharomyces rouxii]
  misc_feature (75)..(330): Homolog of NCBI NO: 15241499 NR Description: expressed protein [Arabidopsis thaliana]
  misc_feature (28)..(331): Homolog of NCBI NO: 34897080 NR Description: unknown protein [Oryza sativa (japonica
EYTVTPTSFPCTHATNSYAAAAAAGGEMDSRGFDSTGREFSSATEMWAQEIGATASASASEVPPGAAAAAPSNGDAGEEAGGEGKREEWYSKGIAYWQGVEASTEGVLGGYGCVNDADVKGSAAFLRPLLTERFGAAKRHLVALDCGSGIGRVTKNFLIKHFNEVDLVEPVAHFLEAARENLSSCMDVEQDTHKAANFYCTPLQDFTPEEGRYDVIWIQWCIGQLTDDDFISFFNRAKVGLKPDGFFVLKENIAKNGFVLDKEDNSVTRSDAYFRELFNKCGLYIHSIKNQKELPEELFAVRMYALVTSQPKVTKNGKRGRPKNSPRIIRS

SEQ ID NO: 64604 - protein, 304 aa, Triticum aestivum
  peptide (1)..(304): Ceres Seq. ID no. 13662723
  misc_feature (58)..(280): Pfam Name: Eukaryotic protein of unknown function (DUF858) Pfam Description: Eukaryotic protein of unknown function (DUF858)
  misc_feature (63)..(284): Homolog of NCBI NO: 39594796 NR Description: Hypothetical protein CBG17371 [Caenorhabditis
  misc_feature (39)..(278): Homolog of NCBI NO: 24652235 NR Description: CG1675-PA [Drosophila melanogaster]
  misc_feature (60)..(279): Homolog of NCBI NO: 7661528 NR Description: AD-003 protein [Homo sapiens]
  misc_feature (60)..(280): Homolog of NCBI NO: 19115139 NR Description: Putative S-adenosylmethionine-dependent
  misc_feature (60)..(279): Homolog of NCBI NO: 12655091 NR Description: AD-003 protein [Homo sapiens]
  misc_feature (60)..(279): Homolog of NCBI NO: 24528555 NR Description: RIKEN cDNA 2610205E22 [Mus musculus]
  misc_feature (63)..(279): Homolog of NCBI NO: 6319738 NR Description: Hypothetical ORF; Ybr261cp [Saccharomyces
  misc_feature (63)..(279): Homolog of NCBI NO: 6523567 NR Description: hypothetical protein [Zygosaccharomyces rouxii]
  misc_feature (48)..(303): Homolog of NCBI NO: 15241499 NR Description: expressed protein [Arabidopsis thaliana]
  misc_feature (1)..(304): Homolog of NCBI NO: 34897080 NR Description: unknown protein [Oryza sativa (japonica
MDSRGFDSTGREFSSATEMWAQEIGATASASASEVPPGAAAAAPSNGDAGEEAGGEGKREEWYSKGIAYWQGVEASTEGVLGGYGCVNDADVKGSAAFLRPLLTERFGAAKRHLVALDCGSGIGRVTKNFLIKHFNEVDLVEPVAHFLEAARENLSSCMDVEQDTHKAANFYCTPLQDFTPEEGRYDVIWIQWCIGQLTDDDFISFFNRAKVGLKPDGFFVLKENIAKNGFVLDKEDNSVTRSDAYFRELFNKCGLYIHSIKNQKELPEELFAVRMYALVTSQPKVTKNGKRGRPKNSPRIIRS

SEQ ID NO: 64605 - protein, 286 aa, Triticum aestivum
  peptide (1)..(286): Ceres Seq. ID no. 13662724
  misc_feature (40)..(262): Pfam Name: Eukaryotic protein of unknown function (DUF858) Pfam Description: Eukaryotic protein of unknown function (DUF858)
  misc_feature (45)..(266): Homolog of NCBI NO: 39594796 NR Description: Hypothetical protein CBG17371 [Caenorhabditis
  misc_feature (21)..(260): Homolog of NCBI NO: 24652235 NR Description: CG1675-PA [Drosophila melanogaster]
  misc_feature (42)..(261): Homolog of NCBI NO: 7661528 NR Description: AD-003 protein [Homo sapiens]
  misc_feature (42)..(262): Homolog of NCBI NO: 19115139 NR Description: Putative S-adenosylmethionine-dependent
  misc_feature (42)..(261): Homolog of NCBI NO: 12655091 NR Description: AD-003 protein [Homo sapiens]
  misc_feature (42)..(261): Homolog of NCBI NO: 24528555 NR Description: RIKEN cDNA 2610205E22 [Mus musculus]
  misc_feature (45)..(261): Homolog of NCBI NO: 6319738 NR Description: Hypothetical ORF; Ybr261cp [Saccharomyces
  misc_feature (45)..(261): Homolog of NCBI NO: 6523567 NR Description: hypothetical protein [Zygosaccharomyces rouxii]
  misc_feature (30)..(285): Homolog of NCBI NO: 15241499 NR Description: expressed protein [Arabidopsis thaliana]
  misc_feature (1)..(286): Homolog of NCBI NO: 34897080 NR Description: unknown protein [Oryza sativa (japonica
MWAQEIGATASASASEVPPGAAAAAPSNGDAGEEAGGEGKREEWYSKGIAYWQGVEASTEGVLGGYGCVNDADVKGSAAFLRPLLTERFGAAKRHLVALDCGSGIGRVTKNFLIKHFNEVDLVEPVAHFLEAARENLSSCMDVEQDTHKAANFYCTPLQDFTPEEGRYDVIWIQWCIGQLTDDDFISFFNRAKVGLKPDGFFVLKENIAKNGFVLDKEDNSVTRSDAYFRELFNKCGLYIHSIKNQKELPEELFAVRMYALVTSQPKVTKNGKRGRPKNSPRIIRS

SEQ ID NO: 64606 - DNA, 809 bp, Triticum aestivum
  misc_feature (1)..(809): Ceres Seq. ID no. 15173263
atctcagatcaaagtttctttttcttattctcttgtgcgccaactcattccttcgttgctcatgactgaatttcttggaatttgtagagaatttttgggtcctgatccgaggagaggagatgtcggacagcgaagagcaccagttcgagtcgaaggcagacgccggcgcttccaagacctacccgcagcaggccggcaccattcgcaagaacggctacatcgtcatcaagaaccgcccctgcaaggttgtggaggtttcaacatctaaaaccgggaagcatggtcatgccaagtgccactttgttgctattgacatcttcaccggcaagaaacttgaagatattgtgccatcttctcacaactgtgatgttcctcatgtgaatcgcacagaataccagctcattgatatatctgaggatggatttgtgagtctgctcactgataatggtaacaccaaagatgacctcaagctcccgactgatgaaaccctccttggccagatcaaggatgggtttgctgaagggaaggacctggtggtgtctgtcatgtccgccatgggagaggagcagattaatgcgctcaaggacattggccccaagtagtctgccctgttagccatggacatcggccccaagagtgtggttcatttgtctctgccggttaagatggatttgggtgtcacagccgttgaggaattgtatctttttgcacaactaagttgtcagtgtttggttgatttgtagtcctaaattcatgggtgactgtatcctaaaactgtcgctccggggtttattgacccctcttgactg

SEQ ID NO: 64607 - protein, 160 aa, Triticum aestivum
  peptide (1)..(160): Ceres Seq. ID no. 15173264
  misc_feature (86)..(155): Pfam Name: Eukaryotic initiation factor 5A hypusine, Pfam Description: Eukaryotic initiation factor 5A hypusine,
  misc_feature (1)..(158): Homolog of NCBI NO: 9295717 NR Description: T24P13.1 [Arabidopsis thaliana]
  misc_feature (1)..(160): Homolog of NCBI NO: 33325123 NR Description: eukaryotic translation initiation factor 5A
  misc_feature (1)..(160): Homolog of NCBI NO: 20138708 NR Description: Eukaryotic translation initiation factor 5A-1
  misc_feature (1)..(160): Homolog of NCBI NO: 33325117 NR Description: eukaryotic translation initiation factor 5A
  misc_feature (1)..(160): Homolog of NCBI NO: 13236654 NR Description: translation initiation factor 5A [Oryza sativa]
  misc_feature (1)..(160): Homolog of NCBI NO: 3024022 NR Description: Eukaryotic translation initiation factor 5A-5
  misc_feature (1)..(160): Homolog of NCBI NO: 124226 NR Description: Eukaryotic translation initiation factor 5A-2
  misc_feature (1)..(160): Homolog of NCBI NO: 3789948 NR Description: translation initiation factor 5A [Oryza sativa]
  misc_feature (1)..(160): Homolog of NCBI NO: 20138706 NR Description: Eukaryotic translation initiation factor 5A-3
  misc_feature (1)..(160): Homolog of NCBI NO: 3024021 NR Description: Eukaryotic translation initiation factor 5A-4
MSDSEEHQFESKADAGASKTYPQQAGTIRKNGYIVIKNRPCKVVEVSTSKTGKHGHAKCHFVAIDIFTGKKLEDIVPSSHNCDVPHVNRTEYQLIDISEDGFVSLLTDNGNTKDDLKLPTDETLLGQIKDGFAEGKDLVVSVMSAMGEEQINALKDIGPK

SEQ ID NO: 64608 - protein, 88 aa, Triticum aestivum
  peptide (1)..(88): Ceres Seq. ID no. 15173265
SQIKVSFSYSLVRQLIPSLLMTEFLGICREFLGPDPRRGDVGQRRAPVRVEGRRRRFQDLPAAGRHHSQERLHRHQEPPLQGCGGFNI

SEQ ID NO: 64609 - DNA, 1278 bp, Triticum aestivum
  misc_feature (1)..(1278): Ceres Seq. ID no. 13656155
atacatcacctcggccggcgctgctaccgatctcctccagagtccaagcctcctcacccaaagccatggccgcgcggcgtcgctccctcctcatgctcctgcccctcctcctctcccacttcctctccctcgccgccgccttccagtcggacgagctgctcctccacgacgacgacgagttcgagggcacccgggtctcctccaccccctccccccggccgccctcgacgccgccggtagtgtcctcccgccgccgatccgcggacgcgacgcaggcggctggcgcctccgagtccgacaccgtccagttcaccctcgagcacgacctcggagccggcctagggttcgcccccgccgggtccttctccgcccgcctcaagtcctcggcccacggctcccagactctcactaagctccggtttacgaggaatgagttgactgaggatgaaaagaatgcatttaagaaattacttgaagaagatagtttttacacaataaggctaccgtctaatgtgttggatcctacaagaaacgattatatttattcctcgatcaaagcgagatgcattccacgtgacagcttggatgaacatattgtcatccacatggacggtgtaaatattttggctgttaattatggttccgtcggtggatgccaatatccccggccaatgaaagtaccgtcaaaatggacattcaattcatacactattctgaagactgctgaccaagcaccaagaactccatcatttgtagagcaattaatagaaactgagagtggactcggtgaagtgatgaaaccacctgagaaatctttctgggctaaatattggatgtacatcattcctcttggtctcattgtcatgaacgctgtcacagcagcagcaaacataccggaggagcaagctggagggcagggtcaagctccagcacaaatggcgccaattgctgctccaaggagaagatgatggcttcctatattctttgcatgccatagattcacaaacaatggacagaggatggatctgcttgaccttccccagaacaggggcagtactagcggcaacaagactcacttgggtttttcttttctcgcattcagaaactcacctttgttgtagaatcacctcagaaaaggttgcgtgttctggtcgcatctacacgcgtatttttgcctgttgatagaaattaccatcagtctttaactcggtgcaaactgcatgccttaatattcagaactagcttaattacaaatatcaaacattgtatgttttgctc

SEQ ID NO: 64610 - protein, 321 aa, Triticum aestivum
  peptide (1)..(321): Ceres Seq. ID no. 15219802
  misc_feature (85)..(306): Homolog of NCBI NO: 21432049 NR Description: LOC284361 protein [Homo sapiens]
  misc_feature (65)..(306): Homolog of NCBI NO: 37574074 NR Description: RIKEN cDNA 2310044H10 [Mus musculus]
  misc_feature (96)..(306): Homolog of NCBI NO: 38181935 NR Description: Unknown (protein for MGC:76288) [Silurana
  misc_feature (96)..(306): Homolog of NCBI NO: 27503262 NR Description: Unknown (protein for IMAGE:5570892) [Xenopus
  misc_feature (28)..(320): Homolog of NCBI NO: 21594383 NR Description: unknown [Arabidopsis thaliana]
  misc_feature (28)..(320): Homolog of NCBI NO: 18408239 NR Description: expressed protein [Arabidopsis thaliana]
TSPRPALLPISSRVQASSPKAMAARRRSLLMLLPLLLSHFLSLAAAFQSDELLLHDDDEFEGTRVSSTPSPRPPSTPPVVSSRRRSADATQAAGASESDTVQFTLEHDLGAGLGFAPAGSFSARLKSSAHGSQTLTKLRFTRNELTEDEKNAFKKLLEEDSFYTIRLPSNVLDPTRNDYIYSSIKARCIPRDSLDEHIVIHMDGVNILAVNYGSVGGCQYPRPMKVPSKWTFNSYTILKTADQAPRTPSFVEQLIETESGLGEVMKPPEKSFWAKYWMYIIPLGLIVMNAVTAAANIPEEQAGGQGQAPAQMAPIAAPRRR

SEQ ID NO: 64611 - protein, 300 aa, Triticum aestivum
  peptide (1)..(300): Ceres Seq. ID no. 15219803
  misc_feature (64)..(285): Homolog of NCBI NO: 21432049 NR Description: LOC284361 protein [Homo sapiens]
  misc_feature (44)..(285): Homolog of NCBI NO: 37574074 NR Description: RIKEN cDNA 2310044H10 [Mus musculus]
  misc_feature (75)..(285): Homolog of NCBI NO: 38181935 NR Description: Unknown (protein for MGC:76288) [Silurana
  misc_feature (75)..(285): Homolog of NCBI NO: 27503262 NR Description: Unknown (protein for IMAGE:5570892) [Xenopus
  misc_feature (7)..(299): Homolog of NCBI NO: 21594383 NR Description: unknown [Arabidopsis thaliana]
  misc_feature (7)..(299): Homolog of NCBI NO: 18408239 NR Description: expressed protein [Arabidopsis thaliana]
MAARRRSLLMLLPLLLSHFLSLAAAFQSDELLLHDDDEFEGTRVSSTPSPRPPSTPPVVSSRRRSADATQAAGASESDTVQFTLEHDLGAGLGFAPAGSFSARLKSSAHGSQTLTKLRFTRNELTEDEKNAFKKLLEEDSFYTIRLPSNVLDPTRNDYIYSSIKARCIPRDSLDEHIVIHMDGVNILAVNYGSVGGCQYPRPMKVPSKWTFNSYTILKTADQAPRTPSFVEQLIETESGLGEVMKPPEKSFWAKYWMYIIPLGLIVMNAVTAAANIPEEQAGGQGQAPAQMAPIAAPRRR

SEQ ID NO: 64612 - protein, 291 aa, Triticum aestivum
  peptide (1)..(291): Ceres Seq. ID no. 15219804
  misc_feature (55)..(276): Homolog of NCBI NO: 21432049 NR Description: LOC284361 protein [Homo sapiens]
  misc_feature (35)..(276): Homolog of NCBI NO: 37574074 NR Description: RIKEN cDNA 2310044H10 [Mus musculus]
  misc_feature (66)..(276): Homolog of NCBI NO: 38181935 NR Description: Unknown (protein for MGC:76288) [Silurana
  misc_feature (66)..(276): Homolog of NCBI NO: 27503262 NR Description: Unknown (protein for IMAGE:5570892) [Xenopus
  misc_feature (1)..(290): Homolog of NCBI NO: 21594383 NR Description: unknown [Arabidopsis thaliana]
  misc_feature (1)..(290): Homolog of NCBI NO: 18408239 NR Description: expressed protein [Arabidopsis thaliana]
MLLPLLLSHFLSLAAAFQSDELLLHDDDEFEGTRVSSTPSPRPPSTPPVVSSRRRSADATQAAGASESDTVQFTLEHDLGAGLGFAPAGSFSARLKSSAHGSQTLTKLRFTRNELTEDEKNAFKKLLEEDSFYTIRLPSNVLDPTRNDYIYSSIKARCIPRDSLDEHIVIHMDGVNILAVNYGSVGGCQYPRPMKVPSKWTFNSYTILKTADQAPRTPSFVEQLIETESGLGEVMKPPEKSFWAKYWMYIIPLGLIVMNAVTAAANIPEEQAGGQGQAPAQMAPIAAPRRR

SEQ ID NO: 64613 - DNA, 1154 bp, Triticum aestivum
  misc_feature (1)..(1154): Ceres Seq. ID no. 13597493
cagagctcacacagtgctggacacgccgcgacgagtcggaggggaaagatcaagatggaggcggccgcctccaatccgtcgagcaagaggatcgccctggtcaccggagggaacaaaggggtcgggctggagacgtgcaggcagctcgcgtccaaggggctcaaggtcgtgctgacggcgaggaacgagggcaggggactagaggcggtcgaaggcgtcaggcgctccggtgctgacgtcgtcttccatcagctggatgtcaccgaccctgacagcgtcgcccggctggcggatttcgtcagggatcagttcgggaagctcgatatcctgataaacaatgcaggcatttcaggcgtcgatcgagatccagttctggttgcgaaagttaaagaacaggttgaaagcatggatgtagatcagagagttcaatggatgaaagaaaattccaaggagacatatgaggaagcaaaagaatgcatgagaacaaactactatggggcaaagcttgtcacggaggcactacttcctcttcttcagttgtcctcctctgggagaattgtcaatgtctcatcaggcttttcactgctaagaaacttcaacagtgaaaaactgaagaatgagtttaacaacgctgacaatcttactgaaaagagactagaggagctgttggattcgttcctagaagatttcaaggccaatttgatagaggcacatgggtggccgaccggtggctcgtcagcctacaaagtcgccaaagctgccctcaatgcttacacaaggattctcgccaagaagtaccctaggatgcgcatcaactgtttgacgcctggttatgtcaagagcgacatgtcgatgcacatgggagttttgacgcccgaggagggcgctagcaaccctgtgaaggtcgctctcttgcccgacgatggcccgacgggtgcttattttgatagggatggcgtggcctcgtttgtgtgactctgtcgtacgtgtaatgttttcgtccggttttactctcagaatatgagacaccgtaacagtagttgtcaataaacagtgtgcagtttaacctgtgctgtgcactcgaatcgacatgcaaaattgacaaatttgatcaaaaaaaaaaaaaaaaaagcttatcgataccgtcgacctcg

SEQ ID NO: 64614 - protein, 324 aa, Triticum aestivum
  peptide (1)..(324): Ceres Seq. ID no. 13597494
  misc_feature (30)..(323): Homolog of NCBI NO: 18378884 NR Description: short-chain dehydrogenase/reductase family
  misc_feature (29)..(318): Homolog of NCBI NO: 34559416 NR Description: (-)-isopiperitenone reductase [Mentha x piperita]
  misc_feature (5)..(317): Homolog of NCBI NO: 33146492 NR Description: carbonyl reductase -like protein
  misc_feature (30)..(323): Homolog of NCBI NO: 15233062 NR Description: short-chain dehydrogenase/reductase family
  misc_feature (28)..(323): Homolog of NCBI NO: 15224100 NR Description: short-chain dehydrogenase/reductase family
  misc_feature (19)..(324): Homolog of NCBI NO: 38346772 NR Description: OSJNBa0081C01.23 [Oryza sativa (japonica
  misc_feature (19)..(324): Homolog of NCBI NO: 38346768 NR Description: OSJNBa0081C01.19 [Oryza sativa (japonica
  misc_feature (19)..(324): Homolog of NCBI NO: 38346769 NR Description: OSJNBa0081C01.20 [Oryza sativa (japonica
  misc_feature (19)..(324): Homolog of NCBI NO: 38346774 NR Description: OSJNBa0081C01.25 [Oryza sativa (japonica
  misc_feature (19)..(324): Homolog of NCBI NO: 38346767 NR Description: OSJNBa0081C01.18 [Oryza sativa (japonica
QSSHSAGHAATSRRGKIKMEAAASNPSSKRIALVTGGNKGVGLETCRQLASKGLKVVLTARNEGRGLEAVEGVRRSGADVVFHQLDVTDPDSVARLADFVRDQFGKLDILINNAGISGVDRDPVLVAKVKEQVESMDVDQRVQWMKENSKETYEEAKECMRTNYYGAKLVTEALLPLLQLSSSGRIVNVSSGFSLLRNFNSEKLKNEFNNADNLTEKRLEELLDSFLEDFKANLIEAHGWPTGGSSAYKVAKAALNAYTRILAKKYPRMRINCLTPGYVKSDMSMHMGVLTPEEGASNPVKVALLPDDGPTGAYFDRDGVASFV

SEQ ID NO: 64615 - protein, 306 aa, Triticum aestivum
  peptide (1)..(306): Ceres Seq. ID no. 13597495
  misc_feature (12)..(305): Homolog of NCBI NO: 18378884 NR Description: short-chain dehydrogenase/reductase family
  misc_feature (11)..(300): Homolog of NCBI NO: 34559416 NR Description: (-)-isopiperitenone reductase [Mentha x piperita]
  misc_feature (1)..(299): Homolog of NCBI NO: 33146492 NR Description: carbonyl reductase -like protein
  misc_feature (12)..(305): Homolog of NCBI NO: 15233062 NR Description: short-chain dehydrogenase/reductase family
  misc_feature (10)..(305): Homolog of NCBI NO: 15224100 NR Description: short-chain dehydrogenase/reductase family
  misc_feature (1)..(306): Homolog of NCBI NO: 38346772 NR Description: OSJNBa0081C01.23 [Oryza sativa (japonica
  misc_feature (1)..(306): Homolog of NCBI NO: 38346768 NR Description: OSJNBa0081C01.19 [Oryza sativa (japonica
  misc_feature (1)..(306): Homolog of NCBI NO: 38346769 NR Description: OSJNBa0081C01.20 [Oryza sativa (japonica
  misc_feature (1)..(306): Homolog of NCBI NO: 38346774 NR Description: OSJNBa0081C01.25 [Oryza sativa (japonica
  misc_feature (1)..(306): Homolog of NCBI NO: 38346767 NR Description: OSJNBa0081C01.18 [Oryza sativa (japonica
MEAAASNPSSKRIALVTGGNKGVGLETCRQLASKGLKVVLTARNEGRGLEAVEGVRRSGADVVFHQLDVTDPDSVARLADFVRDQFGKLDILINNAGISGVDRDPVLVAKVKEQVESMDVDQRVQWMKENSKETYEEAKECMRTNYYGAKLVTEALLPLLQLSSSGRIVNVSSGFSLLRNFNSEKLKNEFNNADNLTEKRLEELLDSFLEDFKANLIEAHGWPTGGSSAYKVAKAALNAYTRILAKKYPRMRINCLTPGYVKSDMSMHMGVLTPEEGASNPVKVALLPDDGPTGAYFDRDGVASFV

SEQ ID NO: 64616 - protein, 189 aa, Triticum aestivum
  peptide (1)..(189): Ceres Seq. ID no. 13597496
  misc_feature (1)..(188): Homolog of NCBI NO: 18378884 NR Description: short-chain dehydrogenase/reductase family
  misc_feature (1)..(183): Homolog of NCBI NO: 34559416 NR Description: (-)-isopiperitenone reductase [Mentha x piperita]
  misc_feature (1)..(182): Homolog of NCBI NO: 33146492 NR Description: carbonyl reductase -like protein
  misc_feature (1)..(188): Homolog of NCBI NO: 15233062 NR Description: short-chain dehydrogenase/reductase family
  misc_feature (1)..(188): Homolog of NCBI NO: 15224100 NR Description: short-chain dehydrogenase/reductase family
  misc_feature (1)..(189): Homolog of NCBI NO: 38346772 NR Description: OSJNBa0081C01.23 [Oryza sativa (japonica
  misc_feature (1)..(189): Homolog of NCBI NO: 38346768 NR Description: OSJNBa0081C01.19 [Oryza sativa (japonica
  misc_feature (1)..(189): Homolog of NCBI NO: 38346769 NR Description: OSJNBa0081C01.20 [Oryza sativa (japonica
  misc_feature (1)..(189): Homolog of NCBI NO: 38346774 NR Description: OSJNBa0081C01.25 [Oryza sativa (japonica
  misc_feature (1)..(189): Homolog of NCBI NO: 38346767 NR Description: OSJNBa0081C01.18 [Oryza sativa (japonica
MDVDQRVQWMKENSKETYEEAKECMRTNYYGAKLVTEALLPLLQLSSSGRIVNVSSGFSLLRNFNSEKLKNEFNNADNLTEKRLEELLDSFLEDFKANLIEAHGWPTGGSSAYKVAKAALNAYTRILAKKYPRMRINCLTPGYVKSDMSMHMGVLTPEEGASNPVKVALLPDDGPTGAYFDRDGVASFV

SEQ ID NO: 64617 - DNA, 1289 bp, Triticum aestivum
  misc_feature (1)..(1289): Ceres Seq. ID no. 13597831
ttctgcgatttccatttgcttcctccgtcttctccatcccccctccctgctgccgaccatccctgagcactcccagtcccaggccattagcctagctagctaccccctccatgcgagggcggcaatggcgcccgcctccgcctccttcgccgtctccctctccgcccccgtccgcttaattccgcccagatgcttccgcggtaggccgaggtggtcccgcccaatcagggcttcgagcgacacgaagggcgccccgaacggggagcggaggatcggggctctggagaggagggtgggggatttgagggcgcttgtcgcctcggtgcctcctgctgttgtctcgatcaggaaaaacattggactaaattccattgccggtttcggtttcggcattgcatttttggctgctctcgcaagacaggtcatcataagaactcaacagcaagatagtagtggttctgtttctgatctagtaaggcgcgggcatctaaaatctgggcaacgtgggattgcaaagccacgtgtgtacaatgatcctttcaataattcattagtcaagatcgatgaagatacttctactgctcagatgtttggcaaggagtaccgcatggctcctgtccggcttacaaatgaacaacaggcaatgcatcagaaaaggagatcacatgcatatcagtggaaaaggcccactgtgtttcttaaagaaggtgatcccctgccaccagatgtcgatccagagacagttagatggattccagtaaaccacccatttgctgctggttcggttgaagtagatgaggagactgccaaaaggaatgtttaccaaaaggatggcgtcccgtcccgtgtaaaagccgaacatgaagctttgcgggcaaggctagaggcttcaaatgatgtaacaccattctctaacggtccaaggggtatgcaacatagtgcaagatcatcgaagttatcagacgagccatctgggaatctgcaacagtctaaacctgacatggtgaatgaccaaaatggccaaccaatgttagagcctgagcctgagcccaagagctctgacaacggttcactatcaaaaagcttggaaggacagtaacggtgtgaattgtataaacccttcggcactttgttttgttatgtagtgttgtcaggttttagctgtagatagaggagttttggaacaacagatttacgtactgaacacatgatatggagcagtgttattgttatgtgctgctgtatatctgatattttttttgcccgaagatctccagatgcacgatctc

SEQ ID NO: 64618 - protein, 365 aa, Triticum aestivum
  peptide (1)..(365): Ceres Seq. ID no. 15222207
  misc_feature (95)..(333): Homolog of NCBI NO: 25373024 NR Description: protein F2D10.35 [imported] - Arabidopsis
  misc_feature (95)..(333): Homolog of NCBI NO: 15218043 NR Description: expressed protein [Arabidopsis thaliana]
SAISICFLRLLHPPSLLPTIPEHSQSQAISLASYPLHARAAMAPASASFAVSLSAPVRLIPPRCFRGRPRWSRPIRASSDTKGAPNGERRIGALERRVGDLRALVASVPPAVVSIRKNIGLNSIAGFGFGIAFLAALARQVIIRTQQQDSSGSVSDLVRRGHLKSGQRGIAKPRVYNDPFNNSLVKIDEDTSTAQMFGKEYRMAPVRLTNEQQAMHQKRRSHAYQWKRPTVFLKEGDPLPPDVDPETVRWIPVNHPFAAGSVEVDEETAKRNVYQKDGVPSRVKAEHEALRARLEASNDVTPFSNGPRGMQHSARSSKLSDEPSGNLQQSKPDMVNDQNGQPMLEPEPEPKSSDNGSLSKSLEGQ

SEQ ID NO: 64619 - protein, 324 aa, Triticum aestivum
  peptide (1)..(324): Ceres Seq. ID no. 15222208
  misc_feature (54)..(292): Homolog of NCBI NO: 25373024 NR Description: protein F2D10.35 [imported] - Arabidopsis
  misc_feature (54)..(292): Homolog of NCBI NO: 15218043 NR Description: expressed protein [Arabidopsis thaliana]
MAPASASFAVSLSAPVRLIPPRCFRGRPRWSRPIRASSDTKGAPNGERRIGALERRVGDLRALVASVPPAVVSIRKNIGLNSIAGFGFGIAFLAALARQVIIRTQQQDSSGSVSDLVRRGHLKSGQRGIAKPRVYNDPFNNSLVKIDEDTSTAQMFGKEYRMAPVRLTNEQQAMHQKRRSHAYQWKRPTVFLKEGDPLPPDVDPETVRWIPVNHPFAAGSVEVDEETAKRNVYQKDGVPSRVKAEHEALRARLEASNDVTPFSNGPRGMQHSARSSKLSDEPSGNLQQSKPDMVNDQNGQPMLEPEPEPKSSDNGSLSKSLEGQ

SEQ ID NO: 64620 - DNA, 1217 bp, Triticum aestivum
  misc_feature (1)..(1217): Ceres Seq. ID no. 13656156
agaaactaatccgagccacacatccccgtttcacaaccaagccaaagctccccactcctccccattccacgccgccgcaccccgaaccctagcgccccatccatccagcgagcggtagccatgccggcggacgcgaagatccggtggggggagctcgaggaggacgacgggggcgacctcgacttccttctcccgccgcgggtggtcatcgggcccgacgagaacggcttcaagaagacgatcgagtaccgcttcgacgacgacggcaacaaggtcaaggtcaccaccaccacccgcgtccgcaagctcgcccgcgcgcgcctctccaaggccgctgtcgagcgccgcaactgggccaagttcggcgacgccgccagcggcgacgacgcctccgcgcgcctcaccgtcgtctccaccgaggagatcctcctcgagcgcccgcgcgccccagggagcaaagctgatgaaccaagtgcttctggtgacccactggcaatggcaagcaagggaggtgctgttctcatggtttgcagaacctgtggtaagaagggtgaccactggacctcaaagtgcccctacaaggacctcgctccaccaactgatgcatcggacatgcctcctacttctgacggccctgcagcactgagtggccctgccaagggctcatacgttgctccaaggctgagggctggtgctgttcataccgatgctgggcacgacatgaggcgcaggaacgatgagaactctgtccgtgttaccaatctgtcggaggacacccgcgagcccgacctccttgagctgttccgcacgtttggcccggtcagccgtgtctacgttgcggtggatcagaagactggaatgagcaggggctttgggttcgtcaacttcgttcacagggaggacgccgagaaggccatcagcaagctcaatgggtatggttatgataacctcatcctccatgtggagatggctgcacctaggcctacttagttactgcctattaagcatccagatttcctacaagtgtcgtatcattatggtctccgaaataccagtacttttgtgtcgtgggcttgtgtcgtgttttgccttgttgagaataactacactctgttgatgaaaaagtgaatttttttaaaaaaaaaaaaaaaaaaaaaaaaaaaaaaaaaaaaaaaaaaaaaaagaaaaaaaaaaaaaaaaaagcttatcgataccgt

SEQ ID NO: 64621 - protein, 289 aa, Triticum aestivum
  peptide (1)..(289): Ceres Seq. ID no. 13656157
  misc_feature (210)..(281): Pfam Name: RNA recognition motif. (a.k.a. RRM, RBD, or RNP domain) Pfam Description: RNA recognition motif. (a.k.a. RRM, RBD, or RNP
  misc_feature (1)..(284): Homolog of NCBI NO: 40738468 NR Description: hypothetical protein AN6017.2 [Aspergillus
  misc_feature (23)..(286): Homolog of NCBI NO: 30583983 NR Description: Homo sapiens eukaryotic translation initiation
  misc_feature (23)..(286): Homolog of NCBI NO: 23503064 NR Description: Eukaryotic translation initiation factor 3
  misc_feature (9)..(287): Homolog of NCBI NO: 2951777 NR Description: translation initiation factor 3
  misc_feature (4)..(286): Homolog of NCBI NO: 29124629 NR Description: Similar to eukaryotic translation initiation
  misc_feature (1)..(287): Homolog of NCBI NO: 19112519 NR Description: eukaryotic translation initiation factor 3
  misc_feature (29)..(289): Homolog of NCBI NO: 30681225 NR Description: eukaryotic translation initiation factor 3,
  misc_feature (6)..(289): Homolog of NCBI NO: 10177573 NR Description: eukaryotic translation initiation factor 3
  misc_feature (5)..(289): Homolog of NCBI NO: 15229743 NR Description: eukaryotic translation initiation factor 3
  misc_feature (5)..(289): Homolog of NCBI NO: 12407751 NR Description: initiation factor 3g [Arabidopsis thaliana]
MPADAKIRWGELEEDDGGDLDFLLPPRVVIGPDENGFKKTIEYRFDDDGNKVKVTTTTRVRKLARARLSKAAVERRNWAKFGDAASGDDASARLTVVSTEEILLERPRAPGSKADEPSASGDPLAMASKGGAVLMVCRTCGKKGDHWTSKCPYKDLAPPTDASDMPPTSDGPAALSGPAKGSYVAPRLRAGAVHTDAGHDMRRRNDENSVRVTNLSEDTREPDLLELFRTFGPVSRVYVAVDQKTGMSRGFGFVNFVHREDAEKAISKLNGYGYDNLILHVEMAAPRPT

SEQ ID NO: 64622 - protein, 164 aa, Triticum aestivum
  peptide (1)..(164): Ceres Seq. ID no. 13656158
  misc_feature (85)..(156): Pfam Name: RNA recognition motif. (a.k.a. RRM, RBD, or RNP domain) Pfam Description: RNA recognition motif. (a.k.a. RRM, RBD, or RNP
  misc_feature (1)..(159): Homolog of NCBI NO: 40738468 NR Description: hypothetical protein AN6017.2 [Aspergillus
  misc_feature (1)..(161): Homolog of NCBI NO: 30583983 NR Description: Homo sapiens eukaryotic translation initiation
  misc_feature (1)..(161): Homolog of NCBI NO: 23503064 NR Description: Eukaryotic translation initiation factor 3
  misc_feature (1)..(162): Homolog of NCBI NO: 2951777 NR Description: translation initiation factor 3
  misc_feature (1)..(161): Homolog of NCBI NO: 29124629 NR Description: Similar to eukaryotic translation initiation
  misc_feature (1)..(162): Homolog of NCBI NO: 19112519 NR Description: eukaryotic translation initiation factor 3
  misc_feature (1)..(164): Homolog of NCBI NO: 30681225 NR Description: eukaryotic translation initiation factor 3,
  misc_feature (1)..(164): Homolog of NCBI NO: 10177573 NR Description: eukaryotic translation initiation factor 3
  misc_feature (1)..(164): Homolog of NCBI NO: 15229743 NR Description: eukaryotic translation initiation factor 3
  misc_feature (1)..(164): Homolog of NCBI NO: 12407751 NR Description: initiation factor 3g [Arabidopsis thaliana]
MASKGGAVLMVCRTCGKKGDHWTSKCPYKDLAPPTDASDMPPTSDGPAALSGPAKGSYVAPRLRAGAVHTDAGHDMRRRNDENSVRVTNLSEDTREPDLLELFRTFGPVSRVYVAVDQKTGMSRGFGFVNFVHREDAEKAISKLNGYGYDNLILHVEMAAPRPT

SEQ ID NO: 64623 - protein, 155 aa, Triticum aestivum
  peptide (1)..(155): Ceres Seq. ID no. 13656159
  misc_feature (76)..(147): Pfam Name: RNA recognition motif. (a.k.a. RRM, RBD, or RNP domain) Pfam Description: RNA recognition motif. (a.k.a. RRM, RBD, or RNP
  misc_feature (1)..(150): Homolog of NCBI NO: 40738468 NR Description: hypothetical protein AN6017.2 [Aspergillus
  misc_feature (1)..(152): Homolog of NCBI NO: 30583983 NR Description: Homo sapiens eukaryotic translation initiation
  misc_feature (1)..(152): Homolog of NCBI NO: 23503064 NR Description: Eukaryotic translation initiation factor 3
  misc_feature (1)..(153): Homolog of NCBI NO: 2951777 NR Description: translation initiation factor 3
  misc_feature (1)..(152): Homolog of NCBI NO: 29124629 NR Description: Similar to eukaryotic translation initiation
  misc_feature (1)..(153): Homolog of NCBI NO: 19112519 NR Description: eukaryotic translation initiation factor 3
  misc_feature (1)..(155): Homolog of NCBI NO: 30681225 NR Description: eukaryotic translation initiation factor 3,
  misc_feature (1)..(155): Homolog of NCBI NO: 10177573 NR Description: eukaryotic translation initiation factor 3
  misc_feature (1)..(155): Homolog of NCBI NO: 15229743 NR Description: eukaryotic translation initiation factor 3
  misc_feature (1)..(155): Homolog of NCBI NO: 12407751 NR Description: initiation factor 3g [Arabidopsis thaliana]
MVCRTCGKKGDHWTSKCPYKDLAPPTDASDMPPTSDGPAALSGPAKGSYVAPRLRAGAVHTDAGHDMRRRNDENSVRVTNLSEDTREPDLLELFRTFGPVSRVYVAVDQKTGMSRGFGFVNFVHREDAEKAISKLNGYGYDNLILHVEMAAPRPT

SEQ ID NO: 64624 - DNA, 1428 bp, Triticum aestivum
  misc_feature (1)..(1428): Ceres Seq. ID no. 15169639
ccggccactggccaagcatgaagcatccccattccttttcctttccgtagctttcttctttgccgctttgcgtgcctccctctctcgctctctcgtccgcagcagctgggacgatggggacgatgaggtcgtcggcggtggcggtagcggcgcggaagcagcagctgctgccatgcttggccctgctgcttcttgcgggggcggcgtccgcccaggcccagaagtacaacgcggtgttcaacttcggcgactccatcactgacacgggcaacctgtgcacgagcgggaagccgacggcgatcaccttcacgcagcccccctacggcgagacctacttcggcacccccacctgccggtgctccgacggccgcgtcatcgtcgacttcctcagcaccaagtttggggtgcctttcctgccaccgtccaaggcgaacggcacggacttcaagcagggtgcgaacatggccatcacgggggcgacggccatggacgcgcccttcttccgcggcctcggcctctcggacaagatctggaacaacgggcccatcagcttccagatccagtggttccagcagatcgccgccactgtgtgcgggaacgactgcaagcggtacctgcgcgagtcactggtggtgttcggcgagttcggcggcaacgactacaacgcgatgctgttcggcaactacaacccggaccaagcgagcaggtacacgaccaagatcgtcaacaccatcatcaggggcgtggagaaggtggtggcaatgggggccagggacgtggtggtgcccggggtgctccccatcggctgcttccccatctacctcaccgtctacggcaccaacagcagcgccgactacgacgccctcggctgcctccgcaagttcaacgacctctccaccttccacaacaacctgctccaggccaagatcgcccgcctccggaagcgctacggccgggcggcgcgcatcatgtacggcgacttctactccgccgtctacgacatggtccagaacccaaacaaatacggattcaacgcggctttcgaggcgtgctgcggctccgggggaggcaagtacaactacgccaacagcgcgaggtgcgggatgcagggcgcggcggcgtgcgccaacccggccgaccacctcagctgggacggcatccacctcaccgaggctgcctacaagcagatcaccgacggctggctcaacgggccctactgcagcccgcccatcctccacacttaaacattattttatttatttatttatatatggagttgggtagtattatttattatttgatttgaggttgagtttaccgaaaggaaaaagggaaatttgattcagtgccgtatggtggtgctgagatgtatacgttgcccaagaaaaaaaaatggaggcaactcttgaataaattgttaatgtttcc

SEQ ID NO: 64625 - protein, 376 aa, Triticum aestivum
  peptide (1)..(376): Ceres Seq. ID no. 15169640
  misc_feature (41)..(363): Pfam Name: GDSL-like Lipase/Acylhydrolase Pfam Description: GDSL-like Lipase/Acylhydrolase
  misc_feature (18)..(376): Homolog of NCBI NO: 15231809 NR Description: GDSL-motif lipase/hydrolase protein [Arabidopsis
  misc_feature (38)..(211): Homolog of NCBI NO: 34912612 NR Description: P0046B10.23 [Oryza sativa (japonica
  misc_feature (29)..(373): Homolog of NCBI NO: 34894838 NR Description: putative lipase homolog [Oryza sativa (japonica
  misc_feature (38)..(372): Homolog of NCBI NO: 10764858 NR Description: F1K23.17 [Arabidopsis thaliana]
  misc_feature (1)..(372): Homolog of NCBI NO: 10764858 NR Description: F1K23.17 [Arabidopsis thaliana]
  misc_feature (13)..(374): Homolog of NCBI NO: 34903994 NR Description: unnamed protein product [Oryza sativa (japonica
  misc_feature (18)..(374): Homolog of NCBI NO: 34903996 NR Description: unnamed protein product [Oryza sativa (japonica
  misc_feature (1)..(374): Homolog of NCBI NO: 34903978 NR Description: unnamed protein product [Oryza sativa (japonica
  misc_feature (33)..(376): Homolog of NCBI NO: 34903958 NR Description: OSJNBa0038J17.24 [Oryza sativa (japonica
  misc_feature (11)..(375): Homolog of NCBI NO: 34903956 NR Description: OSJNBa0038J17.23 [Oryza sativa (japonica
MGTMRSSAVAVAARKQQLLPCLALLLLAGAASAQAQKYNAVFNFGDSITDTGNLCTSGKPTAITFTQPPYGETYFGTPTCRCSDGRVIVDFLSTKFGVPFLPPSKANGTDFKQGANMAITGATAMDAPFFRGLGLSDKIWNNGPISFQIQWFQQIAATVCGNDCKRYLRESLVVFGEFGGNDYNAMLFGNYNPDQASRYTTKIVNTIIRGVEKVVAMGARDVVVPGVLPIGCFPIYLTVYGTNSSADYDALGCLRKFNDLSTFHNNLLQAKIARLRKRYGRAARIMYGDFYSAVYDMVQNPNKYGFNAAFEACCGSGGGKYNYANSARCGMQGAAACANPADHLSWDGIHLTEAAYKQITDGWLNGPYCSPPILHT

SEQ ID NO: 64626 - protein, 373 aa, Triticum aestivum
  peptide (1)..(373): Ceres Seq. ID no. 15169641
  misc_feature (38)..(360): Pfam Name: GDSL-like Lipase/Acylhydrolase Pfam Description: GDSL-like Lipase/Acylhydrolase
  misc_feature (15)..(373): Homolog of NCBI NO: 15231809 NR Description: GDSL-motif lipase/hydrolase protein [Arabidopsis
  misc_feature (35)..(208): Homolog of NCBI NO: 34912612 NR Description: P0046B10.23 [Oryza sativa (japonica
  misc_feature (26)..(370): Homolog of NCBI NO: 34894838 NR Description: putative lipase homolog [Oryza sativa (japonica
  misc_feature (35)..(369): Homolog of NCBI NO: 10764858 NR Description: F1K23.17 [Arabidopsis thaliana]
  misc_feature (1)..(369): Homolog of NCBI NO: 10764858 NR Description: F1K23.17 [Arabidopsis thaliana]
  misc_feature (10)..(371): Homolog of NCBI NO: 34903994 NR Description: unnamed protein product [Oryza sativa (japonica
  misc_feature (15)..(371): Homolog of NCBI NO: 34903996 NR Description: unnamed protein product [Oryza sativa (japonica
  misc_feature (1)..(371): Homolog of NCBI NO: 34903978 NR Description: unnamed protein product [Oryza sativa (japonica
  misc_feature (30)..(373): Homolog of NCBI NO: 34903958 NR Description: OSJNBa0038J17.24 [Oryza sativa (japonica
  misc_feature (8)..(372): Homolog of NCBI NO: 34903956 NR Description: OSJNBa0038J17.23 [Oryza sativa (japonica
MRSSAVAVAARKQQLLPCLALLLLAGAASAQAQKYNAVFNFGDSITDTGNLCTSGKPTAITFTQPPYGETYFGTPTCRCSDGRVIVDFLSTKFGVPFLPPSKANGTDFKQGANMAITGATAMDAPFFRGLGLSDKIWNNGPISFQIQWFQQIAATVCGNDCKRYLRESLVVFGEFGGNDYNAMLFGNYNPDQASRYTTKIVNTIIRGVEKVVAMGARDVVVPGVLPIGCFPIYLTVYGTNSSADYDALGCLRKFNDLSTFHNNLLQAKIARLRKRYGRAARIMYGDFYSAVYDMVQNPNKYGFNAAFEACCGSGGGKYNYANSARCGMQGAAACANPADHLSWDGIHLTEAAYKQITDGWLNGPYCSPPILHT

SEQ ID NO: 64627 - protein, 260 aa, Triticum aestivum
  peptide (1)..(260): Ceres Seq. ID no. 15169642
  misc_feature (1)..(247): Pfam Name: GDSL-like Lipase/Acylhydrolase Pfam Description: GDSL-like Lipase/Acylhydrolase
  misc_feature (1)..(260): Homolog of NCBI NO: 15231809 NR Description: GDSL-motif lipase/hydrolase protein [Arabidopsis
  misc_feature (1)..(95): Homolog of NCBI NO: 34912612 NR Description: P0046B10.23 [Oryza sativa (japonica
  misc_feature (1)..(257): Homolog of NCBI NO: 34894838 NR Description: putative lipase homolog [Oryza sativa (japonica
  misc_feature (1)..(256): Homolog of NCBI NO: 10764858 NR Description: F1K23.17 [Arabidopsis thaliana]
  misc_feature (1)..(256): Homolog of NCBI NO: 10764858 NR Description: F1K23.17 [Arabidopsis thaliana]
  misc_feature (1)..(258): Homolog of NCBI NO: 34903994 NR Description: unnamed protein product [Oryza sativa (japonica
  misc_feature (1)..(258): Homolog of NCBI NO: 34903996 NR Description: unnamed protein product [Oryza sativa (japonica
  misc_feature (1)..(258): Homolog of NCBI NO: 34903978 NR Description: unnamed protein product [Oryza sativa (japonica
  misc_feature (1)..(260): Homolog of NCBI NO: 34903958 NR Description: OSJNBa0038J17.24 [Oryza sativa (japonica
  misc_feature (1)..(259): Homolog of NCBI NO: 34903956 NR Description: OSJNBa0038J17.23 [Oryza sativa (japonica
MAITGATAMDAPFFRGLGLSDKIWNNGPISFQIQWFQQIAATVCGNDCKRYLRESLVVFGEFGGNDYNAMLFGNYNPDQASRYTTKIVNTIIRGVEKVVAMGARDVVVPGVLPIGCFPIYLTVYGTNSSADYDALGCLRKFNDLSTFHNNLLQAKIARLRKRYGRAARIMYGDFYSAVYDMVQNPNKYGFNAAFEACCGSGGGKYNYANSARCGMQGAAACANPADHLSWDGIHLTEAAYKQITDGWLNGPYCSPPILHT

SEQ ID NO: 64628 - DNA, 1159 bp, Triticum aestivum
  misc_feature (1)..(1159): Ceres Seq. ID no. 13662725
cccaagcgaagccaaaggcagccttcacctgtacgcggcgcccaatctagtccaacccctccgccggcgccagatcgcggaggaccctgccgtctcccgcccattctccgcaaaggtctccatgctcatgagatgcaagcacatttgattttctataagttcaacgggcactaatgttaactgaagtattttcctcgatggaggctgaagctgattttgatgttgaagattccagatcaaacaatgaactgcaggagttgtggccagttggtgagatagacccaaagagagggcgattcccttgttgcattgtctggactcctcttcctgtagtttcatggcttgctccttacatagggcatgttggaatctgtcaggaggatggatctgtcctggattttgctggttcaaatttagtgagcatggataattttgcatatggttctgtcgctagatacctccagctggacagaaagaagtgctgctttcctgctaatctggcggcacatgtatgcgagtggtcatacaaacacacagaagttggaacagcaacatcatgggatggagccctgcaactgggcacgagacatttccagcacaaatactacaacctgttcacctgcaactgttactcattcgtggcaaactgcctgaaccggcttgcccacggtggttcggcggagtggaatgttttgaatgtggcagctcttgtttggctgcacggcgagtgggtggacaaaatgtctatcgttcggtcattcgcgccattcgtaactgtgacgtgcatcggtatttttatggccggctggtctttcctaatagggatattggcgttctgtttgcttctgatagggtggtttgtctttgctgtatactgcacgaaaggtttggtgtgctgatattacattgcgactgaacctggtgaggaattgtggaaataatctgtctgggaccattcatccatgctcgtgattattcgtctgaaacttatcaaaacactgcacctgctaaggcctcctttgctgtgtaggatatgaacactacagaaatgggaaagctgtagaaagtgagatacatgtatctgaaattctatgaatggaaatatgaaaagagatatcatttggttcagacggtatgatttttagcattgagtattttt

SEQ ID NO: 64629 - protein, 241 aa, Triticum aestivum
  peptide (1)..(241): Ceres Seq. ID no. 13662726
  misc_feature (34)..(215): Pfam Name: Protein of unknown function (DUF778) Pfam Description: Protein of unknown function (DUF778)
  misc_feature (128)..(209): Homolog of NCBI NO: 14149779 NR Description: hypothetical protein DKFZp564D0478 [Homo sapiens]
  misc_feature (35)..(120): Homolog of NCBI NO: 19848938 NR Description: hypothetical protein SB71 [Homo sapiens]
  misc_feature (35)..(120): Homolog of NCBI NO: 14149779 NR Description: hypothetical protein DKFZp564D0478 [Homo sapiens]
  misc_feature (34)..(240): Homolog of NCBI NO: 21592754 NR Description: unknown [Arabidopsis thaliana]
  misc_feature (34)..(240): Homolog of NCBI NO: 15230386 NR Description: expressed protein [Arabidopsis thaliana]
  misc_feature (35)..(240): Homolog of NCBI NO: 34897172 NR Description: hypothetical protein [Oryza sativa (japonica
  misc_feature (51)..(240): Homolog of NCBI NO: 26449550 NR Description: unknown protein [Arabidopsis thaliana]
  misc_feature (9)..(240): Homolog of NCBI NO: 30682996 NR Description: expressed protein [Arabidopsis thaliana]
  misc_feature (9)..(240): Homolog of NCBI NO: 7452462 NR Description: hypothetical protein At2g26070 [imported] -
  misc_feature (1)..(241): Homolog of NCBI NO: 34910502 NR Description: P0456F08.26 [Oryza sativa (japonica
MLTEVFSSMEAEADFDVEDSRSNNELQELWPVGEIDPKRGRFPCCIVWTPLPVVSWLAPYIGHVGICQEDGSVLDFAGSNLVSMDNFAYGSVARYLQLDRKKCCFPANLAAHVCEWSYKHTEVGTATSWDGALQLGTRHFQHKYYNLFTCNCYSFVANCLNRLAHGGSAEWNVLNVAALVWLHGEWVDKMSIVRSFAPFVTVTCIGIFMAGWSFLIGILAFCLLLIGWFVFAVYCTKGLVC

SEQ ID NO: 64630 - protein, 233 aa, Triticum aestivum
  peptide (1)..(233): Ceres Seq. ID no. 13662727
  misc_feature (26)..(207): Pfam Name: Protein of unknown function (DUF778) Pfam Description: Protein of unknown function (DUF778)
  misc_feature (120)..(201): Homolog of NCBI NO: 14149779 NR Description: hypothetical protein DKFZp564D0478 [Homo sapiens]
  misc_feature (27)..(112): Homolog of NCBI NO: 19848938 NR Description: hypothetical protein SB71 [Homo sapiens]
  misc_feature (27)..(112): Homolog of NCBI NO: 14149779 NR Description: hypothetical protein DKFZp564D0478 [Homo sapiens]
  misc_feature (26)..(232): Homolog of NCBI NO: 21592754 NR Description: unknown [Arabidopsis thaliana]
  misc_feature (26)..(232): Homolog of NCBI NO: 15230386 NR Description: expressed protein [Arabidopsis thaliana]
  misc_feature (27)..(232): Homolog of NCBI NO: 34897172 NR Description: hypothetical protein [Oryza sativa (japonica
  misc_feature (43)..(232): Homolog of NCBI NO: 26449550 NR Description: unknown protein [Arabidopsis thaliana]
  misc_feature (1)..(232): Homolog of NCBI NO: 30682996 NR Description: expressed protein [Arabidopsis thaliana]
  misc_feature (1)..(232): Homolog of NCBI NO: 7452462 NR Description: hypothetical protein At2g26070 [imported] -
  misc_feature (1)..(233): Homolog of NCBI NO: 34910502 NR Description: P0456F08.26 [Oryza sativa (japonica
MEAEADFDVEDSRSNNELQELWPVGEIDPKRGRFPCCIVWTPLPVVSWLAPYIGHVGICQEDGSVLDFAGSNLVSMDNFAYGSVARYLQLDRKKCCFPANLAAHVCEWSYKHTEVGTATSWDGALQLGTRHFQHKYYNLFTCNCYSFVANCLNRLAHGGSAEWNVLNVAALVWLHGEWVDKMSIVRSFAPFVTVTCIGIFMAGWSFLIGILAFCLLLIGWFVFAVYCTKGLVC

SEQ ID NO: 64631 - protein, 158 aa, Triticum aestivum
  peptide (1)..(158): Ceres Seq. ID no. 13662728
  misc_feature (1)..(132): Pfam Name: Protein of unknown function (DUF778) Pfam Description: Protein of unknown function (DUF778)
  misc_feature (45)..(126): Homolog of NCBI NO: 14149779 NR Description: hypothetical protein DKFZp564D0478 [Homo sapiens]
  misc_feature (1)..(37): Homolog of NCBI NO: 19848938 NR Description: hypothetical protein SB71 [Homo sapiens]
  misc_feature (1)..(37): Homolog of NCBI NO: 14149779 NR Description: hypothetical protein DKFZp564D0478 [Homo sapiens]
  misc_feature (1)..(157): Homolog of NCBI NO: 21592754 NR Description: unknown [Arabidopsis thaliana]
  misc_feature (1)..(157): Homolog of NCBI NO: 15230386 NR Description: expressed protein [Arabidopsis thaliana]
  misc_feature (1)..(157): Homolog of NCBI NO: 34897172 NR Description: hypothetical protein [Oryza sativa (japonica
  misc_feature (1)..(157): Homolog of NCBI NO: 26449550 NR Description: unknown protein [Arabidopsis thaliana]
  misc_feature (1)..(157): Homolog of NCBI NO: 30682996 NR Description: expressed protein [Arabidopsis thaliana]
  misc_feature (1)..(157): Homolog of NCBI NO: 7452462 NR Description: hypothetical protein At2g26070 [imported] -
  misc_feature (1)..(158): Homolog of NCBI NO: 34910502 NR Description: P0456F08.26 [Oryza sativa (japonica
MDNFAYGSVARYLQLDRKKCCFPANLAAHVCEWSYKHTEVGTATSWDGALQLGTRHFQHKYYNLFTCNCYSFVANCLNRLAHGGSAEWNVLNVAALVWLHGEWVDKMSIVRSFAPFVTVTCIGIFMAGWSFLIGILAFCLLLIGWFVFAVYCTKGLVC

SEQ ID NO: 64632 - DNA, 1276 bp, Triticum aestivum
  misc_feature (1)..(1276): Ceres Seq. ID no. 14303600
gaaaaagtaatcctgttatctcctcgcgtcgccctcggcgcaataataaaagcgcaacggcacccagcgatctaggcctcctcctcgctcgcatcgccttccctccgctcgcgtctgctacacttcctctcccggcccggctagatctcgccggcaggagatggcggacgcgaagcagcagcaggccgcggcgcccactggcgtctggaagacgatcaagccattcgtcaatggcggcgcctccgggatgctcgccacctgcgtcatccagcccatcgacatgatcaaggtgaagatccagttgggcgagggatctgcagctcaggtcgcaaagaccatgtatgctaatgagggccttggttccttttacaagggtttgtcagctggtttactaaggcaagcgacctatacgacagctcgtcttggatccttcagggttttgacaaacaaagcaattgaggcaaatgatgggaagccattgccacttgttcagaaagcttttattggtctgactgctggagcgattggcgcatgtgtgggcagtcctgctgatttggcactcattaggatgcaagctgactcgaccctaccagcagcacagcggcgtcactacaagaatgcattccatgcactctaccgtatcaccgctgatgaaggcgtccttgcgctttggaagggtgcaggcccaactgtggtgagagccatgtcactgaatatgggtatgcttgcgtcctatgatcaaagtgttgagctgttcagagacaaattgggtgccggggaatatcagactgttattggagccagtgccatttctggattctgtgcggctgcttgcagtctgccctttgattacgtgaaaacacaaattcagaagatgcaacctgatgccactggcaagtacccatacactgggtctttggactgcgccatgcaaaccttgaagaccggtggcccatttaagttctactccggcttccctgtatattgtgtcaggatcgccccgcatgtcatgatgacgtggctcttcttgaatcaaatccagaagtaccagaagaagatcggcatataagatctccagttggagacaagagtaccaatccttgttcgacacatttaataactttccagcagctttgcactcccgtggttgtttttggtagacagagttttaagcaatttttaccgtagcttacatttgctgtggtactcttgacgttgttacaataatcacataatcacattatttgttgtatttggggcaatttttttggcgggc

SEQ ID NO: 64633 - protein, 302 aa, Triticum aestivum
  peptide (1)..(302): Ceres Seq. ID no. 14303601
  misc_feature (85)..(302): Homolog of NCBI NO: 2331139 NR Description: 2-oxoglutarate/malate translocator [Oryza sativa]
  misc_feature (78)..(302): Homolog of NCBI NO: 19913111 NR Description: dicarboxylate/tricarboxylate carrier [Nicotiana
  misc_feature (14)..(302): Homolog of NCBI NO: 19913107 NR Description: dicarboxylate/tricarboxylate carrier [Nicotiana
  misc_feature (14)..(302): Homolog of NCBI NO: 19913105 NR Description: dicarboxylate/tricarboxylate carrier [Nicotiana
  misc_feature (14)..(302): Homolog of NCBI NO: 10798640 NR Description: mitochondrial 2-oxoglutarate/malate carrier
  misc_feature (14)..(302): Homolog of NCBI NO: 7489246 NR Description: oxoglutarate/malate translocator - potato
  misc_feature (7)..(302): Homolog of NCBI NO: 15241167 NR Description: mitochondrial 2-oxoglutarate/malate translocator,
  misc_feature (1)..(302): Homolog of NCBI NO: 19913109 NR Description: dicarboxylate/tricarboxylate carrier [Nicotiana
  misc_feature (1)..(302): Homolog of NCBI NO: 2130090 NR Description: 2-oxoglutarate/malate translocator (clones OMT134
  misc_feature (1)..(302): Homolog of NCBI NO: 2130089 NR Description: 2-oxoglutarate/malate translocator (clone
MADAKQQQAAAPTGVWKTIKPFVNGGASGMLATCVIQPIDMIKVKIQLGEGSAAQVAKTMYANEGLGSFYKGLSAGLLRQATYTTARLGSFRVLTNKAIEANDGKPLPLVQKAFIGLTAGAIGACVGSPADLALIRMQADSTLPAAQRRHYKNAFHALYRITADEGVLALWKGAGPTVVRAMSLNMGMLASYDQSVELFRDKLGAGEYQTVIGASAISGFCAAACSLPFDYVKTQIQKMQPDATGKYPYTGSLDCAMQTLKTGGPFKFYSGFPVYCVRIAPHVMMTWLFLNQIQKYQKKIGI

SEQ ID NO: 64634 - protein, 273 aa, Triticum aestivum
  peptide (1)..(273): Ceres Seq. ID no. 14303602
  misc_feature (56)..(273): Homolog of NCBI NO: 2331139 NR Description: 2-oxoglutarate/malate translocator [Oryza sativa]
  misc_feature (49)..(273): Homolog of NCBI NO: 19913111 NR Description: dicarboxylate/tricarboxylate carrier [Nicotiana
  misc_feature (1)..(273): Homolog of NCBI NO: 19913105 NR Description: dicarboxylate/tricarboxylate carrier [Nicotiana
  misc_feature (1)..(273): Homolog of NCBI NO: 19913107 NR Description: dicarboxylate/tricarboxylate carrier [Nicotiana
  misc_feature (1)..(273): Homolog of NCBI NO: 10798640 NR Description: mitochondrial 2-oxoglutarate/malate carrier
  misc_feature (1)..(273): Homolog of NCBI NO: 7489246 NR Description: oxoglutarate/malate translocator - potato
  misc_feature (1)..(273): Homolog of NCBI NO: 15241167 NR Description: mitochondrial 2-oxoglutarate/malate translocator,
  misc_feature (1)..(273): Homolog of NCBI NO: 19913109 NR Description: dicarboxylate/tricarboxylate carrier [Nicotiana
  misc_feature (1)..(273): Homolog of NCBI NO: 2130090 NR Description: 2-oxoglutarate/malate translocator (clones OMT134
  misc_feature (1)..(273): Homolog of NCBI NO: 2130089 NR Description: 2-oxoglutarate/malate translocator (clone
MLATCVIQPIDMIKVKIQLGEGSAAQVAKTMYANEGLGSFYKGLSAGLLRQATYTTARLGSFRVLTNKAIEANDGKPLPLVQKAFIGLTAGAIGACVGSPADLALIRMQADSTLPAAQRRHYKNAFHALYRITADEGVLALWKGAGPTVVRAMSLNMGMLASYDQSVELFRDKLGAGEYQTVIGASAISGFCAAACSLPFDYVKTQIQKMQPDATGKYPYTGSLDCAMQTLKTGGPFKFYSGFPVYCVRIAPHVMMTWLFLNQIQKYQKKIGI

SEQ ID NO: 64635 - protein, 262 aa, Triticum aestivum
  peptide (1)..(262): Ceres Seq. ID no. 14303603
  misc_feature (45)..(262): Homolog of NCBI NO: 2331139 NR Description: 2-oxoglutarate/malate translocator [Oryza sativa]
  misc_feature (38)..(262): Homolog of NCBI NO: 19913111 NR Description: dicarboxylate/tricarboxylate carrier [Nicotiana
  misc_feature (1)..(262): Homolog of NCBI NO: 19913107 NR Description: dicarboxylate/tricarboxylate carrier [Nicotiana
  misc_feature (1)..(262): Homolog of NCBI NO: 19913105 NR Description: dicarboxylate/tricarboxylate carrier [Nicotiana
  misc_feature (1)..(262): Homolog of NCBI NO: 10798640 NR Description: mitochondrial 2-oxoglutarate/malate carrier
  misc_feature (1)..(262): Homolog of NCBI NO: 7489246 NR Description: oxoglutarate/malate translocator - potato
  misc_feature (1)..(262): Homolog of NCBI NO: 15241167 NR Description: mitochondrial 2-oxoglutarate/malate translocator,
  misc_feature (1)..(262): Homolog of NCBI NO: 19913109 NR Description: dicarboxylate/tricarboxylate carrier [Nicotiana
  misc_feature (1)..(262): Homolog of NCBI NO: 2130090 NR Description: 2-oxoglutarate/malate translocator (clones OMT134
  misc_feature (1)..(262): Homolog of NCBI NO: 2130089 NR Description: 2-oxoglutarate/malate translocator (clone
MIKVKIQLGEGSAAQVAKTMYANEGLGSFYKGLSAGLLRQATYTTARLGSFRVLTNKAIEANDGKPLPLVQKAFIGLTAGAIGACVGSPADLALIRMQADSTLPAAQRRHYKNAFHALYRITADEGVLALWKGAGPTVVRAMSLNMGMLASYDQSVELFRDKLGAGEYQTVIGASAISGFCAAACSLPFDYVKTQIQKMQPDATGKYPYTGSLDCAMQTLKTGGPFKFYSGFPVYCVRIAPHVMMTWLFLNQIQKYQKKIGI

SEQ ID NO: 64636 - DNA, 1783 bp, Triticum aestivum
  misc_feature (1)..(1783): Ceres Seq. ID no. 13655852
cccgaatccaaatccgccattgcacagccggaccagtgccactcgaaccccacgtaccctctctatcccaaccctagcgcggcggcggcgtcgatggcgtcgatggcgtcgatcccgtctgacgaggtctccgagaacggccacggcaacggaaacggcccatccccgccgcgcgccaagcgcccccgcgcagcgttgatctcggccgcccagatccgcgacgagttcgcgcatcacgaccccgcagttgcccgcgtcaacaacggcagcttcggctgctgcccggcctccgtgctcgaagcgcaggcgcgctggcagcgcctcttcctcgctcagcccgacgccttctacttcgacggccttcagccggggctccgccgctcccgcgcagccgtcgcggcccttgtcaacgctggggacgtctccgagatttccctcgtcgacaacgctaccaccgctgctgcaatcgtgctgcagcatgccgcctggagctttgccgaggggcacttcgctcgtggcgacgctgtgctcatgctccattacgcctacggagcagtaaagaaatctatccaggcctacgttgcccgcgcgggcgccactgtcgtcgaggtacccctcccgttcccggtcacctcccctgacgccattattgcggagttccatgctgcgctcgctgttgccaaggccggtggtcgtaaggtccggcttgctgtcattgatcacatcacctccatgcccagtgttctcattccagtcaaggagctagttgccatttgtcgccatgagggtgtcgacaaagtttttgttgatgctgcacactctgttgggcaagtccctgtcgatgtgcgagacattggggcggatttctacactagcaacctccacaagtggttcttttgccccccggccgtggctttcttacacacccgcaagggtggcccgataacctctcagctccaccaccctgttgtgtcacatgaatatggcaacgggctacctatggagagtggatggattgggacacgggattacagtgcccagatcgtcgttcctgaagctattcactttgtgaaccgatttgaaggtgggattgaggggatacgcagccggaaccatgagaaggtaattgagatggggaggatgcttgccgaagcatgggggacagttcttggatcaccaccagtaatgtgtggaagcatggctatggtagggatgcctagttgtctttgcattgagagtgacgatgatgcactgagagtgcggaccatgttgaggaaggatttcaaagttgaggtgcctatatactacaatagcagacaggttaaagtgcaagagatggcaaaggataatagtagtgatccagtgacggggtatgtaagaatctcacaccaggtttacaatgtcaaggaggagtatgagaggctgagagatgctgtcaataagcttgttgctgaggggttcaccagtgccgaattgaggccagctgagaagcaagaagctctggcttgatgacgtggcatctagccagcactccatccgaagatggattaattagttgtggatctgtgccagaagcctgtgctgcaccgagatcgagttctttggtagcccgctcaatggcatcgccatttgatgtagtgtactttcacatactgacaaatgttgtatttgagcttgcaataacgtgcactggaatggaatgtatgtcttctcccttcacttgcatttttgagctgtaatgtaagaataatgatctgaatgcaaggagacttgcatgctttct

SEQ ID NO: 64637 - protein, 502 aa, Triticum aestivum
  peptide (1)..(502): Ceres Seq. ID no. 13655853
  misc_feature (94)..(475): Pfam Name: Aminotransferase class-V Pfam Description: Aminotransferase class-V
  misc_feature (80)..(482): Homolog of NCBI NO: 399225 NR Description: Isopenicillin N epimerase
  misc_feature (80)..(485): Homolog of NCBI NO: 116093 NR Description: Isopenicillin N epimerase
  misc_feature (76)..(388): Homolog of NCBI NO: 25463395 NR Description: hypothetical protein [imported] - yeast (Candida
  misc_feature (80)..(308): Homolog of NCBI NO: 40738451 NR Description: hypothetical protein AN6227.2 [Aspergillus
  misc_feature (80)..(481): Homolog of NCBI NO: 17548917 NR Description: PUTATIVE ISOPENICILLIN N EPIMERASE PROTEIN
  misc_feature (67)..(478): Homolog of NCBI NO: 21230669 NR Description: isopenicillin N epimerase
  misc_feature (42)..(495): Homolog of NCBI NO: 15228693 NR Description: expressed protein [Arabidopsis thaliana]
  misc_feature (60)..(492): Homolog of NCBI NO: 30690360 NR Description: expressed protein [Arabidopsis thaliana]
  misc_feature (35)..(497): Homolog of NCBI NO: 34894322 NR Description: unnamed protein product [Oryza sativa (japonica
  misc_feature (23)..(502): Homolog of NCBI NO: 34894318 NR Description: unnamed protein product [Oryza sativa (japonica
PESKSAIAQPDQCHSNPTYPLYPNPSAAAASMASMASIPSDEVSENGHGNGNGPSPPRAKRPRAALISAAQIRDEFAHHDPAVARVNNGSFGCCPASVLEAQARWQRLFLAQPDAFYFDGLQPGLRRSRAAVAALVNAGDVSEISLVDNATTAAAIVLQHAAWSFAEGHFARGDAVLMLHYAYGAVKKSIQAYVARAGATVVEVPLPFPVTSPDAIIAEFHAALAVAKAGGRKVRLAVIDHITSMPSVLIPVKELVAICRHEGVDKVFVDAAHSVGQVPVDVRDIGADFYTSNLHKWFFCPPAVAFLHTRKGGPITSQLHHPVVSHEYGNGLPMESGWIGTRDYSAQIVVPEAIHFVNRFEGGIEGIRSRNHEKVIEMGRMLAEAWGTVLGSPPVMCGSMAMVGMPSCLCIESDDDALRVRTMLRKDFKVEVPIYYNSRQVKVQEMAKDNSSDPVTGYVRISHQVYNVKEEYERLRDAVNKLVAEGFTSAELRPAEKQEALA

SEQ ID NO: 64638 - protein, 471 aa, Triticum aestivum
  peptide (1)..(471): Ceres Seq. ID no. 13655854
  misc_feature (63)..(444): Pfam Name: Aminotransferase class-V Pfam Description: Aminotransferase class-V
  misc_feature (49)..(451): Homolog of NCBI NO: 399225 NR Description: Isopenicillin N epimerase
  misc_feature (49)..(454): Homolog of NCBI NO: 116093 NR Description: Isopenicillin N epimerase
  misc_feature (45)..(357): Homolog of NCBI NO: 25463395 NR Description: hypothetical protein [imported] - yeast (Candida
  misc_feature (49)..(277): Homolog of NCBI NO: 40738451 NR Description: hypothetical protein AN6227.2 [Aspergillus
  misc_feature (49)..(450): Homolog of NCBI NO: 17548917 NR Description: PUTATIVE ISOPENICILLIN N EPIMERASE PROTEIN
  misc_feature (36)..(447): Homolog of NCBI NO: 21230669 NR Description: isopenicillin N epimerase
  misc_feature (11)..(464): Homolog of NCBI NO: 15228693 NR Description: expressed protein [Arabidopsis thaliana]
  misc_feature (29)..(461): Homolog of NCBI NO: 30690360 NR Description: expressed protein [Arabidopsis thaliana]
  misc_feature (4)..(466): Homolog of NCBI NO: 34894322 NR Description: unnamed protein product [Oryza sativa (japonica
  misc_feature (1)..(471): Homolog of NCBI NO: 34894318 NR Description: unnamed protein product [Oryza sativa (japonica
MASMASIPSDEVSENGHGNGNGPSPPRAKRPRAALISAAQIRDEFAHHDPAVARVNNGSFGCCPASVLEAQARWQRLFLAQPDAFYFDGLQPGLRRSRAAVAALVNAGDVSEISLVDNATTAAAIVLQHAAWSFAEGHFARGDAVLMLHYAYGAVKKSIQAYVARAGATVVEVPLPFPVTSPDAIIAEFHAALAVAKAGGRKVRLAVIDHITSMPSVLIPVKELVAICRHEGVDKVFVDAAHSVGQVPVDVRDIGADFYTSNLHKWFFCPPAVAFLHTRKGGPITSQLHHPVVSHEYGNGLPMESGWIGTRDYSAQIVVPEAIHFVNRFEGGIEGIRSRNHEKVIEMGRMLAEAWGTVLGSPPVMCGSMAMVGMPSCLCIESDDDALRVRTMLRKDFKVEVPIYYNSRQVKVQEMAKDNSSDPVTGYVRISHQVYNVKEEYERLRDAVNKLVAEGFTSAELRPAEKQEALA

SEQ ID NO: 64639 - protein, 468 aa, Triticum aestivum
  peptide (1)..(468): Ceres Seq. ID no. 13655855
  misc_feature (60)..(441): Pfam Name: Aminotransferase class-V Pfam Description: Aminotransferase class-V
  misc_feature (46)..(448): Homolog of NCBI NO: 399225 NR Description: Isopenicillin N epimerase
  misc_feature (46)..(451): Homolog of NCBI NO: 116093 NR Description: Isopenicillin N epimerase
  misc_feature (42)..(354): Homolog of NCBI NO: 25463395 NR Description: hypothetical protein [imported] - yeast (Candida
  misc_feature (46)..(274): Homolog of NCBI NO: 40738451 NR Description: hypothetical protein AN6227.2 [Aspergillus
  misc_feature (46)..(447): Homolog of NCBI NO: 17548917 NR Description: PUTATIVE ISOPENICILLIN N EPIMERASE PROTEIN
  misc_feature (33)..(444): Homolog of NCBI NO: 21230669 NR Description: isopenicillin N epimerase
  misc_feature (8)..(461): Homolog of NCBI NO: 15228693 NR Description: expressed protein [Arabidopsis thaliana]
  misc_feature (26)..(458): Homolog of NCBI NO: 30690360 NR Description: expressed protein [Arabidopsis thaliana]
  misc_feature (1)..(463): Homolog of NCBI NO: 34894322 NR Description: unnamed protein product [Oryza sativa (japonica
  misc_feature (1)..(468): Homolog of NCBI NO: 34894318 NR Description: unnamed protein product [Oryza sativa (japonica
MASIPSDEVSENGHGNGNGPSPPRAKRPRAALISAAQIRDEFAHHDPAVARVNNGSFGCCPASVLEAQARWQRLFLAQPDAFYFDGLQPGLRRSRAAVAALVNAGDVSEISLVDNATTAAAIVLQHAAWSFAEGHFARGDAVLMLHYAYGAVKKSIQAYVARAGATVVEVPLPFPVTSPDAIIAEFHAALAVAKAGGRKVRLAVIDHITSMPSVLIPVKELVAICRHEGVDKVFVDAAHSVGQVPVDVRDIGADFYTSNLHKWFFCPPAVAFLHTRKGGPITSQLHHPVVSHEYGNGLPMESGWIGTRDYSAQIVVPEAIHFVNRFEGGIEGIRSRNHEKVIEMGRMLAEAWGTVLGSPPVMCGSMAMVGMPSCLCIESDDDALRVRTMLRKDFKVEVPIYYNSRQVKVQEMAKDNSSDPVTGYVRISHQVYNVKEEYERLRDAVNKLVAEGFTSAELRPAEKQEALA

SEQ ID NO: 64640 - DNA, 1104 bp, Triticum aestivum
  misc_feature (1)..(1104): Ceres Seq. ID no. 12625870
tcccacccctttacctcgtgcgatcactgagaaccataggtagaagaaaccctcgaagagcagctcttaggctcgcactctcgaatcctagcccccttgtccgcttcaattggagtcgcagggtgagggtaccgggtcgagcttctgggccagcatggtgcccagggacatggtgaatgcccccgccgaaaggctgcacgtccaagggtctgtcgtgaacaagaagtgtgagacgaaggtgccaaataaaatccacaagtcggagagggagaagcggaagcgaggcacgcagaatgacctctttaatgagctgggagccatgctagaaccagacaggcagaacaacgggaaggcatgtgtattgggtgacactacacggatactgaaggatttagtttcacaagtggaatctcttcggaaggagaatagcacactgaagaatgaatctcactatgttgtgttggagagaaatgaactgcgtgatgacaacagcatgcttcgcaatgaaatccaggagcttcagaacaagctgagaatgcgtctgcaaagcaaccctatttggagccaggatactactacaagatcagccgttgcagtaccttatcccacaagcggagtgttcccagtacagcattcaccacattcaccagtcatcacctcgacggcactttctctgcaacctgtaatcactgagcaatgctatgctgccccactacgagagctgcagctcttcccagaagtttcacctacatccactgaagatagcgaactgtcacaagaccagtggatttccaatagtgtaacaaggccccaggcacggtacccaacaccagcggcgatgtcgccagtaaatgagttcccaatccttccaaggatgggagaggagcaacaatatagtagtggcactagtgaggaagacggtccacacagggtttaagtacataacacaatttgcttcaccgtttgagaagtttctgtagtgtgagtggagtgtgtttctctgcaacagatacatatgcagacgtgcatgtaaactccaatctgtctccgaatcttgatcttaactggttaaataggtgataataaaaaatgctttacaccctc

SEQ ID NO: 64641 - protein, 260 aa, Triticum aestivum
  peptide (1)..(260): Ceres Seq. ID no. 12625871
  misc_feature (32)..(81): Pfam Name: Helix-loop-helix DNA-binding domain Pfam Description: Helix-loop-helix DNA-binding domain
  misc_feature (35)..(194): Homolog of NCBI NO: 22329204 NR Description: putative Myc-type transcription factor
  misc_feature (35)..(164): Homolog of NCBI NO: 7487183 NR Description: hypothetical protein T19K4.190 - Arabidopsis
  misc_feature (32)..(169): Homolog of NCBI NO: 11994197 NR Description: emb|CAA18500.1~gene_id:MPN9.10~similar to unknown
  misc_feature (32)..(169): Homolog of NCBI NO: 15230975 NR Description: bHLH protein
  misc_feature (6)..(227): Homolog of NCBI NO: 15228207 NR Description: hypothetical protein
  misc_feature (9)..(245): Homolog of NCBI NO: 18071393 NR Description: putative amelogenin precursor [Oryza sativa]
  misc_feature (1)..(100): Homolog of NCBI NO: 34913194 NR Description: contains EST C74688(E50368)~similar to amelogenin
  misc_feature (101)..(255): Homolog of NCBI NO: 34913194 NR Description: contains EST C74688(E50368)~similar to amelogenin
  misc_feature (1)..(255): Homolog of NCBI NO: 33146544 NR Description: amelogenin precursor-like protein
  misc_feature (1)..(255): Homolog of NCBI NO: 34391901 NR Description: putative transcription factor bHLH
MVPRDMVNAPAERLHVQGSVVNKKCETKVPNKIHKSEREKRKRGTQNDLFNELGAMLEPDRQNNGKACVLGDTTRILKDLVSQVESLRKENSTLKNESHYVVLERNELRDDNSMLRNEIQELQNKLRMRLQSNPIWSQDTTTRSAVAVPYPTSGVFPVQHSPHSPVITSTALSLQPVITEQCYAAPLRELQLFPEVSPTSTEDSELSQDQWISNSVTRPQARYPTPAAMSPVNEFPILPRMGEEQQYSSGTSEEDGPHRV

SEQ ID NO: 64642 - protein, 255 aa, Triticum aestivum
  peptide (1)..(255): Ceres Seq. ID no. 12625872
  misc_feature (27)..(76): Pfam Name: Helix-loop-helix DNA-binding domain Pfam Description: Helix-loop-helix DNA-binding domain
  misc_feature (30)..(189): Homolog of NCBI NO: 22329204 NR Description: putative Myc-type transcription factor
  misc_feature (30)..(159): Homolog of NCBI NO: 7487183 NR Description: hypothetical protein T19K4.190 - Arabidopsis
  misc_feature (27)..(164): Homolog of NCBI NO: 11994197 NR Description: emb|CAA18500.1~gene_id:MPN9.10~similar to unknown
  misc_feature (27)..(164): Homolog of NCBI NO: 15230975 NR Description: bHLH protein
  misc_feature (1)..(222): Homolog of NCBI NO: 15228207 NR Description: hypothetical protein
  misc_feature (4)..(240): Homolog of NCBI NO: 18071393 NR Description: putative amelogenin precursor [Oryza sativa]
  misc_feature (1)..(95): Homolog of NCBI NO: 34913194 NR Description: contains EST C74688(E50368)~similar to amelogenin
  misc_feature (96)..(250): Homolog of NCBI NO: 34913194 NR Description: contains EST C74688(E50368)~similar to amelogenin
  misc_feature (1)..(250): Homolog of NCBI NO: 33146544 NR Description: amelogenin precursor-like protein
  misc_feature (1)..(250): Homolog of NCBI NO: 34391901 NR Description: putative transcription factor bHLH
MVNAPAERLHVQGSVVNKKCETKVPNKIHKSEREKRKRGTQNDLFNELGAMLEPDRQNNGKACVLGDTTRILKDLVSQVESLRKENSTLKNESHYVVLERNELRDDNSMLRNEIQELQNKLRMRLQSNPIWSQDTTTRSAVAVPYPTSGVFPVQHSPHSPVITSTALSLQPVITEQCYAAPLRELQLFPEVSPTSTEDSELSQDQWISNSVTRPQARYPTPAAMSPVNEFPILPRMGEEQQYSSGTSEEDGPHRV

SEQ ID NO: 64643 - protein, 205 aa, Triticum aestivum
  peptide (1)..(205): Ceres Seq. ID no. 12625873
  misc_feature (1)..(139): Homolog of NCBI NO: 22329204 NR Description: putative Myc-type transcription factor
  misc_feature (1)..(109): Homolog of NCBI NO: 7487183 NR Description: hypothetical protein T19K4.190 - Arabidopsis
  misc_feature (1)..(114): Homolog of NCBI NO: 11994197 NR Description: emb|CAA18500.1~gene_id:MPN9.10~similar to unknown
  misc_feature (1)..(114): Homolog of NCBI NO: 15230975 NR Description: bHLH protein
  misc_feature (1)..(172): Homolog of NCBI NO: 15228207 NR Description: hypothetical protein
  misc_feature (1)..(190): Homolog of NCBI NO: 18071393 NR Description: putative amelogenin precursor [Oryza sativa]
  misc_feature (1)..(45): Homolog of NCBI NO: 34913194 NR Description: contains EST C74688(E50368)~similar to amelogenin
  misc_feature (46)..(200): Homolog of NCBI NO: 34913194 NR Description: contains EST C74688(E50368)~similar to amelogenin
  misc_feature (1)..(200): Homolog of NCBI NO: 33146544 NR Description: amelogenin precursor-like protein
  misc_feature (1)..(200): Homolog of NCBI NO: 34391901 NR Description: putative transcription factor bHLH
MLEPDRQNNGKACVLGDTTRILKDLVSQVESLRKENSTLKNESHYVVLERNELRDDNSMLRNEIQELQNKLRMRLQSNPIWSQDTTTRSAVAVPYPTSGVFPVQHSPHSPVITSTALSLQPVITEQCYAAPLRELQLFPEVSPTSTEDSELSQDQWISNSVTRPQARYPTPAAMSPVNEFPILPRMGEEQQYSSGTSEEDGPHRV

SEQ ID NO: 64644 - DNA, 1283 bp, Triticum aestivum
  misc_feature (1)..(1283): Ceres Seq. ID no. 13579918
tatctccctgcagtagacatcgcattcaggcacacataatcagcaattcagcagagtcgccaccatgggcgccaccaatcataccttgcaagcgctgctcccatggctcctcctgttcgtgcagcaggccgccgcggccagcggcgggtgcgagtgcacgaccgccacggacggggcggacaagcagggcgcgatgaagctgaagctggtcgccatcgcgtccatcctcaccgccggggcggctggcgtgctggtgccggtgctcggccgctccatggccgcgctgcgccccgacggcgacatcttcttcgcggtcaaggcgtttgccgctggcgtcatacttgccaccggcatggtgcacatcctgccggcggcgttcgacgggctcacctccccgtgcatccacaaaggcggcggggacaggaacggcttcccttttgccggccttgtggccatgtctgcagccatggccacaatggtgatagactcgctggctgctgggtactaccgccggtctcacttcagcaaggcgcgcccacttgacaacattgacatgcccggagatgaggaagggagggccgatcatccacatatgcacgcgcatggccattcacatggtgaggcaattgttgtcagctcaccggaggaggcggcgatagctgacacaatccggcacagggtggtatctcaggttctagagctgggaatcttggtgcattcagtgataattggtgtgtcattaggagcatctgtgaggccatccaccatcaagcctctggtcggtgccctcagcttccatcaattctttgaaggcataggcttgggtggttgcattgtacaggctaatttcaaggtaagggcaaccatcatcatggcaacgtttttctccctgaccgcacccgtgggcatcgtgctagggattgcgatttcatctagctataatgtgcatagctctactgccttcattattgagggagtcttcaactcagcctcggcagggattttgatctacatgtccctggtggaccttctagcaacagatttcaataacccaaagctacagacaaatacaaagcttcagctgatgacatatcttgcacttttcctaggtgcagggatgatgtccatgcttgccatatgggcatagagatcttcaaagcaattgctaaatttgcacttgtatttcctgctaaagttgaagtatgcattgtattcatccaggggttgtccatttccccaaaataatacacccttggtgaaaaattaaccatattcatccattg

SEQ ID NO: 64645 - protein, 360 aa, Triticum aestivum
  peptide (1)..(360): Ceres Seq. ID no. 13579919
  misc_feature (46)..(357): Pfam Name: ZIP Zinc transporter Pfam Description: ZIP Zinc transporter
  misc_feature (17)..(360): Homolog of NCBI NO: 15220470 NR Description: metal transporter, putative (ZIP5) [Arabidopsis
  misc_feature (15)..(360): Homolog of NCBI NO: 15230588 NR Description: zinc transporter (ZIP1) [Arabidopsis thaliana]
  misc_feature (22)..(360): Homolog of NCBI NO: 30841912 NR Description: putative zinc transporter OsZIP2 [Oryza sativa]
  misc_feature (8)..(360): Homolog of NCBI NO: 34900456 NR Description: putative zinc transporter protein ZIP1
  misc_feature (8)..(360): Homolog of NCBI NO: 32966053 NR Description: iron transporter Fe2 [Oryza sativa (japonica
  misc_feature (23)..(187): Homolog of NCBI NO: 40888860 NR Description: TPA: putative ZIP-like protein
  misc_feature (166)..(360): Homolog of NCBI NO: 40888860 NR Description: TPA: putative ZIP-like protein
  misc_feature (1)..(360): Homolog of NCBI NO: 32492894 NR Description: zinc transporter ZIP3 [Oryza sativa (japonica
MGATNHTLQALLPWLLLFVQQAAAASGGCECTTATDGADKQGAMKLKLVAIASILTAGAAGVLVPVLGRSMAALRPDGDIFFAVKAFAAGVILATGMVHILPAAFDGLTSPCIHKGGGDRNGFPFAGLVAMSAAMATMVIDSLAAGYYRRSHFSKARPLDNIDMPGDEEGRADHPHMHAHGHSHGEAIVVSSPEEAAIADTIRHRVVSQVLELGILVHSVIIGVSLGASVRPSTIKPLVGALSFHQFFEGIGLGGCIVQANFKVRATIIMATFFSLTAPVGIVLGIAISSSYNVHSSTAFIIEGVFNSASAGILIYMSLVDLLATDFNNPKLQTNTKLQLMTYLALFLGAGMMSMLAIWA

SEQ ID NO: 64646 - protein, 317 aa, Triticum aestivum
  peptide (1)..(317): Ceres Seq. ID no. 13579920
  misc_feature (3)..(314): Pfam Name: ZIP Zinc transporter Pfam Description: ZIP Zinc transporter
  misc_feature (1)..(317): Homolog of NCBI NO: 15220470 NR Description: metal transporter, putative (ZIP5) [Arabidopsis
  misc_feature (1)..(317): Homolog of NCBI NO: 15230588 NR Description: zinc transporter (ZIP1) [Arabidopsis thaliana]
  misc_feature (1)..(317): Homolog of NCBI NO: 30841912 NR Description: putative zinc transporter OsZIP2 [Oryza sativa]
  misc_feature (1)..(317): Homolog of NCBI NO: 34900456 NR Description: putative zinc transporter protein ZIP1
  misc_feature (1)..(317): Homolog of NCBI NO: 32966053 NR Description: iron transporter Fe2 [Oryza sativa (japonica
  misc_feature (1)..(144): Homolog of NCBI NO: 40888860 NR Description: TPA: putative ZIP-like protein
  misc_feature (123)..(317): Homolog of NCBI NO: 40888860 NR Description: TPA: putative ZIP-like protein
  misc_feature (1)..(317): Homolog of NCBI NO: 32492894 NR Description: zinc transporter ZIP3 [Oryza sativa (japonica
MKLKLVAIASILTAGAAGVLVPVLGRSMAALRPDGDIFFAVKAFAAGVILATGMVHILPAAFDGLTSPCIHKGGGDRNGFPFAGLVAMSAAMATMVIDSLAAGYYRRSHFSKARPLDNIDMPGDEEGRADHPHMHAHGHSHGEAIVVSSPEEAAIADTIRHRVVSQVLELGILVHSVIIGVSLGASVRPSTIKPLVGALSFHQFFEGIGLGGCIVQANFKVRATIIMATFFSLTAPVGIVLGIAISSSYNVHSSTAFIIEGVFNSASAGILIYMSLVDLLATDFNNPKLQTNTKLQLMTYLALFLGAGMMSMLAIWA

SEQ ID NO: 64647 - protein, 290 aa, Triticum aestivum
  peptide (1)..(290): Ceres Seq. ID no. 13579921
  misc_feature (1)..(287): Pfam Name: ZIP Zinc transporter Pfam Description: ZIP Zinc transporter
  misc_feature (1)..(290): Homolog of NCBI NO: 15220470 NR Description: metal transporter, putative (ZIP5) [Arabidopsis
  misc_feature (1)..(290): Homolog of NCBI NO: 15230588 NR Description: zinc transporter (ZIP1) [Arabidopsis thaliana]
  misc_feature (1)..(290): Homolog of NCBI NO: 30841912 NR Description: putative zinc transporter OsZIP2 [Oryza sativa]
  misc_feature (1)..(290): Homolog of NCBI NO: 34900456 NR Description: putative zinc transporter protein ZIP1
  misc_feature (1)..(290): Homolog of NCBI NO: 32966053 NR Description: iron transporter Fe2 [Oryza sativa (japonica
  misc_feature (1)..(117): Homolog of NCBI NO: 40888860 NR Description: TPA: putative ZIP-like protein
  misc_feature (96)..(290): Homolog of NCBI NO: 40888860 NR Description: TPA: putative ZIP-like protein
  misc_feature (1)..(290): Homolog of NCBI NO: 32492894 NR Description: zinc transporter ZIP3 [Oryza sativa (japonica
MAALRPDGDIFFAVKAFAAGVILATGMVHILPAAFDGLTSPCIHKGGGDRNGFPFAGLVAMSAAMATMVIDSLAAGYYRRSHFSKARPLDNIDMPGDEEGRADHPHMHAHGHSHGEAIVVSSPEEAAIADTIRHRVVSQVLELGILVHSVIIGVSLGASVRPSTIKPLVGALSFHQFFEGIGLGGCIVQANFKVRATIIMATFFSLTAPVGIVLGIAISSSYNVHSSTAFIIEGVFNSASAGILIYMSLVDLLATDFNNPKLQTNTKLQLMTYLALFLGAGMMSMLAIWA

SEQ ID NO: 64648 - DNA, 1499 bp, Triticum aestivum
  misc_feature (1)..(1499): Ceres Seq. ID no. 13597498
ctctcacacggctttccctctctctcctcccgttcgaactaggaatccgaggtgagcacgggcaaagcgatggccgcggccaggccgcaccacagggcgccgccggggcgcgtgcccacgaggtgcgtcgccgcgctctgcgccgcctgcttcctcctcggcgtctgcgtcgtcaaccgctactgggcggttcccgagccacccgattgcccaagcaaggcgaactctgggcgttcgagggccgtgctgagccaagcacaaacccgcgaagtcatcatcgcgttggacagaacgatatcggacatcgagatgcgcctggccgccgccagagccgcgcagatgaggaaccaaggcgtgtcgccgagtgattcagccgctgaccagggaaacatgcgacctagattgcttttcgtcatgggtatcatgaccacattcgataatcggaggcgcagagactctatcaggaagacgtggatgccacaaggtgagcgtttgcgaatgctggagaaggacaagggcattgtcacgcgttttgttattggacgaagtgcaaatcctggtcctgacagtgaagtggagcgtgccatggatgcagaagagaaagaatacaatgatattcttagacttaatcacgttgaaggccaggatgggcttcctttgaagattcagatgtttctttcaagtgctctgtccacgtgggatgctgatttctatgtcaaagttgacgatgatgttcatgtcaacattggtattaccagatcgattttggcacgacataggtcaaaacctcgggtgtacatcggctgcatgaaatccggacctgtgatcgctaacaatgaatctaaatattacgaaccagatcattggaagtttgggactgcgggtaacaactactttaggcacgcaacacggcagctgtatgctataacaagggacttggcgacctacatatcagcaaacaagcatatcttgcacaaatatacaaatgaagatgtatcatttggttcttggttgattgggttggatgttgagcatgttgatgagagaagcctttgttgtggtattcctccagactgcgaatggaaggcgcaggctgggaacccatgtggggcatccttcgactggaactgctccggcgtctgcaatccagcagagagaatggaggaggtgcaccggcgatgctgggaacatcgcgaggctgctctgccacaagcgcaggagtcttgacaatcaaggggtggtggcatccttgtgctgctccatgtaaactcatgtaaattattcggtagacgaagacgcagcagctgtcgtgccgttgtctgggttcttggagctacacatttttgccttccgacgccgtgcatttgcatgaattggaggggaaatttgaacagagctacggcatagtgaaggttttgcatcgtgtatgtaagatatccgatatgtgaaaatgaatgcaggaaagctctgcaaattgtgtcgtcatgattaaatggtcg

SEQ ID NO: 64649 - protein, 385 aa, Triticum aestivum
  peptide (1)..(385): Ceres Seq. ID no. 13597499
  misc_feature (126)..(326): Pfam Name: Galactosyltransferase Pfam Description: Galactosyltransferase
  misc_feature (64)..(373): Homolog of NCBI NO: 12323294 NR Description: putative (Avr9) elicitor response protein;
  misc_feature (64)..(377): Homolog of NCBI NO: 18395060 NR Description: galactosyltransferase family [Arabidopsis
  misc_feature (43)..(379): Homolog of NCBI NO: 18416895 NR Description: galactosyltransferase family [Arabidopsis
  misc_feature (43)..(379): Homolog of NCBI NO: 7485336 NR Description: hypothetical protein F10M23.280 - Arabidopsis
  misc_feature (63)..(377): Homolog of NCBI NO: 15225684 NR Description: galactosyltransferase family [Arabidopsis
  misc_feature (5)..(377): Homolog of NCBI NO: 34907342 NR Description: putative elicitor response protein
  misc_feature (46)..(373): Homolog of NCBI NO: 15217544 NR Description: galactosyltransferase family [Arabidopsis
  misc_feature (47)..(377): Homolog of NCBI NO: 15220440 NR Description: galactosyltransferase family [Arabidopsis
  misc_feature (46)..(377): Homolog of NCBI NO: 4138265 NR Description: Avr9 elicitor response protein [Nicotiana tabacum]
  misc_feature (46)..(373): Homolog of NCBI NO: 15223337 NR Description: galactosyltransferase family [Arabidopsis
MAAARPHHRAPPGRVPTRCVAALCAACFLLGVCVVNRYWAVPEPPDCPSKANSGRSRAVLSQAQTREVIIALDRTISDIEMRLAAARAAQMRNQGVSPSDSAADQGNMRPRLLFVMGIMTTFDNRRRRDSIRKTWMPQGERLRMLEKDKGIVTRFVIGRSANPGPDSEVERAMDAEEKEYNDILRLNHVEGQDGLPLKIQMFLSSALSTWDADFYVKVDDDVHVNIGITRSILARHRSKPRVYIGCMKSGPVIANNESKYYEPDHWKFGTAGNNYFRHATRQLYAITRDLATYISANKHILHKYTNEDVSFGSWLIGLDVEHVDERSLCCGIPPDCEWKAQAGNPCGASFDWNCSGVCNPAERMEEVHRRCWEHREAALPQAQES

SEQ ID NO: 64650 - protein, 305 aa, Triticum aestivum
  peptide (1)..(305): Ceres Seq. ID no. 13597500
  misc_feature (46)..(246): Pfam Name: Galactosyltransferase Pfam Description: Galactosyltransferase
  misc_feature (1)..(293): Homolog of NCBI NO: 12323294 NR Description: putative (Avr9) elicitor response protein;
  misc_feature (1)..(297): Homolog of NCBI NO: 18395060 NR Description: galactosyltransferase family [Arabidopsis
  misc_feature (1)..(299): Homolog of NCBI NO: 18416895 NR Description: galactosyltransferase family [Arabidopsis
  misc_feature (1)..(299): Homolog of NCBI NO: 7485336 NR Description: hypothetical protein F10M23.280 - Arabidopsis
  misc_feature (1)..(297): Homolog of NCBI NO: 15225684 NR Description: galactosyltransferase family [Arabidopsis
  misc_feature (1)..(297): Homolog of NCBI NO: 34907342 NR Description: putative elicitor response protein
  misc_feature (1)..(293): Homolog of NCBI NO: 15217544 NR Description: galactosyltransferase family [Arabidopsis
  misc_feature (1)..(297): Homolog of NCBI NO: 15220440 NR Description: galactosyltransferase family [Arabidopsis
  misc_feature (1)..(297): Homolog of NCBI NO: 4138265 NR Description: Avr9 elicitor response protein [Nicotiana tabacum]
  misc_feature (1)..(293): Homolog of NCBI NO: 15223337 NR Description: galactosyltransferase family [Arabidopsis
MRLAAARAAQMRNQGVSPSDSAADQGNMRPRLLFVMGIMTTFDNRRRRDSIRKTWMPQGERLRMLEKDKGIVTRFVIGRSANPGPDSEVERAMDAEEKEYNDILRLNHVEGQDGLPLKIQMFLSSALSTWDADFYVKVDDDVHVNIGITRSILARHRSKPRVYIGCMKSGPVIANNESKYYEPDHWKFGTAGNNYFRHATRQLYAITRDLATYISANKHILHKYTNEDVSFGSWLIGLDVEHVDERSLCCGIPPDCEWKAQAGNPCGASFDWNCSGVCNPAERMEEVHRRCWEHREAALPQAQES

SEQ ID NO: 64651 - protein, 295 aa, Triticum aestivum
  peptide (1)..(295): Ceres Seq. ID no. 13597501
  misc_feature (36)..(236): Pfam Name: Galactosyltransferase Pfam Description: Galactosyltransferase
  misc_feature (1)..(283): Homolog of NCBI NO: 12323294 NR Description: putative (Avr9) elicitor response protein;
  misc_feature (1)..(287): Homolog of NCBI NO: 18395060 NR Description: galactosyltransferase family [Arabidopsis
  misc_feature (1)..(289): Homolog of NCBI NO: 18416895 NR Description: galactosyltransferase family [Arabidopsis
  misc_feature (1)..(289): Homolog of NCBI NO: 7485336 NR Description: hypothetical protein F10M23.280 - Arabidopsis
  misc_feature (1)..(287): Homolog of NCBI NO: 15225684 NR Description: galactosyltransferase family [Arabidopsis
  misc_feature (1)..(287): Homolog of NCBI NO: 34907342 NR Description: putative elicitor response protein
  misc_feature (1)..(283): Homolog of NCBI NO: 15217544 NR Description: galactosyltransferase family [Arabidopsis
  misc_feature (1)..(287): Homolog of NCBI NO: 15220440 NR Description: galactosyltransferase family [Arabidopsis
  misc_feature (1)..(287): Homolog of NCBI NO: 4138265 NR Description: Avr9 elicitor response protein [Nicotiana tabacum]
  misc_feature (1)..(283): Homolog of NCBI NO: 15223337 NR Description: galactosyltransferase family [Arabidopsis
MRNQGVSPSDSAADQGNMRPRLLFVMGIMTTFDNRRRRDSIRKTWMPQGERLRMLEKDKGIVTRFVIGRSANPGPDSEVERAMDAEEKEYNDILRLNHVEGQDGLPLKIQMFLSSALSTWDADFYVKVDDDVHVNIGITRSILARHRSKPRVYIGCMKSGPVIANNESKYYEPDHWKFGTAGNNYFRHATRQLYAITRDLATYISANKHILHKYTNEDVSFGSWLIGLDVEHVDERSLCCGIPPDCEWKAQAGNPCGASFDWNCSGVCNPAERMEEVHRRCWEHREAALPQAQES

SEQ ID NO: 64652 - DNA, 1230 bp, Triticum aestivum
  misc_feature (1)..(1230): Ceres Seq. ID no. 13590233
tcgagatctccccacgggccaaggccaggagccaacaaacgcaaggccaccgccgcctctgcgcctccgcagtcgccgttctgcgcccttgcccgccaccgcccggagagatggcgaaggcgttttacgcggtgggtttctggatccgggagaccggtcaggccctcgaccgcctcggctgtcgcctccaggggaactacttcttccacgagcagatttcaaggcatcgcacacttatgaacatctttgacaaagcccctcatgttcacaaagaggcatttgtcgctccaagtgcatcccttattggcgatgttgaagttgggcaagggtcttcaatttggtacggatgcattttaagaggtgatgcaaataacgttcaagttggatctgagaccaatatacaggacaattctgttgtgcatgtggcaaaatctaatctaagtggaaaagtctttccaactatcattggagacaatgtcacagtagggcatagtgctgtattacaaggatgcactgttgaggatgaagcttttgttggtatgggggctaccctgttagatggtgttgttgtggaaaagcatgggatggtcgctgctggagcccttgtaagacagaacacgaggatcccttgtggagaggtatggggtggaaaccctgcaaaatttctgaggaagctcacagacgaggagatcgcttttattgcggaatcagctgccaactattccaacttagccaaggcacatgctgttgagaatgctaaacccttggaaaagattgattttgagaaagtgctgcgcaagaaatttgctcaccaggacaatgaacacgattccatgcttagtgtcactcgagaggtccctccagagctggcgccccccagtcctactcctgcccaataagcttttcttatcaccaccttcagtttggattcttatatctctatctgtccagtgagtttggcagtttacttttacttaagtaattttgggtcgagcaatgttctaaagctgaccatgcacttcaatttctgtattccatatgttcaagatccatggaacaaatagatccatttcgcacaaatttaccagtagcatgcgctgcgtgcatagtttactctggctgaaattgcgagatgcactggaggcagcacatgaactgttggcctgtagttaaatgcttaattgaataaatattttgataacaaaaagtactgaaggacaaattttattg

SEQ ID NO: 64653 - protein, 298 aa, Triticum aestivum
  peptide (1)..(298): Ceres Seq. ID no. 13590234
  misc_feature (86)..(257): Homolog of NCBI NO: 40218049 NR Description: putative gamma carbonic anhydrase [Chlamydomonas
  misc_feature (79)..(279): Homolog of NCBI NO: 10177532 NR Description: ferripyochelin-binding protein-like [Arabidopsis
  misc_feature (72)..(293): Homolog of NCBI NO: 8778427 NR Description: F18O14.34 [Arabidopsis thaliana]
  misc_feature (35)..(279): Homolog of NCBI NO: 18425082 NR Description: transferase hexapeptide repeat family
  misc_feature (35)..(298): Homolog of NCBI NO: 34904754 NR Description: putative transcription factor APFI
  misc_feature (35)..(292): Homolog of NCBI NO: 13507025 NR Description: transcription factor APFI [Arabidopsis thaliana]
  misc_feature (35)..(292): Homolog of NCBI NO: 15220153 NR Description: transferase hexapeptide repeat family
  misc_feature (35)..(293): Homolog of NCBI NO: 21537242 NR Description: unknown [Arabidopsis thaliana]
  misc_feature (35)..(293): Homolog of NCBI NO: 18394761 NR Description: transferase hexapeptide repeat family
  misc_feature (37)..(293): Homolog of NCBI NO: 34902506 NR Description: P0581F09.11 [Oryza sativa (japonica
EISPRAKARSQQTQGHRRLCASAVAVLRPCPPPPGEMAKAFYAVGFWIRETGQALDRLGCRLQGNYFFHEQISRHRTLMNIFDKAPHVHKEAFVAPSASLIGDVEVGQGSSIWYGCILRGDANNVQVGSETNIQDNSVVHVAKSNLSGKVFPTIIGDNVTVGHSAVLQGCTVEDEAFVGMGATLLDGVVVEKHGMVAAGALVRQNTRIPCGEVWGGNPAKFLRKLTDEEIAFIAESAANYSNLAKAHAVENAKPLEKIDFEKVLRKKFAHQDNEHDSMLSVTREVPPELAPPSPTPAQ

SEQ ID NO: 64654 - protein, 262 aa, Triticum aestivum
  peptide (1)..(262): Ceres Seq. ID no. 13590235
  misc_feature (50)..(221): Homolog of NCBI NO: 40218049 NR Description: putative gamma carbonic anhydrase [Chlamydomonas
  misc_feature (43)..(243): Homolog of NCBI NO: 10177532 NR Description: ferripyochelin-binding protein-like [Arabidopsis
  misc_feature (36)..(257): Homolog of NCBI NO: 8778427 NR Description: F18O14.34 [Arabidopsis thaliana]
  misc_feature (1)..(243): Homolog of NCBI NO: 18425082 NR Description: transferase hexapeptide repeat family
  misc_feature (1)..(262): Homolog of NCBI NO: 34904754 NR Description: putative transcription factor APFI
  misc_feature (1)..(256): Homolog of NCBI NO: 13507025 NR Description: transcription factor APFI [Arabidopsis thaliana]
  misc_feature (1)..(256): Homolog of NCBI NO: 15220153 NR Description: transferase hexapeptide repeat family
  misc_feature (1)..(257): Homolog of NCBI NO: 21537242 NR Description: unknown [Arabidopsis thaliana]
  misc_feature (1)..(257): Homolog of NCBI NO: 18394761 NR Description: transferase hexapeptide repeat family
  misc_feature (1)..(257): Homolog of NCBI NO: 34902506 NR Description: P0581F09.11 [Oryza sativa (japonica
MAKAFYAVGFWIRETGQALDRLGCRLQGNYFFHEQISRHRTLMNIFDKAPHVHKEAFVAPSASLIGDVEVGQGSSIWYGCILRGDANNVQVGSETNIQDNSVVHVAKSNLSGKVFPTIIGDNVTVGHSAVLQGCTVEDEAFVGMGATLLDGVVVEKHGMVAAGALVRQNTRIPCGEVWGGNPAKFLRKLTDEEIAFIAESAANYSNLAKAHAVENAKPLEKIDFEKVLRKKFAHQDNEHDSMLSVTREVPPELAPPSPTPAQ

SEQ ID NO: 64655 - protein, 220 aa, Triticum aestivum
  peptide (1)..(220): Ceres Seq. ID no. 13590236
  misc_feature (8)..(179): Homolog of NCBI NO: 40218049 NR Description: putative gamma carbonic anhydrase [Chlamydomonas
  misc_feature (1)..(201): Homolog of NCBI NO: 10177532 NR Description: ferripyochelin-binding protein-like [Arabidopsis
  misc_feature (1)..(215): Homolog of NCBI NO: 8778427 NR Description: F18O14.34 [Arabidopsis thaliana]
  misc_feature (1)..(201): Homolog of NCBI NO: 18425082 NR Description: transferase hexapeptide repeat family
  misc_feature (1)..(220): Homolog of NCBI NO: 34904754 NR Description: putative transcription factor APFI
  misc_feature (1)..(214): Homolog of NCBI NO: 13507025 NR Description: transcription factor APFI [Arabidopsis thaliana]
  misc_feature (1)..(214): Homolog of NCBI NO: 15220153 NR Description: transferase hexapeptide repeat family
  misc_feature (1)..(215): Homolog of NCBI NO: 21537242 NR Description: unknown [Arabidopsis thaliana]
  misc_feature (1)..(215): Homolog of NCBI NO: 18394761 NR Description: transferase hexapeptide repeat family
  misc_feature (1)..(215): Homolog of NCBI NO: 34902506 NR Description: P0581F09.11 [Oryza sativa (japonica
MNIFDKAPHVHKEAFVAPSASLIGDVEVGQGSSIWYGCILRGDANNVQVGSETNIQDNSVVHVAKSNLSGKVFPTIIGDNVTVGHSAVLQGCTVEDEAFVGMGATLLDGVVVEKHGMVAAGALVRQNTRIPCGEVWGGNPAKFLRKLTDEEIAFIAESAANYSNLAKAHAVENAKPLEKIDFEKVLRKKFAHQDNEHDSMLSVTREVPPELAPPSPTPAQ

SEQ ID NO: 64656 - DNA, 1300 bp, Triticum aestivum
  misc_feature (1)..(1300): Ceres Seq. ID no. 12617675
aaccacagttcacacggcgcacggcgagctcagtacagtacagcgaggggaaggagcactggggggacagtagctagcgttgcgagttccccggccaatggcaatggcgtggtggaagaacggcgccttggtcgccgcggcgaccctcgccgtggccgcggtggtctgcgccggcgtggcggcggcggcgagcaagttcgacgacgtggtgcagcccagctgggccaacgaccacgtcctctacgaggatgacctcctcaagctccgcctcgacagctcctccggcgggggattcgcgtccaagaacaagttcttgtacggcaaggccaccgccgacctgaagctcgtgccgggggactccgccggcgtcgtcacggctttctatctgtcgtcggcgggggacaagcacaacgagttcgacttcgagttcctgggcaacgtcaccggcgagccgtacctggtgcagaccaacctgtacatcgacggcgtgggcaacccgggagcagcgcatcgacctctggttcgaccccaccgccgacttccacacctacgccgtgctctggaaccccagccaggtcgtcttcctcgtcgacgacacccccatccgcgtctacgacaacaagaacgcctccgccaccaagcccaagggccaccaccgccaccccaacaacgccaccaccgccgccacccagacggcgtccgcgttcccgtcgccgcagcccatggccgtgtacagctccatctggaacgcggacgactgggccacgcgcggcgggctggtcaagacggactggtcgcacgcgccgttcgtggccaccttccgggacgtgcgcgtggagggctgcgcctgggccgccaacgcctccgactcggacgccggcgaggtggcgcgctgcagcggcagctcctggggcaaggagggccgctactggtggaaggagaaggacatgcaggagctgtccgtgcaccagagccaccagctggtgtgggcgcgcgcgcaccacctcgtctacgactactgcgtcgacaccgaccgcttccccgtccagccgcccgagtgcgccggccgctgatccgccgcgtcgtcgccggccgcctccatggaaatcttttattagcactccgtagaatggatccatgacatcgatggatcgtcgtagctgctcgtttcagtttcgatttaggtccgtagcctctccgatgagcttcgatcgtgtttgctatctctgccttgcagttctcttgttcttgttgttatgttggggtgtcctgtataaattcgtccgtggaagtgatgctc

SEQ ID NO: 64657 - protein, 347 aa, Triticum aestivum
  peptide (1)..(347): Ceres Seq. ID no. 12617676
  misc_feature (34)..(133): Pfam Name: Glycosyl hydrolases family 16 Pfam Description: Glycosyl hydrolases family 16
  misc_feature (17)..(133): Homolog of NCBI NO: 7447416 NR Description: xyloglucan endo-1,4-beta-D-glucanase (EC 3.2.1.-)
  misc_feature (13)..(133): Homolog of NCBI NO: 1885310 NR Description: Endoxyloglucan transferase (EXT) [Hordeum vulgare
  misc_feature (17)..(133): Homolog of NCBI NO: 3043422 NR Description: endoxyloglucan transferase [Cicer arietinum]
  misc_feature (17)..(133): Homolog of NCBI NO: 22947847 NR Description: xyloglucan endotransglycosylase [Malus x
  misc_feature (16)..(133): Homolog of NCBI NO: 950299 NR Description: xyloglucan endotransglycosylase precursor
  misc_feature (17)..(133): Homolog of NCBI NO: 27228078 NR Description: xyloglucan endotransglycosylase precursor
  misc_feature (16)..(133): Homolog of NCBI NO: 15240733 NR Description: xyloglucan endotransglycosylase (EXGT-A4)
  misc_feature (13)..(133): Homolog of NCBI NO: 38605539 NR Description: Probable xyloglucan
  misc_feature (11)..(133): Homolog of NCBI NO: 21553878 NR Description: putative xyloglucan endotransglycosylase
  misc_feature (11)..(133): Homolog of NCBI NO: 15236265 NR Description: xyloglucan endotransglycosylase, putative
MAMAWWKNGALVAAATLAVAAVVCAGVAAAASKFDDVVQPSWANDHVLYEDDLLKLRLDSSSGGGFASKNKFLYGKATADLKLVPGDSAGVVTAFYLSSAGDKHNEFDFEFLGNVTGEPYLVQTNLYIDGVGNPGAAHRPLVRPHRRLPHLRRALEPQPGRLPRRRHPHPRLRQQERLRHQAQGPPPPPQQRHHRRHPDGVRVPVAAAHGRVQLHLERGRLGHARRAGQDGLVARAVRGHLPGRARGGLRLGRQRLRLGRRRGGALQRQLLGQGGPLLVEGEGHAGAVRAPEPPAGVGARAPPRLRLLRRHRPLPRPAARVRRPLIRRVVAGRLHGNLLLALRRMDP

SEQ ID NO: 64658 - protein, 345 aa, Triticum aestivum
  peptide (1)..(345): Ceres Seq. ID no. 12617677
  misc_feature (32)..(131): Pfam Name: Glycosyl hydrolases family 16 Pfam Description: Glycosyl hydrolases family 16
  misc_feature (15)..(131): Homolog of NCBI NO: 7447416 NR Description: xyloglucan endo-1,4-beta-D-glucanase (EC 3.2.1.-)
  misc_feature (11)..(131): Homolog of NCBI NO: 1885310 NR Description: Endoxyloglucan transferase (EXT) [Hordeum vulgare
  misc_feature (15)..(131): Homolog of NCBI NO: 3043422 NR Description: endoxyloglucan transferase [Cicer arietinum]
  misc_feature (15)..(131): Homolog of NCBI NO: 22947847 NR Description: xyloglucan endotransglycosylase [Malus x
  misc_feature (14)..(131): Homolog of NCBI NO: 950299 NR Description: xyloglucan endotransglycosylase precursor
  misc_feature (15)..(131): Homolog of NCBI NO: 27228078 NR Description: xyloglucan endotransglycosylase precursor
  misc_feature (14)..(131): Homolog of NCBI NO: 15240733 NR Description: xyloglucan endotransglycosylase (EXGT-A4)
  misc_feature (11)..(131): Homolog of NCBI NO: 38605539 NR Description: Probable xyloglucan
  misc_feature (9)..(131): Homolog of NCBI NO: 21553878 NR Description: putative xyloglucan endotransglycosylase
  misc_feature (9)..(131): Homolog of NCBI NO: 15236265 NR Description: xyloglucan endotransglycosylase, putative
MAWWKNGALVAAATLAVAAVVCAGVAAAASKFDDVVQPSWANDHVLYEDDLLKLRLDSSSGGGFASKNKFLYGKATADLKLVPGDSAGVVTAFYLSSAGDKHNEFDFEFLGNVTGEPYLVQTNLYIDGVGNPGAAHRPLVRPHRRLPHLRRALEPQPGRLPRRRHPHPRLRQQERLRHQAQGPPPPPQQRHHRRHPDGVRVPVAAAHGRVQLHLERGRLGHARRAGQDGLVARAVRGHLPGRARGGLRLGRQRLRLGRRRGGALQRQLLGQGGPLLVEGEGHAGAVRAPEPPAGVGARAPPRLRLLRRHRPLPRPAARVRRPLIRRVVAGRLHGNLLLALRRMDP

SEQ ID NO: 64659 - DNA, 1750 bp, Triticum aestivum
  misc_feature (1)..(1750): Ceres Seq. ID no. 15169663
cgcgcgccacgccaagcagagcaaacccacgccgccgccgccgccgccgccgccgtcgtattcgcccacgcgcgcacagaagactccactccctcctctcgcagccatggcggtggcggacaaggcggtcgccgggggcggcgaggcccagcagccggagccggagccggagccggccgccgaggcctcaacgttcgccgagctgggcgtctgccgcgagctggtggaggcctgcgacgccatggggtggaagcagcccaccaagatccaggcgggggccatcccccacgccctccaagggagggacgtgattgggctggggcagacggggtcggggaagacgggcgcgttcgcgctgcccatcatccaggcgctgctcgagcaccgccagcccttcttcgcctgcatcatgtcgcccacgagggagctggcgattcagattgcggagcagtttgaggcgttagggtcagctatcggcttggtttgctcagtgcttgttggaggagttgaccggatgcagcaagtgttatccattgcaaaacgtccacatattgtggttggaactcctggccgtcttttggaccatttgaaagatacaaaaggttttagcctaactaaagtgaaatacctggtacttgatgaagctgataaattacttaatttggagttcaaggaatcacttgatgatattctgaaggtcattcctaaagaaaggagaacttaccttttttcagccacaatgaccaaaaaggtaagcaaactgcaacgtgcttgtctcagaaaccctgttaaggtggaagtatcctccaaatattctacagtggacacacttaaacaagagtggtatttcgttcctgcagattactaggattgttatcttgttcatgttctgaatgagttgccagggagcatgatcatgatcttcgtgcggacctgcgagtcaacaagactccttgctctcactttaaggaatcttggttttaaagctctctctatcagtggccagatgagtcaggacaaaagactaggtgctttaaacaagttcaaagcaaaagatttcaacatccttatctgcaccgacgtggcgagtcgtggtcttgacattcaaggagttgatgtggttatgaattatgatattccaatgaattctaaggattatgtccatcgggttggtaggactgcgcgtgcagggcaatcgggatatgccgtctcttttgtgaatcagtatgaggctgagtggtttaagctgattgagcagctccttggaagggaaattcctgaccggaaggtagatatggatgaaatcctgatacttcgtgagcatatatcagattcaaagaggattgcactgacgaaactgagggaggacggtggtcacaagaagagaaggaaggtggcggaggacgacgatgatgaagaagaggaggctccaagaggccaccgacagaaaccgaggtctttcaagaaatcatcaaggcggtgatagcactcgagtgcagataagtcggaacctcctgcctgatgaccagtagaatccgtacataccgctccacctcgcgaaagctatttatcggaattttgtccttagttcgtccgatgcaccagccatattgttagttactaagttgcaccagcgctatctatgctaccttttgtttgaaagtcaggccactttgagcaaatagccagtatttctctgtttgacacaagattttacatctaatctatatgaatatttcacctttacatc

SEQ ID NO: 64660 - protein, 288 aa, Triticum aestivum
  peptide (1)..(288): Ceres Seq. ID no. 15169664
  misc_feature (76)..(280): Pfam Name: DEAD/DEAH box helicase Pfam Description: DEAD/DEAH box helicase
  misc_feature (52)..(288): Homolog of NCBI NO: 32406488 NR Description: hypothetical protein [Neurospora crassa]
  misc_feature (48)..(288): Homolog of NCBI NO: 16549139 NR Description: unnamed protein product [Homo sapiens]
  misc_feature (48)..(288): Homolog of NCBI NO: 20149629 NR Description: DEAD (Asp-Glu-Ala-Asp) box polypeptide 47;
  misc_feature (48)..(288): Homolog of NCBI NO: 11121196 NR Description: DEAD box protein [Homo sapiens]
  misc_feature (43)..(288): Homolog of NCBI NO: 27229058 NR Description: DEAD (Asp-Glu-Ala-Asp) box polypeptide 47 [Mus
  misc_feature (64)..(288): Homolog of NCBI NO: 26450667 NR Description: putative replication protein A1 [Arabidopsis
  misc_feature (64)..(288): Homolog of NCBI NO: 21593647 NR Description: replication protein A1-like [Arabidopsis thaliana]
  misc_feature (64)..(288): Homolog of NCBI NO: 18424420 NR Description: DEAD/DEAH box helicase, putative [Arabidopsis
  misc_feature (48)..(288): Homolog of NCBI NO: 34899100 NR Description: ATP-dependent helicase pitchoune
  misc_feature (36)..(288): Homolog of NCBI NO: 31126733 NR Description: putative RNA helicase [Oryza sativa (japonica
ARHAKQSKPTPPPPPPPPSYSPTRAQKTPLPPLAAMAVADKAVAGGGEAQQPEPEPEPAAEASTFAELGVCRELVEACDAMGWKQPTKIQAGAIPHALQGRDVIGLGQTGSGKTGAFALPIIQALLEHRQPFFACIMSPTRELAIQIAEQFEALGSAIGLVCSVLVGGVDRMQQVLSIAKRPHIVVGTPGRLLDHLKDTKGFSLTKVKYLVLDEADKLLNLEFKESLDDILKVIPKERRTYLFSATMTKKVSKLQRACLRNPVKVEVSSKYSTVDTLKQEWYFVPADY

SEQ ID NO: 64661 - protein, 253 aa, Triticum aestivum
  peptide (1)..(253): Ceres Seq. ID no. 15169665
  misc_feature (41)..(245): Pfam Name: DEAD/DEAH box helicase Pfam Description: DEAD/DEAH box helicase
  misc_feature (17)..(253): Homolog of NCBI NO: 32406488 NR Description: hypothetical protein [Neurospora crassa]
  misc_feature (13)..(253): Homolog of NCBI NO: 16549139 NR Description: unnamed protein product [Homo sapiens]
  misc_feature (13)..(253): Homolog of NCBI NO: 20149629 NR Description: DEAD (Asp-Glu-Ala-Asp) box polypeptide 47;
  misc_feature (13)..(253): Homolog of NCBI NO: 11121196 NR Description: DEAD box protein [Homo sapiens]
  misc_feature (8)..(253): Homolog of NCBI NO: 27229058 NR Description: DEAD (Asp-Glu-Ala-Asp) box polypeptide 47 [Mus
  misc_feature (29)..(253): Homolog of NCBI NO: 26450667 NR Description: putative replication protein A1 [Arabidopsis
  misc_feature (29)..(253): Homolog of NCBI NO: 21593647 NR Description: replication protein A1-like [Arabidopsis thaliana]
  misc_feature (29)..(253): Homolog of NCBI NO: 18424420 NR Description: DEAD/DEAH box helicase, putative [Arabidopsis
  misc_feature (13)..(253): Homolog of NCBI NO: 34899100 NR Description: ATP-dependent helicase pitchoune
  misc_feature (1)..(253): Homolog of NCBI NO: 31126733 NR Description: putative RNA helicase [Oryza sativa (japonica
MAVADKAVAGGGEAQQPEPEPEPAAEASTFAELGVCRELVEACDAMGWKQPTKIQAGAIPHALQGRDVIGLGQTGSGKTGAFALPIIQALLEHRQPFFACIMSPTRELAIQIAEQFEALGSAIGLVCSVLVGGVDRMQQVLSIAKRPHIVVGTPGRLLDHLKDTKGFSLTKVKYLVLDEADKLLNLEFKESLDDILKVIPKERRTYLFSATMTKKVSKLQRACLRNPVKVEVSSKYSTVDTLKQEWYFVPADY

SEQ ID NO: 64662 - protein, 208 aa, Triticum aestivum
  peptide (1)..(208): Ceres Seq. ID no. 15169666
  misc_feature (1)..(200): Pfam Name: DEAD/DEAH box helicase Pfam Description: DEAD/DEAH box helicase
  misc_feature (1)..(208): Homolog of NCBI NO: 32406488 NR Description: hypothetical protein [Neurospora crassa]
  misc_feature (1)..(208): Homolog of NCBI NO: 16549139 NR Description: unnamed protein product [Homo sapiens]
  misc_feature (1)..(208): Homolog of NCBI NO: 20149629 NR Description: DEAD (Asp-Glu-Ala-Asp) box polypeptide 47;
  misc_feature (1)..(208): Homolog of NCBI NO: 11121196 NR Description: DEAD box protein [Homo sapiens]
  misc_feature (1)..(208): Homolog of NCBI NO: 27229058 NR Description: DEAD (Asp-Glu-Ala-Asp) box polypeptide 47 [Mus
  misc_feature (1)..(208): Homolog of NCBI NO: 26450667 NR Description: putative replication protein A1 [Arabidopsis
  misc_feature (1)..(208): Homolog of NCBI NO: 21593647 NR Description: replication protein A1-like [Arabidopsis thaliana]
  misc_feature (1)..(208): Homolog of NCBI NO: 18424420 NR Description: DEAD/DEAH box helicase, putative [Arabidopsis
  misc_feature (1)..(208): Homolog of NCBI NO: 34899100 NR Description: ATP-dependent helicase pitchoune
  misc_feature (1)..(208): Homolog of NCBI NO: 31126733 NR Description: putative RNA helicase [Oryza sativa (japonica
MGWKQPTKIQAGAIPHALQGRDVIGLGQTGSGKTGAFALPIIQALLEHRQPFFACIMSPTRELAIQIAEQFEALGSAIGLVCSVLVGGVDRMQQVLSIAKRPHIVVGTPGRLLDHLKDTKGFSLTKVKYLVLDEADKLLNLEFKESLDDILKVIPKERRTYLFSATMTKKVSKLQRACLRNPVKVEVSSKYSTVDTLKQEWYFVPADY

SEQ ID NO: 64663 - DNA, 2293 bp, Triticum aestivum
  misc_feature (1)..(2293): Ceres Seq. ID no. 14302243
cccctcccctcccgtgcttctctccaccccgcccccgcgccacagccgaaccctacacccgcgcgcgcgaggggccgccccgatctgcgagatgtggcgcagccgcgtgtcgcggggcctccgggaggccaaggccgccgccgccgccgcgtccaggcgcttctccaccacctcgtcctacacggtggtggatcacacctacgatgcggtcgtggttggcgctggaggcgcggggctcagggccgcgattgggctctcggagcatgggttcaacaccgcctgcatcaccaagctcttccccacgcggtcacataccgtggcagcgcagggaggtataaacgctgctcttggaaacatgagtgaagatgactggaggtggcatatgtatgatacagtcaagggaagtgattggctcggtgaccaagatgctatccagtatatgtgtagagaagcaccaaaggctgttatagagcttgagaactatggattaccattttccagaactgaagatggaaaaatttatcaacgcgcttttggaggccaaagcttagattttggaaaaggtggtcaggcctatcgatgtgcatgcgctgctgacagaacagggcatgctatgctacacacactttatgggcaggcgatgaagcacaatactcagttttttgttgaatattttgcgctggaccttatcatggacaaagaaggcacctgccagggggtaattgcactaaacatggaggatggtacccttcatcgtttccgttcaacaaatactattttagcaacaggaggttatggcagagcttacttctctgctacttcagctcacacatgtactggtgatggcaatgctatggttgcacgtgctgggttaccccttcaggatcttgagtttgtgcagttccatcctacaggcatttacggtgctggatgccttataactgaaggttcccggggcgaaggtggtattcttaggaacagcgaaggtgagaggttcatggaacgatatgcccctaccgctaaagatcttgcatctcgtgatgttgtttcaagatctatgactatggaaattagagaaggacgtggtgtaggaccaatgaaggaccatctctacctgcaccttaatcatcttcctccagaagttctgaaggaaaggcttcctggtatatctgagactgctgctatttttgctggtgttgatgtcaccaaagagcctattcctgttttgccgactgtgcattataatatgggcggtatcccgacaaattatcatgggcaggtggtggatatcaagggtgataacccagacacaattattcctggtctgatggctgctggggaggcagcttgtgcatctgttcatggtgcaaaccgtcttggtgcaaattcacttcttgacattgttgtatttgggagggcttgtgcaaatagggttgctgagatttccaagccaggagagacacagaaacctcttgaaaaagacgcaggggagaagaccattgcttggttggacaagctgagaaatgctaatggatcactgccaacttcgaagatccgcctcaacatgcaacgtattatgcaaaataatgctgcagttttccgcacacaggaaactctaacagaaggttgcgagctgattagtgaagcacagaaaagtttccacgatgtcaagctcagtgacagaagtctcatatggaattcggatttgatagagaccatagaattagaaaacctgctaataaatgcatgcataaccatgcattcagctgaggctcgccaagagagcagaggagctcatgctcgtgaagatttcaagacaagagatgacgacaagtggatgaagcactcgctagggtactgggaggatgaaaaggttagactagaatacaggccagttcacatgaacaccttggatgatgaagtcgagactttcccgccgaaggcacgtgtttactaatccggacaaggctgtcgacgtttcagttgtttgataagggtatagctcacagcgcggtgtcttccgagtagaaataaatttgcaggggccctccattctcccaaagcttcagaactgtaatataatcgggaatcgccaatatactttccctgaccagtgtaaacttgttgaaagcttctgatgattctattttggtcctgtatcacccctttggttggtaggaataaagacgcataccaagttttgaaggtgtttgaatctgtaaataacctttggcgtgagctgtgaacacaatggttcttttgtctattgtggcttctattaagctttaaactt

SEQ ID NO: 64664 - protein, 651 aa, Triticum aestivum
  peptide (1)..(651): Ceres Seq. ID no. 14302244
  misc_feature (167)..(500): Pfam Name: FAD binding domain Pfam Description: FAD binding domain
  misc_feature (57)..(610): Homolog of NCBI NO: 28374211 NR Description: Similar to succinate dehydrogenase complex,
  misc_feature (59)..(651): Homolog of NCBI NO: 27902658 NR Description: succinate dehydrogenase alpha subunit
  misc_feature (40)..(651): Homolog of NCBI NO: 6322701 NR Description: Yeast succinate dehydrogenase (SDH) is a tetramer non-equivalent subunits--Sdh1p, Sdh2p, Sdh3p, Sdh4p--that couples oxidation of succinate to the transfer of electrons to
  misc_feature (52)..(651): Homolog of NCBI NO: 6644394 NR Description: SdhA [Dictyostelium discoideum]
  misc_feature (59)..(651): Homolog of NCBI NO: 23011974 NR Description: hypothetical protein [Magnetospirillum
  misc_feature (57)..(651): Homolog of NCBI NO: 32417808 NR Description: hypothetical protein [Neurospora crassa]
  misc_feature (37)..(651): Homolog of NCBI NO: 19115231 NR Description: probable succinate dehydrogenase flavoprotein
  misc_feature (31)..(651): Homolog of NCBI NO: 15224174 NR Description: succinate dehydrogenase
  misc_feature (31)..(651): Homolog of NCBI NO: 15240075 NR Description: succinate dehydrogenase
  misc_feature (31)..(651): Homolog of NCBI NO: 34394418 NR Description: putative succinate dehydrogenase flavoprotein
PSPPVLLSTPPPRHSRTLHPRARGAAPICEMWRSRVSRGLREAKAAAAAASRRFSTTSSYTVVDHTYDAVVVGAGGAGLRAAIGLSEHGFNTACITKLFPTRSHTVAAQGGINAALGNMSEDDWRWHMYDTVKGSDWLGDQDAIQYMCREAPKAVIELENYGLPFSRTEDGKIYQRAFGGQSLDFGKGGQAYRCACAADRTGHAMLHTLYGQAMKHNTQFFVEYFALDLIMDKEGTCQGVIALNMEDGTLHRFRSTNTILATGGYGRAYFSATSAHTCTGDGNAMVARAGLPLQDLEFVQFHPTGIYGAGCLITEGSRGEGGILRNSEGERFMERYAPTAKDLASRDVVSRSMTMEIREGRGVGPMKDHLYLHLNHLPPEVLKERLPGISETAAIFAGVDVTKEPIPVLPTVHYNMGGIPTNYHGQVVDIKGDNPDTIIPGLMAAGEAACASVHGANRLGANSLLDIVVFGRACANRVAEISKPGETQKPLEKDAGEKTIAWLDKLRNANGSLPTSKIRLNMQRIMQNNAAVFRTQETLTEGCELISEAQKSFHDVKLSDRSLIWNSDLIETIELENLLINACITMHSAEARQESRGAHAREDFKTRDDDKWMKHSLGYWEDEKVRLEYRPVHMNTLDDEVETFPPKARVY

SEQ ID NO: 64665 - protein, 621 aa, Triticum aestivum
  peptide (1)..(621): Ceres Seq. ID no. 14302245
  misc_feature (137)..(470): Pfam Name: FAD binding domain Pfam Description: FAD binding domain
  misc_feature (27)..(580): Homolog of NCBI NO: 28374211 NR Description: Similar to succinate dehydrogenase complex,
  misc_feature (29)..(621): Homolog of NCBI NO: 27902658 NR Description: succinate dehydrogenase alpha subunit
  misc_feature (10)..(621): Homolog of NCBI NO: 6322701 NR Description: Yeast succinate dehydrogenase (SDH) is a tetramer non-equivalent subunits--Sdh1p, Sdh2p, Sdh3p, Sdh4p--that couples oxidation of succinate to the transfer of electrons to
  misc_feature (22)..(621): Homolog of NCBI NO: 6644394 NR Description: SdhA [Dictyostelium discoideum]
  misc_feature (29)..(621): Homolog of NCBI NO: 23011974 NR Description: hypothetical protein [Magnetospirillum
  misc_feature (27)..(621): Homolog of NCBI NO: 32417808 NR Description: hypothetical protein [Neurospora crassa]
  misc_feature (7)..(621): Homolog of NCBI NO: 19115231 NR Description: probable succinate dehydrogenase flavoprotein
  misc_feature (1)..(621): Homolog of NCBI NO: 15224174 NR Description: succinate dehydrogenase
  misc_feature (1)..(621): Homolog of NCBI NO: 15240075 NR Description: succinate dehydrogenase
  misc_feature (1)..(621): Homolog of NCBI NO: 34394418 NR Description: putative succinate dehydrogenase flavoprotein
MWRSRVSRGLREAKAAAAAASRRFSTTSSYTVVDHTYDAVVVGAGGAGLRAAIGLSEHGFNTACITKLFPTRSHTVAAQGGINAALGNMSEDDWRWHMYDTVKGSDWLGDQDAIQYMCREAPKAVIELENYGLPFSRTEDGKIYQRAFGGQSLDFGKGGQAYRCACAADRTGHAMLHTLYGQAMKHNTQFFVEYFALDLIMDKEGTCQGVIALNMEDGTLHRFRSTNTILATGGYGRAYFSATSAHTCTGDGNAMVARAGLPLQDLEFVQFHPTGIYGAGCLITEGSRGEGGILRNSEGERFMERYAPTAKDLASRDVVSRSMTMEIREGRGVGPMKDHLYLHLNHLPPEVLKERLPGISETAAIFAGVDVTKEPIPVLPTVHYNMGGIPTNYHGQVVDIKGDNPDTIIPGLMAAGEAACASVHGANRLGANSLLDIVVFGRACANRVAEISKPGETQKPLEKDAGEKTIAWLDKLRNANGSLPTSKIRLNMQRIMQNNAAVFRTQETLTEGCELISEAQKSFHDVKLSDRSLIWNSDLIETIELENLLINACITMHSAEARQESRGAHAREDFKTRDDDKWMKHSLGYWEDEKVRLEYRPVHMNTLDDEVETFPPKARVY

SEQ ID NO: 64666 - protein, 533 aa, Triticum aestivum
  peptide (1)..(533): Ceres Seq. ID no. 14302246
  misc_feature (49)..(382): Pfam Name: FAD binding domain Pfam Description: FAD binding domain
  misc_feature (1)..(492): Homolog of NCBI NO: 28374211 NR Description: Similar to succinate dehydrogenase complex,
  misc_feature (1)..(533): Homolog of NCBI NO: 27902658 NR Description: succinate dehydrogenase alpha subunit
  misc_feature (1)..(533): Homolog of NCBI NO: 6322701 NR Description: Yeast succinate dehydrogenase (SDH) is a tetramer non-equivalent subunits--Sdh1p, Sdh2p, Sdh3p, Sdh4p--that couples oxidation of succinate to the transfer of electrons to
  misc_feature (1)..(533): Homolog of NCBI NO: 6644394 NR Description: SdhA [Dictyostelium discoideum]
  misc_feature (1)..(533): Homolog of NCBI NO: 23011974 NR Description: hypothetical protein [Magnetospirillum
  misc_feature (1)..(533): Homolog of NCBI NO: 32417808 NR Description: hypothetical protein [Neurospora crassa]
  misc_feature (1)..(533): Homolog of NCBI NO: 19115231 NR Description: probable succinate dehydrogenase flavoprotein
  misc_feature (1)..(533): Homolog of NCBI NO: 15224174 NR Description: succinate dehydrogenase
  misc_feature (1)..(533): Homolog of NCBI NO: 15240075 NR Description: succinate dehydrogenase
  misc_feature (1)..(533): Homolog of NCBI NO: 34394418 NR Description: putative succinate dehydrogenase flavoprotein
MSEDDWRWHMYDTVKGSDWLGDQDAIQYMCREAPKAVIELENYGLPFSRTEDGKIYQRAFGGQSLDFGKGGQAYRCACAADRTGHAMLHTLYGQAMKHNTQFFVEYFALDLIMDKEGTCQGVIALNMEDGTLHRFRSTNTILATGGYGRAYFSATSAHTCTGDGNAMVARAGLPLQDLEFVQFHPTGIYGAGCLITEGSRGEGGILRNSEGERFMERYAPTAKDLASRDVVSRSMTMEIREGRGVGPMKDHLYLHLNHLPPEVLKERLPGISETAAIFAGVDVTKEPIPVLPTVHYNMGGIPTNYHGQVVDIKGDNPDTIIPGLMAAGEAACASVHGANRLGANSLLDIVVFGRACANRVAEISKPGETQKPLEKDAGEKTIAWLDKLRNANGSLPTSKIRLNMQRIMQNNAAVFRTQETLTEGCELISEAQKSFHDVKLSDRSLIWNSDLIETIELENLLINACITMHSAEARQESRGAHAREDFKTRDDDKWMKHSLGYWEDEKVRLEYRPVHMNTLDDEVETFPPKARVY

SEQ ID NO: 64667 - DNA, 2032 bp, Triticum aestivum
  misc_feature (1)..(2032): Ceres Seq. ID no. 12586556
catggccccgccgtcgtcttctcctccccttccggcatgggcggcggcgaacgccctcttccgacgccaccgccgccttctcccgctcctccttcccccggtgtccctctgcgccctcctacccgtcctctcccactgcctcgtttccggcctcgccggcaaccccttcgtcgcctcccgcctcatcctcgcctcctcgcgcctctccctcacattctccctcctcctcctctcccaccttccagcctcttccctctcgcccttctccttcaactcgctcatacgcgcgtcgcctccaggcctcaccctccgcctgttcgaacaaatgcgccgccggggcgttcccacggataactacaccctccccttcttgatccatgcctgttccggcagtgacatggcactgggacagtccctgcacgggaagagcgtccgtcttggttacagctcccacatcttcacgcagacggcgctgatgaacatgtactttgggtgtggcttggctgtttccgccggcagggtgttcgatgaaatgcaggcgagggatgtggttgcatggaccggcatggtctctggttatgtggactctggaatgcaccttcgagctgctgaggtctttaaggagatgagaggcggtgaggaggttacaaggcctaatgtagcaacgttggtgtcggttgcttctgcgtatgccagtcttggctccctggagtatgctaaggggctgcacggctatgtggagaaggtggggttgcgaggcgatttgattctgacgaatgcactgatggatatgtatggaaagtgtggtagcatagagtcagctcgtgctctgtttgatttcatgcatgagaaggacctactttcatggacaacgatgatttcagggttggcttctcatggacatggcaaagaagcggttgctttgtttttaagcatgcgcgaggtgggagtactgccggactcaaccaccttcatcgtggttctgtctgcttgtagccatgctggactggtggatgaggggatatcaatcttcaattccatggcgagtgagtacaaggtcaccccagatattaagcactatggttgcatggtggatcttttcagcagggcaggacttctttcacgtgcttatgagcttattgatagcatgccttttgagccaaacttggcaattcttggagcattgctgagtgcatgcagtgtcaataatgaactggagattggggaactagttctccagaagattgattctgtttgctcctataaaggaggtgctggtgtgcttctgtccaacatctacgctaaccagaacttatggcatgaagttgattccattagaaggaagataagaaatggtaccatacccagaaagccacctggtcagagttcggtggcatcagaagttcctttcatgagtttgtgatttggagcttttagagagaaatccactttgctgtcactgttaaccttgactggcaaaatggctgattttcatgcgaactggtaaggaagtctcatcaattacttttacgacaaggcagcttatgaagtactcccccgttcctaaatatttgtctttttagagattttaaatggactaccacatacggatgtatatagacatattttagagtgtggattcactcattttgcttcgtatgtagtcacttgttgaaatctctagaaagacaaatatttaggaacggagggagtagatatcagcgtattatgtcaaaaaaagtactccctccgagattccagcgtgtcacccattttgttactgtgttgaaattgttgtggcttttactattgagtattaagtagcgagcatattatacctgtggaatcataagcacattgaccgactgaacttctgtttgctttatctaacaggagatgaggtctctcggcagcatatttcgcagattagctttccatagcgcgcacagaaacactaaacttcatacgcaaacttcttcccctcaccaactcccccttatcatttaggagataagacaaagtataccatctc

SEQ ID NO: 64668 - protein, 473 aa, Triticum aestivum
  peptide (1)..(473): Ceres Seq. ID no. 12586557
  misc_feature (257)..(290): Pfam Name: PPR repeat Pfam Description: PPR repeat
  misc_feature (103)..(464): Homolog of NCBI NO: 34897884 NR Description: Similar to Arabidopsis thaliana DNA chromosome 4,
  misc_feature (103)..(464): Homolog of NCBI NO: 34897084 NR Description: hypothetical protein [Oryza sativa (japonica
  misc_feature (83)..(462): Homolog of NCBI NO: 15234006 NR Description: putative protein; protein id: At4g18750.1
  misc_feature (35)..(464): Homolog of NCBI NO: 21780142 NR Description: hypothetical protein [Arabidopsis thaliana]
  misc_feature (35)..(464): Homolog of NCBI NO: 15227067 NR Description: hypothetical protein; protein id: At2g02980.1
  misc_feature (103)..(464): Homolog of NCBI NO: 34911728 NR Description: P0707D10.28 [Oryza sativa (japonica
  misc_feature (35)..(461): Homolog of NCBI NO: 15232648 NR Description: putative protein; protein id: At3g46790.1
  misc_feature (26)..(464): Homolog of NCBI NO: 34393394 NR Description: putative pentatricopeptide (PPR)
  misc_feature (85)..(464): Homolog of NCBI NO: 7486979 NR Description: hypothetical protein T13K14.230 - Arabidopsis
  misc_feature (1)..(464): Homolog of NCBI NO: 29124127 NR Description: hypothetical protein [Oryza sativa (japonica
MAPPSSSPPLPAWAAANALFRRHRRLLPLLLPPVSLCALLPVLSHCLVSGLAGNPFVASRLILASSRLSLTFSLLLLSHLPASSLSPFSFNSLIRASPPGLTLRLFEQMRRRGVPTDNYTLPFLIHACSGSDMALGQSLHGKSVRLGYSSHIFTQTALMNMYFGCGLAVSAGRVFDEMQARDVVAWTGMVSGYVDSGMHLRAAEVFKEMRGGEEVTRPNVATLVSVASAYASLGSLEYAKGLHGYVEKVGLRGDLILTNALMDMYGKCGSIESARALFDFMHEKDLLSWTTMISGLASHGHGKEAVALFLSMREVGVLPDSTTFIVVLSACSHAGLVDEGISIFNSMASEYKVTPDIKHYGCMVDLFSRAGLLSRAYELIDSMPFEPNLAILGALLSACSVNNELEIGELVLQKIDSVCSYKGGAGVLLSNIYANQNLWHEVDSIRRKIRNGTIPRKPPGQSSVASEVPFMSL

SEQ ID NO: 64669 - protein, 365 aa, Triticum aestivum
  peptide (1)..(365): Ceres Seq. ID no. 12586558
  misc_feature (149)..(182): Pfam Name: PPR repeat Pfam Description: PPR repeat
  misc_feature (1)..(356): Homolog of NCBI NO: 34897884 NR Description: Similar to Arabidopsis thaliana DNA chromosome 4,
  misc_feature (1)..(356): Homolog of NCBI NO: 34897084 NR Description: hypothetical protein [Oryza sativa (japonica
  misc_feature (1)..(354): Homolog of NCBI NO: 15234006 NR Description: putative protein; protein id: At4g18750.1
  misc_feature (1)..(356): Homolog of NCBI NO: 21780142 NR Description: hypothetical protein [Arabidopsis thaliana]
  misc_feature (1)..(356): Homolog of NCBI NO: 15227067 NR Description: hypothetical protein; protein id: At2g02980.1
  misc_feature (1)..(356): Homolog of NCBI NO: 34911728 NR Description: P0707D10.28 [Oryza sativa (japonica
  misc_feature (1)..(353): Homolog of NCBI NO: 15232648 NR Description: putative protein; protein id: At3g46790.1
  misc_feature (1)..(356): Homolog of NCBI NO: 34393394 NR Description: putative pentatricopeptide (PPR)
  misc_feature (1)..(356): Homolog of NCBI NO: 7486979 NR Description: hypothetical protein T13K14.230 - Arabidopsis
  misc_feature (1)..(356): Homolog of NCBI NO: 29124127 NR Description: hypothetical protein [Oryza sativa (japonica
MRRRGVPTDNYTLPFLIHACSGSDMALGQSLHGKSVRLGYSSHIFTQTALMNMYFGCGLAVSAGRVFDEMQARDVVAWTGMVSGYVDSGMHLRAAEVFKEMRGGEEVTRPNVATLVSVASAYASLGSLEYAKGLHGYVEKVGLRGDLILTNALMDMYGKCGSIESARALFDFMHEKDLLSWTTMISGLASHGHGKEAVALFLSMREVGVLPDSTTFIVVLSACSHAGLVDEGISIFNSMASEYKVTPDIKHYGCMVDLFSRAGLLSRAYELIDSMPFEPNLAILGALLSACSVNNELEIGELVLQKIDSVCSYKGGAGVLLSNIYANQNLWHEVDSIRRKIRNGTIPRKPPGQSSVASEVPFMSL

SEQ ID NO: 64670 - protein, 341 aa, Triticum aestivum
  peptide (1)..(341): Ceres Seq. ID no. 12586559
  misc_feature (125)..(158): Pfam Name: PPR repeat Pfam Description: PPR repeat
  misc_feature (1)..(332): Homolog of NCBI NO: 34897884 NR Description: Similar to Arabidopsis thaliana DNA chromosome 4,
  misc_feature (1)..(332): Homolog of NCBI NO: 34897084 NR Description: hypothetical protein [Oryza sativa (japonica
  misc_feature (1)..(330): Homolog of NCBI NO: 15234006 NR Description: putative protein; protein id: At4g18750.1
  misc_feature (1)..(332): Homolog of NCBI NO: 21780142 NR Description: hypothetical protein [Arabidopsis thaliana]
  misc_feature (1)..(332): Homolog of NCBI NO: 15227067 NR Description: hypothetical protein; protein id: At2g02980.1
  misc_feature (1)..(332): Homolog of NCBI NO: 34911728 NR Description: P0707D10.28 [Oryza sativa (japonica
  misc_feature (1)..(329): Homolog of NCBI NO: 15232648 NR Description: putative protein; protein id: At3g46790.1
  misc_feature (1)..(332): Homolog of NCBI NO: 34393394 NR Description: putative pentatricopeptide (PPR)
  misc_feature (1)..(332): Homolog of NCBI NO: 7486979 NR Description: hypothetical protein T13K14.230 - Arabidopsis
  misc_feature (1)..(332): Homolog of NCBI NO: 29124127 NR Description: hypothetical protein [Oryza sativa (japonica
MALGQSLHGKSVRLGYSSHIFTQTALMNMYFGCGLAVSAGRVFDEMQARDVVAWTGMVSGYVDSGMHLRAAEVFKEMRGGEEVTRPNVATLVSVASAYASLGSLEYAKGLHGYVEKVGLRGDLILTNALMDMYGKCGSIESARALFDFMHEKDLLSWTTMISGLASHGHGKEAVALFLSMREVGVLPDSTTFIVVLSACSHAGLVDEGISIFNSMASEYKVTPDIKHYGCMVDLFSRAGLLSRAYELIDSMPFEPNLAILGALLSACSVNNELEIGELVLQKIDSVCSYKGGAGVLLSNIYANQNLWHEVDSIRRKIRNGTIPRKPPGQSSVASEVPFMSL

SEQ ID NO: 64671 - DNA, 1201 bp, Triticum aestivum
  misc_feature (1)..(1201): Ceres Seq. ID no. 13598595
gaaattggcgccacctccctcccgtgctcgcccctcgcctgggctctcgacccatccctgctcgaaccctaacctcagatggcgcttcccgcgtgagagaacgctgccgcggcagcagcgttgaggggggcttcgtcgtagtcagcgcgacagatgtataagcagggggcggccggaggtgcggggccggaccggaagcgcatcagcgacgcgctcgataagcacctggagaaggcggccgcgtcgccctccacgtcgagaggctcggcgggtgcccgaggcaaccacaaccgcgtcgtagtgccgtcctccatccccaagggccgctgctccgaaggggagtctgaatctgacagtgaagcatcagatgttagtggctctgatggagaagacacctcatggatttcatggtattgcaacctaagagggaatgagttcttctgtgaagtcgatgatgattacattcaagatgacttcaatctttgtgggcttagcagtcaagttccatattatgattatgctcttgatctcattttagatatcgagtcttctcatggtgatattttcacagaagaacaaaatgagctagtggaatcagctgctgagatgttgtatgggctaattcatgcgcgatacattctgaccagtaaagggttggctgctatgctggagaaatacaagaactatgactttggacgatgtccacgggtttattgctgtggccaaccatgtctaccagttggacaatcggatattcaccgatctagtacagtgaagatatactgtcctaagtgcgaagacatctactatccacggtctaaataccaaggcaatattgatggagcctactttgggacaacatttcctcacctgtttctgatgacgtacgatcacctcaagccccagaagccctcgcagcgctatgttcctcgcgtatttggcttcaagctccacaaccacaagccatgatgcggaggtgaaggaaaagataagaggccccggaagactactgtaagagtgcaatcgccagatcatgctgcccacccatattgtgtgccctgtctggtctatttaacattgaaatattggtataaaagaagacatgagacgatgttgtaacctaattccagctctactggctagtaaatctggacctctgtttccaaaaccagcagctatcgagaaatcaaagttatggtcg

SEQ ID NO: 64672 - protein, 271 aa, Triticum aestivum
  peptide (1)..(271): Ceres Seq. ID no. 13598596
  misc_feature (79)..(257): Pfam Name: Casein kinase II regulatory subunit Pfam Description: Casein kinase II regulatory subunit
  misc_feature (13)..(271): Homolog of NCBI NO: 15238013 NR Description: casein kinase II beta chain, putative
  misc_feature (1)..(271): Homolog of NCBI NO: 15236597 NR Description: casein kinase II beta chain, putative
  misc_feature (8)..(268): Homolog of NCBI NO: 30689795 NR Description: casein kinase II beta chain, putative
  misc_feature (8)..(268): Homolog of NCBI NO: 15224934 NR Description: casein kinase II beta chain, putative
  misc_feature (13)..(271): Homolog of NCBI NO: 11527002 NR Description: protein kinase CK2 regulatory subunit CK2B2 [Zea
  misc_feature (2)..(267): Homolog of NCBI NO: 37536920 NR Description: putative casein kinase II beta subunit
  misc_feature (11)..(267): Homolog of NCBI NO: 21261784 NR Description: protein kinase Ck2 regulatory subunit 2
  misc_feature (31)..(271): Homolog of NCBI NO: 29367573 NR Description: possible protein kinase CK2 regulatory subunit
  misc_feature (5)..(271): Homolog of NCBI NO: 34901776 NR Description: OJ1058_B11.17 [Oryza sativa (japonica
  misc_feature (1)..(271): Homolog of NCBI NO: 11527004 NR Description: protein kinase CK2 regulatory subunit CK2B3 [Zea
MYKQGAAGGAGPDRKRISDALDKHLEKAAASPSTSRGSAGARGNHNRVVVPSSIPKGRCSEGESESDSEASDVSGSDGEDTSWISWYCNLRGNEFFCEVDDDYIQDDFNLCGLSSQVPYYDYALDLILDIESSHGDIFTEEQNELVESAAEMLYGLIHARYILTSKGLAAMLEKYKNYDFGRCPRVYCCGQPCLPVGQSDIHRSSTVKIYCPKCEDIYYPRSKYQGNIDGAYFGTTFPHLFLMTYDHLKPQKPSQRYVPRVFGFKLHNHKP

SEQ ID NO: 64673 - DNA, 1046 bp, Triticum aestivum
  misc_feature (1)..(1046): Ceres Seq. ID no. 13597570
actctccgatcgttcccttcgcctatctgcaggtctgcatccacacaacacaagcccacgcccacgcccacgcccacgcgcccccaaacccaaaaccctaccacgcctccgcgcccatggcccctaccgcgccgcagccgccccgcccctccgccgccgccccctccgcggcgccggtcgacgcgctcttcctccagaacctgatgaaccgcgtccagctccgcccgcccttcctcgacaccaactccttcctcacccaggacctcgacgacttcctcctcaacgagttcgccgcgctctccgccgcggcgggcgagtcctacgacgacgacgacgacgacgaagaaggggaggacggcggcctctccgacggggaggcctccggggaggccaggcggcgccggatgctctcgcgggaggaggccaagctggagaaggagatcgtccggatggtgctcgccggcgacggggacgcccttaagcccaactcgggccagtccgtcgccgtcggcgaccaccacgtgtgcgtcggcttccacgacgaggccggtggggagtaccgcgtgtgggagtggcacggccacgtcatgctctttgacgacgaggacggctactccgccgagtacatctacgggaaccacttcgagccgctcgctgccgccgctgccagggccaagcagaaggagaaggagaagagagagaaggacctcacctcgggccttcgggatttgattgtgggtgatggggacagtgccaatggcttgaatttgaatggcaatggcggaggccccagggtggtgcgcaggaacgtcgtaaatgcccctgcagcagcgcctgcaaggtaatcctttctagcagttccaccgggctgcacgaagtgaatgcatcaataccaggggcagagccaataaagtttaatcttttttcctctaatgcttgtttaagcggtctcttttgatctaaggagaaaggctctgtaattcacttttggcatgatatatacaatgtgcccactggattttgggatggaatttttattcaatact

SEQ ID NO: 64674 - protein, 280 aa, Triticum aestivum
  peptide (1)..(280): Ceres Seq. ID no. 13597571
  misc_feature (105)..(259): Homolog of NCBI NO: 11357797 NR Description: hypothetical protein F4P12.330 - Arabidopsis
  misc_feature (105)..(265): Homolog of NCBI NO: 22331772 NR Description: expressed protein [Arabidopsis thaliana]
SPIVPFAYLQVCIHTTQAHAHAHAHAPPNPKPYHASAPMAPTAPQPPRPSAAAPSAAPVDALFLQNLMNRVQLRPPFLDTNSFLTQDLDDFLLNEFAALSAAAGESYDDDDDDEEGEDGGLSDGEASGEARRRRMLSREEAKLEKEIVRMVLAGDGDALKPNSGQSVAVGDHHVCVGFHDEAGGEYRVWEWHGHVMLFDDEDGYSAEYIYGNHFEPLAAAAARAKQKEKEKREKDLTSGLRDLIVGDGDSANGLNLNGNGGGPRVVRRNVVNAPAAAPAR

SEQ ID NO: 64675 - protein, 242 aa, Triticum aestivum
  peptide (1)..(242): Ceres Seq. ID no. 13597572
  misc_feature (67)..(221): Homolog of NCBI NO: 11357797 NR Description: hypothetical protein F4P12.330 - Arabidopsis
  misc_feature (67)..(227): Homolog of NCBI NO: 22331772 NR Description: expressed protein [Arabidopsis thaliana]
MAPTAPQPPRPSAAAPSAAPVDALFLQNLMNRVQLRPPFLDTNSFLTQDLDDFLLNEFAALSAAAGESYDDDDDDEEGEDGGLSDGEASGEARRRRMLSREEAKLEKEIVRMVLAGDGDALKPNSGQSVAVGDHHVCVGFHDEAGGEYRVWEWHGHVMLFDDEDGYSAEYIYGNHFEPLAAAAARAKQKEKEKREKDLTSGLRDLIVGDGDSANGLNLNGNGGGPRVVRRNVVNAPAAAPAR

SEQ ID NO: 64676 - protein, 213 aa, Triticum aestivum
  peptide (1)..(213): Ceres Seq. ID no. 13597573
  misc_feature (38)..(192): Homolog of NCBI NO: 11357797 NR Description: hypothetical protein F4P12.330 - Arabidopsis
  misc_feature (38)..(198): Homolog of NCBI NO: 22331772 NR Description: expressed protein [Arabidopsis thaliana]
MNRVQLRPPFLDTNSFLTQDLDDFLLNEFAALSAAAGESYDDDDDDEEGEDGGLSDGEASGEARRRRMLSREEAKLEKEIVRMVLAGDGDALKPNSGQSVAVGDHHVCVGFHDEAGGEYRVWEWHGHVMLFDDEDGYSAEYIYGNHFEPLAAAAARAKQKEKEKREKDLTSGLRDLIVGDGDSANGLNLNGNGGGPRVVRRNVVNAPAAAPAR

SEQ ID NO: 64677 - DNA, 1572 bp, Triticum aestivum
  misc_feature (1)..(1572): Ceres Seq. ID no. 13597574
atcaatcacttgccatcctaccaccttgtgacattccaaacacaaacctacactccacaacccgcaccacatatcaacaacgaaagttcttgttgccgacatggacggcgtcacagccaacaccaccacgatcagtccccggaagctgcgggtgatgctctactcgtccccactcatggggcacctcgtccccatgatagagctcgccaagctcttcgccgctcgtgggctagccatcacggtagtcctcatggacccgccgtatgataccggcgccacgggccccttcctcagcggtgtctccgcggccaacccctccatttctttccatcgtctgccacaggtcaagctcccagagtctgacgactccgtgatgccagccttagcgttcgcccgtctctccaacccacacctacattacttcctcgccggcgcatctccggacttcctcgtggtggacttcttctgcagtgccgccatggacgtagccgcggagctcggcatccccgcctacttcttctccacctccggcgcccagatcctggctttctttatgcacctcacggttctgcatgggaaaagcacgaggagcttccgggaaatgggcgaagaactcgtgcacgtaccggggatcaccccgtttccggcgacgcactccatccagccactcatggatcgtgacggtgcgtcctaccaggcattactaaatgtgagcctcaacctattccgatcacagggcatcttcatcaacaccttccgctcgctggaacctcgtgccatggacaccatcctcgcggggcactccgccccagctggcctctcgacgcccccagtctactgcattgggccgctagtcaagtcagaggaggtgggcgtgaagcgtggagacgagtgcctcgcgtggttggacacgcaacccaaggccagtgtggtgttcctgtgctttggcagcctcggccggttcaacgccgaacaaaccagggaagtggcaaccgtgctggaggctagtggacaaaggttcctctgggttgtgcggagcccgccgagcgacgacacgactacagagccggacttggatgtgctgctttcgaagggtttcctggaccggaccaagggcaggggcctcgtcgtgaagtcatgggcaccacaaggtgatgttctagcacatcatgccgtgggaagttttgtgacacactgcgggtggaactcggtgctcgagtctactatggcaggtgtgcctatgctggcctggccattgtacgcggagcaaaagatgaatgcggtgttcctcgagaaagagatggagttggctgtcatgatggaagggtacgataaggagatggtggaggcaaaggagattgccaaaaagatcaggtggatgatggattcggaaggcgggagggtgctccgagagcggactctagcggtgatgtggcaggccaatgaggctctactcgagggtggagaatcagaggcaacattgacagagcttgttgatgtgtgggttaaagcttgacatgtgcaacatcatttatgaatgatcatggaaataaagagtgagcattgggtctt

SEQ ID NO: 64678 - protein, 471 aa, Triticum aestivum
  peptide (1)..(471): Ceres Seq. ID no. 15222131
  misc_feature (18)..(447): Pfam Name: UDP-glucoronosyl and UDP-glucosyl transferase Pfam Description: UDP-glucoronosyl and UDP-glucosyl transferase
  misc_feature (18)..(453): Homolog of NCBI NO: 30684106 NR Description: glycosyltransferase family [Arabidopsis thaliana]
  misc_feature (18)..(453): Homolog of NCBI NO: 18401155 NR Description: glycosyltransferase family [Arabidopsis thaliana]
  misc_feature (18)..(468): Homolog of NCBI NO: 21593785 NR Description: putative glucosyltransferase [Arabidopsis
  misc_feature (18)..(468): Homolog of NCBI NO: 18401158 NR Description: glycosyltransferase family [Arabidopsis thaliana]
  misc_feature (18)..(466): Homolog of NCBI NO: 34910222 NR Description: putative flavonol glucosyltransferase
  misc_feature (17)..(465): Homolog of NCBI NO: 34910218 NR Description: putative flavonol glucosyltransferase
  misc_feature (18)..(466): Homolog of NCBI NO: 34910228 NR Description: putative flavonol glucosyltransferase
  misc_feature (18)..(466): Homolog of NCBI NO: 34910204 NR Description: putative flavonol glucosyltransferase
  misc_feature (11)..(468): Homolog of NCBI NO: 34910208 NR Description: putative flavonol glucosyltransferase
  misc_feature (1)..(471): Homolog of NCBI NO: 22535568 NR Description: putative glucosyltransferase
MDGVTANTTTISPRKLRVMLYSSPLMGHLVPMIELAKLFAARGLAITVVLMDPPYDTGATGPFLSGVSAANPSISFHRLPQVKLPESDDSVMPALAFARLSNPHLHYFLAGASPDFLVVDFFCSAAMDVAAELGIPAYFFSTSGAQILAFFMHLTVLHGKSTRSFREMGEELVHVPGITPFPATHSIQPLMDRDGASYQALLNVSLNLFRSQGIFINTFRSLEPRAMDTILAGHSAPAGLSTPPVYCIGPLVKSEEVGVKRGDECLAWLDTQPKASVVFLCFGSLGRFNAEQTREVATVLEASGQRFLWVVRSPPSDDTTTEPDLDVLLSKGFLDRTKGRGLVVKSWAPQGDVLAHHAVGSFVTHCGWNSVLESTMAGVPMLAWPLYAEQKMNAVFLEKEMELAVMMEGYDKEMVEAKEIAKKIRWMMDSEGGRVLRERTLAVMWQANEALLEGGESEATLTELVDVWVKA

SEQ ID NO: 64679 - protein, 453 aa, Triticum aestivum
  peptide (1)..(453): Ceres Seq. ID no. 15222132
  misc_feature (1)..(429): Pfam Name: UDP-glucoronosyl and UDP-glucosyl transferase Pfam Description: UDP-glucoronosyl and UDP-glucosyl transferase
  misc_feature (1)..(435): Homolog of NCBI NO: 30684106 NR Description: glycosyltransferase family [Arabidopsis thaliana]
  misc_feature (1)..(435): Homolog of NCBI NO: 18401155 NR Description: glycosyltransferase family [Arabidopsis thaliana]
  misc_feature (1)..(450): Homolog of NCBI NO: 21593785 NR Description: putative glucosyltransferase [Arabidopsis
  misc_feature (1)..(450): Homolog of NCBI NO: 18401158 NR Description: glycosyltransferase family [Arabidopsis thaliana]
  misc_feature (1)..(448): Homolog of NCBI NO: 34910222 NR Description: putative flavonol glucosyltransferase
  misc_feature (1)..(447): Homolog of NCBI NO: 34910218 NR Description: putative flavonol glucosyltransferase
  misc_feature (1)..(448): Homolog of NCBI NO: 34910228 NR Description: putative flavonol glucosyltransferase
  misc_feature (1)..(448): Homolog of NCBI NO: 34910204 NR Description: putative flavonol glucosyltransferase
  misc_feature (1)..(450): Homolog of NCBI NO: 34910208 NR Description: putative flavonol glucosyltransferase
  misc_feature (1)..(453): Homolog of NCBI NO: 22535568 NR Description: putative glucosyltransferase
MLYSSPLMGHLVPMIELAKLFAARGLAITVVLMDPPYDTGATGPFLSGVSAANPSISFHRLPQVKLPESDDSVMPALAFARLSNPHLHYFLAGASPDFLVVDFFCSAAMDVAAELGIPAYFFSTSGAQILAFFMHLTVLHGKSTRSFREMGEELVHVPGITPFPATHSIQPLMDRDGASYQALLNVSLNLFRSQGIFINTFRSLEPRAMDTILAGHSAPAGLSTPPVYCIGPLVKSEEVGVKRGDECLAWLDTQPKASVVFLCFGSLGRFNAEQTREVATVLEASGQRFLWVVRSPPSDDTTTEPDLDVLLSKGFLDRTKGRGLVVKSWAPQGDVLAHHAVGSFVTHCGWNSVLESTMAGVPMLAWPLYAEQKMNAVFLEKEMELAVMMEGYDKEMVEAKEIAKKIRWMMDSEGGRVLRERTLAVMWQANEALLEGGESEATLTELVDVWVKA

SEQ ID NO: 64680 - protein, 446 aa, Triticum aestivum
  peptide (1)..(446): Ceres Seq. ID no. 15222133
  misc_feature (1)..(422): Pfam Name: UDP-glucoronosyl and UDP-glucosyl transferase Pfam Description: UDP-glucoronosyl and UDP-glucosyl transferase
  misc_feature (1)..(428): Homolog of NCBI NO: 30684106 NR Description: glycosyltransferase family [Arabidopsis thaliana]
  misc_feature (1)..(428): Homolog of NCBI NO: 18401155 NR Description: glycosyltransferase family [Arabidopsis thaliana]
  misc_feature (1)..(443): Homolog of NCBI NO: 21593785 NR Description: putative glucosyltransferase [Arabidopsis
  misc_feature (1)..(443): Homolog of NCBI NO: 18401158 NR Description: glycosyltransferase family [Arabidopsis thaliana]
  misc_feature (1)..(441): Homolog of NCBI NO: 34910222 NR Description: putative flavonol glucosyltransferase
  misc_feature (1)..(440): Homolog of NCBI NO: 34910218 NR Description: putative flavonol glucosyltransferase
  misc_feature (1)..(441): Homolog of NCBI NO: 34910228 NR Description: putative flavonol glucosyltransferase
  misc_feature (1)..(441): Homolog of NCBI NO: 34910204 NR Description: putative flavonol glucosyltransferase
  misc_feature (1)..(443): Homolog of NCBI NO: 34910208 NR Description: putative flavonol glucosyltransferase
  misc_feature (1)..(446): Homolog of NCBI NO: 22535568 NR Description: putative glucosyltransferase
MGHLVPMIELAKLFAARGLAITVVLMDPPYDTGATGPFLSGVSAANPSISFHRLPQVKLPESDDSVMPALAFARLSNPHLHYFLAGASPDFLVVDFFCSAAMDVAAELGIPAYFFSTSGAQILAFFMHLTVLHGKSTRSFREMGEELVHVPGITPFPATHSIQPLMDRDGASYQALLNVSLNLFRSQGIFINTFRSLEPRAMDTILAGHSAPAGLSTPPVYCIGPLVKSEEVGVKRGDECLAWLDTQPKASVVFLCFGSLGRFNAEQTREVATVLEASGQRFLWVVRSPPSDDTTTEPDLDVLLSKGFLDRTKGRGLVVKSWAPQGDVLAHHAVGSFVTHCGWNSVLESTMAGVPMLAWPLYAEQKMNAVFLEKEMELAVMMEGYDKEMVEAKEIAKKIRWMMDSEGGRVLRERTLAVMWQANEALLEGGESEATLTELVDVWVKA

SEQ ID NO: 64681 - DNA, 1511 bp, Triticum aestivum
  misc_feature (1)..(1511): Ceres Seq. ID no. 13597502
aaagctaaagaaacaaggtagtgtagccagccatcaagtacaccgcagtgctgcaccgagcggctctaggctagcggagttgagtgtcgtcagacagccaccaccttccagttccagccatggccacggcgtcggcggcgcggatagtgccggtgctgctggccctcgcggccctcatctgcgcggcggcggaggcgtcgccagcgaaggtgccggcgatgtacgtgttcggggactcaacggccgacgtcggcagcaacaactacctgcctggcagcgcggtgccgcgggccaacttcccgcacaacggcgtcgacttccccacctcgcgccccaccggccgcttcagcaatggcttcaacggcatcgacttcttagctctgaacatgggcttcaagcgcagccccccgccgttcctctcggtggccaacagaaccaacaggcagatcgcgcgagggctgctgggagcaaacttcgcctccgcaggatcaggcgttcttgacacgacgggtgactccatcgtctcgatgagcaagcaggtcgagcagttcgccattctgcgatgcaacatctctgcgcgcatcggcaaagaggcggccgacaccgtgctgtcgaggtccctgtttgtcatcagcaccggcggcaacgacatcttcgccttcttctcggcgaacagcacgccgacggccgcgcagatgcagctgttcaccgccaacctggtttcgcagtacaaaaatcatgtgaaggctctgttcggcctcggggcgaggaagttggccgtgatcgacgtcccgccgatcgggtgctgcccctacccgagaagcctgcaccctctcggtgcctgtatcgacgtcctcaacgagctgacccgtgggctcaacaagggcgtcaaggacgccatgcatggcctcagcgtcagcttgggtggcctcaagtactccatcgggagctcccacgccgtcgtgcaaagcatcatgaagcacccccaaagactagggttcaaggaggtgaccatggcgtgctgcggctccggcaagttcaacggcaagtcgggctgcacgcccaacgccacgctgtgcgacaaccggcacgagtacctcttctgggacctgctgcacccgactcacgccacgtccaagctcgccgccgcggccatctacaacggctcgctgcacttcgcagcgcccataaacttcaggcagctagcggaggaccagtgctagatagactgatagagcacgcacggccgcgtgcgcggtcgtgtctgctgcgttattaggtttgcttcacgtgtctgtgatggtgatgtttgtgtgtaggatatgtatgcacagtggtgttcgtctgtggtttcatttgtgtattgttaggtgggtgcctggcgtagtgtggaacctaaagatcaaaatggtaccatntntgtaangcaggttaattacttntcgaggtttgtatgtagtactgtanatccgaatgaactaaaatttaattaaatatattntagtattttt

SEQ ID NO: 64682 - protein, 367 aa, Triticum aestivum
  peptide (1)..(367): Ceres Seq. ID no. 13597503
  misc_feature (34)..(340): Pfam Name: GDSL-like Lipase/Acylhydrolase Pfam Description: GDSL-like Lipase/Acylhydrolase
  misc_feature (10)..(364): Homolog of NCBI NO: 34909504 NR Description: putative GDSL-motif lipase/hydrolase-like protein
  misc_feature (1)..(358): Homolog of NCBI NO: 15235421 NR Description: GDSL-motif lipase/hydrolase protein [Arabidopsis
  misc_feature (12)..(362): Homolog of NCBI NO: 15224005 NR Description: GDSL-motif lipase/hydrolase protein [Arabidopsis
  misc_feature (26)..(358): Homolog of NCBI NO: 15229265 NR Description: GDSL-motif lipase/hydrolase protein [Arabidopsis
  misc_feature (14)..(364): Homolog of NCBI NO: 37535146 NR Description: putative early nodulin gene (Enod) related
  misc_feature (14)..(364): Homolog of NCBI NO: 22758315 NR Description: putative early nodulin gene (Enod) related
  misc_feature (26)..(366): Homolog of NCBI NO: 38345537 NR Description: OSJNBa0020J04.12 [Oryza sativa (japonica
  misc_feature (23)..(362): Homolog of NCBI NO: 15240452 NR Description: GDSL-motif lipase/hydrolase protein [Arabidopsis
  misc_feature (1)..(364): Homolog of NCBI NO: 38345853 NR Description: OSJNBa0084K11.17 [Oryza sativa (japonica
  misc_feature (9)..(363): Homolog of NCBI NO: 29837765 NR Description: putative GDSL-like lipase/acylhydrolase
MATASAARIVPVLLALAALICAAAEASPAKVPAMYVFGDSTADVGSNNYLPGSAVPRANFPHNGVDFPTSRPTGRFSNGFNGIDFLALNMGFKRSPPPFLSVANRTNRQIARGLLGANFASAGSGVLDTTGDSIVSMSKQVEQFAILRCNISARIGKEAADTVLSRSLFVISTGGNDIFAFFSANSTPTAAQMQLFTANLVSQYKNHVKALFGLGARKLAVIDVPPIGCCPYPRSLHPLGACIDVLNELTRGLNKGVKDAMHGLSVSLGGLKYSIGSSHAVVQSIMKHPQRLGFKEVTMACCGSGKFNGKSGCTPNATLCDNRHEYLFWDLLHPTHATSKLAAAAIYNGSLHFAAPINFRQLAEDQC

SEQ ID NO: 64683 - protein, 334 aa, Triticum aestivum
  peptide (1)..(334): Ceres Seq. ID no. 13597504
  misc_feature (1)..(307): Pfam Name: GDSL-like Lipase/Acylhydrolase Pfam Description: GDSL-like Lipase/Acylhydrolase
  misc_feature (1)..(331): Homolog of NCBI NO: 34909504 NR Description: putative GDSL-motif lipase/hydrolase-like protein
  misc_feature (1)..(325): Homolog of NCBI NO: 15235421 NR Description: GDSL-motif lipase/hydrolase protein [Arabidopsis
  misc_feature (1)..(329): Homolog of NCBI NO: 15224005 NR Description: GDSL-motif lipase/hydrolase protein [Arabidopsis
  misc_feature (1)..(325): Homolog of NCBI NO: 15229265 NR Description: GDSL-motif lipase/hydrolase protein [Arabidopsis
  misc_feature (1)..(331): Homolog of NCBI NO: 37535146 NR Description: putative early nodulin gene (Enod) related
  misc_feature (1)..(331): Homolog of NCBI NO: 22758315 NR Description: putative early nodulin gene (Enod) related
  misc_feature (1)..(333): Homolog of NCBI NO: 38345537 NR Description: OSJNBa0020J04.12 [Oryza sativa (japonica
  misc_feature (1)..(329): Homolog of NCBI NO: 15240452 NR Description: GDSL-motif lipase/hydrolase protein [Arabidopsis
  misc_feature (1)..(331): Homolog of NCBI NO: 38345853 NR Description: OSJNBa0084K11.17 [Oryza sativa (japonica
  misc_feature (1)..(330): Homolog of NCBI NO: 29837765 NR Description: putative GDSL-like lipase/acylhydrolase
MYVFGDSTADVGSNNYLPGSAVPRANFPHNGVDFPTSRPTGRFSNGFNGIDFLALNMGFKRSPPPFLSVANRTNRQIARGLLGANFASAGSGVLDTTGDSIVSMSKQVEQFAILRCNISARIGKEAADTVLSRSLFVISTGGNDIFAFFSANSTPTAAQMQLFTANLVSQYKNHVKALFGLGARKLAVIDVPPIGCCPYPRSLHPLGACIDVLNELTRGLNKGVKDAMHGLSVSLGGLKYSIGSSHAVVQSIMKHPQRLGFKEVTMACCGSGKFNGKSGCTPNATLCDNRHEYLFWDLLHPTHATSKLAAAAIYNGSLHFAAPINFRQLAEDQC

SEQ ID NO: 64684 - protein, 278 aa, Triticum aestivum
  peptide (1)..(278): Ceres Seq. ID no. 13597505
  misc_feature (1)..(251): Pfam Name: GDSL-like Lipase/Acylhydrolase Pfam Description: GDSL-like Lipase/Acylhydrolase
  misc_feature (1)..(275): Homolog of NCBI NO: 34909504 NR Description: putative GDSL-motif lipase/hydrolase-like protein
  misc_feature (1)..(269): Homolog of NCBI NO: 15235421 NR Description: GDSL-motif lipase/hydrolase protein [Arabidopsis
  misc_feature (1)..(273): Homolog of NCBI NO: 15224005 NR Description: GDSL-motif lipase/hydrolase protein [Arabidopsis
  misc_feature (1)..(269): Homolog of NCBI NO: 15229265 NR Description: GDSL-motif lipase/hydrolase protein [Arabidopsis
  misc_feature (1)..(275): Homolog of NCBI NO: 37535146 NR Description: putative early nodulin gene (Enod) related
  misc_feature (1)..(275): Homolog of NCBI NO: 22758315 NR Description: putative early nodulin gene (Enod) related
  misc_feature (1)..(277): Homolog of NCBI NO: 38345537 NR Description: OSJNBa0020J04.12 [Oryza sativa (japonica
  misc_feature (1)..(273): Homolog of NCBI NO: 15240452 NR Description: GDSL-motif lipase/hydrolase protein [Arabidopsis
  misc_feature (1)..(275): Homolog of NCBI NO: 38345853 NR Description: OSJNBa0084K11.17 [Oryza sativa (japonica
  misc_feature (1)..(274): Homolog of NCBI NO: 29837765 NR Description: putative GDSL-like lipase/acylhydrolase
MGFKRSPPPFLSVANRTNRQIARGLLGANFASAGSGVLDTTGDSIVSMSKQVEQFAILRCNISARIGKEAADTVLSRSLFVISTGGNDIFAFFSANSTPTAAQMQLFTANLVSQYKNHVKALFGLGARKLAVIDVPPIGCCPYPRSLHPLGACIDVLNELTRGLNKGVKDAMHGLSVSLGGLKYSIGSSHAVVQSIMKHPQRLGFKEVTMACCGSGKFNGKSGCTPNATLCDNRHEYLFWDLLHPTHATSKLAAAAIYNGSLHFAAPINFRQLAEDQC

SEQ ID NO: 64685 - DNA, 1041 bp, Triticum aestivum
  misc_feature (1)..(1041): Ceres Seq. ID no. 13584519
cgcgttccgtaggtagcgagctccgccccggatctggccgtcgagcgatggcctcgacgagggatctcgccatagcgtccatctcggtcgccgcaggcgccgtagccgccgcggccgcgctcctgtactcctactcggcaaccaattccaagccccagagcccgcccccgcccccgccgtgcaccgagccactccccgtcaacggctgcgccgccaggcatccgccagcgcaggaccccttcaaaaccaccaagagggaagggttcatctcatgggacgactacttcatggcgattgcgttcctttcagccgagcgttcaaaggatcctaaccggcaggttggcgcatgcttggttagccaagagggcattatcctaggtataggttacaatggattcccaagaggctgttcagatgataagcttccttgggcaaagaaatctgcaagaggggatccattggagacaaaatatccttatgttgttcatgctgaagttaatgctattttaaatacaaaccatgcttcagcggctggacagaagttatacgtcactatgttcccctgtaatgagtgtgctaagattatcatccagtcaggtgtatctgaagtcatctattttgtagagaaaaggattgacaactcagatcatgtttatgttgcttctcacaacttattatcaatggctggtgtgaaggtcaggaagcatcagccacaaatggcacaaataccaatcaactttcaggatccaagggtytaatgaatgaactgtgcgcccttaggtaatgcaaatgtgcaccaatgccttaacaattatgtcagtcattcaaaggctgtcatgctgggttatatactcccccggggggcctagctgttgtatattgtaatcagtcgaattactagatcgagaaaagcacctgtaactagttgcatcctgttgcgaaatttgtatgtgctcagcatcatgaaccattyttctgtaaactgtggctgcaccatgatttaactctcactacggtcgattcttgctgtagtaaatcgtg

SEQ ID NO: 64686 - protein, 251 aa, Triticum aestivum
  peptide (1)..(251): Ceres Seq. ID no. 15222794
  misc_feature (89)..(205): Pfam Name: Cytidine and deoxycytidylate deaminase Pfam Description: Cytidine and deoxycytidylate deaminase
  misc_feature (85)..(247): Homolog of NCBI NO: 34762517 NR Description: Deoxycytidylate deaminase
  misc_feature (83)..(233): Homolog of NCBI NO: 18310048 NR Description: deoxycytidylate deaminase [Clostridium
  misc_feature (84)..(246): Homolog of NCBI NO: 30520263 NR Description: RIKEN cDNA 6030466N05 gene [Mus musculus]
  misc_feature (84)..(246): Homolog of NCBI NO: 24667298 NR Description: CG6951-PA [Drosophila melanogaster]
  misc_feature (179)..(234): Homolog of NCBI NO: 15228398 NR Description: hypothetical protein [Arabidopsis thaliana]
  misc_feature (18)..(126): Homolog of NCBI NO: 15228398 NR Description: hypothetical protein [Arabidopsis thaliana]
  misc_feature (84)..(246): Homolog of NCBI NO: 21619349 NR Description: 6030466N05Rik protein [Mus musculus]
  misc_feature (84)..(246): Homolog of NCBI NO: 12654885 NR Description: Similar to dCMP deaminase [Homo sapiens]
  misc_feature (84)..(246): Homolog of NCBI NO: 4503277 NR Description: dCMP deaminase [Homo sapiens]
  misc_feature (84)..(246): Homolog of NCBI NO: 23503055 NR Description: Deoxycytidylate deaminase (dCMP deaminase)
  misc_feature (251)..(251): Xaa is any aa, unknown or other
RSVGSELRPGSGRRAMASTRDLAIASISVAAGAVAAAAALLYSYSATNSKPQSPPPPPPCTEPLPVNGCAARHPPAQDPFKTTKREGFISWDDYFMAIAFLSAERSKDPNRQVGACLVSQEGIILGIGYNGFPRGCSDDKLPWAKKSARGDPLETKYPYVVHAEVNAILNTNHASAAGQKLYVTMFPCNECAKIIIQSGVSEVIYFVEKRIDNSDHVYVASHNLLSMAGVKVRKHQPQMAQIPINFQDPRX

SEQ ID NO: 64687 - protein, 236 aa, Triticum aestivum
  peptide (1)..(236): Ceres Seq. ID no. 15222795
  misc_feature (74)..(190): Pfam Name: Cytidine and deoxycytidylate deaminase Pfam Description: Cytidine and deoxycytidylate deaminase
  misc_feature (70)..(232): Homolog of NCBI NO: 34762517 NR Description: Deoxycytidylate deaminase
  misc_feature (68)..(218): Homolog of NCBI NO: 18310048 NR Description: deoxycytidylate deaminase [Clostridium
  misc_feature (69)..(231): Homolog of NCBI NO: 30520263 NR Description: RIKEN cDNA 6030466N05 gene [Mus musculus]
  misc_feature (69)..(231): Homolog of NCBI NO: 24667298 NR Description: CG6951-PA [Drosophila melanogaster]
  misc_feature (164)..(219): Homolog of NCBI NO: 15228398 NR Description: hypothetical protein [Arabidopsis thaliana]
  misc_feature (3)..(111): Homolog of NCBI NO: 15228398 NR Description: hypothetical protein [Arabidopsis thaliana]
  misc_feature (69)..(231): Homolog of NCBI NO: 21619349 NR Description: 6030466N05Rik protein [Mus musculus]
  misc_feature (69)..(231): Homolog of NCBI NO: 12654885 NR Description: Similar to dCMP deaminase [Homo sapiens]
  misc_feature (69)..(231): Homolog of NCBI NO: 4503277 NR Description: dCMP deaminase [Homo sapiens]
  misc_feature (69)..(231): Homolog of NCBI NO: 23503055 NR Description: Deoxycytidylate deaminase (dCMP deaminase)
  misc_feature (236)..(236): Xaa is any aa, unknown or other
MASTRDLAIASISVAAGAVAAAAALLYSYSATNSKPQSPPPPPPCTEPLPVNGCAARHPPAQDPFKTTKREGFISWDDYFMAIAFLSAERSKDPNRQVGACLVSQEGIILGIGYNGFPRGCSDDKLPWAKKSARGDPLETKYPYVVHAEVNAILNTNHASAAGQKLYVTMFPCNECAKIIIQSGVSEVIYFVEKRIDNSDHVYVASHNLLSMAGVKVRKHQPQMAQIPINFQDPRX

SEQ ID NO: 64688 - protein, 156 aa, Triticum aestivum
  peptide (1)..(156): Ceres Seq. ID no. 15222796
  misc_feature (1)..(110): Pfam Name: Cytidine and deoxycytidylate deaminase Pfam Description: Cytidine and deoxycytidylate deaminase
  misc_feature (1)..(152): Homolog of NCBI NO: 34762517 NR Description: Deoxycytidylate deaminase
  misc_feature (1)..(138): Homolog of NCBI NO: 18310048 NR Description: deoxycytidylate deaminase [Clostridium
  misc_feature (1)..(151): Homolog of NCBI NO: 30520263 NR Description: RIKEN cDNA 6030466N05 gene [Mus musculus]
  misc_feature (1)..(151): Homolog of NCBI NO: 24667298 NR Description: CG6951-PA [Drosophila melanogaster]
  misc_feature (84)..(139): Homolog of NCBI NO: 15228398 NR Description: hypothetical protein [Arabidopsis thaliana]
  misc_feature (1)..(31): Homolog of NCBI NO: 15228398 NR Description: hypothetical protein [Arabidopsis thaliana]
  misc_feature (1)..(151): Homolog of NCBI NO: 21619349 NR Description: 6030466N05Rik protein [Mus musculus]
  misc_feature (1)..(151): Homolog of NCBI NO: 12654885 NR Description: Similar to dCMP deaminase [Homo sapiens]
  misc_feature (1)..(151): Homolog of NCBI NO: 4503277 NR Description: dCMP deaminase [Homo sapiens]
  misc_feature (1)..(151): Homolog of NCBI NO: 23503055 NR Description: Deoxycytidylate deaminase (dCMP deaminase)
  misc_feature (156)..(156): Xaa is any aa, unknown or other
MAIAFLSAERSKDPNRQVGACLVSQEGIILGIGYNGFPRGCSDDKLPWAKKSARGDPLETKYPYVVHAEVNAILNTNHASAAGQKLYVTMFPCNECAKIIIQSGVSEVIYFVEKRIDNSDHVYVASHNLLSMAGVKVRKHQPQMAQIPINFQDPRX

SEQ ID NO: 64689 - DNA, 1535 bp, Triticum aestivum
  misc_feature (1)..(1535): Ceres Seq. ID no. 15225423
cactgaattttgttggcgttgagttggaggcgccattggccttttcttgccctctctcatggtgtccattgtgcagctgcagagaaggcgaacagaagcagcagcgtcagcgagaggcatccttccggacagggaggagaggatggatctttctgtgccccgaggcgagttcccgatcccaatgcacgccgccgcctcgccctacgggggcatcggcggcgggggcgtcgccgtcgccgaccatgccatggagctccaccatgaccacgccaaccacaacggccagtcccagtcccaggcgcaggacatgccgtcgcctcccgctgctgtgtctgaggacagctccgggaagaagcgcgcggcggccattgccggcggagcgggagggccggcggtcaagtaccgggagtgcctcaagaaccacgcggcggccatcggcggcaacgccaccgacgggtgcggcgagttcatgcccagcggcgaggagggctcgctggaggcgctcaagtgctccgcctgcggctgccaccgcaatttccaccgcaaggagctcgacgacttcgacggcgacagctgcgcctcgcacggctacggctacggccaccacgccgtccgccgcctgctcggccccgccgtgccgcaccaccacaagagcagcgggggcctcctcgtcaccgcggaccactacggcgcctacgccgcggcgcgcgcgctccctccgccgccgcccccgccgctgggacaccaccaccagatcatcatgccgctcaacatgatccagacgtccgagtcggacgagatggacggcagcggcggcggcggtatcatgggcgacggcagaggcgggctagcctcaggcggcggcggcggctcctcctcgtccaagaagcgcttccgcaccaagttcaccgccgagcagaaggggcgcatgctggagttcgcggagaacgtggggtggcgtctccagaagctggacgacgccatggtgcagcacttctgccaggagatcggcgtcaagcgccgggtcctcaaggtctggatgcacaacaacaagcacaacctcgccagcaggccgctccctacctcgcctgcgcagccgcagtcacagtcgatgccgctggcgatgtcaatgccgatgccgatgcaagtgccgccgtcgcagcccgggccttcgggccaccgcggccccagctccccgcatgcgcagggggagctcaagctcgactgacggcacaaagaagccctggtgtctgtcaacggcgccatggtggctgattctgctagcgttagtaagccgcattgccattaatttcactgttccatcggagcgatcgatcgaagcagagagaagagaagagaaccaaaaaacaaacccgagtctatcaccatctccatttttttcctttctctgtttatcttgtcataaggttggggagcaagcatgagaggggggacataggcgaaccggactgagctccactcaatttcaatttatttttcctggacctagtttttttcgaaaaaaaaaaaaaaaa

SEQ ID NO: 64690 - protein, 389 aa, Triticum aestivum
  peptide (1)..(389): Ceres Seq. ID no. 15225424
  misc_feature (111)..(166): Pfam Name: ZF-HD protein dimerisation region Pfam Description: ZF-HD protein dimerisation region
  misc_feature (210)..(351): Homolog of NCBI NO: 15238445 NR Description: expressed protein [Arabidopsis thaliana]
  misc_feature (272)..(339): Homolog of NCBI NO: 15233925 NR Description: expressed protein [Arabidopsis thaliana]
  misc_feature (74)..(170): Homolog of NCBI NO: 15233925 NR Description: expressed protein [Arabidopsis thaliana]
  misc_feature (274)..(338): Homolog of NCBI NO: 15223757 NR Description: expressed protein [Arabidopsis thaliana]
  misc_feature (37)..(189): Homolog of NCBI NO: 15223757 NR Description: expressed protein [Arabidopsis thaliana]
  misc_feature (220)..(338): Homolog of NCBI NO: 20148768 NR Description: hypothetical protein At2g02540/T822.16
  misc_feature (220)..(338): Homolog of NCBI NO: 15226993 NR Description: expressed protein [Arabidopsis thaliana]
  misc_feature (31)..(166): Homolog of NCBI NO: 20148768 NR Description: hypothetical protein At2g02540/T822.16
  misc_feature (31)..(166): Homolog of NCBI NO: 15226993 NR Description: expressed protein [Arabidopsis thaliana]
  misc_feature (51)..(343): Homolog of NCBI NO: 18410804 NR Description: expressed protein [Arabidopsis thaliana]
MVSIVQLQRRRTEAAASARGILPDREERMDLSVPRGEFPIPMHAAASPYGGIGGGGVAVADHAMELHHDHANHNGQSQSQAQDMPSPPAAVSEDSSGKKRAAAIAGGAGGPAVKYRECLKNHAAAIGGNATDGCGEFMPSGEEGSLEALKCSACGCHRNFHRKELDDFDGDSCASHGYGYGHHAVRRLLGPAVPHHHKSSGGLLVTADHYGAYAAARALPPPPPPPLGHHHQIIMPLNMIQTSESDEMDGSGGGGIMGDGRGGLASGGGGGSSSSKKRFRTKFTAEQKGRMLEFAENVGWRLQKLDDAMVQHFCQEIGVKRRVLKVWMHNNKHNLASRPLPTSPAQPQSQSMPLAMSMPMPMQVPPSQPGPSGHRGPSSPHAQGELKLD

SEQ ID NO: 64691 - protein, 361 aa, Triticum aestivum
  peptide (1)..(361): Ceres Seq. ID no. 15225425
  misc_feature (83)..(138): Pfam Name: ZF-HD protein dimerisation region Pfam Description: ZF-HD protein dimerisation region
  misc_feature (182)..(323): Homolog of NCBI NO: 15238445 NR Description: expressed protein [Arabidopsis thaliana]
  misc_feature (244)..(311): Homolog of NCBI NO: 15233925 NR Description: expressed protein [Arabidopsis thaliana]
  misc_feature (46)..(142): Homolog of NCBI NO: 15233925 NR Description: expressed protein [Arabidopsis thaliana]
  misc_feature (246)..(310): Homolog of NCBI NO: 15223757 NR Description: expressed protein [Arabidopsis thaliana]
  misc_feature (9)..(161): Homolog of NCBI NO: 15223757 NR Description: expressed protein [Arabidopsis thaliana]
  misc_feature (192)..(310): Homolog of NCBI NO: 20148768 NR Description: hypothetical protein At2g02540/T822.16
  misc_feature (192)..(310): Homolog of NCBI NO: 15226993 NR Description: expressed protein [Arabidopsis thaliana]
  misc_feature (3)..(138): Homolog of NCBI NO: 20148768 NR Description: hypothetical protein At2g02540/T822.16
  misc_feature (3)..(138): Homolog of NCBI NO: 15226993 NR Description: expressed protein [Arabidopsis thaliana]
  misc_feature (23)..(315): Homolog of NCBI NO: 18410804 NR Description: expressed protein [Arabidopsis thaliana]
MDLSVPRGEFPIPMHAAASPYGGIGGGGVAVADHAMELHHDHANHNGQSQSQAQDMPSPPAAVSEDSSGKKRAAAIAGGAGGPAVKYRECLKNHAAAIGGNATDGCGEFMPSGEEGSLEALKCSACGCHRNFHRKELDDFDGDSCASHGYGYGHHAVRRLLGPAVPHHHKSSGGLLVTADHYGAYAAARALPPPPPPPLGHHHQIIMPLNMIQTSESDEMDGSGGGGIMGDGRGGLASGGGGGSSSSKKRFRTKFTAEQKGRMLEFAENVGWRLQKLDDAMVQHFCQEIGVKRRVLKVWMHNNKHNLASRPLPTSPAQPQSQSMPLAMSMPMPMQVPPSQPGPSGHRGPSSPHAQGELKLD

SEQ ID NO: 64692 - protein, 348 aa, Triticum aestivum
  peptide (1)..(348): Ceres Seq. ID no. 15225426
  misc_feature (70)..(125): Pfam Name: ZF-HD protein dimerisation region Pfam Description: ZF-HD protein dimerisation region
  misc_feature (169)..(310): Homolog of NCBI NO: 15238445 NR Description: expressed protein [Arabidopsis thaliana]
  misc_feature (231)..(298): Homolog of NCBI NO: 15233925 NR Description: expressed protein [Arabidopsis thaliana]
  misc_feature (33)..(129): Homolog of NCBI NO: 15233925 NR Description: expressed protein [Arabidopsis thaliana]
  misc_feature (233)..(297): Homolog of NCBI NO: 15223757 NR Description: expressed protein [Arabidopsis thaliana]
  misc_feature (1)..(148): Homolog of NCBI NO: 15223757 NR Description: expressed protein [Arabidopsis thaliana]
  misc_feature (179)..(297): Homolog of NCBI NO: 20148768 NR Description: hypothetical protein At2g02540/T822.16
  misc_feature (179)..(297): Homolog of NCBI NO: 15226993 NR Description: expressed protein [Arabidopsis thaliana]
  misc_feature (1)..(125): Homolog of NCBI NO: 20148768 NR Description: hypothetical protein At2g02540/T822.16
  misc_feature (1)..(125): Homolog of NCBI NO: 15226993 NR Description: expressed protein [Arabidopsis thaliana]
  misc_feature (10)..(302): Homolog of NCBI NO: 18410804 NR Description: expressed protein [Arabidopsis thaliana]
MHAAASPYGGIGGGGVAVADHAMELHHDHANHNGQSQSQAQDMPSPPAAVSEDSSGKKRAAAIAGGAGGPAVKYRECLKNHAAAIGGNATDGCGEFMPSGEEGSLEALKCSACGCHRNFHRKELDDFDGDSCASHGYGYGHHAVRRLLGPAVPHHHKSSGGLLVTADHYGAYAAARALPPPPPPPLGHHHQIIMPLNMIQTSESDEMDGSGGGGIMGDGRGGLASGGGGGSSSSKKRFRTKFTAEQKGRMLEFAENVGWRLQKLDDAMVQHFCQEIGVKRRVLKVWMHNNKHNLASRPLPTSPAQPQSQSMPLAMSMPMPMQVPPSQPGPSGHRGPSSPHAQGELKLD

SEQ ID NO: 64693 - DNA, 2159 bp, Triticum aestivum
  misc_feature (1)..(2159): Ceres Seq. ID no. 13584520
atcaacggtgaccctcgatagggtttcatcgtcagagaggaaaagccgaaaaggggatctgaggtcagagtgatgcgccgcctgccttctgccgagctccagcctcgcgccgccgcccttgcctgaggcctcctatgaggatcgagtggtgcttcagaagagacgaccggggagctgcagttcccaatcgaagtagcagctccttttcgagctgccatccgcagtcgaaggaatcaagcggctcctctccgagtcgtggtccgcaatccaagcggctccttttttcagcggcaatccggattcaaagcagtccttcccgggctgcaatcagaaacaggtcctgtttcagttttaataaagtctacgagctgttggctccctcacgtggcaggaacgtagctgctataaatctggcctggcggcaaccgtggtacccgccagttttaagaggatacgatcatctcccttcggcgagcgatggccaaaccatccgtggacggcctaggcaaatcctccctcgatatggtggaggacaatggagttgacaggctcagcaagttgcctgatgacgttttgctcaacattgtggagcgacttgatatcgctgatgttgcacgaaccaccatcctctccagacgttggaagcagatccctgctatactctcaaagatttttataatggttgcttcttttcaacccaagcatgaaggtaggaagttaacctcagatgatatagttcgggccaacaccaacgtgctggaagcaaccaggagcatactggtaaagagggctggaggtccacacaccattcacctgctgcgcatgcaattctacttgggagatgagtccattttcattggtcatgctgttgccaacaccatagcaacacacaaggttgcttcagttgagtttacaatcttgaccaaggtgcgcacaaagtttaccaataatgacctgctcactcatgggaggcagttcatgtcattccttgattcgtgtccaaacacatttggtggtcttgcacgcctcacgctagagaatttgaggttaggagaatcagactttcccaaaattttcagtatatgcaagcaactcgaggtcctctgcctctaccactgtgatatgggcattgagtctttgctggaagtggaacactcacaactcagtgaactggtgattggccgtagcgtgcttattaagagggttgatctgaagtgggtaccaaaactcacagtactgaaatttaatatgtttcgatctcaagatgaccccttctgtcttggctatgtcccacttctccagactgtgagcatcattaatactggtttttcttggcacaagatgctcaagataagcgagttgctgggtgaaaccgccataagcaacctgcatttgaacttcaaaagtgaaaagatttgggtcaagccggaaggtcgaagacaattgttaccagtgttacacaagctaaggcttgtgaatttgattaacatttctgaagaatgcgatctgacttggataatgttcatacttcaaggtgcacccacccttaaggaactacgcatcttggtgcgggaccatttatgtgaaatggtaactggggagcggagaaaaaagtatgcctttagcgaggagaaggacaagggactagagtgggaaccatctgcatctgatttcaagcaccacaaccttgctgagctcagaatctatgggaggtttgaagcagaagaaaaaatcgtgcgctttgccaggaatatcatggaagcagcggtgaatctcgaggacataaaactttataagagtccagtgtgtgagaattgcaagcacatgctccaggagtggacgttgaaggagaagtcgttgcttagctacaaactcagcaaggggatgctgtcttcgctcgtccggattcagttcccaagtttaggggaaatttttacttggccaaagtactggtcttagctgcaagctgtggttttttttttgaggggttgcaagctgcagttcacaggagttgttgtatgcatcgattaattctcactagtcaaccttttaaattattcctgttttgagattgtactgagtcgaggaggataaggagtaactcttgacattagtgtgaagtattttggcaaatgaaagtttcggatgtgttattcgtg

SEQ ID NO: 64694 - protein, 493 aa, Triticum aestivum
  peptide (1)..(493): Ceres Seq. ID no. 13584521
  misc_feature (110)..(448): Homolog of NCBI NO: 34904800 NR Description: hypothetical protein~predicted by GeneMark.hmm
  misc_feature (40)..(407): Homolog of NCBI NO: 34393595 NR Description: unknown protein [Oryza sativa (japonica
  misc_feature (181)..(477): Homolog of NCBI NO: 34912106 NR Description: OSJNBb0024F06.4 [Oryza sativa (japonica
  misc_feature (25)..(313): Homolog of NCBI NO: 38345335 NR Description: OSJNBa0081L15.8 [Oryza sativa (japonica
  misc_feature (23)..(448): Homolog of NCBI NO: 34898872 NR Description: hypothetical protein~similar to Oryza sativa
  misc_feature (23)..(448): Homolog of NCBI NO: 34395313 NR Description: hypothetical protein [Oryza sativa (japonica
  misc_feature (25)..(135): Homolog of NCBI NO: 38345337 NR Description: OSJNBa0081L15.10 [Oryza sativa (japonica
  misc_feature (243)..(479): Homolog of NCBI NO: 38345337 NR Description: OSJNBa0081L15.10 [Oryza sativa (japonica
  misc_feature (21)..(473): Homolog of NCBI NO: 38345336 NR Description: OSJNBa0081L15.9 [Oryza sativa (japonica
  misc_feature (10)..(380): Homolog of NCBI NO: 21741445 NR Description: OJ000223_09.1 [Oryza sativa (japonica
MAKPSVDGLGKSSLDMVEDNGVDRLSKLPDDVLLNIVERLDIADVARTTILSRRWKQIPAILSKIFIMVASFQPKHEGRKLTSDDIVRANTNVLEATRSILVKRAGGPHTIHLLRMQFYLGDESIFIGHAVANTIATHKVASVEFTILTKVRTKFTNNDLLTHGRQFMSFLDSCPNTFGGLARLTLENLRLGESDFPKIFSICKQLEVLCLYHCDMGIESLLEVEHSQLSELVIGRSVLIKRVDLKWVPKLTVLKFNMFRSQDDPFCLGYVPLLQTVSIINTGFSWHKMLKISELLGETAISNLHLNFKSEKIWVKPEGRRQLLPVLHKLRLVNLINISEECDLTWIMFILQGAPTLKELRILVRDHLCEMVTGERRKKYAFSEEKDKGLEWEPSASDFKHHNLAELRIYGRFEAEEKIVRFARNIMEAAVNLEDIKLYKSPVCENCKHMLQEWTLKEKSLLSYKLSKGMLSSLVRIQFPSLGEIFTWPKYWS

SEQ ID NO: 64695 - protein, 478 aa, Triticum aestivum
  peptide (1)..(478): Ceres Seq. ID no. 13584522
  misc_feature (95)..(433): Homolog of NCBI NO: 34904800 NR Description: hypothetical protein~predicted by GeneMark.hmm
  misc_feature (25)..(392): Homolog of NCBI NO: 34393595 NR Description: unknown protein [Oryza sativa (japonica
  misc_feature (166)..(462): Homolog of NCBI NO: 34912106 NR Description: OSJNBb0024F06.4 [Oryza sativa (japonica
  misc_feature (10)..(298): Homolog of NCBI NO: 38345335 NR Description: OSJNBa0081L15.8 [Oryza sativa (japonica
  misc_feature (8)..(433): Homolog of NCBI NO: 34898872 NR Description: hypothetical protein~similar to Oryza sativa
  misc_feature (8)..(433): Homolog of NCBI NO: 34395313 NR Description: hypothetical protein [Oryza sativa (japonica
  misc_feature (10)..(120): Homolog of NCBI NO: 38345337 NR Description: OSJNBa0081L15.10 [Oryza sativa (japonica
  misc_feature (228)..(464): Homolog of NCBI NO: 38345337 NR Description: OSJNBa0081L15.10 [Oryza sativa (japonica
  misc_feature (6)..(458): Homolog of NCBI NO: 38345336 NR Description: OSJNBa0081L15.9 [Oryza sativa (japonica
  misc_feature (1)..(365): Homolog of NCBI NO: 21741445 NR Description: OJ000223_09.1 [Oryza sativa (japonica
MVEDNGVDRLSKLPDDVLLNIVERLDIADVARTTILSRRWKQIPAILSKIFIMVASFQPKHEGRKLTSDDIVRANTNVLEATRSILVKRAGGPHTIHLLRMQFYLGDESIFIGHAVANTIATHKVASVEFTILTKVRTKFTNNDLLTHGRQFMSFLDSCPNTFGGLARLTLENLRLGESDFPKIFSICKQLEVLCLYHCDMGIESLLEVEHSQLSELVIGRSVLIKRVDLKWVPKLTVLKFNMFRSQDDPFCLGYVPLLQTVSIINTGFSWHKMLKISELLGETAISNLHLNFKSEKIWVKPEGRRQLLPVLHKLRLVNLINISEECDLTWIMFILQGAPTLKELRILVRDHLCEMVTGERRKKYAFSEEKDKGLEWEPSASDFKHHNLAELRIYGRFEAEEKIVRFARNIMEAAVNLEDIKLYKSPVCENCKHMLQEWTLKEKSLLSYKLSKGMLSSLVRIQFPSLGEIFTWPKYWS

SEQ ID NO: 64696 - protein, 426 aa, Triticum aestivum
  peptide (1)..(426): Ceres Seq. ID no. 13584523
  misc_feature (43)..(381): Homolog of NCBI NO: 34904800 NR Description: hypothetical protein~predicted by GeneMark.hmm
  misc_feature (1)..(340): Homolog of NCBI NO: 34393595 NR Description: unknown protein [Oryza sativa (japonica
  misc_feature (114)..(410): Homolog of NCBI NO: 34912106 NR Description: OSJNBb0024F06.4 [Oryza sativa (japonica
  misc_feature (1)..(246): Homolog of NCBI NO: 38345335 NR Description: OSJNBa0081L15.8 [Oryza sativa (japonica
  misc_feature (1)..(381): Homolog of NCBI NO: 34898872 NR Description: hypothetical protein~similar to Oryza sativa
  misc_feature (1)..(381): Homolog of NCBI NO: 34395313 NR Description: hypothetical protein [Oryza sativa (japonica
  misc_feature (1)..(68): Homolog of NCBI NO: 38345337 NR Description: OSJNBa0081L15.10 [Oryza sativa (japonica
  misc_feature (176)..(412): Homolog of NCBI NO: 38345337 NR Description: OSJNBa0081L15.10 [Oryza sativa (japonica
  misc_feature (1)..(406): Homolog of NCBI NO: 38345336 NR Description: OSJNBa0081L15.9 [Oryza sativa (japonica
  misc_feature (1)..(313): Homolog of NCBI NO: 21741445 NR Description: OJ000223_09.1 [Oryza sativa (japonica
MVASFQPKHEGRKLTSDDIVRANTNVLEATRSILVKRAGGPHTIHLLRMQFYLGDESIFIGHAVANTIATHKVASVEFTILTKVRTKFTNNDLLTHGRQFMSFLDSCPNTFGGLARLTLENLRLGESDFPKIFSICKQLEVLCLYHCDMGIESLLEVEHSQLSELVIGRSVLIKRVDLKWVPKLTVLKFNMFRSQDDPFCLGYVPLLQTVSIINTGFSWHKMLKISELLGETAISNLHLNFKSEKIWVKPEGRRQLLPVLHKLRLVNLINISEECDLTWIMFILQGAPTLKELRILVRDHLCEMVTGERRKKYAFSEEKDKGLEWEPSASDFKHHNLAELRIYGRFEAEEKIVRFARNIMEAAVNLEDIKLYKSPVCENCKHMLQEWTLKEKSLLSYKLSKGMLSSLVRIQFPSLGEIFTWPKYWS

SEQ ID NO: 64697 - DNA, 1200 bp, Triticum aestivum
  misc_feature (1)..(1200): Ceres Seq. ID no. 12617527
cttccccactatacttccaagcaaaggcgagaaccctagcctcacgagcaccgtgcagcggagatcccgaccatcaccgcgatgcaggccccgacgaacccccccgtcgacctcccgccgctggtggcgccgccgccgcgggtgaaggcgccgaccccgcgcccccctccgccggcctcgctccagcccgactccccgggcgtcttcttcaccaacgccgccgcagccgccccactgggctccgcccaccgccgcatcgccatcgccgtcgatctgtcagacgagtccgcctacgccgtaagctgggccgtcgccaactacctccggcccggggacgccgtcatcctcctgcacgtccgctccaccaatgtcctctacggcgccgattggggctccgtcacccccacatcccccgaggacgacgctgaggtcgccgcgcgcaagatggaggaggacttcgacgccctcaccgcttccaaggccgacgacctggccaagccactcgaggaggccaagatcccctacaagatccacatcgtcaaggatcacgacatgaaggagagactctgcctcgaggtggagaggctagggcttagcgccgtgatcatggggagcaaggggtttggtgcggcgcggcgggccagcaagggaaggctcgggagtatgagtgattactgcgtccaccactgtatttgccccgtggtggtggtgcgttcccctgatgatgctgtagcagagggcggggagtctgccactacgatggaggcggcggttggtgcagacgacgtgctgcaccctgtgccagaggaggatgctgagtaccatgacgccgctgaggagcacaaggatacttgattggatctatgcatcgatgtcctgttggatccagcatgtaaaggttctagcagtcgactgttggctgagtgctacctcgtggtttctgctgagcacattagctgttcgttagactttactgttcatgtcgatctgtgcttccactctgttgtatttggtgaacatttgttctctagaacttttgtgcttctttggatatcaaattatatgttgctgatgagacagtttgactacttagagaaccacatgattgcctgctatacttactcggttttgctaaaaaaaaaaaaaaaaaaaaaaaaaaaaagaaaaaaaaaaaaaaaaaagcttatcgataccgtcgac

SEQ ID NO: 64698 - protein, 257 aa, Triticum aestivum
  peptide (1)..(257): Ceres Seq. ID no. 12617528
  misc_feature (56)..(211): Pfam Name: Universal stress protein family Pfam Description: Universal stress protein family
  misc_feature (127)..(220): Homolog of NCBI NO: 34100044 NR Description: anti-bacterial protein [Solanum tuberosum]
  misc_feature (19)..(249): Homolog of NCBI NO: 18423628 NR Description: putative protein
  misc_feature (19)..(249): Homolog of NCBI NO: 8885586 NR Description: gene_id:F24B18.5~pir||T05756~similar to unknown
  misc_feature (6)..(250): Homolog of NCBI NO: 18416966 NR Description: putative protein
  misc_feature (6)..(250): Homolog of NCBI NO: 7486798 NR Description: hypothetical protein M4I22.130 - Arabidopsis
  misc_feature (27)..(253): Homolog of NCBI NO: 30682187 NR Description: expressed protein [Arabidopsis thaliana]
  misc_feature (14)..(253): Homolog of NCBI NO: 25402657 NR Description: protein T23J18.3 [imported] - Arabidopsis
  misc_feature (17)..(255): Homolog of NCBI NO: 34910112 NR Description: B1100D10.31 [Oryza sativa (japonica
  misc_feature (1)..(255): Homolog of NCBI NO: 28971968 NR Description: OSJNBb0041B22.10 [Oryza sativa (japonica
  misc_feature (1)..(257): Homolog of NCBI NO: 33146953 NR Description: CHP-rich zinc finger protein-like
MQAPTNPPVDLPPLVAPPPRVKAPTPRPPPPASLQPDSPGVFFTNAAAAAPLGSAHRRIAIAVDLSDESAYAVSWAVANYLRPGDAVILLHVRSTNVLYGADWGSVTPTSPEDDAEVAARKMEEDFDALTASKADDLAKPLEEAKIPYKIHIVKDHDMKERLCLEVERLGLSAVIMGSKGFGAARRASKGRLGSMSDYCVHHCICPVVVVRSPDDAVAEGGESATTMEAAVGADDVLHPVPEEDAEYHDAAEEHKDT

SEQ ID NO: 64699 - protein, 141 aa, Triticum aestivum
  peptide (1)..(141): Ceres Seq. ID no. 12617529
SPLYFQAKARTLASRAPCSGDPDHHRDAGPDEPPRRPPAAGGAAAAGEGADPAPPSAGLAPARLPGRLLHQRRRSRPTGLRPPPHRHRRRSVRRVRLRRKLGRRQLPPARGRRHPPARPLHQCPLRRRLGLRHPHIPRGRR

SEQ ID NO: 64700 - protein, 136 aa, Triticum aestivum
  peptide (1)..(136): Ceres Seq. ID no. 12617530
  misc_feature (1)..(90): Pfam Name: Universal stress protein family Pfam Description: Universal stress protein family
  misc_feature (6)..(99): Homolog of NCBI NO: 34100044 NR Description: anti-bacterial protein [Solanum tuberosum]
  misc_feature (1)..(128): Homolog of NCBI NO: 18423628 NR Description: putative protein
  misc_feature (1)..(128): Homolog of NCBI NO: 8885586 NR Description: gene_id:F24B18.5~pir||T05756~similar to unknown
  misc_feature (1)..(129): Homolog of NCBI NO: 18416966 NR Description: putative protein
  misc_feature (1)..(129): Homolog of NCBI NO: 7486798 NR Description: hypothetical protein M4I22.130 - Arabidopsis
  misc_feature (1)..(132): Homolog of NCBI NO: 30682187 NR Description: expressed protein [Arabidopsis thaliana]
  misc_feature (1)..(132): Homolog of NCBI NO: 25402657 NR Description: protein T23J18.3 [imported] - Arabidopsis
  misc_feature (1)..(134): Homolog of NCBI NO: 34910112 NR Description: B1100D10.31 [Oryza sativa (japonica
  misc_feature (1)..(134): Homolog of NCBI NO: 28971968 NR Description: OSJNBb0041B22.10 [Oryza sativa (japonica
  misc_feature (1)..(136): Homolog of NCBI NO: 33146953 NR Description: CHP-rich zinc finger protein-like
MEEDFDALTASKADDLAKPLEEAKIPYKIHIVKDHDMKERLCLEVERLGLSAVIMGSKGFGAARRASKGRLGSMSDYCVHHCICPVVVVRSPDDAVAEGGESATTMEAAVGADDVLHPVPEEDAEYHDAAEEHKDT

SEQ ID NO: 64701 - DNA, 1875 bp, Triticum aestivum
  misc_feature (1)..(1875): Ceres Seq. ID no. 14302263
aaaatccaaatctcatcgtcatccccccgcacccccaacccaacccctcccaccccacctccggcgaccggatcggcagggcgcgatggcgaacatcgacatggcggcggtgctggcggacatggaccgggacgcggcggcggacgcgcggacgccgcggaccaagctcgtgtgcacgctcggcccggcctcccgctccgtgcccatgctcgagaagctgctccgcgccgggatgaacgtcgcgcgcttcaacttctcccacggcacccacgagtaccacaaggagaccctcgacgccctccgccaggccatgcacaacaccggcatcctctgcgccgtcatgctcgacaccaagggacctgagattcgtactggatttttgaaggatggtaaaccaatcaaactgacaaagggtcaagaaatcactgtttccactgactacgatatcaagggcgacacgaacaccatctccatgagctacaagaaacttcctcaggatgtgaagcctgggcatgtcatactatgtgctgatggtaccatctccttgtctgttctgtcttgcgacccagcagctggaactgtcagatgtaggtgtgagaacactgcaatgcttggagagaggaagaattgtaatctgccaggaattgtcgtggaccttcctacgctgacggagaaggataaggaggacattttgggatggggtgtgcctaatgacattgacatgattgctttgtcatttgtccgcaaaggatcagatttggtgaccgtcaggcagcttcttggacagcatgcaaagcgcatcaagttaatgtcaaaggttgaaaaccaagagggcattgtaaactttgatgacattctgagggaaaccgatgcctttatggttgccagaggtgatcttggaatggagattccagttgagaagatattccttgcacagaaaatgatgatctacaagtgcaaccttgctggcaagcctgtggtcacagcgacccagatgcttgagtcaatgatcaagtccccgaggccaacccgtgccgaggctactgacgtcgcaaatgcggtgcttgatggaactgactgtgtcatgctcagtggtgaaagcgctgccggagcataccctgaggtggctgtgaagatcatggcgcgcatctgcgtggaggcggagtcttccctggacaacgacgccgtcttcaaggagatgatcaaggccgcgcccctcccgatgagcccgctggagtccctcgcgtcctcggccgtgcgaaccgccaacaaggccagggccactctgatcgtcgtcctgacccgtggcggcaccacggcgaagctggtggccaagtaccggcccagggtgccgatcctgtcggtggtcgtcccggtgctgacgaccgactcgttcgactggaccgtcagctccgagggccccgccaggcacagcctgatctacaggggcctgatcccgctcctcgccgagggctccgccaaggccaccgactcggagtcgacggaggagatcctccaggcggcgctcaagtcggccgtgaagaagcagctctgcaaggctggtgacgccgtcgtcgtcctgcaccgcatcggcgtcgcctccgtcatcaagatctgcaccgtcaagtgagcgccatcgccgggcgctcggcggcccttgctgccgtggcgaactctctgttcttgtggagacgaattgataatcgccgtaccgtccgttgcagtttgttgcatagatccgatccgagctggtaaattaggagggagaggactccgttaatatagagctcttttattattattaccgttggttgatatgatatgccccctgtagtatggtgtttggcaggtgtcatgcctgcacaaatttttctc

SEQ ID NO: 64702 - protein, 542 aa, Triticum aestivum
  peptide (1)..(542): Ceres Seq. ID no. 14302264
  misc_feature (411)..(542): Pfam Name: Pyruvate kinase, alpha/beta domain Pfam Description: Pyruvate kinase, alpha/beta domain
  misc_feature (29)..(542): Homolog of NCBI NO: 322787 NR Description: pyruvate kinase (EC 2.7.1.40), cytosolic - potato
  misc_feature (29)..(542): Homolog of NCBI NO: 2497538 NR Description: Pyruvate kinase, cytosolic isozyme
  misc_feature (29)..(542): Homolog of NCBI NO: 125606 NR Description: Pyruvate kinase, cytosolic isozyme
  misc_feature (29)..(542): Homolog of NCBI NO: 7271955 NR Description: cytosolic pyruvate kinase [Lilium longiflorum]
KSKSHRHPPAPPTQPLPPHLRRPDRQGAMANIDMAAVLADMDRDAAADARTPRTKLVCTLGPASRSVPMLEKLLRAGMNVARFNFSHGTHEYHKETLDALRQAMHNTGILCAVMLDTKGPEIRTGFLKDGKPIKLTKGQEITVSTDYDIKGDTNTISMSYKKLPQDVKPGHVILCADGTISLSVLSCDPAAGTVRCRCENTAMLGERKNCNLPGIVVDLPTLTEKDKEDILGWGVPNDIDMIALSFVRKGSDLVTVRQLLGQHAKRIKLMSKVENQEGIVNFDDILRETDAFMVARGDLGMEIPVEKIFLAQKMMIYKCNLAGKPVVTATQMLESMIKSPRPTRAEATDVANAVLDGTDCVMLSGESAAGAYPEVAVKIMARICVEAESSLDNDAVFKEMIKAAPLPMSPLESLASSAVRTANKARATLIVVLTRGGTTAKLVAKYRPRVPILSVVVPVLTTDSFDWTVSSEGPARHSLIYRGLIPLLAEGSAKATDSESTEEILQAALKSAVKKQLCKAGDAVVVLHRIGVASVIKICTVK

SEQ ID NO: 64703 - protein, 514 aa, Triticum aestivum
  peptide (1)..(514): Ceres Seq. ID no. 14302265
  misc_feature (383)..(514): Pfam Name: Pyruvate kinase, alpha/beta domain Pfam Description: Pyruvate kinase, alpha/beta domain
  misc_feature (1)..(514): Homolog of NCBI NO: 322787 NR Description: pyruvate kinase (EC 2.7.1.40), cytosolic - potato
  misc_feature (1)..(514): Homolog of NCBI NO: 2497538 NR Description: Pyruvate kinase, cytosolic isozyme
  misc_feature (1)..(514): Homolog of NCBI NO: 125606 NR Description: Pyruvate kinase, cytosolic isozyme
  misc_feature (1)..(514): Homolog of NCBI NO: 7271955 NR Description: cytosolic pyruvate kinase [Lilium longiflorum]
MANIDMAAVLADMDRDAAADARTPRTKLVCTLGPASRSVPMLEKLLRAGMNVARFNFSHGTHEYHKETLDALRQAMHNTGILCAVMLDTKGPEIRTGFLKDGKPIKLTKGQEITVSTDYDIKGDTNTISMSYKKLPQDVKPGHVILCADGTISLSVLSCDPAAGTVRCRCENTAMLGERKNCNLPGIVVDLPTLTEKDKEDILGWGVPNDIDMIALSFVRKGSDLVTVRQLLGQHAKRIKLMSKVENQEGIVNFDDILRETDAFMVARGDLGMEIPVEKIFLAQKMMIYKCNLAGKPVVTATQMLESMIKSPRPTRAEATDVANAVLDGTDCVMLSGESAAGAYPEVAVKIMARICVEAESSLDNDAVFKEMIKAAPLPMSPLESLASSAVRTANKARATLIVVLTRGGTTAKLVAKYRPRVPILSVVVPVLTTDSFDWTVSSEGPARHSLIYRGLIPLLAEGSAKATDSESTEEILQAALKSAVKKQLCKAGDAVVVLHRIGVASVIKICTVK

SEQ ID NO: 64704 - protein, 509 aa, Triticum aestivum
  peptide (1)..(509): Ceres Seq. ID no. 14302266
  misc_feature (378)..(509): Pfam Name: Pyruvate kinase, alpha/beta domain Pfam Description: Pyruvate kinase, alpha/beta domain
  misc_feature (1)..(509): Homolog of NCBI NO: 322787 NR Description: pyruvate kinase (EC 2.7.1.40), cytosolic - potato
  misc_feature (1)..(509): Homolog of NCBI NO: 2497538 NR Description: Pyruvate kinase, cytosolic isozyme
  misc_feature (1)..(509): Homolog of NCBI NO: 125606 NR Description: Pyruvate kinase, cytosolic isozyme
  misc_feature (1)..(509): Homolog of NCBI NO: 7271955 NR Description: cytosolic pyruvate kinase [Lilium longiflorum]
MAAVLADMDRDAAADARTPRTKLVCTLGPASRSVPMLEKLLRAGMNVARFNFSHGTHEYHKETLDALRQAMHNTGILCAVMLDTKGPEIRTGFLKDGKPIKLTKGQEITVSTDYDIKGDTNTISMSYKKLPQDVKPGHVILCADGTISLSVLSCDPAAGTVRCRCENTAMLGERKNCNLPGIVVDLPTLTEKDKEDILGWGVPNDIDMIALSFVRKGSDLVTVRQLLGQHAKRIKLMSKVENQEGIVNFDDILRETDAFMVARGDLGMEIPVEKIFLAQKMMIYKCNLAGKPVVTATQMLESMIKSPRPTRAEATDVANAVLDGTDCVMLSGESAAGAYPEVAVKIMARICVEAESSLDNDAVFKEMIKAAPLPMSPLESLASSAVRTANKARATLIVVLTRGGTTAKLVAKYRPRVPILSVVVPVLTTDSFDWTVSSEGPARHSLIYRGLIPLLAEGSAKATDSESTEEILQAALKSAVKKQLCKAGDAVVVLHRIGVASVIKICTVK

SEQ ID NO: 64705 - DNA, 959 bp, Triticum aestivum
  misc_feature (1)..(959): Ceres Seq. ID no. 13597898
gcactactacagtccaagccgcaccgctctctcgctagccacctccctctcgtccgccaccgcattaactcttcgcccaccgcttcccaacaaacccgccgcccgcccttgaccgcggcagccatggcgctcgcagcggcacaacgccagcggtcggcgtcggccgtgctggtcgcggcggtgctgctatcgctttcactctcactctcatgcgtgcaggcgcaggcgccgcacgtggcggtgccaccttcggctcccccgaaggcggcggcggcgcctgggccggccgcggggttgagcgcggcgtgcctcaactcgctgctcaacatgtcggactgcctgccgtacgtgcaggccgggagcaaggcgcgggcgccggacaagccgtgctgcccggagctggccggcatggtgggctccaaccccgtctgcctctgcgagctcctctccggggccgccgactccctcggcatcgccgtcgactacgcccgcgcgctcgcgctccccggcgtctgccgcgtcgccaccccgcccatcaccacctgcgcagcaatgggatacaacgttcgtctgggcccgtctccggcgcccgcgccgggatctccctcgcccatgtcgcccggcggcagcccacagtaccccgctggtccttcgccgttcgcctcgccgccggagtcgcccaagcccagccacgcggcgcgccgcttccacgccgccggcgccctygtcgccctcgccgcctccttygccgtcgggatggccttcttytaagcggacaaggccagcgagactgttaaccgttcgataaaaatctgtcgcgtgaatgtcatggacatgctttctccgtctctagtctgtgcgctagtactccagtatgatgattctaggtagataagataatacagtaccagttatttcccgccaatatgttatgtgctatgctaatcaattgatctgtc

SEQ ID NO: 64706 - protein, 256 aa, Triticum aestivum
  peptide (1)..(256): Ceres Seq. ID no. 15222229
  misc_feature (103)..(182): Pfam Name: Protease inhibitor/seed storage/LTP family Pfam Description: Protease inhibitor/seed storage/LTP family
  misc_feature (60)..(210): Homolog of NCBI NO: 21618293 NR Description: unknown [Arabidopsis thaliana]
  misc_feature (90)..(233): Homolog of NCBI NO: 27765012 NR Description: At2g13820 [Arabidopsis thaliana]
  misc_feature (90)..(233): Homolog of NCBI NO: 15225509 NR Description: protease inhibitor/seed storage/lipid transfer
  misc_feature (96)..(245): Homolog of NCBI NO: 25553596 NR Description: OJ1656_E11.27 [Oryza sativa (japonica
  misc_feature (60)..(210): Homolog of NCBI NO: 18401329 NR Description: protease inhibitor/seed storage/lipid transfer
  misc_feature (52)..(221): Homolog of NCBI NO: 28269449 NR Description: putative protease inhibitor
  misc_feature (67)..(255): Homolog of NCBI NO: 25553588 NR Description: OJ1656_E11.14 [Oryza sativa (japonica
  misc_feature (53)..(227): Homolog of NCBI NO: 21617892 NR Description: lipid-transfer protein-like protein [Arabidopsis
  misc_feature (53)..(227): Homolog of NCBI NO: 15229756 NR Description: protease inhibitor/seed storage/lipid transfer
  misc_feature (60)..(253): Homolog of NCBI NO: 34909226 NR Description: P0432B10.23 [Oryza sativa (japonica
  misc_feature (242)..(242): Xaa is any aa, unknown or other
  misc_feature (249)..(249): Xaa is any aa, unknown or other
  misc_feature (256)..(256): Xaa is any aa, unknown or other
ALLQSKPHRSLASHLPLVRHRINSSPTASQQTRRPPLTAAAMALAAAQRQRSASAVLVAAVLLSLSLSLSCVQAQAPHVAVPPSAPPKAAAAPGPAAGLSAACLNSLLNMSDCLPYVQAGSKARAPDKPCCPELAGMVGSNPVCLCELLSGAADSLGIAVDYARALALPGVCRVATPPITTCAAMGYNVRLGPSPAPAPGSPSPMSPGGSPQYPAGPSPFASPPESPKPSHAARRFHAAGAXVALAASXAVGMAFX

SEQ ID NO: 64707 - protein, 215 aa, Triticum aestivum
  peptide (1)..(215): Ceres Seq. ID no. 15222230
  misc_feature (62)..(141): Pfam Name: Protease inhibitor/seed storage/LTP family Pfam Description: Protease inhibitor/seed storage/LTP family
  misc_feature (19)..(169): Homolog of NCBI NO: 21618293 NR Description: unknown [Arabidopsis thaliana]
  misc_feature (49)..(192): Homolog of NCBI NO: 27765012 NR Description: At2g13820 [Arabidopsis thaliana]
  misc_feature (49)..(192): Homolog of NCBI NO: 15225509 NR Description: protease inhibitor/seed storage/lipid transfer
  misc_feature (55)..(204): Homolog of NCBI NO: 25553596 NR Description: OJ1656_E11.27 [Oryza sativa (japonica
  misc_feature (19)..(169): Homolog of NCBI NO: 18401329 NR Description: protease inhibitor/seed storage/lipid transfer
  misc_feature (11)..(180): Homolog of NCBI NO: 28269449 NR Description: putative protease inhibitor
  misc_feature (26)..(214): Homolog of NCBI NO: 25553588 NR Description: OJ1656_E11.14 [Oryza sativa (japonica
  misc_feature (12)..(186): Homolog of NCBI NO: 21617892 NR Description: lipid-transfer protein-like protein [Arabidopsis
  misc_feature (12)..(186): Homolog of NCBI NO: 15229756 NR Description: protease inhibitor/seed storage/lipid transfer
  misc_feature (19)..(212): Homolog of NCBI NO: 34909226 NR Description: P0432B10.23 [Oryza sativa (japonica
  misc_feature (201)..(201): Xaa is any aa, unknown or other
  misc_feature (208)..(208): Xaa is any aa, unknown or other
  misc_feature (215)..(215): Xaa is any aa, unknown or other
MALAAAQRQRSASAVLVAAVLLSLSLSLSCVQAQAPHVAVPPSAPPKAAAAPGPAAGLSAACLNSLLNMSDCLPYVQAGSKARAPDKPCCPELAGMVGSNPVCLCELLSGAADSLGIAVDYARALALPGVCRVATPPITTCAAMGYNVRLGPSPAPAPGSPSPMSPGGSPQYPAGPSPFASPPESPKPSHAARRFHAAGAXVALAASXAVGMAFX

SEQ ID NO: 64708 - protein, 195 aa, Triticum aestivum
  peptide (1)..(195): Ceres Seq. ID no. 15222231
  misc_feature (173)..(173): Xaa is any aa, unknown or other
  misc_feature (180)..(180): Xaa is any aa, unknown or other
  misc_feature (187)..(187): Xaa is any aa, unknown or other
MRAGAGAARGGATFGSPEGGGGAWAGRGVERGVPQLAAQHVGLPAVRAGREQGAGAGQAVLPGAGRHGGLQPRLPLRAPLRGRRLPRHRRRLRPRARAPRRLPRRHPAHHHLRSNGIQRSSGPVSGARAGISLAHVARRQPTVPRWSFAVRLAAGVAQAQPRGAPLPRRRRPXRPRRLLXRRDGLLXSGQGQRDC

SEQ ID NO: 64709 - DNA, 1342 bp, Triticum aestivum
  misc_feature (1)..(1342): Ceres Seq. ID no. 13656196
atcccggtccggggcgcacatccatctcccatgcccgcacctccacctgagctggactccctggtatagcgagcgcgccgaccaactccatagctggggcttctccaatcaatccagccggccagagcgcagctcccgcccacccttccccggtccccgtctcttccgcaaaggagcagccgcgccattgccgtgggaggaagcaatgggggcgacacgcgcggacgccgacgagaaggaggaaggcgtgatggcgacggacttcttttggtcgtacacggacgaaccgcacgcgtcccgccgccgggagatcctggccaagtacccgcagatcaaggagctcttcggctcggatcctctcgccttcatcaagatagccgcagttgtttcgcttcagctatggaccgccacgctcctgcgagatgcaggctggtcgaagatactgccggtcgcttacttcttcggttcctttctgaatcacaatctcttccttgcgatccacgagctcagccacaacctcgccttcgccaccccatccctgaaccgctggctaggcatcttcgcaaacctgcccatcggcgtcccaatgtcggtgacattccagaaataccacctggagcaccaccggttccaaggcgtggacgggatcgacatggacatccccagccagacagaggcgcacgtcgtaaagaacaccgtcagcaaatccatctgggtcgtgctccagctcttcttctacgcgctcaggccgctcttcctgaagccgaagcccccgggcctgtgggagttcaccaacctgacgatccaggtcgcgctcgacgcggcaatggtgtacctctacggctggaagtcgctggcctacctcatcctgtctacgttcctcggtggcggcatgcacccgatggccggccacttcatctcggagcactacgtcttcagcccggagcaggagacctactcgtactacgggccgctgaacctgatgacgtggcacgtcgggtaccacaacgagcaccacgacttccccaggatccccggcgccaagctgcacaaggtgaaggagatcgcgccggagtactatgacagtctgaaatcatacaggtcctggagccaggtgatatacatgtacgtcatggaccagacggtaggccctttcagccggatgaagcggaaggcgcccaagaaagatttgtagaagaaacctctgcctgtaggttaagttttgccacacatagctgttttagatgatgttttgatcccctgggccactgtctcactgaactactgaagtgttaactcgaaggtattttgcttgtgtgttcagggaacttgcacttgttcc

SEQ ID NO: 64710 - protein, 397 aa, Triticum aestivum
  peptide (1)..(397): Ceres Seq. ID no. 13656197
  misc_feature (151)..(360): Pfam Name: Fatty acid desaturase Pfam Description: Fatty acid desaturase
  misc_feature (60)..(397): Homolog of NCBI NO: 19113199 NR Description: putative fatty acid desaturase
  misc_feature (83)..(394): Homolog of NCBI NO: 20147516 NR Description: sphingolipid delta 4 desaturase protein DES1 [Mus
  misc_feature (83)..(394): Homolog of NCBI NO: 6681175 NR Description: degenerative spermatocyte homolog [Mus musculus]
  misc_feature (83)..(394): Homolog of NCBI NO: 16758022 NR Description: degenerative spermatocyte homolog [Rattus
  misc_feature (83)..(390): Homolog of NCBI NO: 4505193 NR Description: sphingolipid delta 4 desaturase
  misc_feature (83)..(394): Homolog of NCBI NO: 34304727 NR Description: fatty acid desaturase [Microtus fortis]
  misc_feature (83)..(392): Homolog of NCBI NO: 31240007 NR Description: ENSANGP00000016966 [Anopheles gambiae]
  misc_feature (83)..(391): Homolog of NCBI NO: 17136246 NR Description: infertile crescent CG9078-PA [Drosophila
  misc_feature (70)..(396): Homolog of NCBI NO: 15234510 NR Description: fatty acid desaturase family protein [Arabidopsis
  misc_feature (78)..(395): Homolog of NCBI NO: 20147520 NR Description: putative sphingolipid delta 4 desaturase DES-1
SRSGAHIHLPCPHLHLSWTPWYSERADQLHSWGFSNQSSRPERSSRPPFPGPRLFRKGAAAPLPWEEAMGATRADADEKEEGVMATDFFWSYTDEPHASRRREILAKYPQIKELFGSDPLAFIKIAAVVSLQLWTATLLRDAGWSKILPVAYFFGSFLNHNLFLAIHELSHNLAFATPSLNRWLGIFANLPIGVPMSVTFQKYHLEHHRFQGVDGIDMDIPSQTEAHVVKNTVSKSIWVVLQLFFYALRPLFLKPKPPGLWEFTNLTIQVALDAAMVYLYGWKSLAYLILSTFLGGGMHPMAGHFISEHYVFSPEQETYSYYGPLNLMTWHVGYHNEHHDFPRIPGAKLHKVKEIAPEYYDSLKSYRSWSQVIYMYVMDQTVGPFSRMKRKAPKKDL

SEQ ID NO: 64711 - protein, 329 aa, Triticum aestivum
  peptide (1)..(329): Ceres Seq. ID no. 13656198
  misc_feature (83)..(292): Pfam Name: Fatty acid desaturase Pfam Description: Fatty acid desaturase
  misc_feature (1)..(329): Homolog of NCBI NO: 19113199 NR Description: putative fatty acid desaturase
  misc_feature (15)..(326): Homolog of NCBI NO: 20147516 NR Description: sphingolipid delta 4 desaturase protein DES1 [Mus
  misc_feature (15)..(326): Homolog of NCBI NO: 6681175 NR Description: degenerative spermatocyte homolog [Mus musculus]
  misc_feature (15)..(326): Homolog of NCBI NO: 16758022 NR Description: degenerative spermatocyte homolog [Rattus
  misc_feature (15)..(322): Homolog of NCBI NO: 4505193 NR Description: sphingolipid delta 4 desaturase
  misc_feature (15)..(326): Homolog of NCBI NO: 34304727 NR Description: fatty acid desaturase [Microtus fortis]
  misc_feature (15)..(324): Homolog of NCBI NO: 31240007 NR Description: ENSANGP00000016966 [Anopheles gambiae]
  misc_feature (15)..(323): Homolog of NCBI NO: 17136246 NR Description: infertile crescent CG9078-PA [Drosophila
  misc_feature (2)..(328): Homolog of NCBI NO: 15234510 NR Description: fatty acid desaturase family protein [Arabidopsis
  misc_feature (10)..(327): Homolog of NCBI NO: 20147520 NR Description: putative sphingolipid delta 4 desaturase DES-1
MGATRADADEKEEGVMATDFFWSYTDEPHASRRREILAKYPQIKELFGSDPLAFIKIAAVVSLQLWTATLLRDAGWSKILPVAYFFGSFLNHNLFLAIHELSHNLAFATPSLNRWLGIFANLPIGVPMSVTFQKYHLEHHRFQGVDGIDMDIPSQTEAHVVKNTVSKSIWVVLQLFFYALRPLFLKPKPPGLWEFTNLTIQVALDAAMVYLYGWKSLAYLILSTFLGGGMHPMAGHFISEHYVFSPEQETYSYYGPLNLMTWHVGYHNEHHDFPRIPGAKLHKVKEIAPEYYDSLKSYRSWSQVIYMYVMDQTVGPFSRMKRKAPKKDL

SEQ ID NO: 64712 - protein, 314 aa, Triticum aestivum
  peptide (1)..(314): Ceres Seq. ID no. 13656199
  misc_feature (68)..(277): Pfam Name: Fatty acid desaturase Pfam Description: Fatty acid desaturase
  misc_feature (1)..(314): Homolog of NCBI NO: 19113199 NR Description: putative fatty acid desaturase
  misc_feature (1)..(311): Homolog of NCBI NO: 20147516 NR Description: sphingolipid delta 4 desaturase protein DES1 [Mus
  misc_feature (1)..(311): Homolog of NCBI NO: 6681175 NR Description: degenerative spermatocyte homolog [Mus musculus]
  misc_feature (1)..(311): Homolog of NCBI NO: 16758022 NR Description: degenerative spermatocyte homolog [Rattus
  misc_feature (1)..(307): Homolog of NCBI NO: 4505193 NR Description: sphingolipid delta 4 desaturase
  misc_feature (1)..(311): Homolog of NCBI NO: 34304727 NR Description: fatty acid desaturase [Microtus fortis]
  misc_feature (1)..(309): Homolog of NCBI NO: 31240007 NR Description: ENSANGP00000016966 [Anopheles gambiae]
  misc_feature (1)..(308): Homolog of NCBI NO: 17136246 NR Description: infertile crescent CG9078-PA [Drosophila
  misc_feature (1)..(313): Homolog of NCBI NO: 15234510 NR Description: fatty acid desaturase family protein [Arabidopsis
  misc_feature (1)..(312): Homolog of NCBI NO: 20147520 NR Description: putative sphingolipid delta 4 desaturase DES-1
MATDFFWSYTDEPHASRRREILAKYPQIKELFGSDPLAFIKIAAVVSLQLWTATLLRDAGWSKILPVAYFFGSFLNHNLFLAIHELSHNLAFATPSLNRWLGIFANLPIGVPMSVTFQKYHLEHHRFQGVDGIDMDIPSQTEAHVVKNTVSKSIWVVLQLFFYALRPLFLKPKPPGLWEFTNLTIQVALDAAMVYLYGWKSLAYLILSTFLGGGMHPMAGHFISEHYVFSPEQETYSYYGPLNLMTWHVGYHNEHHDFPRIPGAKLHKVKEIAPEYYDSLKSYRSWSQVIYMYVMDQTVGPFSRMKRKAPKKDL

SEQ ID NO: 64713 - DNA, 1099 bp, Triticum aestivum
  misc_feature (1)..(1099): Ceres Seq. ID no. 13597506
actagtagcagctatagctagcctacgagccacacacatcacatcaaagcgcatccagcaggcaatggcgtcctcctcctcgtctccgctgctcatgttgctgctgctgccgctcctgcgcgccatggcgcgcccgtgctccgccgtcgacgccatcggcacctactgcgccaagaacggcaccagcgcggagacgcaggccagcatcgaccaggtcctcgcggcgctcgtcccgcgcgcctcggccgcctactacgccacggccaccgccggccgctcctcgtccgcggtctggggcctcgcgcagtgccgcggcgacgtgccgcgccaggactgctcgctctgcctcgccgccgcggccaaggaggtcgcgtcgtcctgccgcggcagctccgacggccgggtcttctacgactactgcctgctccggtactccacctccaacttcgtcggcctcgcggacacgggctacacgctcatcctcctcaacacccagaacgccaccggcgtcgacctggccgcgttcgaccgggcgcaggggaaactcatgtcccgcgtcgcctccgaggccggcgacgccgccaacaaggggcttgcgacggacacgacgaggctcggcagcgagggcggcggagccaagacgaccatctacgggctcggctggtgcaccagggacatcacggcggcggactgcgggctttgcgtggcgcaggcggtggcggagctgcccaactactgccggtaccggcgtgggtgccgcgtcatctacagcagctgcatggcgcgctacgaggtgtaccccttcttcttccccctcgacggcgccgacgagtcggccgacgagctcggacagtgcgacaagatcgtcttgaactacccgtgatgggtggagtacagctacgtagtcaactacggtgctagtatctactgtacgtagcactctagctcgttgtgcgtacctggtggtggcgaatccatttgtagtgtatggctagctcgtagctagcctagaatccaagcagggtcaaaataattttcgttaagtgcaaaataataagcgaaaaactagccttgtgttcctcgcacatgtttgcttgcg

SEQ ID NO: 64714 - protein, 293 aa, Triticum aestivum
  peptide (1)..(293): Ceres Seq. ID no. 15222116
  misc_feature (97)..(151): Pfam Name: Domain of unknown function DUF26 Pfam Description: Domain of unknown function DUF26
  misc_feature (33)..(269): Homolog of NCBI NO: 34898856 NR Description: OJ1058_A12.26 [Oryza sativa (japonica
  misc_feature (46)..(268): Homolog of NCBI NO: 18403247 NR Description: receptor protein kinase-related [Arabidopsis
  misc_feature (35)..(269): Homolog of NCBI NO: 34898854 NR Description: OJ1058_A12.25 [Oryza sativa (japonica
  misc_feature (38)..(269): Homolog of NCBI NO: 34393282 NR Description: putative serine/threonine kinase receptor
  misc_feature (38)..(269): Homolog of NCBI NO: 34898846 NR Description: OJ1058_A12.21 [Oryza sativa (japonica
  misc_feature (31)..(291): Homolog of NCBI NO: 38636827 NR Description: putative 33-kDa secretory protein
  misc_feature (22)..(291): Homolog of NCBI NO: 38636830 NR Description: putative 33 kDa secretory protein
  misc_feature (22)..(291): Homolog of NCBI NO: 23450951 NR Description: 33-kDa secretory protein [Oryza sativa]
  misc_feature (22)..(291): Homolog of NCBI NO: 3643271 NR Description: 33 kDa secretory protein [Oryza sativa]
  misc_feature (38)..(291): Homolog of NCBI NO: 15239000 NR Description: 33 kDa secretory protein-related [Arabidopsis
LVAAIASLRATHITSKRIQQAMASSSSSPLLMLLLLPLLRAMARPCSAVDAIGTYCAKNGTSAETQASIDQVLAALVPRASAAYYATATAGRSSSAVWGLAQCRGDVPRQDCSLCLAAAAKEVASSCRGSSDGRVFYDYCLLRYSTSNFVGLADTGYTLILLNTQNATGVDLAAFDRAQGKLMSRVASEAGDAANKGLATDTTRLGSEGGGAKTTIYGLGWCTRDITAADCGLCVAQAVAELPNYCRYRRGCRVIYSSCMARYEVYPFFFPLDGADESADELGQCDKIVLNYP

SEQ ID NO: 64715 - protein, 272 aa, Triticum aestivum
  peptide (1)..(272): Ceres Seq. ID no. 15222117
  misc_feature (76)..(130): Pfam Name: Domain of unknown function DUF26 Pfam Description: Domain of unknown function DUF26
  misc_feature (12)..(248): Homolog of NCBI NO: 34898856 NR Description: OJ1058_A12.26 [Oryza sativa (japonica
  misc_feature (25)..(247): Homolog of NCBI NO: 18403247 NR Description: receptor protein kinase-related [Arabidopsis
  misc_feature (14)..(248): Homolog of NCBI NO: 34898854 NR Description: OJ1058_A12.25 [Oryza sativa (japonica
  misc_feature (17)..(248): Homolog of NCBI NO: 34393282 NR Description: putative serine/threonine kinase receptor
  misc_feature (17)..(248): Homolog of NCBI NO: 34898846 NR Description: OJ1058_A12.21 [Oryza sativa (japonica
  misc_feature (10)..(270): Homolog of NCBI NO: 38636827 NR Description: putative 33-kDa secretory protein
  misc_feature (1)..(270): Homolog of NCBI NO: 38636830 NR Description: putative 33 kDa secretory protein
  misc_feature (1)..(270): Homolog of NCBI NO: 23450951 NR Description: 33-kDa secretory protein [Oryza sativa]
  misc_feature (1)..(270): Homolog of NCBI NO: 3643271 NR Description: 33 kDa secretory protein [Oryza sativa]
  misc_feature (17)..(270): Homolog of NCBI NO: 15239000 NR Description: 33 kDa secretory protein-related [Arabidopsis
MASSSSSPLLMLLLLPLLRAMARPCSAVDAIGTYCAKNGTSAETQASIDQVLAALVPRASAAYYATATAGRSSSAVWGLAQCRGDVPRQDCSLCLAAAAKEVASSCRGSSDGRVFYDYCLLRYSTSNFVGLADTGYTLILLNTQNATGVDLAAFDRAQGKLMSRVASEAGDAANKGLATDTTRLGSEGGGAKTTIYGLGWCTRDITAADCGLCVAQAVAELPNYCRYRRGCRVIYSSCMARYEVYPFFFPLDGADESADELGQCDKIVLNYP

SEQ ID NO: 64716 - protein, 262 aa, Triticum aestivum
  peptide (1)..(262): Ceres Seq. ID no. 15222118
  misc_feature (66)..(120): Pfam Name: Domain of unknown function DUF26 Pfam Description: Domain of unknown function DUF26
  misc_feature (2)..(238): Homolog of NCBI NO: 34898856 NR Description: OJ1058_A12.26 [Oryza sativa (japonica
  misc_feature (15)..(237): Homolog of NCBI NO: 18403247 NR Description: receptor protein kinase-related [Arabidopsis
  misc_feature (4)..(238): Homolog of NCBI NO: 34898854 NR Description: OJ1058_A12.25 [Oryza sativa (japonica
  misc_feature (7)..(238): Homolog of NCBI NO: 34393282 NR Description: putative serine/threonine kinase receptor
  misc_feature (7)..(238): Homolog of NCBI NO: 34898846 NR Description: OJ1058_A12.21 [Oryza sativa (japonica
  misc_feature (1)..(260): Homolog of NCBI NO: 38636827 NR Description: putative 33-kDa secretory protein
  misc_feature (1)..(260): Homolog of NCBI NO: 38636830 NR Description: putative 33 kDa secretory protein
  misc_feature (1)..(260): Homolog of NCBI NO: 23450951 NR Description: 33-kDa secretory protein [Oryza sativa]
  misc_feature (1)..(260): Homolog of NCBI NO: 3643271 NR Description: 33 kDa secretory protein [Oryza sativa]
  misc_feature (7)..(260): Homolog of NCBI NO: 15239000 NR Description: 33 kDa secretory protein-related [Arabidopsis
MLLLLPLLRAMARPCSAVDAIGTYCAKNGTSAETQASIDQVLAALVPRASAAYYATATAGRSSSAVWGLAQCRGDVPRQDCSLCLAAAAKEVASSCRGSSDGRVFYDYCLLRYSTSNFVGLADTGYTLILLNTQNATGVDLAAFDRAQGKLMSRVASEAGDAANKGLATDTTRLGSEGGGAKTTIYGLGWCTRDITAADCGLCVAQAVAELPNYCRYRRGCRVIYSSCMARYEVYPFFFPLDGADESADELGQCDKIVLNYP

SEQ ID NO: 64717 - DNA, 1682 bp, Triticum aestivum
  misc_feature (1)..(1682): Ceres Seq. ID no. 12625948
ccatcaagacaggcagacagttccgtgggcaccagaaccacaccccttcccgttcagacgcggcggaagatcgaatcggccgcgcacggcgatggcgacgactccaccgccgccgccgcttcctctcctcctccttcccctcctcctgctcgcggccttctccgccgccgaggagtttccgcgcgacgggaaggtgatagacctggacgacagcaacttcgaggcggccctcagctccatcgatttcctcttcgtcgacttctacgcgccatggtgcggccactgcaagcgcctcgcccccgagttagatgaagctgcaccggtgttggtgggattgagtgagcccatcatggttgccaaagtaaatgccgacaagtacaggaagcttggatcaaaatatggagtggatgggttccctactctaatgctctttatacatggggtccctattgaatacactggttcaaggaaagctgacttgcttgtccgcaatcttaagaagtttgttgcgcctgatgtttctactcttgagtcggattctgcaatcaagagctttgttgagaatgccggcacaagctttccgatgttcatcggttttggggtcaacgagtcattgattgctgaatatggaggaaaatacaagaaaagagcatggtttgccgtcgcaaaagatttttctgaggactggatggcgacatatgattttaataagatcccagcattggttgcagttcatccaaagtataatgaacaaagtgtgttctatggcccatttgaaggacgtttcttggaggattttgtaaggcaatcgctgctgcctttgactgtccccatcaacaccgagacactgaaattgctggatgatgatgacagaaaagttgtcctcgcaattttggaggatgactcggatgtaaattctacccagctggtaaaaattttgaggtctgctgctcatgcgaaccgtgatttggtgtttggatatgttggagtcaaacaatgggaggagtttgtggagacttttgatgtttccaagagctcacaattgccaaagctgctagtgtgggacagaaatgaagagtatgaactagtggagggttcagagaagttagaagaaggcgaccaagcatcccaattaagccaattccttgagggatatagagcagggagaacaataaagaagaaagtcagtggcccttccttcatgggtttcatgcactctcttgtcagcatgaactcattatacattctcatgtttgttgttgctcttctcggtgtcatgatgtactttactggccaagatgatactcagccaagacgggttcatgacgagtgatagcttcttgcatgaaaagaaggttatcaaccaggagttctagctcggaggtcgtattgccacctttgaactgttgttagccctgaagaggtcaggttttagcggttgcttgtgatattcgccgtttctctgtcagcaatcatcaggtcctgcattttctctgcccccgtttctgtttgttggttagagcttagcaactagcccccatgtaaagctagaaacacttcctaattttgccacttgtgtggagtttttatttattttattgcgagggttatatggtgtatcatactctgccaaacttttgtacaactgaactgatacaagtattaataatgtgtgaattgtg

SEQ ID NO: 64718 - protein, 443 aa, Triticum aestivum
  peptide (1)..(443): Ceres Seq. ID no. 12625949
  misc_feature (42)..(322): Pfam Name: Calsequestrin Pfam Description: Calsequestrin
  misc_feature (43)..(295): Homolog of NCBI NO: 20805287 NR Description: protein disulfide isomerase-like PDI-M
  misc_feature (43)..(384): Homolog of NCBI NO: 20913929 NR Description: prolyl 4-hydroxylase, beta polypeptide [Mus
  misc_feature (42)..(394): Homolog of NCBI NO: 14494995 NR Description: putative protein disulfide isomerase [Toxoplasma
  misc_feature (44)..(384): Homolog of NCBI NO: 27806501 NR Description: procollagen-proline, 2-oxoglutarate 4-dioxygenase
  misc_feature (43)..(384): Homolog of NCBI NO: 129731 NR Description: PROTEIN DISULFIDE ISOMERASE PRECURSOR (PDI)
  misc_feature (44)..(290): Homolog of NCBI NO: 20805285 NR Description: protein disulfide isomerase-like PDI-H
  misc_feature (43)..(384): Homolog of NCBI NO: 27819775 NR Description: RH09122p [Drosophila melanogaster]
  misc_feature (45)..(432): Homolog of NCBI NO: 18399786 NR Description: protein disulfide isomerase, putative
  misc_feature (45)..(432): Homolog of NCBI NO: 8778373 NR Description: F15O4.20 [Arabidopsis thaliana]
  misc_feature (32)..(439): Homolog of NCBI NO: 38344940 NR Description: OSJNBa0084A10.16 [Oryza sativa (japonica
HQDRQTVPWAPEPHPFPFRRGGRSNRPRTAMATTPPPPPLPLLLLPLLLLAAFSAAEEFPRDGKVIDLDDSNFEAALSSIDFLFVDFYAPWCGHCKRLAPELDEAAPVLVGLSEPIMVAKVNADKYRKLGSKYGVDGFPTLMLFIHGVPIEYTGSRKADLLVRNLKKFVAPDVSTLESDSAIKSFVENAGTSFPMFIGFGVNESLIAEYGGKYKKRAWFAVAKDFSEDWMATYDFNKIPALVAVHPKYNEQSVFYGPFEGRFLEDFVRQSLLPLTVPINTETLKLLDDDDRKVVLAILEDDSDVNSTQLVKILRSAAHANRDLVFGYVGVKQWEEFVETFDVSKSSQLPKLLVWDRNEEYELVEGSEKLEEGDQASQLSQFLEGYRAGRTIKKKVSGPSFMGFMHSLVSMNSLYILMFVVALLGVMMYFTGQDDTQPRRVHDE

SEQ ID NO: 64719 - protein, 413 aa, Triticum aestivum
  peptide (1)..(413): Ceres Seq. ID no. 12625950
  misc_feature (12)..(292): Pfam Name: Calsequestrin Pfam Description: Calsequestrin
  misc_feature (13)..(265): Homolog of NCBI NO: 20805287 NR Description: protein disulfide isomerase-like PDI-M
  misc_feature (13)..(354): Homolog of NCBI NO: 20913929 NR Description: prolyl 4-hydroxylase, beta polypeptide [Mus
  misc_feature (12)..(364): Homolog of NCBI NO: 14494995 NR Description: putative protein disulfide isomerase [Toxoplasma
  misc_feature (14)..(354): Homolog of NCBI NO: 27806501 NR Description: procollagen-proline, 2-oxoglutarate 4-dioxygenase
  misc_feature (13)..(354): Homolog of NCBI NO: 129731 NR Description: PROTEIN DISULFIDE ISOMERASE PRECURSOR (PDI)
  misc_feature (14)..(260): Homolog of NCBI NO: 20805285 NR Description: protein disulfide isomerase-like PDI-H
  misc_feature (13)..(354): Homolog of NCBI NO: 27819775 NR Description: RH09122p [Drosophila melanogaster]
  misc_feature (15)..(402): Homolog of NCBI NO: 18399786 NR Description: protein disulfide isomerase, putative
  misc_feature (15)..(402): Homolog of NCBI NO: 8778373 NR Description: F15O4.20 [Arabidopsis thaliana]
  misc_feature (2)..(409): Homolog of NCBI NO: 38344940 NR Description: OSJNBa0084A10.16 [Oryza sativa (japonica
MATTPPPPPLPLLLLPLLLLAAFSAAEEFPRDGKVIDLDDSNFEAALSSIDFLFVDFYAPWCGHCKRLAPELDEAAPVLVGLSEPIMVAKVNADKYRKLGSKYGVDGFPTLMLFIHGVPIEYTGSRKADLLVRNLKKFVAPDVSTLESDSAIKSFVENAGTSFPMFIGFGVNESLIAEYGGKYKKRAWFAVAKDFSEDWMATYDFNKIPALVAVHPKYNEQSVFYGPFEGRFLEDFVRQSLLPLTVPINTETLKLLDDDDRKVVLAILEDDSDVNSTQLVKILRSAAHANRDLVFGYVGVKQWEEFVETFDVSKSSQLPKLLVWDRNEEYELVEGSEKLEEGDQASQLSQFLEGYRAGRTIKKKVSGPSFMGFMHSLVSMNSLYILMFVVALLGVMMYFTGQDDTQPRRVHDE

SEQ ID NO: 64720 - protein, 327 aa, Triticum aestivum
  peptide (1)..(327): Ceres Seq. ID no. 12625951
  misc_feature (1)..(206): Pfam Name: Calsequestrin Pfam Description: Calsequestrin
  misc_feature (1)..(179): Homolog of NCBI NO: 20805287 NR Description: protein disulfide isomerase-like PDI-M
  misc_feature (1)..(268): Homolog of NCBI NO: 20913929 NR Description: prolyl 4-hydroxylase, beta polypeptide [Mus
  misc_feature (1)..(278): Homolog of NCBI NO: 14494995 NR Description: putative protein disulfide isomerase [Toxoplasma
  misc_feature (1)..(268): Homolog of NCBI NO: 27806501 NR Description: procollagen-proline, 2-oxoglutarate 4-dioxygenase
  misc_feature (1)..(268): Homolog of NCBI NO: 129731 NR Description: PROTEIN DISULFIDE ISOMERASE PRECURSOR (PDI)
  misc_feature (1)..(174): Homolog of NCBI NO: 20805285 NR Description: protein disulfide isomerase-like PDI-H
  misc_feature (1)..(268): Homolog of NCBI NO: 27819775 NR Description: RH09122p [Drosophila melanogaster]
  misc_feature (1)..(316): Homolog of NCBI NO: 18399786 NR Description: protein disulfide isomerase, putative
  misc_feature (1)..(316): Homolog of NCBI NO: 8778373 NR Description: F15O4.20 [Arabidopsis thaliana]
  misc_feature (1)..(323): Homolog of NCBI NO: 38344940 NR Description: OSJNBa0084A10.16 [Oryza sativa (japonica
MVAKVNADKYRKLGSKYGVDGFPTLMLFIHGVPIEYTGSRKADLLVRNLKKFVAPDVSTLESDSAIKSFVENAGTSFPMFIGFGVNESLIAEYGGKYKKRAWFAVAKDFSEDWMATYDFNKIPALVAVHPKYNEQSVFYGPFEGRFLEDFVRQSLLPLTVPINTETLKLLDDDDRKVVLAILEDDSDVNSTQLVKILRSAAHANRDLVFGYVGVKQWEEFVETFDVSKSSQLPKLLVWDRNEEYELVEGSEKLEEGDQASQLSQFLEGYRAGRTIKKKVSGPSFMGFMHSLVSMNSLYILMFVVALLGVMMYFTGQDDTQPRRVHDE

SEQ ID NO: 64721 - DNA, 509 bp, Triticum aestivum
  misc_feature (1)..(509): Ceres Seq. ID no. 13656047
aggaaaatagacattccaacgcagttcccccacccccacctcgcctgagcaggtcgccggcgaccgacaggccttcagctcgcccccaacctccccacccctcccgcgacgacccggggggaggcgccgagcgagcaggggggatggagttcacggaggcgtacaagcagacgggcccgtgctgcttctctcccgacgcccgcttcctcgccgtcgcctgcgactaccgcctcgtggtccgcgacgtcgtcaccctcaaggtggtgcagttgttttcatgtgtagacaagataaactttttggagtgggcaccagattcagaatacattctatgtggactttacaagcggccaatggtgcaggcttggtcgctgagccagcctgactggacctgtaagattgatgaaggatctgcagggattgcttatgctcgctggagtcctgacagtcgtcatatactcactacatcagagttccaactccgtttgactgtatggtctcttgtaaat

SEQ ID NO: 64722 - protein, 169 aa, Triticum aestivum
  peptide (1)..(169): Ceres Seq. ID no. 13656048
  misc_feature (48)..(167): Homolog of NCBI NO: 16445434 NR Description: WD repeat domain 8 protein; WD repeat-containing
  misc_feature (48)..(167): Homolog of NCBI NO: 17380347 NR Description: WD-repeat protein 8
  misc_feature (48)..(167): Homolog of NCBI NO: 7020525 NR Description: unnamed protein product [Homo sapiens]
  misc_feature (48)..(167): Homolog of NCBI NO: 38174120 NR Description: Unknown (protein for MGC:75994) [Silurana
  misc_feature (48)..(167): Homolog of NCBI NO: 29791584 NR Description: Similar to WD repeat domain 8 [Danio rerio]
  misc_feature (48)..(167): Homolog of NCBI NO: 16507946 NR Description: Wdr8 protein [Mus musculus]
  misc_feature (48)..(167): Homolog of NCBI NO: 26342120 NR Description: unnamed protein product [Mus musculus]
  misc_feature (48)..(167): Homolog of NCBI NO: 10946908 NR Description: WD repeat domain 8; DD57 [Mus musculus]
  misc_feature (48)..(168): Homolog of NCBI NO: 15240819 NR Description: WD-40 repeat protein family [Arabidopsis
  misc_feature (48)..(168): Homolog of NCBI NO: 37536890 NR Description: putative WD-40 protein [Oryza sativa (japonica
ENRHSNAVPPPPPRLSRSPATDRPSARPQPPHPSRDDPGGGAERAGGMEFTEAYKQTGPCCFSPDARFLAVACDYRLVVRDVVTLKVVQLFSCVDKINFLEWAPDSEYILCGLYKRPMVQAWSLSQPDWTCKIDEGSAGIAYARWSPDSRHILTTSEFQLRLTVWSLVN

SEQ ID NO: 64723 - protein, 122 aa, Triticum aestivum
  peptide (1)..(122): Ceres Seq. ID no. 13656049
  misc_feature (1)..(120): Homolog of NCBI NO: 16445434 NR Description: WD repeat domain 8 protein; WD repeat-containing
  misc_feature (1)..(120): Homolog of NCBI NO: 17380347 NR Description: WD-repeat protein 8
  misc_feature (1)..(120): Homolog of NCBI NO: 7020525 NR Description: unnamed protein product [Homo sapiens]
  misc_feature (1)..(120): Homolog of NCBI NO: 38174120 NR Description: Unknown (protein for MGC:75994) [Silurana
  misc_feature (1)..(120): Homolog of NCBI NO: 29791584 NR Description: Similar to WD repeat domain 8 [Danio rerio]
  misc_feature (1)..(120): Homolog of NCBI NO: 26342120 NR Description: unnamed protein product [Mus musculus]
  misc_feature (1)..(120): Homolog of NCBI NO: 16507946 NR Description: Wdr8 protein [Mus musculus]
  misc_feature (1)..(120): Homolog of NCBI NO: 10946908 NR Description: WD repeat domain 8; DD57 [Mus musculus]
  misc_feature (1)..(121): Homolog of NCBI NO: 15240819 NR Description: WD-40 repeat protein family [Arabidopsis
  misc_feature (1)..(121): Homolog of NCBI NO: 37536890 NR Description: putative WD-40 protein [Oryza sativa (japonica
MEFTEAYKQTGPCCFSPDARFLAVACDYRLVVRDVVTLKVVQLFSCVDKINFLEWAPDSEYILCGLYKRPMVQAWSLSQPDWTCKIDEGSAGIAYARWSPDSRHILTTSEFQLRLTVWSLVN

SEQ ID NO: 64724 - DNA, 1296 bp, Triticum aestivum
  misc_feature (1)..(1296): Ceres Seq. ID no. 13656050
aagatcaacaccaaacctctagatatagctggtatctttacctcgcgccgcccgaagacatggtatccgcgacgacgatgcaccaccggcgccgctccattctccagctggccctcctactactggcggcgtcaccggcggcaatgctggcggccggcggagcctgcgagagagaggagttcccggccggcaggagctacgcgacgtgcgcggatctccctgccctcggcgcctcgctgcactggacgtacgacgcggcggcctcgtcgttgtccctggcattcgcggccaagccgcccggcgcgagcggcgccggctgggtggcttggggggtcaaccccaccggcgatggcatgaagggcgcgcagacgctcctcgccttcaagagcaaaggcgcatacgtcgtcaacacgtacaacctcaccgggtaccgcccgctcagcgcggcgtccacgccgatcgcgttcgaggccaccgagctcgccgccgacgagggcgccgacgggaaggtgcggctctacggcacgctgcagctgcccaagggcatggaggccgtgaaccacatctggcaggtagggtcgacggtggccaatggggtgccggccaagcacgcgttcgcgcaggagaacctcgaggcgaagggcagtcttgtgctcaccggtgccggagcgacggaggccgcgccagctccggtgtttatctctcacgactatctcgattaaccagtagcagtagtgtttgggatacaaaattcaagagagaaagagagagtggggaaggagaaggaagtaggtaaggaagaacagagctggcaacaatctgcaaaaaaaaacacacacacacacacacacaccaatcttggggatgatccgtcgggaaagaaaattaagagtattaagaaaactaagaatactatgagcacttctaattcagatgatttcacaatagttcccccacaaaaaacatcaacatgagtgacaacaatgtgagtgatcatgagcataattttaatttgtctactataaagtatgcaaattcggtgagaaccaatttttgataatatgtgttctgggcgtcaatctccgttcaattgcaatcaaccgcccatattatgcttcaagggttggatgtacaacagtagtgttttttctagagaaaatttggagcgttctccttgtttgggtgatgtaccatgtaaaaaattactttcactgatatatctgcgtacaataaaaatctttatagaggaaaaaacataacaaatgtattttttatgatcaaataatatgttgatac

SEQ ID NO: 64725 - protein, 239 aa, Triticum aestivum
  peptide (1)..(239): Ceres Seq. ID no. 13656051
  misc_feature (118)..(223): Pfam Name: Protein of unknown function (DUF568) Pfam Description: Protein of unknown function (DUF568)
  misc_feature (54)..(227): Homolog of NCBI NO: 15239696 NR Description: auxin-induced protein, putative [Arabidopsis
  misc_feature (37)..(216): Homolog of NCBI NO: 21592781 NR Description: putative membrane protein [Arabidopsis thaliana]
  misc_feature (37)..(216): Homolog of NCBI NO: 18421491 NR Description: auxin-induced protein family [Arabidopsis
  misc_feature (31)..(224): Homolog of NCBI NO: 18404500 NR Description: auxin-induced protein family [Arabidopsis
  misc_feature (32)..(220): Homolog of NCBI NO: 21593814 NR Description: unknown [Arabidopsis thaliana]
  misc_feature (32)..(220): Homolog of NCBI NO: 15235545 NR Description: auxin-induced protein, putative [Arabidopsis
  misc_feature (36)..(216): Homolog of NCBI NO: 38424013 NR Description: auxin-induced protein-like
  misc_feature (33)..(230): Homolog of NCBI NO: 11357190 NR Description: auxin-induced protein AIR12
  misc_feature (33)..(230): Homolog of NCBI NO: 30680258 NR Description: auxin-induced protein (AIR12) [Arabidopsis
  misc_feature (26)..(231): Homolog of NCBI NO: 29647484 NR Description: OJ1191_A10.2 [Oryza sativa (japonica
DQHQTSRYSWYLYLAPPEDMVSATTMHHRRRSILQLALLLLAASPAAMLAAGGACEREEFPAGRSYATCADLPALGASLHWTYDAAASSLSLAFAAKPPGASGAGWVAWGVNPTGDGMKGAQTLLAFKSKGAYVVNTYNLTGYRPLSAASTPIAFEATELAADEGADGKVRLYGTLQLPKGMEAVNHIWQVGSTVANGVPAKHAFAQENLEAKGSLVLTGAGATEAAPAPVFISHDYLD

SEQ ID NO: 64726 - protein, 220 aa, Triticum aestivum
  peptide (1)..(220): Ceres Seq. ID no. 13656052
  misc_feature (99)..(204): Pfam Name: Protein of unknown function (DUF568) Pfam Description: Protein of unknown function (DUF568)
  misc_feature (35)..(208): Homolog of NCBI NO: 15239696 NR Description: auxin-induced protein, putative [Arabidopsis
  misc_feature (18)..(197): Homolog of NCBI NO: 21592781 NR Description: putative membrane protein [Arabidopsis thaliana]
  misc_feature (18)..(197): Homolog of NCBI NO: 18421491 NR Description: auxin-induced protein family [Arabidopsis
  misc_feature (12)..(205): Homolog of NCBI NO: 18404500 NR Description: auxin-induced protein family [Arabidopsis
  misc_feature (13)..(201): Homolog of NCBI NO: 21593814 NR Description: unknown [Arabidopsis thaliana]
  misc_feature (13)..(201): Homolog of NCBI NO: 15235545 NR Description: auxin-induced protein, putative [Arabidopsis
  misc_feature (17)..(197): Homolog of NCBI NO: 38424013 NR Description: auxin-induced protein-like
  misc_feature (14)..(211): Homolog of NCBI NO: 11357190 NR Description: auxin-induced protein AIR12
  misc_feature (14)..(211): Homolog of NCBI NO: 30680258 NR Description: auxin-induced protein (AIR12) [Arabidopsis
  misc_feature (7)..(212): Homolog of NCBI NO: 29647484 NR Description: OJ1191_A10.2 [Oryza sativa (japonica
MVSATTMHHRRRSILQLALLLLAASPAAMLAAGGACEREEFPAGRSYATCADLPALGASLHWTYDAAASSLSLAFAAKPPGASGAGWVAWGVNPTGDGMKGAQTLLAFKSKGAYVVNTYNLTGYRPLSAASTPIAFEATELAADEGADGKVRLYGTLQLPKGMEAVNHIWQVGSTVANGVPAKHAFAQENLEAKGSLVLTGAGATEAAPAPVFISHDYLD

SEQ ID NO: 64727 - protein, 214 aa, Triticum aestivum
  peptide (1)..(214): Ceres Seq. ID no. 13656053
  misc_feature (93)..(198): Pfam Name: Protein of unknown function (DUF568) Pfam Description: Protein of unknown function (DUF568)
  misc_feature (29)..(202): Homolog of NCBI NO: 15239696 NR Description: auxin-induced protein, putative [Arabidopsis
  misc_feature (12)..(191): Homolog of NCBI NO: 21592781 NR Description: putative membrane protein [Arabidopsis thaliana]
  misc_feature (12)..(191): Homolog of NCBI NO: 18421491 NR Description: auxin-induced protein family [Arabidopsis
  misc_feature (6)..(199): Homolog of NCBI NO: 18404500 NR Description: auxin-induced protein family [Arabidopsis
  misc_feature (7)..(195): Homolog of NCBI NO: 21593814 NR Description: unknown [Arabidopsis thaliana]
  misc_feature (7)..(195): Homolog of NCBI NO: 15235545 NR Description: auxin-induced protein, putative [Arabidopsis
  misc_feature (11)..(191): Homolog of NCBI NO: 38424013 NR Description: auxin-induced protein-like
  misc_feature (8)..(205): Homolog of NCBI NO: 11357190 NR Description: auxin-induced protein AIR12
  misc_feature (8)..(205): Homolog of NCBI NO: 30680258 NR Description: auxin-induced protein (AIR12) [Arabidopsis
  misc_feature (1)..(206): Homolog of NCBI NO: 29647484 NR Description: OJ1191_A10.2 [Oryza sativa (japonica
MHHRRRSILQLALLLLAASPAAMLAAGGACEREEFPAGRSYATCADLPALGASLHWTYDAAASSLSLAFAAKPPGASGAGWVAWGVNPTGDGMKGAQTLLAFKSKGAYVVNTYNLTGYRPLSAASTPIAFEATELAADEGADGKVRLYGTLQLPKGMEAVNHIWQVGSTVANGVPAKHAFAQENLEAKGSLVLTGAGATEAAPAPVFISHDYLD

SEQ ID NO: 64728 - DNA, 1375 bp, Triticum aestivum
  misc_feature (1)..(1375): Ceres Seq. ID no. 13656028
acctagaacatcctaatcgaaaagatattttcctcctctccgtgcggacaactccactccactcgtccactcctactaccagcttctcactcccactcccgcaggcgggtgatccatggccacggcgctccgcctcccgtctctcctctcctcccgcgccgcccctaccaccgccgctcgcgctaccatccgagggaatcggacaggatcgttcactcacagggtcgccgcgcagcctgacgacaccaccgccaccacctccacctccaccacgccggctccgcccgccgggttcacgcctccggttcccaagcggttcgaggtcaagcccggccagtcaaacaacatcgccggcgccgccctcgctttgcccttccgcctcggcaccggcgtcttcgtcctaggatatggagtgacacttgttgatgctaacgagatatcaccagatcaatatgctttggatttccaaggtcggaaggtgaaagaaacgtcgaaggtggggcagtgccctcgacctgctaagcctattgaaatatacgagtttgaaggatgtccattttgtcgaaaggtcagagagatggtatccgtcctggaccttgatgttttatattacccttgtcctaaaggcagcccaaccttccggccaaaggttctagagatgggtggaaagaaacagtttccttacatggtcgatccaaacacaggagttgctatgtatgaatcagatgacatcataaattacctggcaaaaacttacggtgatggaagtgttccaattatgctaaaacttggtctattgacaacaataacggcagggcttgcattgagtgggcgtagcgggaaggggtcttcctacagtcctgcaaagcttccatctcagccaatagagatatgggcatacgagggatctcctttctgtaaaatagcgcgtgagacccttgtcgaattggagttgccacacttgctacacagctgtgcgcgtggcagccccaagcgacaggatttttttgagaaatatggtcttttccaggcgccttatatcgaggatcctaacacgggggtaaagatgttcgaaagcgccgacatcgtagagtatctgagggcaacatatgctgcttgagaatccctgtcactgtcttttctcagtaaataactaaatattgagctcatagctgccatgtctcttctcatgtagtagatcacattctttactaggaaaaatggtgcatactagatatgtaaggtgtaaattatattcgctgcagctgagacagcgtctttgctatctaagagacactgaatctgaggccgtagaaaagggaaaaaaaaaaaaaaaaaagcttatcgataccgtcgacctcgagggggggcccgg

SEQ ID NO: 64729 - protein, 334 aa, Triticum aestivum
  peptide (1)..(334): Ceres Seq. ID no. 13656029
  misc_feature (133)..(259): Homolog of NCBI NO: 15488040 NR Description: unknown [Photobacterium profundum]
  misc_feature (134)..(334): Homolog of NCBI NO: 7487730 NR Description: hypothetical protein T5L19.130 - Arabidopsis
  misc_feature (134)..(334): Homolog of NCBI NO: 21593568 NR Description: unknown [Arabidopsis thaliana]
  misc_feature (134)..(334): Homolog of NCBI NO: 18413285 NR Description: expressed protein [Arabidopsis thaliana]
  misc_feature (7)..(334): Homolog of NCBI NO: 11282317 NR Description: hypothetical protein F8F6.90 - Arabidopsis
  misc_feature (7)..(334): Homolog of NCBI NO: 21593275 NR Description: unknown [Arabidopsis thaliana]
  misc_feature (7)..(334): Homolog of NCBI NO: 18414386 NR Description: auxin-regulated protein [Arabidopsis thaliana]
MATALRLPSLLSSRAAPTTAARATIRGNRTGSFTHRVAAQPDDTTATTSTSTTPAPPAGFTPPVPKRFEVKPGQSNNIAGAALALPFRLGTGVFVLGYGVTLVDANEISPDQYALDFQGRKVKETSKVGQCPRPAKPIEIYEFEGCPFCRKVREMVSVLDLDVLYYPCPKGSPTFRPKVLEMGGKKQFPYMVDPNTGVAMYESDDIINYLAKTYGDGSVPIMLKLGLLTTITAGLALSGRSGKGSSYSPAKLPSQPIEIWAYEGSPFCKIARETLVELELPHLLHSCARGSPKRQDFFEKYGLFQAPYIEDPNTGVKMFESADIVEYLRATYAA

SEQ ID NO: 64730 - protein, 180 aa, Triticum aestivum
  peptide (1)..(180): Ceres Seq. ID no. 13656030
  misc_feature (1)..(105): Homolog of NCBI NO: 15488040 NR Description: unknown [Photobacterium profundum]
  misc_feature (1)..(180): Homolog of NCBI NO: 7487730 NR Description: hypothetical protein T5L19.130 - Arabidopsis
  misc_feature (1)..(180): Homolog of NCBI NO: 21593568 NR Description: unknown [Arabidopsis thaliana]
  misc_feature (1)..(180): Homolog of NCBI NO: 18413285 NR Description: expressed protein [Arabidopsis thaliana]
  misc_feature (1)..(180): Homolog of NCBI NO: 11282317 NR Description: hypothetical protein F8F6.90 - Arabidopsis
  misc_feature (1)..(180): Homolog of NCBI NO: 21593275 NR Description: unknown [Arabidopsis thaliana]
  misc_feature (1)..(180): Homolog of NCBI NO: 18414386 NR Description: auxin-regulated protein [Arabidopsis thaliana]
MVSVLDLDVLYYPCPKGSPTFRPKVLEMGGKKQFPYMVDPNTGVAMYESDDIINYLAKTYGDGSVPIMLKLGLLTTITAGLALSGRSGKGSSYSPAKLPSQPIEIWAYEGSPFCKIARETLVELELPHLLHSCARGSPKRQDFFEKYGLFQAPYIEDPNTGVKMFESADIVEYLRATYAA

SEQ ID NO: 64731 - DNA, 1379 bp, Triticum aestivum
  misc_feature (1)..(1379): Ceres Seq. ID no. 15169674
ccattccgactctctctccaccgaaacagaaacaccaacctcccctcggccggcgaccatggcggaggccgcggccgcaggagcgacgcctctcctccgcaacctccccgatgagatcgtgctctgggagatcctcgcccgccttgaccccagatcgctcatccgctgccgcgccgtccgccgcgcctggcgccgcgccacctccacccgtcgcttcctcctggcccaccacgcacgccagcccgcattccccatcgccgccgacaacaggtaccgtaacttcctcgccttcgaccaccggtccgccgccaccgccgacgcccagttccacaccgtcgcccggcttggcgggtccttcagtctggagctctgctgcgacggcctcctcctcgtcgccaagtctggcatgcttggcaatcgcgcccgcctcgccgtctgcaacccggtaacgcgtcagcacgcctccctcccgcccctgccggacttcaacatcctggggatgtacctacacggacctaccgacgagtaccggctgttactgcaatggaggggcgcaatggactggggggacgacagtgactttgactcgcctacaggcaaaaatggctgctatgtctttgcgctgggatccgaccagccaccgaggtacatcgggttgtcggagcccaaattctcgtcggcttacttccacggacctgcccgggtgcgtgatagcctgcattggtgcctgttttatcgcccaggcgagaccccactggaggattgtgaggctggatgggaactggtggtatttgacaccatagctgagtcatttcggcagatgcatgctccagttgatcccaccaagtcatgcatccttgagatggatgacatgcttggcatctattgctgtaacaaggctgcggaagttgttgatatatgggtgttgccgaactacgacagtgaggtttgggacttgaagtaccgggttgcattgccgatcgcagaaatcaggggaaagcttgaaggccatgatggtgagtgctattggtatgtgaccgttgcttcgggtggtggtgacgagctcttgctggccagttttggtcgttcgctgttttacattgacactcatggcaaactggttgctagcttccaagacatctttccctctaggcatcggctcaaacaaactcttgttccgcatgatttcttcagaacagtaaaaggtcaggctgtcgacgcttcacctttcatctgacggatgttgagagaggcggtgcttcttaacaggctagttttcatatcctcgtgagttgtaatgtctatgtattggatcaagtatgggcctgctgatttcttctttttgtgtcaatcagaagtgactgtcatgtggttgcatg

SEQ ID NO: 64732 - protein, 411 aa, Triticum aestivum
  peptide (1)..(411): Ceres Seq. ID no. 15169675
  misc_feature (35)..(77): Pfam Name: F-box domain Pfam Description: F-box domain
  misc_feature (35)..(248): Homolog of NCBI NO: 37533944 NR Description: hypothetical protein [Oryza sativa (japonica
  misc_feature (136)..(398): Homolog of NCBI NO: 37533944 NR Description: hypothetical protein [Oryza sativa (japonica
  misc_feature (18)..(410): Homolog of NCBI NO: 38344215 NR Description: OSJNBb0026E15.3 [Oryza sativa (japonica
  misc_feature (10)..(398): Homolog of NCBI NO: 37530720 NR Description: unknown protein [Oryza sativa (japonica
  misc_feature (19)..(411): Homolog of NCBI NO: 38346527 NR Description: OSJNBa0040D17.2 [Oryza sativa (japonica
  misc_feature (20)..(411): Homolog of NCBI NO: 38346045 NR Description: OSJNBa0059D20.17 [Oryza sativa (japonica
  misc_feature (203)..(411): Homolog of NCBI NO: 38346536 NR Description: OSJNBa0040D17.11 [Oryza sativa (japonica
  misc_feature (23)..(241): Homolog of NCBI NO: 38346536 NR Description: OSJNBa0040D17.11 [Oryza sativa (japonica
HSDSLSTETETPTSPRPATMAEAAAAGATPLLRNLPDEIVLWEILARLDPRSLIRCRAVRRAWRRATSTRRFLLAHHARQPAFPIAADNRYRNFLAFDHRSAATADAQFHTVARLGGSFSLELCCDGLLLVAKSGMLGNRARLAVCNPVTRQHASLPPLPDFNILGMYLHGPTDEYRLLLQWRGAMDWGDDSDFDSPTGKNGCYVFALGSDQPPRYIGLSEPKFSSAYFHGPARVRDSLHWCLFYRPGETPLEDCEAGWELVVFDTIAESFRQMHAPVDPTKSCILEMDDMLGIYCCNKAAEVVDIWVLPNYDSEVWDLKYRVALPIAEIRGKLEGHDGECYWYVTVASGGGDELLLASFGRSLFYIDTHGKLVASFQDIFPSRHRLKQTLVPHDFFRTVKGQAVDASPFI

SEQ ID NO: 64733 - protein, 392 aa, Triticum aestivum
  peptide (1)..(392): Ceres Seq. ID no. 15169676
  misc_feature (16)..(58): Pfam Name: F-box domain Pfam Description: F-box domain
  misc_feature (16)..(229): Homolog of NCBI NO: 37533944 NR Description: hypothetical protein [Oryza sativa (japonica
  misc_feature (117)..(379): Homolog of NCBI NO: 37533944 NR Description: hypothetical protein [Oryza sativa (japonica
  misc_feature (1)..(391): Homolog of NCBI NO: 38344215 NR Description: OSJNBb0026E15.3 [Oryza sativa (japonica
  misc_feature (1)..(379): Homolog of NCBI NO: 37530720 NR Description: unknown protein [Oryza sativa (japonica
  misc_feature (1)..(392): Homolog of NCBI NO: 38346527 NR Description: OSJNBa0040D17.2 [Oryza sativa (japonica
  misc_feature (1)..(392): Homolog of NCBI NO: 38346045 NR Description: OSJNBa0059D20.17 [Oryza sativa (japonica
  misc_feature (184)..(392): Homolog of NCBI NO: 38346536 NR Description: OSJNBa0040D17.11 [Oryza sativa (japonica
  misc_feature (4)..(222): Homolog of NCBI NO: 38346536 NR Description: OSJNBa0040D17.11 [Oryza sativa (japonica
MAEAAAAGATPLLRNLPDEIVLWEILARLDPRSLIRCRAVRRAWRRATSTRRFLLAHHARQPAFPIAADNRYRNFLAFDHRSAATADAQFHTVARLGGSFSLELCCDGLLLVAKSGMLGNRARLAVCNPVTRQHASLPPLPDFNILGMYLHGPTDEYRLLLQWRGAMDWGDDSDFDSPTGKNGCYVFALGSDQPPRYIGLSEPKFSSAYFHGPARVRDSLHWCLFYRPGETPLEDCEAGWELVVFDTIAESFRQMHAPVDPTKSCILEMDDMLGIYCCNKAAEVVDIWVLPNYDSEVWDLKYRVALPIAEIRGKLEGHDGECYWYVTVASGGGDELLLASFGRSLFYIDTHGKLVASFQDIFPSRHRLKQTLVPHDFFRTVKGQAVDASPFI

SEQ ID NO: 64734 - protein, 276 aa, Triticum aestivum
  peptide (1)..(276): Ceres Seq. ID no. 15169677
  misc_feature (1)..(113): Homolog of NCBI NO: 37533944 NR Description: hypothetical protein [Oryza sativa (japonica
  misc_feature (1)..(263): Homolog of NCBI NO: 37533944 NR Description: hypothetical protein [Oryza sativa (japonica
  misc_feature (1)..(275): Homolog of NCBI NO: 38344215 NR Description: OSJNBb0026E15.3 [Oryza sativa (japonica
  misc_feature (1)..(263): Homolog of NCBI NO: 37530720 NR Description: unknown protein [Oryza sativa (japonica
  misc_feature (1)..(276): Homolog of NCBI NO: 38346527 NR Description: OSJNBa0040D17.2 [Oryza sativa (japonica
  misc_feature (1)..(276): Homolog of NCBI NO: 38346045 NR Description: OSJNBa0059D20.17 [Oryza sativa (japonica
  misc_feature (68)..(276): Homolog of NCBI NO: 38346536 NR Description: OSJNBa0040D17.11 [Oryza sativa (japonica
  misc_feature (1)..(106): Homolog of NCBI NO: 38346536 NR Description: OSJNBa0040D17.11 [Oryza sativa (japonica
MLGNRARLAVCNPVTRQHASLPPLPDFNILGMYLHGPTDEYRLLLQWRGAMDWGDDSDFDSPTGKNGCYVFALGSDQPPRYIGLSEPKFSSAYFHGPARVRDSLHWCLFYRPGETPLEDCEAGWELVVFDTIAESFRQMHAPVDPTKSCILEMDDMLGIYCCNKAAEVVDIWVLPNYDSEVWDLKYRVALPIAEIRGKLEGHDGECYWYVTVASGGGDELLLASFGRSLFYIDTHGKLVASFQDIFPSRHRLKQTLVPHDFFRTVKGQAVDASPFI

SEQ ID NO: 64735 - DNA, 699 bp, Triticum aestivum
  misc_feature (1)..(699): Ceres Seq. ID no. 13597511
aaaaaaaacacaccgactccactgcatctgcttcgccgcgggcgagtccggccgccggcgatgcggggcccgcacaaccgcccccagtgcacgccggcccaccaggcgggcgccctcctcctggtcgccgtcaccttcctcctcacccgcctcctctccgcccctccccctgccccgcccttccccacccccggcccccggctctccgccgcggccgaccacctccgcgtctacgtctacgccgaggacgaggtcgacggcctgcgcgcgctgctccgcggccgcgacggcgccgtctccgccgccacctgcctcaagggccagtggggaacgcaggtgaagatccaccagcttctcctgaggtcaaggtataggacactggacaaggacgaagcgcatctcttctttgttcccagctacgtcaaatgtgttcgcatgaccggagctctcacagacaaggaaatcaatcagacatatgtcaaggttctgagtcagatgtcatatttccgcagatcgggtgggcgtgaccacatttttgtcttcccaagtggtgctggagctcacctgtttcgctcgtgggcaacttttctgaatcgatccatcatcctcactccagagggtgaccgtactgacaagcgaggtataagcgcatttaatacatggaaagacattattatcccggggaatgtggatgattct

SEQ ID NO: 64736 - protein, 233 aa, Triticum aestivum
  peptide (1)..(233): Ceres Seq. ID no. 13597512
  misc_feature (77)..(232): Pfam Name: Exostosin family Pfam Description: Exostosin family
  misc_feature (12)..(187): Homolog of NCBI NO: 34902390 NR Description: Unknown protein [Oryza sativa (japonica
  misc_feature (75)..(232): Homolog of NCBI NO: 21537341 NR Description: unknown [Arabidopsis thaliana]
  misc_feature (75)..(232): Homolog of NCBI NO: 18650643 NR Description: At1g21480/F24J8_23 [Arabidopsis thaliana]
  misc_feature (25)..(51): Homolog of NCBI NO: 25518706 NR Description: hypothetical protein F24J8.10 - Arabidopsis
  misc_feature (25)..(51): Homolog of NCBI NO: 18394994 NR Description: Exostosin family [Arabidopsis thaliana]
  misc_feature (75)..(232): Homolog of NCBI NO: 25518706 NR Description: hypothetical protein F24J8.10 - Arabidopsis
  misc_feature (75)..(232): Homolog of NCBI NO: 18394994 NR Description: Exostosin family [Arabidopsis thaliana]
KKNTPTPLHLLRRGRVRPPAMRGPHNRPQCTPAHQAGALLLVAVTFLLTRLLSAPPPAPPFPTPGPRLSAAADHLRVYVYAEDEVDGLRALLRGRDGAVSAATCLKGQWGTQVKIHQLLLRSRYRTLDKDEAHLFFVPSYVKCVRMTGALTDKEINQTYVKVLSQMSYFRRSGGRDHIFVFPSGAGAHLFRSWATFLNRSIILTPEGDRTDKRGISAFNTWKDIIIPGNVDDS

SEQ ID NO: 64737 - protein, 213 aa, Triticum aestivum
  peptide (1)..(213): Ceres Seq. ID no. 13597513
  misc_feature (57)..(212): Pfam Name: Exostosin family Pfam Description: Exostosin family
  misc_feature (1)..(167): Homolog of NCBI NO: 34902390 NR Description: Unknown protein [Oryza sativa (japonica
  misc_feature (55)..(212): Homolog of NCBI NO: 21537341 NR Description: unknown [Arabidopsis thaliana]
  misc_feature (55)..(212): Homolog of NCBI NO: 18650643 NR Description: At1g21480/F24J8_23 [Arabidopsis thaliana]
  misc_feature (5)..(31): Homolog of NCBI NO: 25518706 NR Description: hypothetical protein F24J8.10 - Arabidopsis
  misc_feature (5)..(31): Homolog of NCBI NO: 18394994 NR Description: Exostosin family [Arabidopsis thaliana]
  misc_feature (55)..(212): Homolog of NCBI NO: 25518706 NR Description: hypothetical protein F24J8.10 - Arabidopsis
  misc_feature (55)..(212): Homolog of NCBI NO: 18394994 NR Description: Exostosin family [Arabidopsis thaliana]
MRGPHNRPQCTPAHQAGALLLVAVTFLLTRLLSAPPPAPPFPTPGPRLSAAADHLRVYVYAEDEVDGLRALLRGRDGAVSAATCLKGQWGTQVKIHQLLLRSRYRTLDKDEAHLFFVPSYVKCVRMTGALTDKEINQTYVKVLSQMSYFRRSGGRDHIFVFPSGAGAHLFRSWATFLNRSIILTPEGDRTDKRGISAFNTWKDIIIPGNVDDS

SEQ ID NO: 64738 - protein, 123 aa, Triticum aestivum
  peptide (1)..(123): Ceres Seq. ID no. 13597514
  misc_feature (5)..(104): Pfam Name: 7 transmembrane receptor (rhodopsin family) Pfam Description: 7 transmembrane receptor (rhodopsin family)
  misc_feature (10)..(119): Homolog of NCBI NO: 15145793 NR Description: basic proline-rich protein [Sus scrofa]
  misc_feature (10)..(119): Homolog of NCBI NO: 15145795 NR Description: basic proline-rich protein [Sus scrofa]
  misc_feature (10)..(119): Homolog of NCBI NO: 15145795 NR Description: basic proline-rich protein [Sus scrofa]
  misc_feature (10)..(119): Homolog of NCBI NO: 15145797 NR Description: basic proline-rich protein [Sus scrofa]
  misc_feature (10)..(119): Homolog of NCBI NO: 15145797 NR Description: basic proline-rich protein [Sus scrofa]
  misc_feature (6)..(119): Homolog of NCBI NO: 15145797 NR Description: basic proline-rich protein [Sus scrofa]
  misc_feature (10)..(119): Homolog of NCBI NO: 15145797 NR Description: basic proline-rich protein [Sus scrofa]
  misc_feature (10)..(119): Homolog of NCBI NO: 15145793 NR Description: basic proline-rich protein [Sus scrofa]
  misc_feature (10)..(119): Homolog of NCBI NO: 15145795 NR Description: basic proline-rich protein [Sus scrofa]
  misc_feature (10)..(119): Homolog of NCBI NO: 15145797 NR Description: basic proline-rich protein [Sus scrofa]
KKHTDSTASASPRASPAAGDAGPAQPPPVHAGPPGGRPPPGRRHLPPHPPPLRPSPCPALPHPRPPALRRGRPPPRLRLRRGRGRRPARAAPRPRRRRLRRHLPQGPVGNAGEDPPASPEVKV

SEQ ID NO: 64739 - DNA, 1953 bp, Triticum aestivum
  misc_feature (1)..(1953): Ceres Seq. ID no. 13584538
aatccgccgactgctccgtttatttaaccgagccgtcccattcttggagagcaagaagcacgccaccacctcgcgtccccaaagaatccccatcccttcccctcccctcccctccccggccgcacacagatccggcgaccgacaacaagccatggtgtccaacggggagctgtcgcagccgcaggcgggggagtacggcctcgccgtcatgcgccgccggcccaagaccaagatcgtctgcacgctcggcccggcctcccgctccgtcgacatgatcgagaagctgctgcgcgccggcatgtgcgtcgcccgcttcaacttctcccacggctcccacgactaccaccaggagacgctcgacaacctgcacgccgccatggaccgcaccgggatcctctgcgccgtcatgctcgacaccaagggtccagagatccgtactggatttttgaaagatgggaagcctatccagttgaggaagggccaagaaattgtgatctccacagattatagcataaagggggacgacaagatgatatcgatgagctataagaagctagcagttgatctgaagccaggcagtgtcatattatgcgctgatggtaccatcactcttacagtgcttcattgtgacaaagagcaaggtctcgttcgctgctgttgtgagaacactgctatgcttggtgagaggaagaatgtcaatcttccaggggtcgttgttgatctgccaacactcactgaaaaggacagggaggatatccttcaatggggcgtcccgaacaagattgacatgattgctttgtcgtttgtccgcaaaggttcagatcttgtggaggtcaggaaggtacttggggagcatgccaagtcaataatgctgatgtcaaaggttgagaaccaggaaggagtagctaactttgacgatatcctggcacagtctgatgcttttatggtggcaagaggtgatttggggatggaaattcctgtagagaagatcttttatgcacagaaggtgatgattttcaagtgcaacattcagggcaagccagttgtgactgcaacccagatgttggagtctatgatcaagtctcctcggcctactcgagcggaagcaactgatgtggccaacgcagttcttgatggcactgactgtgtgatgctcagtggtgagacagcggctggggcttatccagaactggcagtgcaaactatggccaagatctgcttgcaggccgagtcatgcgtggactattctgctgtttttaaatcaatcatgtcatcagccccgattcccatgagcccattggagagccttgcctcatcagctgtccgcacagccaactcagccaaggcgacgcttatcttggtactgaccaggggaggaacaactgcaaggcttgtagccaagtacaggccatccatgccgatactgtctgtggtggttcctgagctcaagacggtcgagtttgactggatctgcagcgacgaggggcctgccaggcaaagcctcatcgtgaggggcgtgatccctatgctcagtgctggcactgccaaggcgtttgacagcgaagccacggaagaggcactgaggtttgccatgaagaacgccaaggagatgggcctttgcaacgctggtgactccattgtggcccttcaccgcatcgggaatgcatctgtcatcaagctcttgaccgtgtaagctagtggcagcgaagcgacaatgcaacaccattttgcccggggattttcccttctttctttttgcgaggctacgcatacccacagttttttgctgccaagattgcggcagtgcaacctggttaaaactttgtgttatcaagttgtggctgtttactctttatgagagggtttagccaccaaaactattatcgcagcagcttgttttgctactactactataacttatatgcaacgattgaactacctgatagttgctcc

SEQ ID NO: 64740 - protein, 563 aa, Triticum aestivum
  peptide (1)..(563): Ceres Seq. ID no. 13584539
  misc_feature (433)..(562): Pfam Name: Pyruvate kinase, alpha/beta domain Pfam Description: Pyruvate kinase, alpha/beta domain
  misc_feature (67)..(563): Homolog of NCBI NO: 15241190 NR Description: pyruvate kinase, putative [Arabidopsis thaliana]
  misc_feature (72)..(563): Homolog of NCBI NO: 2497543 NR Description: Pyruvate kinase, cytosolic isozyme
IRRLLRLFNRAVPFLESKKHATTSRPQRIPIPSPPLPSPAAHRSGDRQQAMVSNGELSQPQAGEYGLAVMRRRPKTKIVCTLGPASRSVDMIEKLLRAGMCVARFNFSHGSHDYHQETLDNLHAAMDRTGILCAVMLDTKGPEIRTGFLKDGKPIQLRKGQEIVISTDYSIKGDDKMISMSYKKLAVDLKPGSVILCADGTITLTVLHCDKEQGLVRCCCENTAMLGERKNVNLPGVVVDLPTLTEKDREDILQWGVPNKIDMIALSFVRKGSDLVEVRKVLGEHAKSIMLMSKVENQEGVANFDDILAQSDAFMVARGDLGMEIPVEKIFYAQKVMIFKCNIQGKPVVTATQMLESMIKSPRPTRAEATDVANAVLDGTDCVMLSGETAAGAYPELAVQTMAKICLQAESCVDYSAVFKSIMSSAPIPMSPLESLASSAVRTANSAKATLILVLTRGGTTARLVAKYRPSMPILSVVVPELKTVEFDWICSDEGPARQSLIVRGVIPMLSAGTAKAFDSEATEEALRFAMKNAKEMGLCNAGDSIVALHRIGNASVIKLLTV

SEQ ID NO: 64741 - protein, 513 aa, Triticum aestivum
  peptide (1)..(513): Ceres Seq. ID no. 13584540
  misc_feature (383)..(512): Pfam Name: Pyruvate kinase, alpha/beta domain Pfam Description: Pyruvate kinase, alpha/beta domain
  misc_feature (17)..(513): Homolog of NCBI NO: 15241190 NR Description: pyruvate kinase, putative [Arabidopsis thaliana]
  misc_feature (22)..(513): Homolog of NCBI NO: 2497543 NR Description: Pyruvate kinase, cytosolic isozyme
MVSNGELSQPQAGEYGLAVMRRRPKTKIVCTLGPASRSVDMIEKLLRAGMCVARFNFSHGSHDYHQETLDNLHAAMDRTGILCAVMLDTKGPEIRTGFLKDGKPIQLRKGQEIVISTDYSIKGDDKMISMSYKKLAVDLKPGSVILCADGTITLTVLHCDKEQGLVRCCCENTAMLGERKNVNLPGVVVDLPTLTEKDREDILQWGVPNKIDMIALSFVRKGSDLVEVRKVLGEHAKSIMLMSKVENQEGVANFDDILAQSDAFMVARGDLGMEIPVEKIFYAQKVMIFKCNIQGKPVVTATQMLESMIKSPRPTRAEATDVANAVLDGTDCVMLSGETAAGAYPELAVQTMAKICLQAESCVDYSAVFKSIMSSAPIPMSPLESLASSAVRTANSAKATLILVLTRGGTTARLVAKYRPSMPILSVVVPELKTVEFDWICSDEGPARQSLIVRGVIPMLSAGTAKAFDSEATEEALRFAMKNAKEMGLCNAGDSIVALHRIGNASVIKLLTV

SEQ ID NO: 64742 - protein, 494 aa, Triticum aestivum
  peptide (1)..(494): Ceres Seq. ID no. 13584541
  misc_feature (364)..(493): Pfam Name: Pyruvate kinase, alpha/beta domain Pfam Description: Pyruvate kinase, alpha/beta domain
  misc_feature (1)..(494): Homolog of NCBI NO: 15241190 NR Description: pyruvate kinase, putative [Arabidopsis thaliana]
  misc_feature (3)..(494): Homolog of NCBI NO: 2497543 NR Description: Pyruvate kinase, cytosolic isozyme
MRRRPKTKIVCTLGPASRSVDMIEKLLRAGMCVARFNFSHGSHDYHQETLDNLHAAMDRTGILCAVMLDTKGPEIRTGFLKDGKPIQLRKGQEIVISTDYSIKGDDKMISMSYKKLAVDLKPGSVILCADGTITLTVLHCDKEQGLVRCCCENTAMLGERKNVNLPGVVVDLPTLTEKDREDILQWGVPNKIDMIALSFVRKGSDLVEVRKVLGEHAKSIMLMSKVENQEGVANFDDILAQSDAFMVARGDLGMEIPVEKIFYAQKVMIFKCNIQGKPVVTATQMLESMIKSPRPTRAEATDVANAVLDGTDCVMLSGETAAGAYPELAVQTMAKICLQAESCVDYSAVFKSIMSSAPIPMSPLESLASSAVRTANSAKATLILVLTRGGTTARLVAKYRPSMPILSVVVPELKTVEFDWICSDEGPARQSLIVRGVIPMLSAGTAKAFDSEATEEALRFAMKNAKEMGLCNAGDSIVALHRIGNASVIKLLTV

SEQ ID NO: 64743 - DNA, 1456 bp, Triticum aestivum
  misc_feature (1)..(1456): Ceres Seq. ID no. 13655812
aacggtagcatcgctcgtgatagcactgcaacctgggaaccactttctttacattgctctcagtcgagtcaccacttgccagcgatggagagctgcagcttggtcgacacggccgccgccgctctctgctcgacaccgggcgcgcgccgccgcggccgcgccgggagcgccgcgaggttcttcaactgctccagctcctccagagagcacggggtgagcgcgtcctactccatcggccggatgctgagcggggtgaggtcggcggcgcggaggaagctgttcaggagcgagcccgagtggatgggcgtcaactggccggactccatcggccaccattggtggacatccctggagaacaacttcgtgctcgaggcctccgaggacgagtacggcggggtcgtcgtcgacgccgacaggctgccgtccgacgaggccgccttcgcccggtcgctagcggcgtccctctcctactggcagtccgtgggaaagaaaggggtgtggctgaaattgccagtggatcgatctgagtttgttccaatagcagtcaaggaaggattcaagtaccaccacgcggaggaggcctacttgatgctgacgtactggatccccgacgagccgtctctgctcccagcgaacgcttctcatcaggtcggcgtcgggggcttcgtgatcaatgatcaaatggaggtcctagtggtgcaagagaagtatcgcggctgggcgttggatggtgtctggaaactccccacggggttcattcaggagtcagaagaaatatacacgggagccatcagagaggtgcaggaagaaacaggggttgacactgaattcgtggatgtggttgccttcaggcacgcgcacaacgtggcgtttcagaagtcggacctgttcttcatctgcatgctgaggcctctgtcgagcgcgatcaagatcgacgaaacagagattcaggcagcaaagtggatgccgctggaggagttcgtgaagcagccgttcatccaggaggaccacatgttccagaagatcatggacatctgcatccagcggctgaggaagtgctactgcggcctcacggcgcacaacgtcgtctccaagttcgacggcaggcagtccaccctctactacaacgtgggcgagcccgaggatgtcaactgcgacgctgcctgacgggtcgccggattctttttttctttgctctgcgaccgtctaggcgttgtgcggtgcaaagttgtagcattaaggaggcaactggattggcctctgtatatacgtgtaggagactgtaattagacatgggcgggacgggttagctctgtcgcgtagtaatgtgtactactattcgtcagtgtaccggtggtggcaattatctagaagaaatggcagtgatctggaagatatatctttctttcagtttcagtgtattgtgcactttgaaaagaccatgtttctccacgct

SEQ ID NO: 64744 - protein, 388 aa, Triticum aestivum
  peptide (1)..(388): Ceres Seq. ID no. 15220558
  misc_feature (215)..(346): Pfam Name: NUDIX domain Pfam Description: NUDIX domain
  misc_feature (273)..(379): Homolog of NCBI NO: 30686884 NR Description: MutT/nudix family protein [Arabidopsis thaliana]
  misc_feature (122)..(273): Homolog of NCBI NO: 30686884 NR Description: MutT/nudix family protein [Arabidopsis thaliana]
  misc_feature (122)..(379): Homolog of NCBI NO: 38564312 NR Description: At4g25434 [Arabidopsis thaliana]
  misc_feature (122)..(376): Homolog of NCBI NO: 9758793 NR Description: MutT domain protein-like [Arabidopsis thaliana]
  misc_feature (122)..(376): Homolog of NCBI NO: 18422823 NR Description: MutT/nudix family protein [Arabidopsis thaliana]
  misc_feature (115)..(385): Homolog of NCBI NO: 21593371 NR Description: mutT domain protein-like [Arabidopsis thaliana]
  misc_feature (115)..(385): Homolog of NCBI NO: 18422772 NR Description: MutT/nudix family protein [Arabidopsis thaliana]
  misc_feature (115)..(385): Homolog of NCBI NO: 8809607 NR Description: mutT domain protein-like [Arabidopsis thaliana]
  misc_feature (115)..(385): Homolog of NCBI NO: 21928133 NR Description: AT5g47240/MQL5_10 [Arabidopsis thaliana]
  misc_feature (29)..(388): Homolog of NCBI NO: 38346172 NR Description: OSJNBa0079A21.19 [Oryza sativa (japonica
NGSIARDSTATWEPLSLHCSQSSHHLPAMESCSLVDTAAAALCSTPGARRRGRAGSAARFFNCSSSSREHGVSASYSIGRMLSGVRSAARRKLFRSEPEWMGVNWPDSIGHHWWTSLENNFVLEASEDEYGGVVVDADRLPSDEAAFARSLAASLSYWQSVGKKGVWLKLPVDRSEFVPIAVKEGFKYHHAEEAYLMLTYWIPDEPSLLPANASHQVGVGGFVINDQMEVLVVQEKYRGWALDGVWKLPTGFIQESEEIYTGAIREVQEETGVDTEFVDVVAFRHAHNVAFQKSDLFFICMLRPLSSAIKIDETEIQAAKWMPLEEFVKQPFIQEDHMFQKIMDICIQRLRKCYCGLTAHNVVSKFDGRQSTLYYNVGEPEDVNCDAA

SEQ ID NO: 64745 - protein, 360 aa, Triticum aestivum
  peptide (1)..(360): Ceres Seq. ID no. 15220559
  misc_feature (187)..(318): Pfam Name: NUDIX domain Pfam Description: NUDIX domain
  misc_feature (245)..(351): Homolog of NCBI NO: 30686884 NR Description: MutT/nudix family protein [Arabidopsis thaliana]
  misc_feature (94)..(245): Homolog of NCBI NO: 30686884 NR Description: MutT/nudix family protein [Arabidopsis thaliana]
  misc_feature (94)..(351): Homolog of NCBI NO: 38564312 NR Description: At4g25434 [Arabidopsis thaliana]
  misc_feature (94)..(348): Homolog of NCBI NO: 9758793 NR Description: MutT domain protein-like [Arabidopsis thaliana]
  misc_feature (94)..(348): Homolog of NCBI NO: 18422823 NR Description: MutT/nudix family protein [Arabidopsis thaliana]
  misc_feature (87)..(357): Homolog of NCBI NO: 18422772 NR Description: MutT/nudix family protein [Arabidopsis thaliana]
  misc_feature (87)..(357): Homolog of NCBI NO: 21593371 NR Description: mutT domain protein-like [Arabidopsis thaliana]
  misc_feature (87)..(357): Homolog of NCBI NO: 8809607 NR Description: mutT domain protein-like [Arabidopsis thaliana]
  misc_feature (87)..(357): Homolog of NCBI NO: 21928133 NR Description: AT5g47240/MQL5_10 [Arabidopsis thaliana]
  misc_feature (1)..(360): Homolog of NCBI NO: 38346172 NR Description: OSJNBa0079A21.19 [Oryza sativa (japonica
MESCSLVDTAAAALCSTPGARRRGRAGSAARFFNCSSSSREHGVSASYSIGRMLSGVRSAARRKLFRSEPEWMGVNWPDSIGHHWWTSLENNFVLEASEDEYGGVVVDADRLPSDEAAFARSLAASLSYWQSVGKKGVWLKLPVDRSEFVPIAVKEGFKYHHAEEAYLMLTYWIPDEPSLLPANASHQVGVGGFVINDQMEVLVVQEKYRGWALDGVWKLPTGFIQESEEIYTGAIREVQEETGVDTEFVDVVAFRHAHNVAFQKSDLFFICMLRPLSSAIKIDETEIQAAKWMPLEEFVKQPFIQEDHMFQKIMDICIQRLRKCYCGLTAHNVVSKFDGRQSTLYYNVGEPEDVNCDAA

SEQ ID NO: 64746 - protein, 308 aa, Triticum aestivum
  peptide (1)..(308): Ceres Seq. ID no. 15220560
  misc_feature (135)..(266): Pfam Name: NUDIX domain Pfam Description: NUDIX domain
  misc_feature (193)..(299): Homolog of NCBI NO: 30686884 NR Description: MutT/nudix family protein [Arabidopsis thaliana]
  misc_feature (42)..(193): Homolog of NCBI NO: 30686884 NR Description: MutT/nudix family protein [Arabidopsis thaliana]
  misc_feature (42)..(299): Homolog of NCBI NO: 38564312 NR Description: At4g25434 [Arabidopsis thaliana]
  misc_feature (42)..(296): Homolog of NCBI NO: 9758793 NR Description: MutT domain protein-like [Arabidopsis thaliana]
  misc_feature (42)..(296): Homolog of NCBI NO: 18422823 NR Description: MutT/nudix family protein [Arabidopsis thaliana]
  misc_feature (35)..(305): Homolog of NCBI NO: 18422772 NR Description: MutT/nudix family protein [Arabidopsis thaliana]
  misc_feature (35)..(305): Homolog of NCBI NO: 21593371 NR Description: mutT domain protein-like [Arabidopsis thaliana]
  misc_feature (35)..(305): Homolog of NCBI NO: 8809607 NR Description: mutT domain protein-like [Arabidopsis thaliana]
  misc_feature (35)..(305): Homolog of NCBI NO: 21928133 NR Description: AT5g47240/MQL5_10 [Arabidopsis thaliana]
  misc_feature (1)..(308): Homolog of NCBI NO: 38346172 NR Description: OSJNBa0079A21.19 [Oryza sativa (japonica
MLSGVRSAARRKLFRSEPEWMGVNWPDSIGHHWWTSLENNFVLEASEDEYGGVVVDADRLPSDEAAFARSLAASLSYWQSVGKKGVWLKLPVDRSEFVPIAVKEGFKYHHAEEAYLMLTYWIPDEPSLLPANASHQVGVGGFVINDQMEVLVVQEKYRGWALDGVWKLPTGFIQESEEIYTGAIREVQEETGVDTEFVDVVAFRHAHNVAFQKSDLFFICMLRPLSSAIKIDETEIQAAKWMPLEEFVKQPFIQEDHMFQKIMDICIQRLRKCYCGLTAHNVVSKFDGRQSTLYYNVGEPEDVNCDAA

SEQ ID NO: 64747 - DNA, 1057 bp, Triticum aestivum
  misc_feature (1)..(1057): Ceres Seq. ID no. 12617450
cacaacagcaaagcatccagcatcgccaacttccaaaatcaacctacgttgtacacttttcgagccctatccagttctattttctatacacttctcgagccccatccagttttgcgttcgtgccgctcgatccaatcctaccttagcttgcgaagacatggcttctcgtcaggatcaggctagctaccacgccggggaggccaaggcccgcgccgaggagaagacggggtacgtcgtgggcgcggcgcaggacaaggcgagggaggccaaggacacggcgtccgacgccgcgggccgtgccatgggcaggggcggcgacgccaaggaggcgaccaaggagaaggcgtacgaggccaaggacgcggcgtcggacgccaccggccgcgccatggacaagggccgcggcgccgcggaggccaccaaggagaagggctgcgaggccaaggacaaggccgccggcaccgcgcagcagaccgggagctacatcgcccagacggccgaggccgccaagcagaaggcggccggcgccgcccagtacaccatcgacacggcccgtgccggcaccgagcagaccgggagctacatcgagcagacggccgaggccgccaagcagaaggccggcgcggccgcgcagtatgccatggacaccgccgtcgccggcaaggacaagaccggcagcctcctcgtgcaggcaggggagacggtgaagggcgcggcggtgggggcgaaggacgccgtgatgaacacgatcggaatgggcggcggcaccaacggcagcaccgacgtccccgccaaggacaccagcacgtacaagcccgggaccagggattactaatcgtgtgccattgtcaaggcgaccctgatgtatctttctaagctgtagtttaatttctacgtggccatctgtcgccactttggtttctaaattagctcacctcgtggaggttgtaacttgtcaggacctagacaaatgcccaatgaagcattcctgactcctcccttccatgcttgtttccgtgttcacaatttaataaagttggaatcctagtgtctctcc

SEQ ID NO: 64748 - protein, 277 aa, Triticum aestivum
  peptide (1)..(277): Ceres Seq. ID no. 12617451
  misc_feature (172)..(244): Pfam Name: Late embryogenesis abundant protein Pfam Description: Late embryogenesis abundant protein
  misc_feature (53)..(226): Homolog of NCBI NO: 7489569 NR Description: protein LEA type 1 - rice
  misc_feature (53)..(226): Homolog of NCBI NO: 4105441 NR Description: group 3 LEA protein [Oryza sativa]
  misc_feature (53)..(226): Homolog of NCBI NO: 7489493 NR Description: LEA protein - rice
  misc_feature (53)..(269): Homolog of NCBI NO: 25989707 NR Description: LEA3 protein [Triticum aestivum]
  misc_feature (53)..(269): Homolog of NCBI NO: 126081 NR Description: ABA-inducible protein PHV A1
  misc_feature (53)..(269): Homolog of NCBI NO: 7387828 NR Description: Late embryogenesis abundant protein, group 3
  misc_feature (53)..(269): Homolog of NCBI NO: 25989705 NR Description: LEA1 protein [Triticum aestivum]
  misc_feature (53)..(277): Homolog of NCBI NO: 7387829 NR Description: Late embryogenesis abundant protein, group 3
  misc_feature (53)..(277): Homolog of NCBI NO: 34910364 NR Description: WSI18 protein [Oryza sativa (japonica
  misc_feature (53)..(277): Homolog of NCBI NO: 1076757 NR Description: WSI18 protein - rice
TTAKHPASPTSKINLRCTLFEPYPVLFSIHFSSPIQFCVRAARSNPTLACEDMASRQDQASYHAGEAKARAEEKTGYVVGAAQDKAREAKDTASDAAGRAMGRGGDAKEATKEKAYEAKDAASDATGRAMDKGRGAAEATKEKGCEAKDKAAGTAQQTGSYIAQTAEAAKQKAAGAAQYTIDTARAGTEQTGSYIEQTAEAAKQKAGAAAQYAMDTAVAGKDKTGSLLVQAGETVKGAAVGAKDAVMNTIGMGGGTNGSTDVPAKDTSTYKPGTRDY

SEQ ID NO: 64749 - protein, 225 aa, Triticum aestivum
  peptide (1)..(225): Ceres Seq. ID no. 12617452
  misc_feature (120)..(192): Pfam Name: Late embryogenesis abundant protein Pfam Description: Late embryogenesis abundant protein
  misc_feature (1)..(174): Homolog of NCBI NO: 7489569 NR Description: protein LEA type 1 - rice
  misc_feature (1)..(174): Homolog of NCBI NO: 4105441 NR Description: group 3 LEA protein [Oryza sativa]
  misc_feature (1)..(174): Homolog of NCBI NO: 7489493 NR Description: LEA protein - rice
  misc_feature (1)..(217): Homolog of NCBI NO: 25989707 NR Description: LEA3 protein [Triticum aestivum]
  misc_feature (1)..(217): Homolog of NCBI NO: 126081 NR Description: ABA-inducible protein PHV A1
  misc_feature (1)..(217): Homolog of NCBI NO: 7387828 NR Description: Late embryogenesis abundant protein, group 3
  misc_feature (1)..(217): Homolog of NCBI NO: 25989705 NR Description: LEA1 protein [Triticum aestivum]
  misc_feature (1)..(225): Homolog of NCBI NO: 7387829 NR Description: Late embryogenesis abundant protein, group 3
  misc_feature (1)..(225): Homolog of NCBI NO: 34910364 NR Description: WSI18 protein [Oryza sativa (japonica
  misc_feature (1)..(225): Homolog of NCBI NO: 1076757 NR Description: WSI18 protein - rice
MASRQDQASYHAGEAKARAEEKTGYVVGAAQDKAREAKDTASDAAGRAMGRGGDAKEATKEKAYEAKDAASDATGRAMDKGRGAAEATKEKGCEAKDKAAGTAQQTGSYIAQTAEAAKQKAAGAAQYTIDTARAGTEQTGSYIEQTAEAAKQKAGAAAQYAMDTAVAGKDKTGSLLVQAGETVKGAAVGAKDAVMNTIGMGGGTNGSTDVPAKDTSTYKPGTRDY

SEQ ID NO: 64750 - protein, 177 aa, Triticum aestivum
  peptide (1)..(177): Ceres Seq. ID no. 12617453
  misc_feature (72)..(144): Pfam Name: Late embryogenesis abundant protein Pfam Description: Late embryogenesis abundant protein
  misc_feature (1)..(126): Homolog of NCBI NO: 7489569 NR Description: protein LEA type 1 - rice
  misc_feature (1)..(126): Homolog of NCBI NO: 4105441 NR Description: group 3 LEA protein [Oryza sativa]
  misc_feature (1)..(126): Homolog of NCBI NO: 7489493 NR Description: LEA protein - rice
  misc_feature (1)..(169): Homolog of NCBI NO: 25989707 NR Description: LEA3 protein [Triticum aestivum]
  misc_feature (1)..(169): Homolog of NCBI NO: 126081 NR Description: ABA-inducible protein PHV A1
  misc_feature (1)..(169): Homolog of NCBI NO: 7387828 NR Description: Late embryogenesis abundant protein, group 3
  misc_feature (1)..(169): Homolog of NCBI NO: 25989705 NR Description: LEA1 protein [Triticum aestivum]
  misc_feature (1)..(177): Homolog of NCBI NO: 7387829 NR Description: Late embryogenesis abundant protein, group 3
  misc_feature (1)..(177): Homolog of NCBI NO: 34910364 NR Description: WSI18 protein [Oryza sativa (japonica
  misc_feature (1)..(177): Homolog of NCBI NO: 1076757 NR Description: WSI18 protein - rice
MGRGGDAKEATKEKAYEAKDAASDATGRAMDKGRGAAEATKEKGCEAKDKAAGTAQQTGSYIAQTAEAAKQKAAGAAQYTIDTARAGTEQTGSYIEQTAEAAKQKAGAAAQYAMDTAVAGKDKTGSLLVQAGETVKGAAVGAKDAVMNTIGMGGGTNGSTDVPAKDTSTYKPGTRDY

SEQ ID NO: 64751 - DNA, 1207 bp, Triticum aestivum
  misc_feature (1)..(1207): Ceres Seq. ID no. 13584480
aggaagccacactcccgcagctgcagcgaatttacactgcaggtcgaggctagctgagatccatggcgtcgagcagggcgatcttggccatgggcctccttgccgccgtgctgtcccccgccttgtcaaagcggtcgtttatctccatgccagccgacgtgagtagtcctgtgaccctggccaacggcctctcctacggttaccacgccaactcctgcccgcagctgcaagacattgtgtggccgatcgtggagagcgcggtcctgggtgaggtggccatcgccgccggcctcctccgtatcttcttccacgactgctttcctcagggctgcgacgcgtccgtccttctgacgggacccaacagcgagcgggacctgccgccgaaccagacgctgcagccgcgtgcgatgcagctcatcgaggacgtccgcgtcaaggtacacgccgcctgtggcgccaccgtctcctgcgccgacatcatcgccctcgccacccgcgacgccgtcttcgtggccggggaaagcgaaatgttctacttctacgacctgccgctcggccggtttgacagcctcgagccggctaatagcagcgccgtcttcgacctcccgcagtccaccgccgacgccaacacgctcatcaacgtcttcaagagccgcaacctcgagccgatcgacctcgtcgcactctctggcgcgcacactgtcgggaaggcgcagtgcagctccttcaacaaccgcttctccgaggacgccgacttcgcccggaggctcgccgccaactgctccagcgacccgaaccggctgcaggacctcgacgtggaaacccccatcgtgttggacaaccagtacttcaaaaacctgatggagggaaagggggtgttcacctccgaccaagtgctcatcagcgacgggcgcaccgactgggcggtcaaaggcctcgccgagaacaaatattggttctacagccagttccgtgactccttggtgaagctgagtcagtaccaacccggaggaaacgtgggcgagatccgccgcaacagctgcttcacgcccaacggacagagcattcccgccaccgccggtgacgaggggttcgcagcctctgcttgagttcaccgctcactacgggatcgtcgtttagtttgcttgtagtaagagtataagctcgtgtgtactctgcttcgttcaatcctctttcatgatggctc

SEQ ID NO: 64752 - protein, 348 aa, Triticum aestivum
  peptide (1)..(348): Ceres Seq. ID no. 13584481
  misc_feature (63)..(295): Pfam Name: Peroxidase Pfam Description: Peroxidase
  misc_feature (10)..(348): Homolog of NCBI NO: 5777629 NR Description: CAA303717.1 protein [Oryza sativa]
  misc_feature (10)..(334): Homolog of NCBI NO: 7433070 NR Description: probable peroxidase (EC 1.11.1.7), cationic -
  misc_feature (15)..(348): Homolog of NCBI NO: 7433075 NR Description: probable peroxidase (EC 1.11.1.-) 1 precursor,
  misc_feature (11)..(348): Homolog of NCBI NO: 38345507 NR Description: OSJNBa0039K24.8 [Oryza sativa (japonica
  misc_feature (10)..(348): Homolog of NCBI NO: 5777627 NR Description: CAA303715.1 protein [Oryza sativa]
  misc_feature (10)..(348): Homolog of NCBI NO: 38345506 NR Description: OSJNBa0039K24.4 [Oryza sativa (japonica
  misc_feature (12)..(347): Homolog of NCBI NO: 38345508 NR Description: OSJNBa0039K24.10 [Oryza sativa (japonica
  misc_feature (43)..(348): Homolog of NCBI NO: 5777624 NR Description: CAA303712.1 protein [Oryza sativa]
  misc_feature (33)..(348): Homolog of NCBI NO: 38345511 NR Description: OSJNBa0039K24.14 [Oryza sativa (japonica
  misc_feature (7)..(348): Homolog of NCBI NO: 5777628 NR Description: CAA303716.1 protein [Oryza sativa]
MASSRAILAMGLLAAVLSPALSKRSFISMPADVSSPVTLANGLSYGYHANSCPQLQDIVWPIVESAVLGEVAIAAGLLRIFFHDCFPQGCDASVLLTGPNSERDLPPNQTLQPRAMQLIEDVRVKVHAACGATVSCADIIALATRDAVFVAGESEMFYFYDLPLGRFDSLEPANSSAVFDLPQSTADANTLINVFKSRNLEPIDLVALSGAHTVGKAQCSSFNNRFSEDADFARRLAANCSSDPNRLQDLDVETPIVLDNQYFKNLMEGKGVFTSDQVLISDGRTDWAVKGLAENKYWFYSQFRDSLVKLSQYQPGGNVGEIRRNSCFTPNGQSIPATAGDEGFAASA

SEQ ID NO: 64753 - protein, 339 aa, Triticum aestivum
  peptide (1)..(339): Ceres Seq. ID no. 13584482
  misc_feature (54)..(286): Pfam Name: Peroxidase Pfam Description: Peroxidase
  misc_feature (1)..(339): Homolog of NCBI NO: 5777629 NR Description: CAA303717.1 protein [Oryza sativa]
  misc_feature (1)..(325): Homolog of NCBI NO: 7433070 NR Description: probable peroxidase (EC 1.11.1.7), cationic -
  misc_feature (6)..(339): Homolog of NCBI NO: 7433075 NR Description: probable peroxidase (EC 1.11.1.-) 1 precursor,
  misc_feature (2)..(339): Homolog of NCBI NO: 38345507 NR Description: OSJNBa0039K24.8 [Oryza sativa (japonica
  misc_feature (1)..(339): Homolog of NCBI NO: 5777627 NR Description: CAA303715.1 protein [Oryza sativa]
  misc_feature (1)..(339): Homolog of NCBI NO: 38345506 NR Description: OSJNBa0039K24.4 [Oryza sativa (japonica
  misc_feature (3)..(338): Homolog of NCBI NO: 38345508 NR Description: OSJNBa0039K24.10 [Oryza sativa (japonica
  misc_feature (34)..(339): Homolog of NCBI NO: 5777624 NR Description: CAA303712.1 protein [Oryza sativa]
  misc_feature (24)..(339): Homolog of NCBI NO: 38345511 NR Description: OSJNBa0039K24.14 [Oryza sativa (japonica
  misc_feature (1)..(339): Homolog of NCBI NO: 5777628 NR Description: CAA303716.1 protein [Oryza sativa]
MGLLAAVLSPALSKRSFISMPADVSSPVTLANGLSYGYHANSCPQLQDIVWPIVESAVLGEVAIAAGLLRIFFHDCFPQGCDASVLLTGPNSERDLPPNQTLQPRAMQLIEDVRVKVHAACGATVSCADIIALATRDAVFVAGESEMFYFYDLPLGRFDSLEPANSSAVFDLPQSTADANTLINVFKSRNLEPIDLVALSGAHTVGKAQCSSFNNRFSEDADFARRLAANCSSDPNRLQDLDVETPIVLDNQYFKNLMEGKGVFTSDQVLISDGRTDWAVKGLAENKYWFYSQFRDSLVKLSQYQPGGNVGEIRRNSCFTPNGQSIPATAGDEGFAASA

SEQ ID NO: 64754 - protein, 320 aa, Triticum aestivum
  peptide (1)..(320): Ceres Seq. ID no. 13584483
  misc_feature (35)..(267): Pfam Name: Peroxidase Pfam Description: Peroxidase
  misc_feature (1)..(320): Homolog of NCBI NO: 5777629 NR Description: CAA303717.1 protein [Oryza sativa]
  misc_feature (1)..(306): Homolog of NCBI NO: 7433070 NR Description: probable peroxidase (EC 1.11.1.7), cationic -
  misc_feature (1)..(320): Homolog of NCBI NO: 7433075 NR Description: probable peroxidase (EC 1.11.1.-) 1 precursor,
  misc_feature (1)..(320): Homolog of NCBI NO: 38345507 NR Description: OSJNBa0039K24.8 [Oryza sativa (japonica
  misc_feature (1)..(320): Homolog of NCBI NO: 5777627 NR Description: CAA303715.1 protein [Oryza sativa]
  misc_feature (1)..(320): Homolog of NCBI NO: 38345506 NR Description: OSJNBa0039K24.4 [Oryza sativa (japonica
  misc_feature (1)..(319): Homolog of NCBI NO: 38345508 NR Description: OSJNBa0039K24.10 [Oryza sativa (japonica
  misc_feature (15)..(320): Homolog of NCBI NO: 5777624 NR Description: CAA303712.1 protein [Oryza sativa]
  misc_feature (5)..(320): Homolog of NCBI NO: 38345511 NR Description: OSJNBa0039K24.14 [Oryza sativa (japonica
  misc_feature (1)..(320): Homolog of NCBI NO: 5777628 NR Description: CAA303716.1 protein [Oryza sativa]
MPADVSSPVTLANGLSYGYHANSCPQLQDIVWPIVESAVLGEVAIAAGLLRIFFHDCFPQGCDASVLLTGPNSERDLPPNQTLQPRAMQLIEDVRVKVHAACGATVSCADIIALATRDAVFVAGESEMFYFYDLPLGRFDSLEPANSSAVFDLPQSTADANTLINVFKSRNLEPIDLVALSGAHTVGKAQCSSFNNRFSEDADFARRLAANCSSDPNRLQDLDVETPIVLDNQYFKNLMEGKGVFTSDQVLISDGRTDWAVKGLAENKYWFYSQFRDSLVKLSQYQPGGNVGEIRRNSCFTPNGQSIPATAGDEGFAASA

SEQ ID NO: 64755 - DNA, 1324 bp, Triticum aestivum
  misc_feature (1)..(1324): Ceres Seq. ID no. 15179784
acgaattcccctcccctccccgctaaccccgccgcatggaaaacgcaggcccggcaggggatccgcccggcgaatccatcgaatccccgctcctgcccgcgccggagaccaagatgccgccaccggtgccggccgtccggctcggggcgccgccgccgcccccgtgcctcaggacccacggggccaagatggcgcgccggcacatgtacgactggatcgtgctgctcctcctcgccgccatcgaggtcgcgctcaacctcatcacgcccttccaccgcttcgtcgccgagttcatgatggaggacctccgctaccccatgaagcccaacaccatccccgtctgggccgtcccgatatacgccgtcatcctgccgatgctcatcttcgccgccatctatgtcaagaagaagaatgcctacgacctgcatcacgccatactaggcctgctgttctccgtgctcatcaccggcgtcctcaccgatgcgatcaaggacggcgtcggccggcctcgccccaacttctactatcgatgctttcctgacggagtgccgaactatgaggcggtcactcgacaagtcatatgccacggagacgcaaaagtcatcaaagaagggcacaagagcttccccagtggccacacttcatggtcctttgccgggctgggcttcctgtcgtggtaccttgccggcaagatcagggtgtttgaccggggcggacacattgccaagctctgtgtcgtgatcctgccactgctcttcgctgcgatggtcggcgtgtcgcgggtcgcagactactggcaccactggcgggacgtgtttgccggtgggatcctcgggctggttgttgcttcgttctgctatctgcagttcttcccgcatccggctagcaaacacgggctgtggcctcatgcattccggcatcaggatcctaacccggaaactgagaaccaaggaacaacagatccccatcagtcggtgctgccgtccatggtacaacatgttgcctccatggagatgagaaccaatggccgagcgttggataacatggaggctggcagcggcagagcctggtaactgaatacgaccaccatggggatggggccaggcacgcaccaccatgagagacatcaccttgtaggtaggtaggtactagtagaactcttgttttgtagtatatgtttcttgtaaagacaaatgaaattgcgcgatttggttcgttgttggaccgaagtagatctagtccttgagttttcagaatcaatccgttgatctagtcctaaacaagtgcattttctgttcatgcaaatgcagtatatacttttgcc

SEQ ID NO: 64756 - protein, 345 aa, Triticum aestivum
  peptide (1)..(345): Ceres Seq. ID no. 15179785
  misc_feature (107)..(282): Pfam Name: PAP2 superfamily Pfam Description: PAP2 superfamily
  misc_feature (45)..(344): Homolog of NCBI NO: 15724220 NR Description: At2g01180/F10A8.6 [Arabidopsis thaliana]
  misc_feature (31)..(328): Homolog of NCBI NO: 10673973 NR Description: phosphatidic acid phosphatase beta [Vigna
  misc_feature (45)..(293): Homolog of NCBI NO: 18396250 NR Description: phosphatidic acid phosphatase (PAP2) family
  misc_feature (45)..(293): Homolog of NCBI NO: 6957723 NR Description: putative phosphatidate phosphohydrolase
  misc_feature (47)..(293): Homolog of NCBI NO: 9621903 NR Description: phosphatidic acid phosphatase alpha [Vigna
  misc_feature (31)..(293): Homolog of NCBI NO: 15218051 NR Description: phosphatidic acid phosphatase (PAP2) family
  misc_feature (47)..(340): Homolog of NCBI NO: 38637527 NR Description: putative phosphatidic acid phosphatase beta
  misc_feature (31)..(294): Homolog of NCBI NO: 20161571 NR Description: putative phosphatidic acid phosphatase beta
  misc_feature (31)..(340): Homolog of NCBI NO: 38637528 NR Description: unknown protein [Oryza sativa (japonica
  misc_feature (31)..(310): Homolog of NCBI NO: 34910912 NR Description: putative phosphatidic acid phosphatase beta
MENAGPAGDPPGESIESPLLPAPETKMPPPVPAVRLGAPPPPPCLRTHGAKMARRHMYDWIVLLLLAAIEVALNLITPFHRFVAEFMMEDLRYPMKPNTIPVWAVPIYAVILPMLIFAAIYVKKKNAYDLHHAILGLLFSVLITGVLTDAIKDGVGRPRPNFYYRCFPDGVPNYEAVTRQVICHGDAKVIKEGHKSFPSGHTSWSFAGLGFLSWYLAGKIRVFDRGGHIAKLCVVILPLLFAAMVGVSRVADYWHHWRDVFAGGILGLVVASFCYLQFFPHPASKHGLWPHAFRHQDPNPETENQGTTDPHQSVLPSMVQHVASMEMRTNGRALDNMEAGSGRAW

SEQ ID NO: 64757 - protein, 319 aa, Triticum aestivum
  peptide (1)..(319): Ceres Seq. ID no. 15179786
  misc_feature (81)..(256): Pfam Name: PAP2 superfamily Pfam Description: PAP2 superfamily
  misc_feature (19)..(318): Homolog of NCBI NO: 15724220 NR Description: At2g01180/F10A8.6 [Arabidopsis thaliana]
  misc_feature (5)..(302): Homolog of NCBI NO: 10673973 NR Description: phosphatidic acid phosphatase beta [Vigna
  misc_feature (19)..(267): Homolog of NCBI NO: 18396250 NR Description: phosphatidic acid phosphatase (PAP2) family
  misc_feature (19)..(267): Homolog of NCBI NO: 6957723 NR Description: putative phosphatidate phosphohydrolase
  misc_feature (21)..(267): Homolog of NCBI NO: 9621903 NR Description: phosphatidic acid phosphatase alpha [Vigna
  misc_feature (5)..(267): Homolog of NCBI NO: 15218051 NR Description: phosphatidic acid phosphatase (PAP2) family
  misc_feature (21)..(314): Homolog of NCBI NO: 38637527 NR Description: putative phosphatidic acid phosphatase beta
  misc_feature (5)..(268): Homolog of NCBI NO: 20161571 NR Description: putative phosphatidic acid phosphatase beta
  misc_feature (5)..(314): Homolog of NCBI NO: 38637528 NR Description: unknown protein [Oryza sativa (japonica
  misc_feature (5)..(284): Homolog of NCBI NO: 34910912 NR Description: putative phosphatidic acid phosphatase beta
MPPPVPAVRLGAPPPPPCLRTHGAKMARRHMYDWIVLLLLAAIEVALNLITPFHRFVAEFMMEDLRYPMKPNTIPVWAVPIYAVILPMLIFAAIYVKKKNAYDLHHAILGLLFSVLITGVLTDAIKDGVGRPRPNFYYRCFPDGVPNYEAVTRQVICHGDAKVIKEGHKSFPSGHTSWSFAGLGFLSWYLAGKIRVFDRGGHIAKLCVVILPLLFAAMVGVSRVADYWHHWRDVFAGGILGLVVASFCYLQFFPHPASKHGLWPHAFRHQDPNPETENQGTTDPHQSVLPSMVQHVASMEMRTNGRALDNMEAGSGRAW

SEQ ID NO: 64758 - protein, 294 aa, Triticum aestivum
  peptide (1)..(294): Ceres Seq. ID no. 15179787
  misc_feature (56)..(231): Pfam Name: PAP2 superfamily Pfam Description: PAP2 superfamily
  misc_feature (1)..(293): Homolog of NCBI NO: 15724220 NR Description: At2g01180/F10A8.6 [Arabidopsis thaliana]
  misc_feature (1)..(277): Homolog of NCBI NO: 10673973 NR Description: phosphatidic acid phosphatase beta [Vigna
  misc_feature (1)..(242): Homolog of NCBI NO: 18396250 NR Description: phosphatidic acid phosphatase (PAP2) family
  misc_feature (1)..(242): Homolog of NCBI NO: 6957723 NR Description: putative phosphatidate phosphohydrolase
  misc_feature (1)..(242): Homolog of NCBI NO: 9621903 NR Description: phosphatidic acid phosphatase alpha [Vigna
  misc_feature (1)..(242): Homolog of NCBI NO: 15218051 NR Description: phosphatidic acid phosphatase (PAP2) family
  misc_feature (1)..(289): Homolog of NCBI NO: 38637527 NR Description: putative phosphatidic acid phosphatase beta
  misc_feature (1)..(243): Homolog of NCBI NO: 20161571 NR Description: putative phosphatidic acid phosphatase beta
  misc_feature (1)..(289): Homolog of NCBI NO: 38637528 NR Description: unknown protein [Oryza sativa (japonica
  misc_feature (1)..(259): Homolog of NCBI NO: 34910912 NR Description: putative phosphatidic acid phosphatase beta
MARRHMYDWIVLLLLAAIEVALNLITPFHRFVAEFMMEDLRYPMKPNTIPVWAVPIYAVILPMLIFAAIYVKKKNAYDLHHAILGLLFSVLITGVLTDAIKDGVGRPRPNFYYRCFPDGVPNYEAVTRQVICHGDAKVIKEGHKSFPSGHTSWSFAGLGFLSWYLAGKIRVFDRGGHIAKLCVVILPLLFAAMVGVSRVADYWHHWRDVFAGGILGLVVASFCYLQFFPHPASKHGLWPHAFRHQDPNPETENQGTTDPHQSVLPSMVQHVASMEMRTNGRALDNMEAGSGRAW

SEQ ID NO: 64759 - DNA, 1235 bp, Triticum aestivum
  misc_feature (1)..(1235): Ceres Seq. ID no. 13597519
atcctacactgagtttagctagatcaatttgtgagcttagcatatctgcgatggcttccaggacatggcatttcttgctcgccctcttcctcctgtcctccgctgcgtatgggcagctctcgccgtccttctacgccacgagctgccccctgctggagctcaccgtgcgcgccaccatgatcgctgcgctcctcgccgagcgccgaatgggcgcctccctcctcaggctccacttccatgactgctttgttcaaggctgtgacggatccattcttctggatgacgtgggcagcttcgtcggcgagaagacggccttcccgaacgtgaactccgtgcgcggctacgaggtgatcgaccggatcaaggccaacgtggagctgctctgccccggcgtcgtctcctgtgccgacatcgtcgccctcgcagcacgcgacggcacgtttctgctaggcgggccgagctgggcggtgccgctgggccggcgggactcgacgacggcgagcctggcggaggcgaacgccgacctcccggggccgacgctgaacctcgaccagctcatccgcgcgttcgacaagaagcagctgaccccgcgggacctgacggcgctgtcgggcgcgcacaccatcggcttctcgcagtgccagttcttccgcggccacatctacaacgacaccaacatcgacccggcgttcgcggcgctgcgccggcaggcatgccccgccgcggcccccgccggcgactccaacctggcgcccttcgacgcgcagacccagctcgtcttcgacaacgcctactaccgcaacctagtcgcccaacgcggcctgctgcactcggatcaggagctcttcaacggcgcctcccaggatgcgctggtgcgccagtacggctccaacccggcgctcttcgccgccgacttcgtggccgccatgatcaagatgggcaacatcgcccccctcaccgggtccagcggccagatcaggcgcaactgcagggtcgtcaacagctagctgattggtcgtctaaatgatcaattgatcatgctacgtgatgatggagatgtctcaagtttggttggctacgaaggtaaccaaccagcatgcatgcatggcagaataagagccgtttggttcaggtttagatgattgttgcctttgtccgtgcttcatcatgtaagttgccggtctctgcagtactactatcatggaaatcaagcaactctcgaatgtgtatttgcc

SEQ ID NO: 64760 - protein, 334 aa, Triticum aestivum
  peptide (1)..(334): Ceres Seq. ID no. 13597520
  misc_feature (55)..(297): Pfam Name: Peroxidase Pfam Description: Peroxidase
  misc_feature (17)..(333): Homolog of NCBI NO: 28400798 NR Description: peroxidase [Asparagus officinalis]
  misc_feature (24)..(333): Homolog of NCBI NO: 99872 NR Description: peroxidase (EC 1.11.1.7) precursor, cationic
  misc_feature (24)..(333): Homolog of NCBI NO: 5381253 NR Description: peroxidase [Nicotiana tabacum]
  misc_feature (24)..(333): Homolog of NCBI NO: 6093671 NR Description: Cationic peroxidase 1 precursor (PNPC1)
  misc_feature (24)..(333): Homolog of NCBI NO: 7433048 NR Description: probable peroxidase (EC 1.11.1.7) (clone PC44) -
  misc_feature (17)..(334): Homolog of NCBI NO: 520568 NR Description: peroxidase
  misc_feature (27)..(333): Homolog of NCBI NO: 7433049 NR Description: peroxidase (EC 1.11.1.7) - flax (fragment)
  misc_feature (24)..(333): Homolog of NCBI NO: 577503 NR Description: cationic peroxidase
  misc_feature (26)..(333): Homolog of NCBI NO: 7433047 NR Description: probable peroxidase (EC 1.11.1.7) (clone PC23) -
  misc_feature (25)..(333): Homolog of NCBI NO: 5453379 NR Description: bacterial-induced peroxidase precursor [Gossypium
PTLSLARSICELSISAMASRTWHFLLALFLLSSAAYGQLSPSFYATSCPLLELTVRATMIAALLAERRMGASLLRLHFHDCFVQGCDGSILLDDVGSFVGEKTAFPNVNSVRGYEVIDRIKANVELLCPGVVSCADIVALAARDGTFLLGGPSWAVPLGRRDSTTASLAEANADLPGPTLNLDQLIRAFDKKQLTPRDLTALSGAHTIGFSQCQFFRGHIYNDTNIDPAFAALRRQACPAAAPAGDSNLAPFDAQTQLVFDNAYYRNLVAQRGLLHSDQELFNGASQDALVRQYGSNPALFAADFVAAMIKMGNIAPLTGSSGQIRRNCRVVNS

SEQ ID NO: 64761 - protein, 318 aa, Triticum aestivum
  peptide (1)..(318): Ceres Seq. ID no. 13597521
  misc_feature (39)..(281): Pfam Name: Peroxidase Pfam Description: Peroxidase
  misc_feature (1)..(317): Homolog of NCBI NO: 28400798 NR Description: peroxidase [Asparagus officinalis]
  misc_feature (8)..(317): Homolog of NCBI NO: 99872 NR Description: peroxidase (EC 1.11.1.7) precursor, cationic
  misc_feature (8)..(317): Homolog of NCBI NO: 5381253 NR Description: peroxidase [Nicotiana tabacum]
  misc_feature (8)..(317): Homolog of NCBI NO: 6093671 NR Description: Cationic peroxidase 1 precursor (PNPC1)
  misc_feature (8)..(317): Homolog of NCBI NO: 7433048 NR Description: probable peroxidase (EC 1.11.1.7) (clone PC44) -
  misc_feature (1)..(318): Homolog of NCBI NO: 520568 NR Description: peroxidase
  misc_feature (11)..(317): Homolog of NCBI NO: 7433049 NR Description: peroxidase (EC 1.11.1.7) - flax (fragment)
  misc_feature (8)..(317): Homolog of NCBI NO: 577503 NR Description: cationic peroxidase
  misc_feature (10)..(317): Homolog of NCBI NO: 7433047 NR Description: probable peroxidase (EC 1.11.1.7) (clone PC23) -
  misc_feature (9)..(317): Homolog of NCBI NO: 5453379 NR Description: bacterial-induced peroxidase precursor [Gossypium
MASRTWHFLLALFLLSSAAYGQLSPSFYATSCPLLELTVRATMIAALLAERRMGASLLRLHFHDCFVQGCDGSILLDDVGSFVGEKTAFPNVNSVRGYEVIDRIKANVELLCPGVVSCADIVALAARDGTFLLGGPSWAVPLGRRDSTTASLAEANADLPGPTLNLDQLIRAFDKKQLTPRDLTALSGAHTIGFSQCQFFRGHIYNDTNIDPAFAALRRQACPAAAPAGDSNLAPFDAQTQLVFDNAYYRNLVAQRGLLHSDQELFNGASQDALVRQYGSNPALFAADFVAAMIKMGNIAPLTGSSGQIRRNCRVVNS

SEQ ID NO: 64762 - protein, 276 aa, Triticum aestivum
  peptide (1)..(276): Ceres Seq. ID no. 13597522
  misc_feature (1)..(239): Pfam Name: Peroxidase Pfam Description: Peroxidase
  misc_feature (1)..(275): Homolog of NCBI NO: 28400798 NR Description: peroxidase [Asparagus officinalis]
  misc_feature (1)..(275): Homolog of NCBI NO: 99872 NR Description: peroxidase (EC 1.11.1.7) precursor, cationic
  misc_feature (1)..(275): Homolog of NCBI NO: 5381253 NR Description: peroxidase [Nicotiana tabacum]
  misc_feature (1)..(275): Homolog of NCBI NO: 6093671 NR Description: Cationic peroxidase 1 precursor (PNPC1)
  misc_feature (1)..(275): Homolog of NCBI NO: 7433048 NR Description: probable peroxidase (EC 1.11.1.7) (clone PC44) -
  misc_feature (1)..(276): Homolog of NCBI NO: 520568 NR Description: peroxidase
  misc_feature (1)..(275): Homolog of NCBI NO: 7433049 NR Description: peroxidase (EC 1.11.1.7) - flax (fragment)
  misc_feature (1)..(275): Homolog of NCBI NO: 577503 NR Description: cationic peroxidase
  misc_feature (1)..(275): Homolog of NCBI NO: 7433047 NR Description: probable peroxidase (EC 1.11.1.7) (clone PC23) -
  misc_feature (1)..(275): Homolog of NCBI NO: 5453379 NR Description: bacterial-induced peroxidase precursor [Gossypium
MIAALLAERRMGASLLRLHFHDCFVQGCDGSILLDDVGSFVGEKTAFPNVNSVRGYEVIDRIKANVELLCPGVVSCADIVALAARDGTFLLGGPSWAVPLGRRDSTTASLAEANADLPGPTLNLDQLIRAFDKKQLTPRDLTALSGAHTIGFSQCQFFRGHIYNDTNIDPAFAALRRQACPAAAPAGDSNLAPFDAQTQLVFDNAYYRNLVAQRGLLHSDQELFNGASQDALVRQYGSNPALFAADFVAAMIKMGNIAPLTGSSGQIRRNCRVVNS

SEQ ID NO: 64763 - DNA, 1077 bp, Triticum aestivum
  misc_feature (1)..(1077): Ceres Seq. ID no. 12617991
aacctccattgctgcgtgctcccttcctcctctctaaccaagcacctcctcttgcgctgcgggtgctggctacctagaggtggcgtgctggatggtcgctgaggcggtcgggttcatgatgtcccgcgcggcggacggcggcaccatggcgccggagctcgtcacccgggacttcctcggcggctgccaggcgcccgcccccggcgatgaccccaggcacgacgcggccgcccggcacgactccgtcatgcccggcaagccaccgctgcagaagcaccggagcccgccgccgtcggccaggggggacctcaacctcttccccgcctccggcgccgccatggcgccactgccgacgatggcgccggcggcggactgcgccgccaccaccacgtaccacagcgtgtgcacgatcgagaaggtcaagaccgcgctggagcggttcgagcgcgggaagcaggggcaggggcagcaccaccaccagcagcagcacagcggcgcgggcgcgaccgcgggcgcctccccgtcctcctcctcggtcaccacgtcctccgtcaagcgccgcggggacgccggcgccgtggagcagggcgacggctgcgactccccgtccgcgggcgggggcatggtggccgccgcatgcccgcgctgcttcctctacgtgctcatcgcccggagcgacccccgctgcccgcgctgcgagtcgcacgtgccgccacccccggccccggcgcccaagaagaagccgcggatcgacctcaacgtcggcttcctcggaacctagccatgccaagccaagaagaagtaggtcaagatggttgtcgtccgtcctcgtcctcgtcctcgtcctcggcgcgttaggtaggcagcaggcctccggtgctcggattggccacgacgacgccattgtttttctgatgccaccgacggattccggtacataggggaggcgctccagatttttgcttgtccatttccaagtatggccggccgtccgtccgtccgtccccgattctgtcatgtcagatcaatcaaacactcgacagaacatgaatgaatgaaactactattcctactggg

SEQ ID NO: 64764 - protein, 244 aa, Triticum aestivum
  peptide (1)..(244): Ceres Seq. ID no. 12617992
  misc_feature (1)..(202): Pfam Name: AF-4 proto-oncoprotein Pfam Description: AF-4 proto-oncoprotein
  misc_feature (1)..(192): Homolog of NCBI NO: 27375632 NR Description: blr0521 [Bradyrhizobium japonicum]
  misc_feature (1)..(196): Homolog of NCBI NO: 23017082 NR Description: hypothetical protein [Thermobifida fusca]
  misc_feature (1)..(202): Homolog of NCBI NO: 7949115 NR Description: Ser/Arg-related nuclear matrix protein
  misc_feature (1)..(189): Homolog of NCBI NO: 29250754 NR Description: GLP_49_64409_65443 [Giardia lamblia ATCC 50803]
  misc_feature (1)..(177): Homolog of NCBI NO: 25989119 NR Description: unknown [Streptomyces aureofaciens]
  misc_feature (1)..(195): Homolog of NCBI NO: 40789025 NR Description: KIAA1029 protein [Homo sapiens]
  misc_feature (1)..(195): Homolog of NCBI NO: 40353727 NR Description: synaptopodin [Homo sapiens]
  misc_feature (1)..(196): Homolog of NCBI NO: 27375632 NR Description: blr0521 [Bradyrhizobium japonicum]
  misc_feature (1)..(197): Homolog of NCBI NO: 25143299 NR Description: pre-mRNA splicing SR protein related RSR-1 (68.2
  misc_feature (1)..(200): Homolog of NCBI NO: 25143299 NR Description: pre-mRNA splicing SR protein related RSR-1 (68.2
MTPGTTRPPGTTPSCPASHRCRSTGARRRRPGGTSTSSPPPAPPWRHCRRWRRRRTAPPPPRTTACARSRRSRPRWSGSSAGSRGRGSTTTSSSTAARARPRAPPRPPPRSPRPPSSAAGTPAPWSRATAATPRPRAGAWWPPHARAASSTCSSPGATPAARAASRTCRHPRPRRPRRSRGSTSTSASSEPSHAKPRRSRSRWLSSVLVLVLVLGALGRQQASGARIGHDDAIVFLMPPTDSGT

SEQ ID NO: 64765 - protein, 229 aa, Triticum aestivum
  peptide (1)..(229): Ceres Seq. ID no. 12617993
  misc_feature (179)..(224): Homolog of NCBI NO: 7452060 NR Description: hypothetical protein YUP8H12R.23 - Arabidopsis
  misc_feature (167)..(224): Homolog of NCBI NO: 18394369 NR Description: expressed protein
  misc_feature (119)..(206): Homolog of NCBI NO: 34908532 NR Description: P0423B08.15 [Oryza sativa (japonica
  misc_feature (91)..(229): Homolog of NCBI NO: 38605781 NR Description: OSJNBa0044K18.24 [Oryza sativa (japonica
  misc_feature (86)..(223): Homolog of NCBI NO: 5852085 NR Description: zwh0008.1 [Oryza sativa (indica cultivar-group)]
  misc_feature (17)..(223): Homolog of NCBI NO: 38345608 NR Description: OSJNBa0093O08.10 [Oryza sativa (japonica
MVAEAVGFMMSRAADGGTMAPELVTRDFLGGCQAPAPGDDPRHDAAARHDSVMPGKPPLQKHRSPPPSARGDLNLFPASGAAMAPLPTMAPAADCAATTTYHSVCTIEKVKTALERFERGKQGQGQHHHQQQHSGAGATAGASPSSSSVTTSSVKRRGDAGAVEQGDGCDSPSAGGGMVAAACPRCFLYVLIARSDPRCPRCESHVPPPPAPAPKKKPRIDLNVGFLGT

SEQ ID NO: 64766 - protein, 221 aa, Triticum aestivum
  peptide (1)..(221): Ceres Seq. ID no. 12617994
  misc_feature (171)..(216): Homolog of NCBI NO: 7452060 NR Description: hypothetical protein YUP8H12R.23 - Arabidopsis
  misc_feature (159)..(216): Homolog of NCBI NO: 18394369 NR Description: expressed protein
  misc_feature (111)..(198): Homolog of NCBI NO: 34908532 NR Description: P0423B08.15 [Oryza sativa (japonica
  misc_feature (83)..(221): Homolog of NCBI NO: 38605781 NR Description: OSJNBa0044K18.24 [Oryza sativa (japonica
  misc_feature (78)..(215): Homolog of NCBI NO: 5852085 NR Description: zwh0008.1 [Oryza sativa (indica cultivar-group)]
  misc_feature (9)..(215): Homolog of NCBI NO: 38345608 NR Description: OSJNBa0093O08.10 [Oryza sativa (japonica
MMSRAADGGTMAPELVTRDFLGGCQAPAPGDDPRHDAAARHDSVMPGKPPLQKHRSPPPSARGDLNLFPASGAAMAPLPTMAPAADCAATTTYHSVCTIEKVKTALERFERGKQGQGQHHHQQQHSGAGATAGASPSSSSVTTSSVKRRGDAGAVEQGDGCDSPSAGGGMVAAACPRCFLYVLIARSDPRCPRCESHVPPPPAPAPKKKPRIDLNVGFLGT

SEQ ID NO: 64767 - DNA, 902 bp, Triticum aestivum
  misc_feature (1)..(902): Ceres Seq. ID no. 12586454
aaaccacgcgaaggggaaacccaaattccatcccgacttctctacctctccggcctccacccaggagagccctaagccggaagcaccttacccttaagctctcttgacctctccccatggcgtccgcgtggtgcctcttggcgccggccgccgcgccggtggcggcgccgggcgctctcggcgtctccgcctccgaatccagaggcgtcttcgtcgcgcgggcggcggtccctgcgaggatgcggcgcaggtggggttcgctcgtggtgtgcgtagcccccgacgaggagaagattacgcggcgctcgcccctcgatttccccatcgaatgggagaaacctaagcctgggaggagacctgacatcttcccaaagttcagccctatgaaaacaccattgccccatccattaccagctgatgatcctttggatgatgatgaggaagaagaagaggaagaagcccaacctcaagaagaaccccaggaggatgatcctgacaaagaggatcctgaggaagatgacccagacaagccaattgagtaattttggatgaggtggcctgtggtagatagaaaccgtgtcgtattttccagagaatatgtggggtttgagctattcagaaatgttagtttgtgtcggcttatataggctctagacataagtttgctcagcaaggacctttgagcttttctgaagctatacaaattttgttccactagtttcaatatgaatttatatgtattcttctgaaaggtatttgcctatacgacacaataagctgttgaatgttcagtagttatgttcactgatttgatactccaatgtgctgaaagtgcattataagcaattaggtagttgtaatattggcaataacttggcatcagttagaatgacacattggtc

SEQ ID NO: 64768 - protein, 141 aa, Triticum aestivum
  peptide (1)..(141): Ceres Seq. ID no. 12586455
  misc_feature (53)..(137): Homolog of NCBI NO: 26452533 NR Description: unknown protein [Arabidopsis thaliana]
  misc_feature (20)..(138): Homolog of NCBI NO: 18398354 NR Description: expressed protein
  misc_feature (5)..(137): Homolog of NCBI NO: 21553725 NR Description: unknown [Arabidopsis thaliana]
  misc_feature (5)..(137): Homolog of NCBI NO: 18404214 NR Description: Expressed protein
MASAWCLLAPAAAPVAAPGALGVSASESRGVFVARAAVPARMRRRWGSLVVCVAPDEEKITRRSPLDFPIEWEKPKPGRRPDIFPKFSPMKTPLPHPLPADDPLDDDEEEEEEEAQPQEEPQEDDPDKEDPEEDDPDKPIE

SEQ ID NO: 64769 - protein, 100 aa, Triticum aestivum
  peptide (1)..(100): Ceres Seq. ID no. 12586456
  misc_feature (12)..(96): Homolog of NCBI NO: 26452533 NR Description: unknown protein [Arabidopsis thaliana]
  misc_feature (1)..(97): Homolog of NCBI NO: 18398354 NR Description: expressed protein
  misc_feature (1)..(96): Homolog of NCBI NO: 21553725 NR Description: unknown [Arabidopsis thaliana]
  misc_feature (1)..(96): Homolog of NCBI NO: 18404214 NR Description: Expressed protein
MRRRWGSLVVCVAPDEEKITRRSPLDFPIEWEKPKPGRRPDIFPKFSPMKTPLPHPLPADDPLDDDEEEEEEEAQPQEEPQEDDPDKEDPEEDDPDKPIE

SEQ ID NO: 64770 - DNA, 2075 bp, Triticum aestivum
  misc_feature (1)..(2075): Ceres Seq. ID no. 13591098
ctctctccgcttctattctcttcctgccaggctccgtccgtccgccaccgatccgtcatcccctctgcgcccccttctccggcagccgccgcccgcccgccgtcgacatcccccaggggtccgcccggccctccgccgcatcggccatggcgtcgccggcgctcatctccgacaccgaccagtggaaggccctccaggcgcacgtcggcgcgatccacaagacgcacctgcgcgacctcatgacggacgccgatcgatgcaaggcaatgacagccgaattcgagggcgtcttcctggactactcgaggcagcaggccaccacggagaccgtcgacaagctcttcaagctggcagaggctgcaaagctcaaggagaagattgacaagatgtttaaaggcgaaaagataaataccacggagaacagatcagtgctccatgtggctttgagagctccaagagatgcagtcataaacagtgacggtgtgaacgtggtccccgaagtttgggctgttaaggataaaatcaagcagttttcagagactttcaggagtggctcatgggttggggcaaccgggaaaccgttgacaaatgttgtctcagttggaattggtggcagcttccttggacctctgtttgtgcatacggctctccagactgacccagaagcagcagaatctgccaaaggccgacaactgagatttcttgcaaatgttgatccggttgatgttgcacggagcatcaaagatttagaccctgcaaccactcttgttgtggttgtctcaaagaccttcacgacagctgaaacaatgttaaatgctcgaactatcaaggagtggattgtctcttctcttggacctcaggctgtttccaaacacatgattgctgtcagtactaatcttaagcttgtcaaggagttcggaattgaccctaacaacgcctttgcattctgggactgggttggcggccgctatagtgtttgcagtgctgtcggtgttctgcccttatctcttcagtatggatttccaattgttcagaaatttctggagggtgcttccagcattgacaaccacttccacacatcttcatttgagaaaaatatacctgtactccttggtttgttgagtgtgtggaatgtttcatttcttggatatccggctagggcaatattgccatactctcaagcacttgagaaactagcaccacatattcagcagcttagcatggagagtaatggaaagggtgtctccattgatggtgttcgacttccatatgaggctggtgaaattgattttggtgaacctggaacaaacgggcaacacagcttctatcaattaatccatcagggaagagttattccttgtgattttattggtgtcataaaaagccagcagcctgtttacttgaaaggggaaacggttagcaatcatgatgagttgatgtccaatttctttgctcagcctgacgcacttgcttatggaaagactcctgaacaattacgcagcgagaaagttcccgaaaatcttatctctcacaagacttttcagggcaaccggccatcactgagtttcttgctgtcttcattatctgcctatgagattggacagcttttatccatctatgagcaccggatcgcagttcagggtttcatatggggaatcaactcgtttgaccagtggggagtggagctgggcaagtcactggcttctacagtgaggaaacagttgcatgcatcacgcatggaaggaaagcccgtcgagggcttcaaccccagcagcgcaagtttgctcacacggtttcttgcggttaaaccatcaaccccatatgacacaacagtgcttccaaaagtgtaagccgagggaggtttagtagtcctaaaaaaagaagtgtaacctgaggttgagactgataatcgacaagctatgttgagcttgtggcataacaagttttcttccttctttcttgcgacttgttacaaccagtctggttgtactgtaattttgaagttcctcttgcttcagcttggagaaagacaagtaaactatgacgaaataatgaaataaatatatcgactcgtg

SEQ ID NO: 64771 - protein, 615 aa, Triticum aestivum
  peptide (1)..(615): Ceres Seq. ID no. 13591099
  misc_feature (99)..(595): Pfam Name: Phosphoglucose isomerase Pfam Description: Phosphoglucose isomerase
  misc_feature (49)..(615): Homolog of NCBI NO: 2588808 NR Description: cytosolic phosphoglucose isomerase [Dioscorea
  misc_feature (49)..(615): Homolog of NCBI NO: 2588806 NR Description: phosphoglucose isomerase [Dioscorea tokoro]
  misc_feature (49)..(615): Homolog of NCBI NO: 1730181 NR Description: Glucose-6-phosphate isomerase, cytosolic (GPI)
  misc_feature (49)..(615): Homolog of NCBI NO: 1730169 NR Description: Glucose-6-phosphate isomerase, cytosolic 1 (GPI)
  misc_feature (49)..(615): Homolog of NCBI NO: 2588812 NR Description: cytosolic phosphoglucose isomerase [Dioscorea
  misc_feature (49)..(615): Homolog of NCBI NO: 2588816 NR Description: cytosolic phosphoglucose isomerase [Dioscorea
  misc_feature (49)..(615): Homolog of NCBI NO: 1169798 NR Description: Glucose-6-phosphate isomerase, cytosolic B (Phosphoglucose isomerase B) (PGI-B) (Phosphohexose isomerase B)
  misc_feature (49)..(615): Homolog of NCBI NO: 1169797 NR Description: Glucose-6-phosphate isomerase, cytosolic A (Phosphoglucose isomerase A) (PGI-A) (Phosphohexose isomerase A)
  misc_feature (49)..(615): Homolog of NCBI NO: 34915218 NR Description: phosphoglucose isomerase (Pgi-a)
  misc_feature (49)..(615): Homolog of NCBI NO: 1346073 NR Description: Glucose-6-phosphate isomerase, cytosolic (GPI)
LSASILFLPGSVRPPPIRHPLCAPFSGSRRPPAVDIPQGSARPSAASAMASPALISDTDQWKALQAHVGAIHKTHLRDLMTDADRCKAMTAEFEGVFLDYSRQQATTETVDKLFKLAEAAKLKEKIDKMFKGEKINTTENRSVLHVALRAPRDAVINSDGVNVVPEVWAVKDKIKQFSETFRSGSWVGATGKPLTNVVSVGIGGSFLGPLFVHTALQTDPEAAESAKGRQLRFLANVDPVDVARSIKDLDPATTLVVVVSKTFTTAETMLNARTIKEWIVSSLGPQAVSKHMIAVSTNLKLVKEFGIDPNNAFAFWDWVGGRYSVCSAVGVLPLSLQYGFPIVQKFLEGASSIDNHFHTSSFEKNIPVLLGLLSVWNVSFLGYPARAILPYSQALEKLAPHIQQLSMESNGKGVSIDGVRLPYEAGEIDFGEPGTNGQHSFYQLIHQGRVIPCDFIGVIKSQQPVYLKGETVSNHDELMSNFFAQPDALAYGKTPEQLRSEKVPENLISHKTFQGNRPSLSFLLSSLSAYEIGQLLSIYEHRIAVQGFIWGINSFDQWGVELGKSLASTVRKQLHASRMEGKPVEGFNPSSASLLTRFLAVKPSTPYDTTVLPKV

SEQ ID NO: 64772 - protein, 567 aa, Triticum aestivum
  peptide (1)..(567): Ceres Seq. ID no. 13591100
  misc_feature (51)..(547): Pfam Name: Phosphoglucose isomerase Pfam Description: Phosphoglucose isomerase
  misc_feature (1)..(567): Homolog of NCBI NO: 2588808 NR Description: cytosolic phosphoglucose isomerase [Dioscorea
  misc_feature (1)..(567): Homolog of NCBI NO: 2588806 NR Description: phosphoglucose isomerase [Dioscorea tokoro]
  misc_feature (1)..(567): Homolog of NCBI NO: 1730181 NR Description: Glucose-6-phosphate isomerase, cytosolic (GPI)
  misc_feature (1)..(567): Homolog of NCBI NO: 1730169 NR Description: Glucose-6-phosphate isomerase, cytosolic 1 (GPI)
  misc_feature (1)..(567): Homolog of NCBI NO: 2588812 NR Description: cytosolic phosphoglucose isomerase [Dioscorea
  misc_feature (1)..(567): Homolog of NCBI NO: 2588816 NR Description: cytosolic phosphoglucose isomerase [Dioscorea
  misc_feature (1)..(567): Homolog of NCBI NO: 1169798 NR Description: Glucose-6-phosphate isomerase, cytosolic B (Phosphoglucose isomerase B) (PGI-B) (Phosphohexose isomerase B)
  misc_feature (1)..(567): Homolog of NCBI NO: 1169797 NR Description: Glucose-6-phosphate isomerase, cytosolic A (Phosphoglucose isomerase A) (PGI-A) (Phosphohexose isomerase A)
  misc_feature (1)..(567): Homolog of NCBI NO: 34915218 NR Description: phosphoglucose isomerase (Pgi-a)
  misc_feature (1)..(567): Homolog of NCBI NO: 1346073 NR Description: Glucose-6-phosphate isomerase, cytosolic (GPI)
MASPALISDTDQWKALQAHVGAIHKTHLRDLMTDADRCKAMTAEFEGVFLDYSRQQATTETVDKLFKLAEAAKLKEKIDKMFKGEKINTTENRSVLHVALRAPRDAVINSDGVNVVPEVWAVKDKIKQFSETFRSGSWVGATGKPLTNVVSVGIGGSFLGPLFVHTALQTDPEAAESAKGRQLRFLANVDPVDVARSIKDLDPATTLVVVVSKTFTTAETMLNARTIKEWIVSSLGPQAVSKHMIAVSTNLKLVKEFGIDPNNAFAFWDWVGGRYSVCSAVGVLPLSLQYGFPIVQKFLEGASSIDNHFHTSSFEKNIPVLLGLLSVWNVSFLGYPARAILPYSQALEKLAPHIQQLSMESNGKGVSIDGVRLPYEAGEIDFGEPGTNGQHSFYQLIHQGRVIPCDFIGVIKSQQPVYLKGETVSNHDELMSNFFAQPDALAYGKTPEQLRSEKVPENLISHKTFQGNRPSLSFLLSSLSAYEIGQLLSIYEHRIAVQGFIWGINSFDQWGVELGKSLASTVRKQLHASRMEGKPVEGFNPSSASLLTRFLAVKPSTPYDTTVLPKV

SEQ ID NO: 64773 - protein, 536 aa, Triticum aestivum
  peptide (1)..(536): Ceres Seq. ID no. 13591101
  misc_feature (20)..(516): Pfam Name: Phosphoglucose isomerase Pfam Description: Phosphoglucose isomerase
  misc_feature (1)..(536): Homolog of NCBI NO: 2588808 NR Description: cytosolic phosphoglucose isomerase [Dioscorea
  misc_feature (1)..(536): Homolog of NCBI NO: 2588806 NR Description: phosphoglucose isomerase [Dioscorea tokoro]
  misc_feature (1)..(536): Homolog of NCBI NO: 1730181 NR Description: Glucose-6-phosphate isomerase, cytosolic (GPI)
  misc_feature (1)..(536): Homolog of NCBI NO: 1730169 NR Description: Glucose-6-phosphate isomerase, cytosolic 1 (GPI)
  misc_feature (1)..(536): Homolog of NCBI NO: 2588812 NR Description: cytosolic phosphoglucose isomerase [Dioscorea
  misc_feature (1)..(536): Homolog of NCBI NO: 2588816 NR Description: cytosolic phosphoglucose isomerase [Dioscorea
  misc_feature (1)..(536): Homolog of NCBI NO: 1169798 NR Description: Glucose-6-phosphate isomerase, cytosolic B (Phosphoglucose isomerase B) (PGI-B) (Phosphohexose isomerase B)
  misc_feature (1)..(536): Homolog of NCBI NO: 1169797 NR Description: Glucose-6-phosphate isomerase, cytosolic A (Phosphoglucose isomerase A) (PGI-A) (Phosphohexose isomerase A)
  misc_feature (1)..(536): Homolog of NCBI NO: 34915218 NR Description: phosphoglucose isomerase (Pgi-a)
  misc_feature (1)..(536): Homolog of NCBI NO: 1346073 NR Description: Glucose-6-phosphate isomerase, cytosolic (GPI)
MTDADRCKAMTAEFEGVFLDYSRQQATTETVDKLFKLAEAAKLKEKIDKMFKGEKINTTENRSVLHVALRAPRDAVINSDGVNVVPEVWAVKDKIKQFSETFRSGSWVGATGKPLTNVVSVGIGGSFLGPLFVHTALQTDPEAAESAKGRQLRFLANVDPVDVARSIKDLDPATTLVVVVSKTFTTAETMLNARTIKEWIVSSLGPQAVSKHMIAVSTNLKLVKEFGIDPNNAFAFWDWVGGRYSVCSAVGVLPLSLQYGFPIVQKFLEGASSIDNHFHTSSFEKNIPVLLGLLSVWNVSFLGYPARAILPYSQALEKLAPHIQQLSMESNGKGVSIDGVRLPYEAGEIDFGEPGTNGQHSFYQLIHQGRVIPCDFIGVIKSQQPVYLKGETVSNHDELMSNFFAQPDALAYGKTPEQLRSEKVPENLISHKTFQGNRPSLSFLLSSLSAYEIGQLLSIYEHRIAVQGFIWGINSFDQWGVELGKSLASTVRKQLHASRMEGKPVEGFNPSSASLLTRFLAVKPSTPYDTTVLPKV

SEQ ID NO: 64774 - DNA, 1539 bp, Triticum aestivum
  misc_feature (1)..(1539): Ceres Seq. ID no. 15225826
tttttcgccacagatattcccaaagcatctcctttctttccccgttgctctcctcctcggattcctcttcccctgccccctcctccctcctactctgctcctacccgcccgtattattcttcccttccccctctctctctgcttttccctcgtgcccgatcttcccaccagcactccagcagagcgccagttctgccaaggaaacgccggaggcgggccggcatgcgcgtggacgacgccgacaagcccgattctgcagacgccggagcggagaagcccgccgagctcccctcgcctcatatggagagtgtttgcgagaacaccacaactgctgatttcaagcagagtaactttggaaatttccttccaaatgttagatcaggcggttggtcagatattggaagtcgccagtacatggaagatacccatgtgtgtattgccgatctagctaaaaactttggttatccaacagtggataaagaagttgtttccttttatggggtctttgatgggcatggtggaaaagatgctgcccatttcgttcgcgataatctgccaagggtcattgtggaagatgctgattttcctctggagcttgagaaagtagtgagcagatcctttgtgcagattgatagtcagtttgccgataaatgctctcaccagagaactctgtcgtccggcacaacggcacttacagcaatgatttttggaaggtcccttctggtcgcgaacgctggtgattgcagagcagtactttcccggtgtggcatcgcaatggagatgtcgatggaccacaggccctgcagcctcagcgaaaagctgcgggtcgagtcgctcggtggctacgtggacgacggctacctgaacggtctgctgggagtcaccagagccctcggcgactggcacctcgagggaatgaaggaggccagcaggcccgggggaggccccctgagcgcggagccggagatcaagctgaccacgctgaccaaggacgacgagttcctggtgatcggcagcgacgggctgtgggacgtcttctcgaaccagaacgccgtggacttcgcccggcggcgcctccaggagcacaacgacgtgaagcgctgctgcagggagatcgtcgaggaggcgataaggcgcggagccacagacaatttaacagcagtgctggtctcattccacctggtggcgcctcctcagatcagagtgaatcagccacgtagggtggcgcggagcatctcggccgacgggctcaacagcctcaggatactcctgggaagccaatgacggcgctcttctcgtgccgccgtgatcaggtgctgtgccggtgcttgctgagctctaattgtatgtagtcgtgtccgtgcttcgttgttgatgttgttagctgctgttatgttaccccattgttgttgaggcagtggctgttattcttgttggtaattaagccaacgaacatgtgagctcatagttgtgagcatttcttagctgctggaaactaggcatgtcctggtgaagaggctgcgtgccttgctgtgctgt

SEQ ID NO: 64775 - protein, 427 aa, Triticum aestivum
  peptide (1)..(427): Ceres Seq. ID no. 15225827
  misc_feature (125)..(385): Pfam Name: Protein phosphatase 2C Pfam Description: Protein phosphatase 2C
  misc_feature (63)..(421): Homolog of NCBI NO: 34894410 NR Description: putative protein phosphatase
  misc_feature (121)..(424): Homolog of NCBI NO: 25352221 NR Description: phosphoprotein phosphatase (EC 3.1.3.16) 2C
  misc_feature (121)..(424): Homolog of NCBI NO: 15230495 NR Description: protein phosphatase 2C (PP2C), putative
  misc_feature (121)..(426): Homolog of NCBI NO: 37536524 NR Description: putative protein phosphatase-2C
  misc_feature (121)..(426): Homolog of NCBI NO: 10140768 NR Description: putative protein phosphatase-2C [Oryza sativa]
  misc_feature (121)..(424): Homolog of NCBI NO: 15226152 NR Description: protein phosphatase 2C (PP2C) [Arabidopsis
  misc_feature (115)..(424): Homolog of NCBI NO: 15224766 NR Description: protein phosphatase 2C (PP2C), putative
  misc_feature (121)..(424): Homolog of NCBI NO: 20146108 NR Description: protein phosphatase 2C [Mesembryanthemum
  misc_feature (101)..(424): Homolog of NCBI NO: 21693562 NR Description: DNA-binding protein phosphatase 2C [Nicotiana
  misc_feature (101)..(427): Homolog of NCBI NO: 24413992 NR Description: putative DNA-binding protein phosphatase 2C
FFATDIPKASPFFPRCSPPRIPLPLPPPPSYSAPTRPYYSSLPPLSLLFPRARSSHQHSSRAPVLPRKRRRRAGMRVDDADKPDSADAGAEKPAELPSPHMESVCENTTTADFKQSNFGNFLPNVRSGGWSDIGSRQYMEDTHVCIADLAKNFGYPTVDKEVVSFYGVFDGHGGKDAAHFVRDNLPRVIVEDADFPLELEKVVSRSFVQIDSQFADKCSHQRTLSSGTTALTAMIFGRSLLVANAGDCRAVLSRCGIAMEMSMDHRPCSLSEKLRVESLGGYVDDGYLNGLLGVTRALGDWHLEGMKEASRPGGGPLSAEPEIKLTTLTKDDEFLVIGSDGLWDVFSNQNAVDFARRRLQEHNDVKRCCREIVEEAIRRGATDNLTAVLVSFHLVAPPQIRVNQPRRVARSISADGLNSLRILLGSQ

SEQ ID NO: 64776 - protein, 353 aa, Triticum aestivum
  peptide (1)..(353): Ceres Seq. ID no. 15225828
  misc_feature (51)..(311): Pfam Name: Protein phosphatase 2C Pfam Description: Protein phosphatase 2C
  misc_feature (1)..(347): Homolog of NCBI NO: 34894410 NR Description: putative protein phosphatase
  misc_feature (47)..(350): Homolog of NCBI NO: 25352221 NR Description: phosphoprotein phosphatase (EC 3.1.3.16) 2C
  misc_feature (47)..(350): Homolog of NCBI NO: 15230495 NR Description: protein phosphatase 2C (PP2C), putative
  misc_feature (47)..(352): Homolog of NCBI NO: 37536524 NR Description: putative protein phosphatase-2C
  misc_feature (47)..(352): Homolog of NCBI NO: 10140768 NR Description: putative protein phosphatase-2C [Oryza sativa]
  misc_feature (47)..(350): Homolog of NCBI NO: 15226152 NR Description: protein phosphatase 2C (PP2C) [Arabidopsis
  misc_feature (41)..(350): Homolog of NCBI NO: 15224766 NR Description: protein phosphatase 2C (PP2C), putative
  misc_feature (47)..(350): Homolog of NCBI NO: 20146108 NR Description: protein phosphatase 2C [Mesembryanthemum
  misc_feature (27)..(350): Homolog of NCBI NO: 21693562 NR Description: DNA-binding protein phosphatase 2C [Nicotiana
  misc_feature (27)..(353): Homolog of NCBI NO: 24413992 NR Description: putative DNA-binding protein phosphatase 2C
MRVDDADKPDSADAGAEKPAELPSPHMESVCENTTTADFKQSNFGNFLPNVRSGGWSDIGSRQYMEDTHVCIADLAKNFGYPTVDKEVVSFYGVFDGHGGKDAAHFVRDNLPRVIVEDADFPLELEKVVSRSFVQIDSQFADKCSHQRTLSSGTTALTAMIFGRSLLVANAGDCRAVLSRCGIAMEMSMDHRPCSLSEKLRVESLGGYVDDGYLNGLLGVTRALGDWHLEGMKEASRPGGGPLSAEPEIKLTTLTKDDEFLVIGSDGLWDVFSNQNAVDFARRRLQEHNDVKRCCREIVEEAIRRGATDNLTAVLVSFHLVAPPQIRVNQPRRVARSISADGLNSLRILLGSQ

SEQ ID NO: 64777 - protein, 327 aa, Triticum aestivum
  peptide (1)..(327): Ceres Seq. ID no. 15225829
  misc_feature (25)..(285): Pfam Name: Protein phosphatase 2C Pfam Description: Protein phosphatase 2C
  misc_feature (1)..(321): Homolog of NCBI NO: 34894410 NR Description: putative protein phosphatase
  misc_feature (21)..(324): Homolog of NCBI NO: 25352221 NR Description: phosphoprotein phosphatase (EC 3.1.3.16) 2C
  misc_feature (21)..(324): Homolog of NCBI NO: 15230495 NR Description: protein phosphatase 2C (PP2C), putative
  misc_feature (21)..(326): Homolog of NCBI NO: 37536524 NR Description: putative protein phosphatase-2C
  misc_feature (21)..(326): Homolog of NCBI NO: 10140768 NR Description: putative protein phosphatase-2C [Oryza sativa]
  misc_feature (21)..(324): Homolog of NCBI NO: 15226152 NR Description: protein phosphatase 2C (PP2C) [Arabidopsis
  misc_feature (15)..(324): Homolog of NCBI NO: 15224766 NR Description: protein phosphatase 2C (PP2C), putative
  misc_feature (21)..(324): Homolog of NCBI NO: 20146108 NR Description: protein phosphatase 2C [Mesembryanthemum
  misc_feature (1)..(324): Homolog of NCBI NO: 21693562 NR Description: DNA-binding protein phosphatase 2C [Nicotiana
  misc_feature (1)..(327): Homolog of NCBI NO: 24413992 NR Description: putative DNA-binding protein phosphatase 2C
MESVCENTTTADFKQSNFGNFLPNVRSGGWSDIGSRQYMEDTHVCIADLAKNFGYPTVDKEVVSFYGVFDGHGGKDAAHFVRDNLPRVIVEDADFPLELEKVVSRSFVQIDSQFADKCSHQRTLSSGTTALTAMIFGRSLLVANAGDCRAVLSRCGIAMEMSMDHRPCSLSEKLRVESLGGYVDDGYLNGLLGVTRALGDWHLEGMKEASRPGGGPLSAEPEIKLTTLTKDDEFLVIGSDGLWDVFSNQNAVDFARRRLQEHNDVKRCCREIVEEAIRRGATDNLTAVLVSFHLVAPPQIRVNQPRRVARSISADGLNSLRILLGSQ

SEQ ID NO: 64778 - DNA, 1336 bp, Triticum aestivum
  misc_feature (1)..(1336): Ceres Seq. ID no. 13597523
gagagaggagagaaaggaaggaaagggagccgaagaaagctctccccccctccccgaattccatcctatttcttctgcccctctcctcgcctcgcccggaccccggccggccggattcccgcaggaggaggaggaggaggaggtggggatggggagggaggacaggttcccggtctgggaggccgcgctcggcgccggggtcgccgccgtcttcgccgcgggcctcgtcggggtctacctctccatgccggactccgactacagcttcctcaagttgccccgcaacctccacgaactacaaatcctcactggccatcttgagaactataccagtgactacaccgtacaggtgttgataggctactgtgctgtgtacattttcatgcagaccttcatgatcccagggacaatattcatgtcattgcttgctggtgctctattcgggcaactccggggtgtggctctggttgtctttgctgcctcagctggtgcttcttcatgctttttcctgtcgaagctgattggaaaaccgctggtgttcgtgctgtggccagacaagctcacattcttccagaagcaggttgccaaaagaagagaaaagctgttgaattacatgcttttcctcagggtcaccccaacactgccaaataccttcatcaacttggcctcgcccattgttgatgtgcccttccataccttcttactggcaactcttatcggtctcatcccagcagcctacgtgaccgtgagggctgggattgctctgggagagttaacatcgctcagcgacctgtacgacacccagtcagtagctctgctgttcttgatcggcgtggtctcggtcacaccagcattgttgagcaaggacgaggcgcaagacacggcaccagaaatcgcagcaggcgcctcatgaacaccaaagaggagtcacctagcccacctgtacataccaaggcacagcatgcggcggcttcattggatttgggcctacaggccttgtgaggtggatgacacatggtttgcgagttcacatgacgacacagcagcacggcgggaccttggacccaagtccgcctatcacccgcgtgccggagatgtgcgttgccgtgagaacactgtttcaattcatggccaccccccacattgtttgttatgaatgaatctgggaagcacaatgcccatccacaggcaagatgcttcggatgtgtagacaagtagtgtgtgtgccgttcgtcagcctgcgatgctgtttatttagatggaactggcagctagtccaaatccttgtatatatattgaccagattcattcaatccatattcagtggttcaatgcc

SEQ ID NO: 64779 - protein, 303 aa, Triticum aestivum
  peptide (1)..(303): Ceres Seq. ID no. 15222119
  misc_feature (78)..(288): Homolog of NCBI NO: 34858940 NR Description: similar to D7Ertd743e protein [Rattus norvegicus]
  misc_feature (78)..(292): Homolog of NCBI NO: 26330556 NR Description: unnamed protein product [Mus musculus]
  misc_feature (67)..(286): Homolog of NCBI NO: 18859941 NR Description: CG8408-PA [Drosophila melanogaster]
  misc_feature (29)..(288): Homolog of NCBI NO: 20558053 NR Description: similar to KIAA0033 [Homo sapiens]
  misc_feature (29)..(288): Homolog of NCBI NO: 436224 NR Description: KIAA0033 [Homo sapiens]
  misc_feature (57)..(288): Homolog of NCBI NO: 28850296 NR Description: similar to Mus musculus (Mouse). Colon RCB-0549 cDNA, RIKEN full-length enriched library, clone:G430121L01 N-terminal nucleophile aminohydrolases (Ntn hydrolases) structure
  misc_feature (52)..(288): Homolog of NCBI NO: 30681121 NR Description: expressed protein [Arabidopsis thaliana]
  misc_feature (38)..(288): Homolog of NCBI NO: 18409951 NR Description: expressed protein [Arabidopsis thaliana]
  misc_feature (59)..(291): Homolog of NCBI NO: 21593768 NR Description: unknown [Arabidopsis thaliana]
  misc_feature (59)..(291): Homolog of NCBI NO: 18414967 NR Description: expressed protein [Arabidopsis thaliana]
REERKEGKGAEESSPPLPEFHPISSAPLLASPGPRPAGFPQEEEEEEVGMGREDRFPVWEAALGAGVAAVFAAGLVGVYLSMPDSDYSFLKLPRNLHELQILTGHLENYTSDYTVQVLIGYCAVYIFMQTFMIPGTIFMSLLAGALFGQLRGVALVVFAASAGASSCFFLSKLIGKPLVFVLWPDKLTFFQKQVAKRREKLLNYMLFLRVTPTLPNTFINLASPIVDVPFHTFLLATLIGLIPAAYVTVRAGIALGELTSLSDLYDTQSVALLFLIGVVSVTPALLSKDEAQDTAPEIAAGAS

SEQ ID NO: 64780 - protein, 254 aa, Triticum aestivum
  peptide (1)..(254): Ceres Seq. ID no. 15222120
  misc_feature (29)..(239): Homolog of NCBI NO: 34858940 NR Description: similar to D7Ertd743e protein [Rattus norvegicus]
  misc_feature (29)..(243): Homolog of NCBI NO: 26330556 NR Description: unnamed protein product [Mus musculus]
  misc_feature (18)..(237): Homolog of NCBI NO: 18859941 NR Description: CG8408-PA [Drosophila melanogaster]
  misc_feature (1)..(239): Homolog of NCBI NO: 20558053 NR Description: similar to KIAA0033 [Homo sapiens]
  misc_feature (1)..(239): Homolog of NCBI NO: 436224 NR Description: KIAA0033 [Homo sapiens]
  misc_feature (8)..(239): Homolog of NCBI NO: 28850296 NR Description: similar to Mus musculus (Mouse). Colon RCB-0549 cDNA, RIKEN full-length enriched library, clone:G430121L01 N-terminal nucleophile aminohydrolases (Ntn hydrolases) structure
  misc_feature (3)..(239): Homolog of NCBI NO: 30681121 NR Description: expressed protein [Arabidopsis thaliana]
  misc_feature (1)..(239): Homolog of NCBI NO: 18409951 NR Description: expressed protein [Arabidopsis thaliana]
  misc_feature (10)..(242): Homolog of NCBI NO: 21593768 NR Description: unknown [Arabidopsis thaliana]
  misc_feature (10)..(242): Homolog of NCBI NO: 18414967 NR Description: expressed protein [Arabidopsis thaliana]
MGREDRFPVWEAALGAGVAAVFAAGLVGVYLSMPDSDYSFLKLPRNLHELQILTGHLENYTSDYTVQVLIGYCAVYIFMQTFMIPGTIFMSLLAGALFGQLRGVALVVFAASAGASSCFFLSKLIGKPLVFVLWPDKLTFFQKQVAKRREKLLNYMLFLRVTPTLPNTFINLASPIVDVPFHTFLLATLIGLIPAAYVTVRAGIALGELTSLSDLYDTQSVALLFLIGVVSVTPALLSKDEAQDTAPEIAAGAS

SEQ ID NO: 64781 - protein, 222 aa, Triticum aestivum
  peptide (1)..(222): Ceres Seq. ID no. 15222121
  misc_feature (1)..(207): Homolog of NCBI NO: 34858940 NR Description: similar to D7Ertd743e protein [Rattus norvegicus]
  misc_feature (1)..(211): Homolog of NCBI NO: 26330556 NR Description: unnamed protein product [Mus musculus]
  misc_feature (1)..(205): Homolog of NCBI NO: 18859941 NR Description: CG8408-PA [Drosophila melanogaster]
  misc_feature (1)..(207): Homolog of NCBI NO: 20558053 NR Description: similar to KIAA0033 [Homo sapiens]
  misc_feature (1)..(207): Homolog of NCBI NO: 436224 NR Description: KIAA0033 [Homo sapiens]
  misc_feature (1)..(207): Homolog of NCBI NO: 28850296 NR Description: similar to Mus musculus (Mouse). Colon RCB-0549 cDNA, RIKEN full-length enriched library, clone:G430121L01 N-terminal nucleophile aminohydrolases (Ntn hydrolases) structure
  misc_feature (1)..(207): Homolog of NCBI NO: 30681121 NR Description: expressed protein [Arabidopsis thaliana]
  misc_feature (1)..(207): Homolog of NCBI NO: 18409951 NR Description: expressed protein [Arabidopsis thaliana]
  misc_feature (1)..(210): Homolog of NCBI NO: 21593768 NR Description: unknown [Arabidopsis thaliana]
  misc_feature (1)..(210): Homolog of NCBI NO: 18414967 NR Description: expressed protein [Arabidopsis thaliana]
MPDSDYSFLKLPRNLHELQILTGHLENYTSDYTVQVLIGYCAVYIFMQTFMIPGTIFMSLLAGALFGQLRGVALVVFAASAGASSCFFLSKLIGKPLVFVLWPDKLTFFQKQVAKRREKLLNYMLFLRVTPTLPNTFINLASPIVDVPFHTFLLATLIGLIPAAYVTVRAGIALGELTSLSDLYDTQSVALLFLIGVVSVTPALLSKDEAQDTAPEIAAGAS

SEQ ID NO: 64782 - DNA, 1364 bp, Triticum aestivum
  misc_feature (1)..(1364): Ceres Seq. ID no. 13597524
aaaccctgcaagcactggacaaccacagaaacccagaccccccgccgccgccgccgccatggtcgccgccggagctcttcacgctggcagccgtgtcctcctaccgatccgccgaagcttcagcacaccctggtcccacgtccgctcccacctccactccaccaagcccccttctgctccactcccgcccccacctccgccgccgccttcttcccacgccgcgtccgcgcgcttcacccctgccttcacccctaccactaggaggagcggatcaatcgggtccggggtagtcgcgtggtacctgggctcgatcgaggcgcggcccctgctgaccaagagcatcacggctgccacaatttacaccgttgccgacctcacctcccagatgatcacacttcctcctgaggagtcactcgatctaattaggactctgcgcatggctagttatgggatgctgttctcaggaccttcactgcactattggttcaactttatctcaaaagtagtccccaaaaaggatgtagtgagcaccttcaagaagatgtttctaggacaagcagtttatggcccaattattaattgtattttcttctcgtataatgcaggattacaaggtgagacgatcccagagatcattgcaagattaaagcgggatataattccgaccatcaaaagtgggctcatttattggcctctttgtgacttcatcactttcaagtttatccctgttcatttgcagccgctagtaagcaattcctttgcgtttctttggaccatctacctaacatacatggccggcttaaagaaaccaggcgtggaggtgatcacgagctcttagtcataatcaaatgactgagtttctgccagttatttctgaaaggaagtcttcatgggcattacttggaactatgacggggccgtcattaccaccactagctcatttaagctttcaatgttcaacgacgaaaacggagacaaactgcttgctaggcatatttcgtattcagtagagtagtatccaccaggcttttctagcttgcgtacagttttgggtaggcatttctgtatggatggtagaatgacactaggcatttctcccatctttctgaagtttgtcatattgcacttagaaacaagcagtttttaccaaattgtctgtgcccagttatgcagatgttaggtaaaattgttcttgtccctaagataaagtggacaaggtaaggtttacgcttgaagatctctacatacaatgcaacatttattagcggatagttatgtacatctccctcccttgtacgcagaaagaagacgattacacagtttgttcgcttaaaaaaaaaaaaaaaaaagcttatcgataccgt

SEQ ID NO: 64783 - protein, 278 aa, Triticum aestivum
  peptide (1)..(278): Ceres Seq. ID no. 13597525
  misc_feature (203)..(270): Pfam Name: Mpv17 / PMP22 family Pfam Description: Mpv17 / PMP22 family
  misc_feature (88)..(264): Homolog of NCBI NO: 34904256 NR Description: P0452F10.16 [Oryza sativa (japonica
  misc_feature (90)..(265): Homolog of NCBI NO: 21594286 NR Description: unknown [Arabidopsis thaliana]
  misc_feature (90)..(265): Homolog of NCBI NO: 16648746 NR Description: AT5g19750/T29J13_170 [Arabidopsis thaliana]
  misc_feature (90)..(265): Homolog of NCBI NO: 15241166 NR Description: expressed protein [Arabidopsis thaliana]
  misc_feature (94)..(248): Homolog of NCBI NO: 7485624 NR Description: hypothetical protein F17I5.90 - Arabidopsis
  misc_feature (85)..(246): Homolog of NCBI NO: 9757841 NR Description: contains similarity to 22 kDa peroxisomal
  misc_feature (95)..(270): Homolog of NCBI NO: 15226016 NR Description: peroxisomal membrane protein, putative (22 kDa)
  misc_feature (94)..(274): Homolog of NCBI NO: 18418319 NR Description: peroxisomal membrane protein, putative (22 kDa)
  misc_feature (85)..(269): Homolog of NCBI NO: 18422298 NR Description: peroxisomal membrane protein family (22 kDa)
  misc_feature (85)..(269): Homolog of NCBI NO: 21553640 NR Description: contains similarity to 22 kDa peroxisomal
NPASTGQPQKPRPPAAAAAMVAAGALHAGSRVLLPIRRSFSTPWSHVRSHLHSTKPPSAPLPPPPPPPPSSHAASARFTPAFTPTTRRSGSIGSGVVAWYLGSIEARPLLTKSITAATIYTVADLTSQMITLPPEESLDLIRTLRMASYGMLFSGPSLHYWFNFISKVVPKKDVVSTFKKMFLGQAVYGPIINCIFFSYNAGLQGETIPEIIARLKRDIIPTIKSGLIYWPLCDFITFKFIPVHLQPLVSNSFAFLWTIYLTYMAGLKKPGVEVITSS

SEQ ID NO: 64784 - protein, 259 aa, Triticum aestivum
  peptide (1)..(259): Ceres Seq. ID no. 13597526
  misc_feature (184)..(251): Pfam Name: Mpv17 / PMP22 family Pfam Description: Mpv17 / PMP22 family
  misc_feature (69)..(245): Homolog of NCBI NO: 34904256 NR Description: P0452F10.16 [Oryza sativa (japonica
  misc_feature (71)..(246): Homolog of NCBI NO: 16648746 NR Description: AT5g19750/T29J13_170 [Arabidopsis thaliana]
  misc_feature (71)..(246): Homolog of NCBI NO: 21594286 NR Description: unknown [Arabidopsis thaliana]
  misc_feature (71)..(246): Homolog of NCBI NO: 15241166 NR Description: expressed protein [Arabidopsis thaliana]
  misc_feature (75)..(229): Homolog of NCBI NO: 7485624 NR Description: hypothetical protein F17I5.90 - Arabidopsis
  misc_feature (66)..(227): Homolog of NCBI NO: 9757841 NR Description: contains similarity to 22 kDa peroxisomal
  misc_feature (76)..(251): Homolog of NCBI NO: 15226016 NR Description: peroxisomal membrane protein, putative (22 kDa)
  misc_feature (75)..(255): Homolog of NCBI NO: 18418319 NR Description: peroxisomal membrane protein, putative (22 kDa)
  misc_feature (66)..(250): Homolog of NCBI NO: 18422298 NR Description: peroxisomal membrane protein family (22 kDa)
  misc_feature (66)..(250): Homolog of NCBI NO: 21553640 NR Description: contains similarity to 22 kDa peroxisomal
MVAAGALHAGSRVLLPIRRSFSTPWSHVRSHLHSTKPPSAPLPPPPPPPPSSHAASARFTPAFTPTTRRSGSIGSGVVAWYLGSIEARPLLTKSITAATIYTVADLTSQMITLPPEESLDLIRTLRMASYGMLFSGPSLHYWFNFISKVVPKKDVVSTFKKMFLGQAVYGPIINCIFFSYNAGLQGETIPEIIARLKRDIIPTIKSGLIYWPLCDFITFKFIPVHLQPLVSNSFAFLWTIYLTYMAGLKKPGVEVITSS

SEQ ID NO: 64785 - protein, 150 aa, Triticum aestivum
  peptide (1)..(150): Ceres Seq. ID no. 13597527
  misc_feature (75)..(142): Pfam Name: Mpv17 / PMP22 family Pfam Description: Mpv17 / PMP22 family
  misc_feature (1)..(136): Homolog of NCBI NO: 34904256 NR Description: P0452F10.16 [Oryza sativa (japonica
  misc_feature (1)..(137): Homolog of NCBI NO: 21594286 NR Description: unknown [Arabidopsis thaliana]
  misc_feature (1)..(137): Homolog of NCBI NO: 16648746 NR Description: AT5g19750/T29J13_170 [Arabidopsis thaliana]
  misc_feature (1)..(137): Homolog of NCBI NO: 15241166 NR Description: expressed protein [Arabidopsis thaliana]
  misc_feature (1)..(120): Homolog of NCBI NO: 7485624 NR Description: hypothetical protein F17I5.90 - Arabidopsis
  misc_feature (1)..(118): Homolog of NCBI NO: 9757841 NR Description: contains similarity to 22 kDa peroxisomal
  misc_feature (1)..(142): Homolog of NCBI NO: 15226016 NR Description: peroxisomal membrane protein, putative (22 kDa)
  misc_feature (1)..(146): Homolog of NCBI NO: 18418319 NR Description: peroxisomal membrane protein, putative (22 kDa)
  misc_feature (1)..(141): Homolog of NCBI NO: 18422298 NR Description: peroxisomal membrane protein family (22 kDa)
  misc_feature (1)..(141): Homolog of NCBI NO: 21553640 NR Description: contains similarity to 22 kDa peroxisomal
MITLPPEESLDLIRTLRMASYGMLFSGPSLHYWFNFISKVVPKKDVVSTFKKMFLGQAVYGPIINCIFFSYNAGLQGETIPEIIARLKRDIIPTIKSGLIYWPLCDFITFKFIPVHLQPLVSNSFAFLWTIYLTYMAGLKKPGVEVITSS

SEQ ID NO: 64786 - DNA, 1709 bp, Triticum aestivum
  misc_feature (1)..(1709): Ceres Seq. ID no. 13662854
aaaaaaaaaccaattccatctgaagaaaattagcatcacctagccgccgccactgccgccgccgccgccgggaacatggccgcgcggcggtataccgagcacgaagaggcgctcgagatcaagtcccttcgccgcatcatcgccgcctacatcaactatcaagatgcagcagagaaagatgtcaagagatatgaacgttcattcaaaaagctttctcctgcccacaaggaacttctatttcaccttggtcttaagtaccaacgactgagatggtgtatatccatgaatacatcttttatcatgaatatgcttgaggcatttgaacctcctttcgacatgagtcagtgtgtagatggtgattgtcatgattgtgcagagcacatgcacggacatagtcatgctgataccataaataattctgaattgcttgctcagcattgttgcccagaggaaggtgcaaatactagagaaactgagaacaagaaggatgaggaagtccacatggtgggctgctcccagcctgctgcctgcaacttggggatatcccaaggtgaagataaatcatgtaatgatggtaaagatgcgagtgcagctgctaactgtcaagatacagattgttttgcatcttctactgatgaaaatgtaactccagggcaccgcagggctccatctttgccactggatgttcctccagttgacgttgacaaagtaagatgcatcataagaaatattgtgagagactgggcccaggagggtcaaattgaacgtgatgagtgctataaaccaattcttgaggaacttaatcgtctttttcctgaccgaagcaggccaccttcatgtttagtccctggtgctgggcttgggagattggctctggagatctcttctctgggttttgtaagccagggaaatgagttctcatattacatgatgatctgttcaagtttcattctaaaccacacccaagaggccaatgaatggaccatttatccttggatacacaacaattgcaattctctttcagacaaagatcaacttcgggctgtttcatttcctgatattcatccctcaagtgctgggataactgaaggattttcgatgtgtgctggagattttgtagaggtctacaatgaggaaagccaagaatctgcatgggatgctgttgtaacttgcttcttcctcgatacggcacacaatattgttgaatatattgagataatatcaaaaattctcaaggatggtggagtctgggtaaacatgggtccgcttctttatcactttgctgatgcctawvcacmataaagtggaccagatgatgatatgtctatcgaactaagtttggaagacgtgaaaagggtagcttaccattatggatttgtgatggaggtggagaaaatgatagataccacttacacagcnnntatggtatcgatgatgcagaatcgataccgcgcggcattttggacgatgaggaagnnnncgtctcgatcgaaagctaaaaagcgccagtgaggtgaagatcctctgtctggtgtgaaattcgggtcgaagctgttagaaatttagaaagagtgatttgggccggacccattggtgatgtttatcctgggacaaacgaggatgatgtgttggtgccgccattgtcgcaccatgatatgctactgttgatactcgaacctcagagcgaaactgtgctgtgaatcctgtgc

SEQ ID NO: 64787 - protein, 408 aa, Triticum aestivum
  peptide (1)..(408): Ceres Seq. ID no. 15220189
  misc_feature (1)..(79): Homolog of NCBI NO: 22748889 NR Description: hypothetical protein FLJ25795 [Homo sapiens]
  misc_feature (208)..(408): Homolog of NCBI NO: 22748889 NR Description: hypothetical protein FLJ25795 [Homo sapiens]
  misc_feature (227)..(347): Homolog of NCBI NO: 25408215 NR Description: hypothetical protein At2g32170 [imported] -
  misc_feature (332)..(408): Homolog of NCBI NO: 25408215 NR Description: hypothetical protein At2g32170 [imported] -
  misc_feature (199)..(408): Homolog of NCBI NO: 25349707 NR Description: hypothetical protein At2g32160 [imported] -
  misc_feature (3)..(129): Homolog of NCBI NO: 30685195 NR Description: expressed protein [Arabidopsis thaliana]
  misc_feature (193)..(408): Homolog of NCBI NO: 30685195 NR Description: expressed protein [Arabidopsis thaliana]
  misc_feature (3)..(129): Homolog of NCBI NO: 30685200 NR Description: expressed protein [Arabidopsis thaliana]
  misc_feature (193)..(408): Homolog of NCBI NO: 30685200 NR Description: expressed protein [Arabidopsis thaliana]
  misc_feature (4)..(408): Homolog of NCBI NO: 30685202 NR Description: expressed protein [Arabidopsis thaliana]
  misc_feature (406)..(406): Xaa is any aa, unknown or other
  misc_feature (407)..(407): Xaa is any aa, unknown or other
  misc_feature (408)..(408): Xaa is any aa, unknown or other
MAARRYTEHEEALEIKSLRRIIAAYINYQDAAEKDVKRYERSFKKLSPAHKELLFHLGLKYQRLRWCISMNTSFIMNMLEAFEPPFDMSQCVDGDCHDCAEHMHGHSHADTINNSELLAQHCCPEEGANTRETENKKDEEVHMVGCSQPAACNLGISQGEDKSCNDGKDASAAANCQDTDCFASSTDENVTPGHRRAPSLPLDVPPVDVDKVRCIIRNIVRDWAQEGQIERDECYKPILEELNRLFPDRSRPPSCLVPGAGLGRLALEISSLGFVSQGNEFSYYMMICSSFILNHTQEANEWTIYPWIHNNCNSLSDKDQLRAVSFPDIHPSSAGITEGFSMCAGDFVEVYNEESQESAWDAVVTCFFLDTAHNIVEYIEIISKILKDGGVWVNMGPLLYHFADAXXX

SEQ ID NO: 64788 - protein, 339 aa, Triticum aestivum
  peptide (1)..(339): Ceres Seq. ID no. 15220190
  misc_feature (139)..(339): Homolog of NCBI NO: 12846470 NR Description: unnamed protein product [Mus musculus]
  misc_feature (139)..(339): Homolog of NCBI NO: 22748889 NR Description: hypothetical protein FLJ25795 [Homo sapiens]
  misc_feature (158)..(278): Homolog of NCBI NO: 25408215 NR Description: hypothetical protein At2g32170 [imported] -
  misc_feature (263)..(339): Homolog of NCBI NO: 25408215 NR Description: hypothetical protein At2g32170 [imported] -
  misc_feature (130)..(339): Homolog of NCBI NO: 25349707 NR Description: hypothetical protein At2g32160 [imported] -
  misc_feature (1)..(60): Homolog of NCBI NO: 30685195 NR Description: expressed protein [Arabidopsis thaliana]
  misc_feature (124)..(339): Homolog of NCBI NO: 30685195 NR Description: expressed protein [Arabidopsis thaliana]
  misc_feature (1)..(60): Homolog of NCBI NO: 30685200 NR Description: expressed protein [Arabidopsis thaliana]
  misc_feature (124)..(339): Homolog of NCBI NO: 30685200 NR Description: expressed protein [Arabidopsis thaliana]
  misc_feature (1)..(339): Homolog of NCBI NO: 30685202 NR Description: expressed protein [Arabidopsis thaliana]
  misc_feature (337)..(337): Xaa is any aa, unknown or other
  misc_feature (338)..(338): Xaa is any aa, unknown or other
  misc_feature (339)..(339): Xaa is any aa, unknown or other
MNTSFIMNMLEAFEPPFDMSQCVDGDCHDCAEHMHGHSHADTINNSELLAQHCCPEEGANTRETENKKDEEVHMVGCSQPAACNLGISQGEDKSCNDGKDASAAANCQDTDCFASSTDENVTPGHRRAPSLPLDVPPVDVDKVRCIIRNIVRDWAQEGQIERDECYKPILEELNRLFPDRSRPPSCLVPGAGLGRLALEISSLGFVSQGNEFSYYMMICSSFILNHTQEANEWTIYPWIHNNCNSLSDKDQLRAVSFPDIHPSSAGITEGFSMCAGDFVEVYNEESQESAWDAVVTCFFLDTAHNIVEYIEIISKILKDGGVWVNMGPLLYHFADAXXX

SEQ ID NO: 64789 - protein, 333 aa, Triticum aestivum
  peptide (1)..(333): Ceres Seq. ID no. 15220191
  misc_feature (133)..(333): Homolog of NCBI NO: 12846470 NR Description: unnamed protein product [Mus musculus]
  misc_feature (133)..(333): Homolog of NCBI NO: 22748889 NR Description: hypothetical protein FLJ25795 [Homo sapiens]
  misc_feature (152)..(272): Homolog of NCBI NO: 25408215 NR Description: hypothetical protein At2g32170 [imported] -
  misc_feature (257)..(333): Homolog of NCBI NO: 25408215 NR Description: hypothetical protein At2g32170 [imported] -
  misc_feature (124)..(333): Homolog of NCBI NO: 25349707 NR Description: hypothetical protein At2g32160 [imported] -
  misc_feature (1)..(54): Homolog of NCBI NO: 30685195 NR Description: expressed protein [Arabidopsis thaliana]
  misc_feature (118)..(333): Homolog of NCBI NO: 30685195 NR Description: expressed protein [Arabidopsis thaliana]
  misc_feature (1)..(54): Homolog of NCBI NO: 30685200 NR Description: expressed protein [Arabidopsis thaliana]
  misc_feature (118)..(333): Homolog of NCBI NO: 30685200 NR Description: expressed protein [Arabidopsis thaliana]
  misc_feature (1)..(333): Homolog of NCBI NO: 30685202 NR Description: expressed protein [Arabidopsis thaliana]
  misc_feature (331)..(331): Xaa is any aa, unknown or other
  misc_feature (332)..(332): Xaa is any aa, unknown or other
  misc_feature (333)..(333): Xaa is any aa, unknown or other
MNMLEAFEPPFDMSQCVDGDCHDCAEHMHGHSHADTINNSELLAQHCCPEEGANTRETENKKDEEVHMVGCSQPAACNLGISQGEDKSCNDGKDASAAANCQDTDCFASSTDENVTPGHRRAPSLPLDVPPVDVDKVRCIIRNIVRDWAQEGQIERDECYKPILEELNRLFPDRSRPPSCLVPGAGLGRLALEISSLGFVSQGNEFSYYMMICSSFILNHTQEANEWTIYPWIHNNCNSLSDKDQLRAVSFPDIHPSSAGITEGFSMCAGDFVEVYNEESQESAWDAVVTCFFLDTAHNIVEYIEIISKILKDGGVWVNMGPLLYHFADAXXX

SEQ ID NO: 64790 - DNA, 1628 bp, Triticum aestivum
  misc_feature (1)..(1628): Ceres Seq. ID no. 13662754
  misc_feature: Pfam Name: DUF1618 Pfam Description: Protein of unknown function (DUF1618)
gaacaagcgtggcttcccttacactgccaagcaatactgttgtgatgtctcctcctgccgcgacaacagtctgatcaagtttgtcgagatggagttcaatgagccggaccgcaggaacagaggcggccaaggctgtagagccatcatgtgggatacgacggtgatttcagatggttggagccagcgcttcagagttgatgttgataacatttcggtggacagaagttattctggtctactgcctcagctgtggaatggcgagaccagagaactagaactgaagagactgattttgtatacccccacgctgagcgtgcacgacgacaatcttctttacgtgatggctaagatgaacagtgaagacgataaggcctgggtcatcaccgtcgacatgaaacgcgaggccgtggaagcaatcgccccgtattctaccagagggcgcaaactcacttcatggcatagtccatgcacctttccagagtacctcgacccggcgaccccaggggatcatgtggccatgcactctaggaggatttgtgcggcggactgtgttctgcaaatgctgttgactcgagactggttcagggaaattggtgaacgctttgaatttgagaggccaacccacgttgagtgcctgtcactaattcagtgttgcccagtatcatctgttctttcagatatccaagaagtggtaaaatatgctttctctactggtgaaggcgaagctgctcccaaagctgtggatttatgctcacgagcttttgaagacttcgatgtgctgctacgcgagttattgcatgatccagcgtcatctaccgaaggcatgagttgcaaaatcagtgttgcccttcgagctttagacagtatcttggacattgtgccaccaaccttgagggcgcttgcggatgcctgtcatcaaaaaggagggaaaacaatatttgatctgggtgaggagcctggtgatccaaaggacttgaaactacagtgctctcctaaagctaacaaccttacatggtgcaagcagccagtcgtctattcaaagaacagatctgacgagttgcagcagtggggatccaacctgattaaccgtttccagataggagggaggacggtatttgatcttgttgagcaggcaagagatacagaggactggaaagtggagagctcttgtgatgctaacaacctttctggcggcaaggacaagggcggatcttacgaggtgcagcaggggagatccaagcccattaaccgccggcaaaggaagcggaaccaggcacggggcagggaagctggccgtgatgaacgattggtggttccatattgccgccaactggagcagtatgtgttgattttcttgtgcctgctcttcattgcctacatctgtgcaccgatcactatgaagtggttaggccatggccctttagtatcctactagtgcatacattccgtctaatatgtgcacagtatcgtcatatctgcattatgtaagaacatacttgcattatgtaaaaacataagcttatatgaggggatgcctcctgtgcgtggagtagcatgggatggtactgttgtggacaaatttacaagcacgtatgtatcagcagtacaccaccaggtttccttgtttc

SEQ ID NO: 64791 - protein, 477 aa, Triticum aestivum
  peptide (1)..(477): Ceres Seq. ID no. 15220185
  misc_feature: Pfam Name: DUF1618 Pfam Description: Protein of unknown function (DUF1618)
  misc_feature (18)..(143): Homolog of NCBI NO: 38347094 NR Description: OSJNBa0006M15.9 [Oryza sativa (japonica
  misc_feature (15)..(172): Homolog of NCBI NO: 38344573 NR Description: OSJNBa0053B21.5 [Oryza sativa (japonica
  misc_feature (8)..(162): Homolog of NCBI NO: 27436751 NR Description: Hypothetical protein [Oryza sativa (japonica
NKRGFPYTAKQYCCDVSSCRDNSLIKFVEMEFNEPDRRNRGGQGCRAIMWDTTVISDGWSQRFRVDVDNISVDRSYSGLLPQLWNGETRELELKRLILYTPTLSVHDDNLLYVMAKMNSEDDKAWVITVDMKREAVEAIAPYSTRGRKLTSWHSPCTFPEYLDPATPGDHVAMHSRRICAADCVLQMLLTRDWFREIGERFEFERPTHVECLSLIQCCPVSSVLSDIQEVVKYAFSTGEGEAAPKAVDLCSRAFEDFDVLLRELLHDPASSTEGMSCKISVALRALDSILDIVPPTLRALADACHQKGGKTIFDLGEEPGDPKDLKLQCSPKANNLTWCKQPVVYSKNRSDELQQWGSNLINRFQIGGRTVFDLVEQARDTEDWKVESSCDANNLSGGKDKGGSYEVQQGRSKPINRRQRKRNQARGREAGRDERLVVPYCRQLEQYVLIFLCLLFIAYICAPITMKWLGHGPLVSY

SEQ ID NO: 64792 - protein, 448 aa, Triticum aestivum
  peptide (1)..(448): Ceres Seq. ID no. 15220186
  misc_feature: Pfam Name: DUF1618 Pfam Description: Protein of unknown function (DUF1618)
  misc_feature (1)..(114): Homolog of NCBI NO: 38347094 NR Description: OSJNBa0006M15.9 [Oryza sativa (japonica
  misc_feature (1)..(143): Homolog of NCBI NO: 38344573 NR Description: OSJNBa0053B21.5 [Oryza sativa (japonica
  misc_feature (1)..(133): Homolog of NCBI NO: 27436751 NR Description: Hypothetical protein [Oryza sativa (japonica
MEFNEPDRRNRGGQGCRAIMWDTTVISDGWSQRFRVDVDNISVDRSYSGLLPQLWNGETRELELKRLILYTPTLSVHDDNLLYVMAKMNSEDDKAWVITVDMKREAVEAIAPYSTRGRKLTSWHSPCTFPEYLDPATPGDHVAMHSRRICAADCVLQMLLTRDWFREIGERFEFERPTHVECLSLIQCCPVSSVLSDIQEVVKYAFSTGEGEAAPKAVDLCSRAFEDFDVLLRELLHDPASSTEGMSCKISVALRALDSILDIVPPTLRALADACHQKGGKTIFDLGEEPGDPKDLKLQCSPKANNLTWCKQPVVYSKNRSDELQQWGSNLINRFQIGGRTVFDLVEQARDTEDWKVESSCDANNLSGGKDKGGSYEVQQGRSKPINRRQRKRNQARGREAGRDERLVVPYCRQLEQYVLIFLCLLFIAYICAPITMKWLGHGPLVSY

SEQ ID NO: 64793 - protein, 429 aa, Triticum aestivum
  peptide (1)..(429): Ceres Seq. ID no. 15220187
  misc_feature: Pfam Name: DUF1618 Pfam Description: Protein of unknown function (DUF1618)
  misc_feature (1)..(95): Homolog of NCBI NO: 38347094 NR Description: OSJNBa0006M15.9 [Oryza sativa (japonica
  misc_feature (1)..(124): Homolog of NCBI NO: 38344573 NR Description: OSJNBa0053B21.5 [Oryza sativa (japonica
  misc_feature (1)..(114): Homolog of NCBI NO: 27436751 NR Description: Hypothetical protein [Oryza sativa (japonica
MWDTTVISDGWSQRFRVDVDNISVDRSYSGLLPQLWNGETRELELKRLILYTPTLSVHDDNLLYVMAKMNSEDDKAWVITVDMKREAVEAIAPYSTRGRKLTSWHSPCTFPEYLDPATPGDHVAMHSRRICAADCVLQMLLTRDWFREIGERFEFERPTHVECLSLIQCCPVSSVLSDIQEVVKYAFSTGEGEAAPKAVDLCSRAFEDFDVLLRELLHDPASSTEGMSCKISVALRALDSILDIVPPTLRALADACHQKGGKTIFDLGEEPGDPKDLKLQCSPKANNLTWCKQPVVYSKNRSDELQQWGSNLINRFQIGGRTVFDLVEQARDTEDWKVESSCDANNLSGGKDKGGSYEVQQGRSKPINRRQRKRNQARGREAGRDERLVVPYCRQLEQYVLIFLCLLFIAYICAPITMKWLGHGPLVSY

SEQ ID NO: 64794 - DNA, 2111 bp, Triticum aestivum
  misc_feature (1)..(2111): Ceres Seq. ID no. 13662574
agaacatcctaatcgaaaaaaccaaaaattattagaggcgacgaagaagggtgcgaacccgccgccgttccgggttccgattagatagagctgtcgcgccgccgatcccgtcgccccgccgcgccgagcttacagtttgtgcgtcatggggacttcttcaggtgcgaatttccatcaacagcctccgccccaggggatgctgccgcctcgccatggtgcccgggcccctagcctgcagacttccctctcattggcctcgtcggaacaggttggctcgcctgaaatgcaggaacctgtgtccaattctgaccagggccatgactctgccaccgaaagtgcaagttcgagggagacctggcctgtagagccggaacatagcaatgctgctgctgctagtagtggcggtgctgtgaaaaaggtggagatggaaaaggatatcagaaatggtatccccaagttgcaggttattcgtggaagctcccgcatcgatagggtgtcactgagggagattgcgcgggagagagtggacctagttgttgagaaaatgaaggtaatgccagaggagcacctggaggagattaaaaatgagctcaggtcgattctggaggggacagggggctctcatcatattgaggagtttctgtatctgcagaagtttgtccagggcagaggtgatttgacaccaactatgctttcaatggcccatcatgtccaactggagatcctcgtggcaatcaagactggaatccaggcgtttttgcaccccagcgtcaccattccccaaagccacctggtggaggtcttcttgtataagaggtgccggaacattgcttgccagagtgctctcccggctgaggaatgcagatgcaatgtatgtgctaacagaaatgggttttgcaacctttgcatgtgcgtgatttgcaacaagtttgattttgaggtcaacacatgccgatgggttgggtgcgatttctgttcccattggacgcacaccgactgtgcgattcgtgttggccagattgggacagggcaatcaattaagagcggcaccggtcatgccgaaatgctttttaggtgccaggcttgccagaagacatcagaattattcggttgggttaaggatgtgtttcaacaatgtgctcctggttgggatagggatgccttagtacgagagcttgagtttgtttgtaagatatttcgtctaagcgaagacccaaaaggaagaaatttgttcaggaaatgtgcgaatctgattgaaagattgaggaatagttctcctgattctgtcaatcctaggatgatactgcatgcacttcgagagcttgagatggattcccctaagagctctgaaaatgaagaatcgggacgcttgatcactccccaggaggcatgtaatcgtattgcagaggtagtccaagaagctgtcagaaagatggagcttgttgctgaagagaaaatgggactgtacaaaaaggctcgcaccgctgtggaggcctgtgaccgtgagcttgatgagaaggccagacaagttcaggagttcaaggccgagaggctgcggaagaagcagcaggtggaggagctcgagagcattgttcggttgaaacaggccgaggctgagatgttccagctcaaggcaagtgaggctcgccaggaggctgagaggctccagagcatcgcgcttgccaaatctgagagggctgagcaggactacgctagcctctacctcaagcggcgcctggaggaagcggaggcagagaagcagtttctttttgagaaaataaagcttcaggacggccataggcccccgcaggcgagcagcagcgtgcctgctgattcctctcaggctccctctcaggcgttgatgctgtccaaaattcaggaccttctcaagaacgttcgtaccatgccgacaaagtcggaggcgcattcaaaataagagcagcaggtgcacttcagatttgggattacatgttgtgttattgtgctaatgtatggtgacttctgtgtgatgtgttaggagtatataatgggcggtgccccccttggaaaatcgaatattaatgttgttggcgatatcgtgatatgatatactcatgtaggctacatatttc

SEQ ID NO: 64795 - protein, 596 aa, Triticum aestivum
  peptide (1)..(596): Ceres Seq. ID no. 15220178
  misc_feature (417)..(546): Homolog of NCBI NO: 33339558 NR Description: ABRH1 [Marsilea quadrifolia]
  misc_feature (91)..(534): Homolog of NCBI NO: 18394157 NR Description: expressed protein [Arabidopsis thaliana]
  misc_feature (91)..(551): Homolog of NCBI NO: 25402780 NR Description: protein F10B6.14 [imported] - Arabidopsis
  misc_feature (37)..(552): Homolog of NCBI NO: 15229445 NR Description: expressed protein [Arabidopsis thaliana]
  misc_feature (37)..(552): Homolog of NCBI NO: 30695820 NR Description: expressed protein [Arabidopsis thaliana]
  misc_feature (37)..(552): Homolog of NCBI NO: 28973711 NR Description: unknown protein [Arabidopsis thaliana]
  misc_feature (23)..(596): Homolog of NCBI NO: 18398053 NR Description: expressed protein [Arabidopsis thaliana]
  misc_feature (88)..(595): Homolog of NCBI NO: 30385713 NR Description: Potyvirus VPg interacting protein [Pisum sativum]
  misc_feature (52)..(588): Homolog of NCBI NO: 15238905 NR Description: expressed protein [Arabidopsis thaliana]
  misc_feature (18)..(584): Homolog of NCBI NO: 30385711 NR Description: Potyvirus VPg interacting protein [Nicotiana
MGTSSGANFHQQPPPQGMLPPRHGARAPSLQTSLSLASSEQVGSPEMQEPVSNSDQGHDSATESASSRETWPVEPEHSNAAAASSGGAVKKVEMEKDIRNGIPKLQVIRGSSRIDRVSLREIARERVDLVVEKMKVMPEEHLEEIKNELRSILEGTGGSHHIEEFLYLQKFVQGRGDLTPTMLSMAHHVQLEILVAIKTGIQAFLHPSVTIPQSHLVEVFLYKRCRNIACQSALPAEECRCNVCANRNGFCNLCMCVICNKFDFEVNTCRWVGCDFCSHWTHTDCAIRVGQIGTGQSIKSGTGHAEMLFRCQACQKTSELFGWVKDVFQQCAPGWDRDALVRELEFVCKIFRLSEDPKGRNLFRKCANLIERLRNSSPDSVNPRMILHALRELEMDSPKSSENEESGRLITPQEACNRIAEVVQEAVRKMELVAEEKMGLYKKARTAVEACDRELDEKARQVQEFKAERLRKKQQVEELESIVRLKQAEAEMFQLKASEARQEAERLQSIALAKSERAEQDYASLYLKRRLEEAEAEKQFLFEKIKLQDGHRPPQASSSVPADSSQAPSQALMLSKIQDLLKNVRTMPTKSEAHSK

SEQ ID NO: 64796 - protein, 579 aa, Triticum aestivum
  peptide (1)..(579): Ceres Seq. ID no. 15220179
  misc_feature (400)..(529): Homolog of NCBI NO: 33339558 NR Description: ABRH1 [Marsilea quadrifolia]
  misc_feature (74)..(517): Homolog of NCBI NO: 18394157 NR Description: expressed protein [Arabidopsis thaliana]
  misc_feature (74)..(534): Homolog of NCBI NO: 25402780 NR Description: protein F10B6.14 [imported] - Arabidopsis
  misc_feature (20)..(535): Homolog of NCBI NO: 15229445 NR Description: expressed protein [Arabidopsis thaliana]
  misc_feature (20)..(535): Homolog of NCBI NO: 30695820 NR Description: expressed protein [Arabidopsis thaliana]
  misc_feature (20)..(535): Homolog of NCBI NO: 28973711 NR Description: unknown protein [Arabidopsis thaliana]
  misc_feature (6)..(579): Homolog of NCBI NO: 18398053 NR Description: expressed protein [Arabidopsis thaliana]
  misc_feature (71)..(578): Homolog of NCBI NO: 30385713 NR Description: Potyvirus VPg interacting protein [Pisum sativum]
  misc_feature (35)..(571): Homolog of NCBI NO: 15238905 NR Description: expressed protein [Arabidopsis thaliana]
  misc_feature (1)..(567): Homolog of NCBI NO: 30385711 NR Description: Potyvirus VPg interacting protein [Nicotiana
MLPPRHGARAPSLQTSLSLASSEQVGSPEMQEPVSNSDQGHDSATESASSRETWPVEPEHSNAAAASSGGAVKKVEMEKDIRNGIPKLQVIRGSSRIDRVSLREIARERVDLVVEKMKVMPEEHLEEIKNELRSILEGTGGSHHIEEFLYLQKFVQGRGDLTPTMLSMAHHVQLEILVAIKTGIQAFLHPSVTIPQSHLVEVFLYKRCRNIACQSALPAEECRCNVCANRNGFCNLCMCVICNKFDFEVNTCRWVGCDFCSHWTHTDCAIRVGQIGTGQSIKSGTGHAEMLFRCQACQKTSELFGWVKDVFQQCAPGWDRDALVRELEFVCKIFRLSEDPKGRNLFRKCANLIERLRNSSPDSVNPRMILHALRELEMDSPKSSENEESGRLITPQEACNRIAEVVQEAVRKMELVAEEKMGLYKKARTAVEACDRELDEKARQVQEFKAERLRKKQQVEELESIVRLKQAEAEMFQLKASEARQEAERLQSIALAKSERAEQDYASLYLKRRLEEAEAEKQFLFEKIKLQDGHRPPQASSSVPADSSQAPSQALMLSKIQDLLKNVRTMPTKSEAHSK

SEQ ID NO: 64797 - protein, 550 aa, Triticum aestivum
  peptide (1)..(550): Ceres Seq. ID no. 15220180
  misc_feature (371)..(500): Homolog of NCBI NO: 33339558 NR Description: ABRH1 [Marsilea quadrifolia]
  misc_feature (45)..(488): Homolog of NCBI NO: 18394157 NR Description: expressed protein [Arabidopsis thaliana]
  misc_feature (45)..(505): Homolog of NCBI NO: 25402780 NR Description: protein F10B6.14 [imported] - Arabidopsis
  misc_feature (1)..(506): Homolog of NCBI NO: 15229445 NR Description: expressed protein [Arabidopsis thaliana]
  misc_feature (1)..(506): Homolog of NCBI NO: 30695820 NR Description: expressed protein [Arabidopsis thaliana]
  misc_feature (1)..(506): Homolog of NCBI NO: 28973711 NR Description: unknown protein [Arabidopsis thaliana]
  misc_feature (1)..(550): Homolog of NCBI NO: 18398053 NR Description: expressed protein [Arabidopsis thaliana]
  misc_feature (42)..(549): Homolog of NCBI NO: 30385713 NR Description: Potyvirus VPg interacting protein [Pisum sativum]
  misc_feature (6)..(542): Homolog of NCBI NO: 15238905 NR Description: expressed protein [Arabidopsis thaliana]
  misc_feature (1)..(538): Homolog of NCBI NO: 30385711 NR Description: Potyvirus VPg interacting protein [Nicotiana
MQEPVSNSDQGHDSATESASSRETWPVEPEHSNAAAASSGGAVKKVEMEKDIRNGIPKLQVIRGSSRIDRVSLREIARERVDLVVEKMKVMPEEHLEEIKNELRSILEGTGGSHHIEEFLYLQKFVQGRGDLTPTMLSMAHHVQLEILVAIKTGIQAFLHPSVTIPQSHLVEVFLYKRCRNIACQSALPAEECRCNVCANRNGFCNLCMCVICNKFDFEVNTCRWVGCDFCSHWTHTDCAIRVGQIGTGQSIKSGTGHAEMLFRCQACQKTSELFGWVKDVFQQCAPGWDRDALVRELEFVCKIFRLSEDPKGRNLFRKCANLIERLRNSSPDSVNPRMILHALRELEMDSPKSSENEESGRLITPQEACNRIAEVVQEAVRKMELVAEEKMGLYKKARTAVEACDRELDEKARQVQEFKAERLRKKQQVEELESIVRLKQAEAEMFQLKASEARQEAERLQSIALAKSERAEQDYASLYLKRRLEEAEAEKQFLFEKIKLQDGHRPPQASSSVPADSSQAPSQALMLSKIQDLLKNVRTMPTKSEAHSK

SEQ ID NO: 64798 - DNA, 754 bp, Triticum aestivum
  misc_feature (1)..(754): Ceres Seq. ID no. 13656008
gtgatcgattccgattccgtgcccgcgcgtcgagcgatcggcccagagagctcgtcgacaaatctcgctcgtgtccatcagatcgccatcgccggcccacctgcccacctgcccaccagtcgatgatggccttcccctctttcacatggccgttccgccgccgagccgccgccggcgccagcggcggagccggcccaagcaaaccctccgccgctgaggggaaggaggaggacgcggaggagctcggcgtcacgccgcagctcctcgacttcctccggacgctctcccccgacgccttcaagtcctccgccctccagctccaccaaggggcctcggcggaggcggcgggagagctctcggactggcagcagcggcacgccgtcctcgtgctcgccagagccaaggaactcgctaaggtccgctatgatttgtgcccacgccacatgaaggacaagcagttctggacaatctacttcctgctcgccaggacctacatcttgccgtacgagttacgtgccatacaaaaagagaaggtaagaaggatggagacagagaacggaaagtcaaaagaagtgattgctgttgaggtggagatgcaggaatcgaaatgcagtagagaatctcaaacgttaccagatgattcagaacctcaggattcatagttgatgttgctgacggcatattaggtaagggctggaagcagctgtatcaaaattgatatttggcttaattcagaactcatttttcccgttgg

SEQ ID NO: 64799 - protein, 219 aa, Triticum aestivum
  peptide (1)..(219): Ceres Seq. ID no. 13656009
  misc_feature (117)..(160): Pfam Name: BSD domain Pfam Description: BSD domain
  misc_feature (4)..(219): Homolog of NCBI NO: 21555533 NR Description: unknown [Arabidopsis thaliana]
  misc_feature (100)..(190): Homolog of NCBI NO: 30697787 NR Description: expressed protein [Arabidopsis thaliana]
  misc_feature (100)..(190): Homolog of NCBI NO: 25404796 NR Description: hypothetical protein T6L1.21 [imported] -
  misc_feature (70)..(215): Homolog of NCBI NO: 15450417 NR Description: At1g26300/F28B23_4 [Arabidopsis thaliana]
  misc_feature (64)..(202): Homolog of NCBI NO: 18404344 NR Description: expressed protein [Arabidopsis thaliana]
  misc_feature (168)..(219): Homolog of NCBI NO: 38346066 NR Description: OSJNBa0084K01.6 [Oryza sativa (japonica
  misc_feature (42)..(119): Homolog of NCBI NO: 38346066 NR Description: OSJNBa0084K01.6 [Oryza sativa (japonica
DRFRFRARASSDRPRELVDKSRSCPSDRHRRPTCPPAHQSMMAFPSFTWPFRRRAAAGASGGAGPSKPSAAEGKEEDAEELGVTPQLLDFLRTLSPDAFKSSALQLHQGASAEAAGELSDWQQRHAVLVLARAKELAKVRYDLCPRHMKDKQFWTIYFLLARTYILPYELRAIQKEKVRRMETENGKSKEVIAVEVEMQESKCSRESQTLPDDSEPQDS

SEQ ID NO: 64800 - protein, 179 aa, Triticum aestivum
  peptide (1)..(179): Ceres Seq. ID no. 13656010
  misc_feature (77)..(120): Pfam Name: BSD domain Pfam Description: BSD domain
  misc_feature (1)..(179): Homolog of NCBI NO: 21555533 NR Description: unknown [Arabidopsis thaliana]
  misc_feature (60)..(150): Homolog of NCBI NO: 30697787 NR Description: expressed protein [Arabidopsis thaliana]
  misc_feature (60)..(150): Homolog of NCBI NO: 25404796 NR Description: hypothetical protein T6L1.21 [imported] -
  misc_feature (30)..(175): Homolog of NCBI NO: 15450417 NR Description: At1g26300/F28B23_4 [Arabidopsis thaliana]
  misc_feature (24)..(162): Homolog of NCBI NO: 18404344 NR Description: expressed protein [Arabidopsis thaliana]
  misc_feature (128)..(179): Homolog of NCBI NO: 38346066 NR Description: OSJNBa0084K01.6 [Oryza sativa (japonica
  misc_feature (2)..(79): Homolog of NCBI NO: 38346066 NR Description: OSJNBa0084K01.6 [Oryza sativa (japonica
MMAFPSFTWPFRRRAAAGASGGAGPSKPSAAEGKEEDAEELGVTPQLLDFLRTLSPDAFKSSALQLHQGASAEAAGELSDWQQRHAVLVLARAKELAKVRYDLCPRHMKDKQFWTIYFLLARTYILPYELRAIQKEKVRRMETENGKSKEVIAVEVEMQESKCSRESQTLPDDSEPQDS

SEQ ID NO: 64801 - protein, 178 aa, Triticum aestivum
  peptide (1)..(178): Ceres Seq. ID no. 13656011
  misc_feature (76)..(119): Pfam Name: BSD domain Pfam Description: BSD domain
  misc_feature (1)..(178): Homolog of NCBI NO: 21555533 NR Description: unknown [Arabidopsis thaliana]
  misc_feature (59)..(149): Homolog of NCBI NO: 30697787 NR Description: expressed protein [Arabidopsis thaliana]
  misc_feature (59)..(149): Homolog of NCBI NO: 25404796 NR Description: hypothetical protein T6L1.21 [imported] -
  misc_feature (29)..(174): Homolog of NCBI NO: 15450417 NR Description: At1g26300/F28B23_4 [Arabidopsis thaliana]
  misc_feature (23)..(161): Homolog of NCBI NO: 18404344 NR Description: expressed protein [Arabidopsis thaliana]
  misc_feature (127)..(178): Homolog of NCBI NO: 38346066 NR Description: OSJNBa0084K01.6 [Oryza sativa (japonica
  misc_feature (1)..(78): Homolog of NCBI NO: 38346066 NR Description: OSJNBa0084K01.6 [Oryza sativa (japonica
MAFPSFTWPFRRRAAAGASGGAGPSKPSAAEGKEEDAEELGVTPQLLDFLRTLSPDAFKSSALQLHQGASAEAAGELSDWQQRHAVLVLARAKELAKVRYDLCPRHMKDKQFWTIYFLLARTYILPYELRAIQKEKVRRMETENGKSKEVIAVEVEMQESKCSRESQTLPDDSEPQDS

SEQ ID NO: 64802 - DNA, 1628 bp, Triticum aestivum
  misc_feature (1)..(1628): Ceres Seq. ID no. 13597528
cttgctcatctcatctcattccctcccttgtgccatctgctctgctctctcctatcatctatctagcaactcaattccatttgcatgcctacacacatcttacattcactacctcaacacttaccactccaccctagctaagctatcttcacctccatcacaaatcatcaattgcttcagtttgatcccatcaccatgggcgagcaagtagccaccaaggaggaggccaacaaggaagaatcacctgcacccgccgccgcacctgaagctgcaccggcaccggcaccggcagaggagaagaaggacgaggcagcagccgaccaagacccaaagaaggaggaaccaccagcagccgacccaccgtcccctccgccgccggtgccggtgatcctgggcgtcgaggtgcactgcacgggctgcgccaagcggatcaggcgctccctcctccgctgcaagggcgtcgaggccgtccacgtcgacatgtccgccaaccaggtcaccatcaagggcgccgtcgacccgcaggccctctgcgaccgcctccgcgccaagaccaagcgcgacgccaccctcatctcccctctgccacctcctccgccggccgagggcgaggagcctccgccgccccctcctccggcaccgccgctcgtcagcgaggcccgcacagtggagctgctcgtcaacatgcactgcgaggcctgcgcgcagcagctgcagaccaagatgatgaggatgaagggggtggtcagcgctcagacggacctcgccgccgggaggctcacgctcagtgccaccgtggaggacgagaagattgtggagtacatccaccgacggactgggaagatcgcctccgtcgtgccgccgccgcctccggagccgcccaaggaggaggaaccaccagctcctgctgctgatgctgagccaccaaaggatgaagcaccagccgacggcaagaaagaagaggccggcgacaacaaggcggctgaagacggcaaaggagctgcagaggccggggaggagaagaaggaaggtgccggcgaggaggaccagaagccggggaagcaagaaggtgtggcggtggacggcttcccgccggaggagatgatgaagcggatggtctactggccctacggcggcgcacccggcggcggcatccactacaagctgcatccggccgacgccgaggaggccatgatggccaggaggatggccatgcacgccatgccgccacctatgccgccgccgccgcaccaccaccaccacaacccctacgccatgatgcaccagcagtgggcgcctccaccgccgccgccacctccggggatgccgatgtacaacagctacaactacggcagcagctacatgatggagcggccgccgcagatgttcagcgacgagaaccccaacgcctgcgtcatctcctagtcctagctatctcggatcgatggatggatcaccacatgggccatggcatggatatgagctgagcatgtgagcttggccggattattggaccatcctccatatacatttctatactccgattatgtactgctgcgtaattataagcagtagttattgtactattagcgacgaaattaaaggacattggtcacgcttgtaagatc

SEQ ID NO: 64803 - protein, 409 aa, Triticum aestivum
  peptide (1)..(409): Ceres Seq. ID no. 13597529
  misc_feature (65)..(124): Pfam Name: Heavy-metal-associated domain Pfam Description: Heavy-metal-associated domain
  misc_feature (385)..(408): Homolog of NCBI NO: 4097547 NR Description: ATFP3 [Arabidopsis thaliana]
  misc_feature (51)..(286): Homolog of NCBI NO: 4097547 NR Description: ATFP3 [Arabidopsis thaliana]
  misc_feature (357)..(408): Homolog of NCBI NO: 9758294 NR Description: contains similarity to ATFP3~gene_id:MLE2.16
  misc_feature (8)..(286): Homolog of NCBI NO: 9758294 NR Description: contains similarity to ATFP3~gene_id:MLE2.16
  misc_feature (357)..(408): Homolog of NCBI NO: 18424719 NR Description: copper chaperone (CCH)-related [Arabidopsis
  misc_feature (1)..(286): Homolog of NCBI NO: 18424719 NR Description: copper chaperone (CCH)-related [Arabidopsis
  misc_feature (383)..(409): Homolog of NCBI NO: 18420811 NR Description: copper-binding protein family [Arabidopsis
  misc_feature (1)..(310): Homolog of NCBI NO: 18420811 NR Description: copper-binding protein family [Arabidopsis
  misc_feature (383)..(409): Homolog of NCBI NO: 21594005 NR Description: unknown [Arabidopsis thaliana]
  misc_feature (1)..(310): Homolog of NCBI NO: 21594005 NR Description: unknown [Arabidopsis thaliana]
MGEQVATKEEANKEESPAPAAAPEAAPAPAPAEEKKDEAAADQDPKKEEPPAADPPSPPPPVPVILGVEVHCTGCAKRIRRSLLRCKGVEAVHVDMSANQVTIKGAVDPQALCDRLRAKTKRDATLISPLPPPPPAEGEEPPPPPPPAPPLVSEARTVELLVNMHCEACAQQLQTKMMRMKGVVSAQTDLAAGRLTLSATVEDEKIVEYIHRRTGKIASVVPPPPPEPPKEEEPPAPAADAEPPKDEAPADGKKEEAGDNKAAEDGKGAAEAGEEKKEGAGEEDQKPGKQEGVAVDGFPPEEMMKRMVYWPYGGAPGGGIHYKLHPADAEEAMMARRMAMHAMPPPMPPPPHHHHHNPYAMMHQQWAPPPPPPPPGMPMYNSYNYGSSYMMERPPQMFSDENPNACVIS

SEQ ID NO: 64804 - protein, 314 aa, Triticum aestivum
  peptide (1)..(314): Ceres Seq. ID no. 13597530
  misc_feature (249)..(300): Pfam Name: Extensin-like region Pfam Description: Extensin-like region
  misc_feature (290)..(313): Homolog of NCBI NO: 4097547 NR Description: ATFP3 [Arabidopsis thaliana]
  misc_feature (1)..(191): Homolog of NCBI NO: 4097547 NR Description: ATFP3 [Arabidopsis thaliana]
  misc_feature (262)..(313): Homolog of NCBI NO: 9758294 NR Description: contains similarity to ATFP3~gene_id:MLE2.16
  misc_feature (1)..(191): Homolog of NCBI NO: 9758294 NR Description: contains similarity to ATFP3~gene_id:MLE2.16
  misc_feature (262)..(313): Homolog of NCBI NO: 18424719 NR Description: copper chaperone (CCH)-related [Arabidopsis
  misc_feature (1)..(191): Homolog of NCBI NO: 18424719 NR Description: copper chaperone (CCH)-related [Arabidopsis
  misc_feature (288)..(314): Homolog of NCBI NO: 18420811 NR Description: copper-binding protein family [Arabidopsis
  misc_feature (1)..(215): Homolog of NCBI NO: 18420811 NR Description: copper-binding protein family [Arabidopsis
  misc_feature (288)..(314): Homolog of NCBI NO: 21594005 NR Description: unknown [Arabidopsis thaliana]
  misc_feature (1)..(215): Homolog of NCBI NO: 21594005 NR Description: unknown [Arabidopsis thaliana]
MSANQVTIKGAVDPQALCDRLRAKTKRDATLISPLPPPPPAEGEEPPPPPPPAPPLVSEARTVELLVNMHCEACAQQLQTKMMRMKGVVSAQTDLAAGRLTLSATVEDEKIVEYIHRRTGKIASVVPPPPPEPPKEEEPPAPAADAEPPKDEAPADGKKEEAGDNKAAEDGKGAAEAGEEKKEGAGEEDQKPGKQEGVAVDGFPPEEMMKRMVYWPYGGAPGGGIHYKLHPADAEEAMMARRMAMHAMPPPMPPPPHHHHHNPYAMMHQQWAPPPPPPPPGMPMYNSYNYGSSYMMERPPQMFSDENPNACVIS

SEQ ID NO: 64805 - protein, 246 aa, Triticum aestivum
  peptide (1)..(246): Ceres Seq. ID no. 13597531
  misc_feature (181)..(232): Pfam Name: Extensin-like region Pfam Description: Extensin-like region
  misc_feature (222)..(245): Homolog of NCBI NO: 4097547 NR Description: ATFP3 [Arabidopsis thaliana]
  misc_feature (1)..(123): Homolog of NCBI NO: 4097547 NR Description: ATFP3 [Arabidopsis thaliana]
  misc_feature (194)..(245): Homolog of NCBI NO: 9758294 NR Description: contains similarity to ATFP3~gene_id:MLE2.16
  misc_feature (1)..(123): Homolog of NCBI NO: 9758294 NR Description: contains similarity to ATFP3~gene_id:MLE2.16
  misc_feature (194)..(245): Homolog of NCBI NO: 18424719 NR Description: copper chaperone (CCH)-related [Arabidopsis
  misc_feature (1)..(123): Homolog of NCBI NO: 18424719 NR Description: copper chaperone (CCH)-related [Arabidopsis
  misc_feature (220)..(246): Homolog of NCBI NO: 18420811 NR Description: copper-binding protein family [Arabidopsis
  misc_feature (1)..(147): Homolog of NCBI NO: 18420811 NR Description: copper-binding protein family [Arabidopsis
  misc_feature (220)..(246): Homolog of NCBI NO: 21594005 NR Description: unknown [Arabidopsis thaliana]
  misc_feature (1)..(147): Homolog of NCBI NO: 21594005 NR Description: unknown [Arabidopsis thaliana]
MHCEACAQQLQTKMMRMKGVVSAQTDLAAGRLTLSATVEDEKIVEYIHRRTGKIASVVPPPPPEPPKEEEPPAPAADAEPPKDEAPADGKKEEAGDNKAAEDGKGAAEAGEEKKEGAGEEDQKPGKQEGVAVDGFPPEEMMKRMVYWPYGGAPGGGIHYKLHPADAEEAMMARRMAMHAMPPPMPPPPHHHHHNPYAMMHQQWAPPPPPPPPGMPMYNSYNYGSSYMMERPPQMFSDENPNACVIS

SEQ ID NO: 64806 - DNA, 1106 bp, Triticum aestivum
  misc_feature (1)..(1106): Ceres Seq. ID no. 13597725
ctttcagccccacctcgcctccctccatccccctccattaaagcccgcgccctcctcctccgctccattcccctcgccaccgcccagatccagaccatgacggtgccgccgtcgccggagccgttccgcgtcttcgtcgggtacgacccgaaggagcacgaggcctacgaggtgtgtcgccgcagcctgatccgccacgccaccgtgccgctcgacgtgcgccccatccggcagccggacctccgcgcgtcggggctctactggcgcacgcggggtcacatggagagcactgagttctccttcacccgcttcctcacccccttcctcgccggctaccgcggctgggcgctcttcatcgactgcgacttcctctacctcgccgacgtcgccgagctcatcgcctccgccgtgccctcggacgctgccgccgccaagcgcctcgccgtcgtctgcgtcaagcacgagtacaagcccctcgaggccaccaagatggacggcgccatgcagaccgtgtacccgcgcaagaactggtcctccatggtgctctacaactgcgcccaccccaagaacgtcgccgcgctcaccccggacgccgtcagcaccaagaccggcgccttcctccaccgattctcctggctcgacgacgacgagatcggggaggtgcccttcgtctggaacttcctcgtcggccacaacagggtcgaccctgacgacccggccacgcagcccaaggccctgcactacacctgcgggggaccctggttcgacaggtacagggactgcgagttcgccgacctctggatcaaggaggccgaggagctcagggcggagaaggagaagcgcagagccgagaaggagaggctcgagctcgaggacgacgaggacgacgaggggaattgatggatgatggggccggccaacaagttcactgcattgcattggttcttttgcgccgtgggaattctttcgattcaatctgtttgttatgctggtttcttggtataggtggtaggggaggccagagtagaatagctcgagtatattggtttagtatgctcttgtgtagtagctgcaatcgatctatgaatgaaccagtcctcattgcc

SEQ ID NO: 64807 - protein, 299 aa, Triticum aestivum
  peptide (1)..(299): Ceres Seq. ID no. 13597726
  misc_feature (44)..(267): Homolog of NCBI NO: 16264294 NR Description: conserved hypothetical protein [Sinorhizobium
  misc_feature (39)..(259): Homolog of NCBI NO: 33864719 NR Description: conserved hypothetical protein [Synechococcus sp.
  misc_feature (40)..(259): Homolog of NCBI NO: 33864181 NR Description: conserved hypothetical protein
  misc_feature (40)..(280): Homolog of NCBI NO: 15217806 NR Description: expressed protein [Arabidopsis thaliana]
  misc_feature (40)..(289): Homolog of NCBI NO: 34903402 NR Description: hypothetical protein~similar to Oryza sativa
  misc_feature (32)..(299): Homolog of NCBI NO: 37536068 NR Description: unknown protein [Oryza sativa (japonica
LSAPPRLPPSPSIKARALLLRSIPLATAQIQTMTVPPSPEPFRVFVGYDPKEHEAYEVCRRSLIRHATVPLDVRPIRQPDLRASGLYWRTRGHMESTEFSFTRFLTPFLAGYRGWALFIDCDFLYLADVAELIASAVPSDAAAAKRLAVVCVKHEYKPLEATKMDGAMQTVYPRKNWSSMVLYNCAHPKNVAALTPDAVSTKTGAFLHRFSWLDDDEIGEVPFVWNFLVGHNRVDPDDPATQPKALHYTCGGPWFDRYRDCEFADLWIKEAEELRAEKEKRRAEKERLELEDDEDDEGN

SEQ ID NO: 64808 - protein, 267 aa, Triticum aestivum
  peptide (1)..(267): Ceres Seq. ID no. 13597727
  misc_feature (12)..(235): Homolog of NCBI NO: 16264294 NR Description: conserved hypothetical protein [Sinorhizobium
  misc_feature (7)..(227): Homolog of NCBI NO: 33864719 NR Description: conserved hypothetical protein [Synechococcus sp.
  misc_feature (8)..(227): Homolog of NCBI NO: 33864181 NR Description: conserved hypothetical protein
  misc_feature (8)..(248): Homolog of NCBI NO: 15217806 NR Description: expressed protein [Arabidopsis thaliana]
  misc_feature (8)..(257): Homolog of NCBI NO: 34903402 NR Description: hypothetical protein~similar to Oryza sativa
  misc_feature (1)..(267): Homolog of NCBI NO: 37536068 NR Description: unknown protein [Oryza sativa (japonica
MTVPPSPEPFRVFVGYDPKEHEAYEVCRRSLIRHATVPLDVRPIRQPDLRASGLYWRTRGHMESTEFSFTRFLTPFLAGYRGWALFIDCDFLYLADVAELIASAVPSDAAAAKRLAVVCVKHEYKPLEATKMDGAMQTVYPRKNWSSMVLYNCAHPKNVAALTPDAVSTKTGAFLHRFSWLDDDEIGEVPFVWNFLVGHNRVDPDDPATQPKALHYTCGGPWFDRYRDCEFADLWIKEAEELRAEKEKRRAEKERLELEDDEDDEGN

SEQ ID NO: 64809 - protein, 206 aa, Triticum aestivum
  peptide (1)..(206): Ceres Seq. ID no. 13597728
  misc_feature (1)..(174): Homolog of NCBI NO: 16264294 NR Description: conserved hypothetical protein [Sinorhizobium
  misc_feature (1)..(166): Homolog of NCBI NO: 33864719 NR Description: conserved hypothetical protein [Synechococcus sp.
  misc_feature (1)..(166): Homolog of NCBI NO: 33864181 NR Description: conserved hypothetical protein
  misc_feature (1)..(187): Homolog of NCBI NO: 15217806 NR Description: expressed protein [Arabidopsis thaliana]
  misc_feature (1)..(196): Homolog of NCBI NO: 34903402 NR Description: hypothetical protein~similar to Oryza sativa
  misc_feature (1)..(206): Homolog of NCBI NO: 37536068 NR Description: unknown protein [Oryza sativa (japonica
MESTEFSFTRFLTPFLAGYRGWALFIDCDFLYLADVAELIASAVPSDAAAAKRLAVVCVKHEYKPLEATKMDGAMQTVYPRKNWSSMVLYNCAHPKNVAALTPDAVSTKTGAFLHRFSWLDDDEIGEVPFVWNFLVGHNRVDPDDPATQPKALHYTCGGPWFDRYRDCEFADLWIKEAEELRAEKEKRRAEKERLELEDDEDDEGN

SEQ ID NO: 64810 - DNA, 1846 bp, Triticum aestivum
  misc_feature (1)..(1846): Ceres Seq. ID no. 13597732
cctacccgatacgaaccaaccccagattttccccgggcgccgcagccgcatttcgtcgagcacaggacgcgcatggcgatggccgcgccccacgtctcgcactcgcagccacccgcagggcgcgccgctttattcgctcaccccaccaccgcgcagaactcctcccctctccgcctccctctcggccgcgccgccgtccggcccgtccgcctctacgccgtctccaccgatgccgcccctgccaccgccgccgccgcgatggacgccgtggccgactgggggctcaccccgctcgcggaggccgacccggaggtgtacgacctcatcgagcgcgagaagcggcgccagcgcacgggcatcgagctaatcgcgtccgagaacttcacctcgctcgccgtcatggaggcgctcggctccccgctcaccaacaagtactccgagggcatgcccggggcgcgctactacggcgggaacgaggtcatcgacgaggtcgaggagctctgccgcgcccgcgccctcaaggcgttccacctcgaccccgcttcctggggcgtcaacgtgcagccctactccggctcccccgccaacttcgccgcctacactgggctgctccaaccccacgagcgcatcatggggctcgatttgccgtccggaggacacctcactcatgggtactacacggccgggggcaagaagatttcggccacctccatctacttttcgagcttgccctacaaggtgagctccgacaccgggtacgtcgactatgataggctggaggagaaggccatggatttccgccccaagctcattatctgtggcgggagcgcgtacccacgggactgggattatgccaggcttagggccatcgcggacaagtgcggggccatgttgctgtgtgacatggctcatatcagcggtctcgttgccgctcaggaggctacgaatccgtttgagtattctgatgtggttaccaccaccacccacaagagtctccgagggccaaggtctggtatgatattctacaggaagggcccgaagcctcccaaaaaaggccagcccgagggtgctctttacgattacgaggacaagatcaactttgcagtgtttccatcactccagggcggccctcacaaccaccagattgctgccctggcagttggcctgaagcaggcaatgtcacctggattcaaggcatatattcagcaggtcaaggccaatgctgttgcccttggaaaccatctgatgagtaagggctacaagatggttactgacggaacagagaaccaccttgttctctgggatcttcgccctcttggcttgtctggtaacaaagttgagaaagtatgtgatctgagcagcattacactcaacaaaaatgccgtctttggtgacagcagtgcactggcacctggtggtgtgcgaattggtacacctgccatgacctcgagaggtttggtcgagaaggactttgtgaagattgctgagtaccttcatcaggctgtagtcatctgcttgaatgtccagaagcagcgaggtaagcgttacaatgatttcatcgttgacttggagaagaacgaggacatcgcggagctcagggcagaggtcgagaagtttgccattgcatttgagatgcctggcttccgggtgtcagacatgaaatacaaggattaggctgtggtaccatgcagatcgttttcttgtagcagcaaattggtgcccttaaggggctgattgctgtgctctattcgtgatgtatgattatggttgagaatgatatgactcatgaataatcattgaaggcatgccataacatggagatggtatttcctagcctcagttttcc

SEQ ID NO: 64811 - protein, 557 aa, Triticum aestivum
  peptide (1)..(557): Ceres Seq. ID no. 13597733
  misc_feature (98)..(498): Pfam Name: Serine hydroxymethyltransferase Pfam Description: Serine hydroxymethyltransferase
  misc_feature (98)..(557): Homolog of NCBI NO: 17066746 NR Description: serine hydroxymethyltransferase [Chlamydomonas
  misc_feature (56)..(548): Homolog of NCBI NO: 15219182 NR Description: glycine hydroxymethyltransferase -related
  misc_feature (64)..(550): Homolog of NCBI NO: 34907298 NR Description: putative hydroxymethyltransferase
  misc_feature (89)..(546): Homolog of NCBI NO: 21537165 NR Description: putative hydroxymethyltransferase [Arabidopsis
  misc_feature (89)..(546): Homolog of NCBI NO: 25286207 NR Description: probable hydroxymethyltransferase, 49598-47322
  misc_feature (89)..(546): Homolog of NCBI NO: 18400090 NR Description: hydroxymethyltransferase -related [Arabidopsis
  misc_feature (87)..(554): Homolog of NCBI NO: 15236371 NR Description: glycine hydroxymethyltransferase - like protein
  misc_feature (87)..(557): Homolog of NCBI NO: 21592544 NR Description: hydroxymethyltransferase [Arabidopsis thaliana]
  misc_feature (87)..(557): Homolog of NCBI NO: 11762130 NR Description: AT4g13930 [Arabidopsis thaliana]
  misc_feature (87)..(557): Homolog of NCBI NO: 15236375 NR Description: hydroxymethyltransferase [Arabidopsis thaliana]
PTRYEPTPDFPRAPQPHFVEHRTRMAMAAPHVSHSQPPAGRAALFAHPTTAQNSSPLRLPLGRAAVRPVRLYAVSTDAAPATAAAAMDAVADWGLTPLAEADPEVYDLIEREKRRQRTGIELIASENFTSLAVMEALGSPLTNKYSEGMPGARYYGGNEVIDEVEELCRARALKAFHLDPASWGVNVQPYSGSPANFAAYTGLLQPHERIMGLDLPSGGHLTHGYYTAGGKKISATSIYFSSLPYKVSSDTGYVDYDRLEEKAMDFRPKLIICGGSAYPRDWDYARLRAIADKCGAMLLCDMAHISGLVAAQEATNPFEYSDVVTTTTHKSLRGPRSGMIFYRKGPKPPKKGQPEGALYDYEDKINFAVFPSLQGGPHNHQIAALAVGLKQAMSPGFKAYIQQVKANAVALGNHLMSKGYKMVTDGTENHLVLWDLRPLGLSGNKVEKVCDLSSITLNKNAVFGDSSALAPGGVRIGTPAMTSRGLVEKDFVKIAEYLHQAVVICLNVQKQRGKRYNDFIVDLEKNEDIAELRAEVEKFAIAFEMPGFRVSDMKYKD

SEQ ID NO: 64812 - protein, 533 aa, Triticum aestivum
  peptide (1)..(533): Ceres Seq. ID no. 13597734
  misc_feature (74)..(474): Pfam Name: Serine hydroxymethyltransferase Pfam Description: Serine hydroxymethyltransferase
  misc_feature (74)..(533): Homolog of NCBI NO: 17066746 NR Description: serine hydroxymethyltransferase [Chlamydomonas
  misc_feature (32)..(524): Homolog of NCBI NO: 15219182 NR Description: glycine hydroxymethyltransferase -related
  misc_feature (40)..(526): Homolog of NCBI NO: 34907298 NR Description: putative hydroxymethyltransferase
  misc_feature (65)..(522): Homolog of NCBI NO: 21537165 NR Description: putative hydroxymethyltransferase [Arabidopsis
  misc_feature (65)..(522): Homolog of NCBI NO: 25286207 NR Description: probable hydroxymethyltransferase, 49598-47322
  misc_feature (65)..(522): Homolog of NCBI NO: 18400090 NR Description: hydroxymethyltransferase -related [Arabidopsis
  misc_feature (63)..(530): Homolog of NCBI NO: 15236371 NR Description: glycine hydroxymethyltransferase - like protein
  misc_feature (63)..(533): Homolog of NCBI NO: 21592544 NR Description: hydroxymethyltransferase [Arabidopsis thaliana]
  misc_feature (63)..(533): Homolog of NCBI NO: 11762130 NR Description: AT4g13930 [Arabidopsis thaliana]
  misc_feature (63)..(533): Homolog of NCBI NO: 15236375 NR Description: hydroxymethyltransferase [Arabidopsis thaliana]
MAMAAPHVSHSQPPAGRAALFAHPTTAQNSSPLRLPLGRAAVRPVRLYAVSTDAAPATAAAAMDAVADWGLTPLAEADPEVYDLIEREKRRQRTGIELIASENFTSLAVMEALGSPLTNKYSEGMPGARYYGGNEVIDEVEELCRARALKAFHLDPASWGVNVQPYSGSPANFAAYTGLLQPHERIMGLDLPSGGHLTHGYYTAGGKKISATSIYFSSLPYKVSSDTGYVDYDRLEEKAMDFRPKLIICGGSAYPRDWDYARLRAIADKCGAMLLCDMAHISGLVAAQEATNPFEYSDVVTTTTHKSLRGPRSGMIFYRKGPKPPKKGQPEGALYDYEDKINFAVFPSLQGGPHNHQIAALAVGLKQAMSPGFKAYIQQVKANAVALGNHLMSKGYKMVTDGTENHLVLWDLRPLGLSGNKVEKVCDLSSITLNKNAVFGDSSALAPGGVRIGTPAMTSRGLVEKDFVKIAEYLHQAVVICLNVQKQRGKRYNDFIVDLEKNEDIAELRAEVEKFAIAFEMPGFRVSDMKYKD

SEQ ID NO: 64813 - protein, 531 aa, Triticum aestivum
  peptide (1)..(531): Ceres Seq. ID no. 13597735
  misc_feature (72)..(472): Pfam Name: Serine hydroxymethyltransferase Pfam Description: Serine hydroxymethyltransferase
  misc_feature (72)..(531): Homolog of NCBI NO: 17066746 NR Description: serine hydroxymethyltransferase [Chlamydomonas
  misc_feature (30)..(522): Homolog of NCBI NO: 15219182 NR Description: glycine hydroxymethyltransferase -related
  misc_feature (38)..(524): Homolog of NCBI NO: 34907298 NR Description: putative hydroxymethyltransferase
  misc_feature (63)..(520): Homolog of NCBI NO: 21537165 NR Description: putative hydroxymethyltransferase [Arabidopsis
  misc_feature (63)..(520): Homolog of NCBI NO: 25286207 NR Description: probable hydroxymethyltransferase, 49598-47322
  misc_feature (63)..(520): Homolog of NCBI NO: 18400090 NR Description: hydroxymethyltransferase -related [Arabidopsis
  misc_feature (61)..(528): Homolog of NCBI NO: 15236371 NR Description: glycine hydroxymethyltransferase - like protein
  misc_feature (61)..(531): Homolog of NCBI NO: 21592544 NR Description: hydroxymethyltransferase [Arabidopsis thaliana]
  misc_feature (61)..(531): Homolog of NCBI NO: 11762130 NR Description: AT4g13930 [Arabidopsis thaliana]
  misc_feature (61)..(531): Homolog of NCBI NO: 15236375 NR Description: hydroxymethyltransferase [Arabidopsis thaliana]
MAAPHVSHSQPPAGRAALFAHPTTAQNSSPLRLPLGRAAVRPVRLYAVSTDAAPATAAAAMDAVADWGLTPLAEADPEVYDLIEREKRRQRTGIELIASENFTSLAVMEALGSPLTNKYSEGMPGARYYGGNEVIDEVEELCRARALKAFHLDPASWGVNVQPYSGSPANFAAYTGLLQPHERIMGLDLPSGGHLTHGYYTAGGKKISATSIYFSSLPYKVSSDTGYVDYDRLEEKAMDFRPKLIICGGSAYPRDWDYARLRAIADKCGAMLLCDMAHISGLVAAQEATNPFEYSDVVTTTTHKSLRGPRSGMIFYRKGPKPPKKGQPEGALYDYEDKINFAVFPSLQGGPHNHQIAALAVGLKQAMSPGFKAYIQQVKANAVALGNHLMSKGYKMVTDGTENHLVLWDLRPLGLSGNKVEKVCDLSSITLNKNAVFGDSSALAPGGVRIGTPAMTSRGLVEKDFVKIAEYLHQAVVICLNVQKQRGKRYNDFIVDLEKNEDIAELRAEVEKFAIAFEMPGFRVSDMKYKD

SEQ ID NO: 64814 - DNA, 1415 bp, Triticum aestivum
  misc_feature (1)..(1415): Ceres Seq. ID no. 14302852
atcacaccatcacgatcgagcactcgcaacagcttcactcaactcgcagtgaagatcacctagagaccgactagcagtgatcgatggcgtccgtccggcgcccgtgcgcggtggcgctgctcgcctgcgccgccgcattcctcgtgacggtcggtgcccagccgaaggacaaccccattttgtcggaccccaacgtggtccccatctacatgagccccggcgcgcagcccaccgtggtgagctgctacaaccagagcagcccgtcgcaggccccagagtgcatgattccggtgcgccggtgccccgccggctgccgcgacctctgctacgtgcactgccccagctgcaagctcgtctgcatgtgtgaactggccggcacggagtgctacgacccgcgcttcgtgggtggcgacggcaacaagttcctcttccacggccgcagggacgccgacttctgcctgctctccgacgccaacctgcacatcaacgcgcacttcatcggcaagcgcaacgtgaaggcggcgcgtgacttcacatgggtgcaggcgctcggcatccgcttcggtggccaccgcctctacctcggcgtcaagaggacggtcacctgggacaacgccgtcgaccgcctcgtcatcaccttcgacggcgtgcccgtcgagctggacgcggcgccggccgccagctggagcccggcctccgcgcccgcgctgtctgtcttccgcatcggcaaggccaacggcgtggtggtgcgcctcgacggccggttccgcatcgtcgccaacgcggtgccggtgaccgaggaggactcgagggtccacgactacggcctcaccgccgacgacagcctcgcgcacctcaacgtcgcgttcaagttcaactccatcagcgccgacgtgcacggcgtgctcggccagacctaccgcccggactacgtcagcgccggggttgacatgggcgccaagatcccggtgatggggggtgccgcaaagtaccaggtgtcggacatcttcgggacggactgcgaggtggcgcgcttcgccggagaggacgtcgtccgcgtcggggcggtcgacatgatcgacgagccggccgacaccatgtgcggcagcggcaagggcagcgccgggctggtctgcaagaagtgatgtggtatcgcgagctgattttgcttcgttaccctcgtaagtgtgcccatacacgtctacgtgctcgctgctgctacactacattatcggtagtacctccgcatttcagaataaataaccgctggtgatgtcgtgtcgttgtgtgttagtcaatcgatagtcgtgtagggcaacgttggaaatccaggcgttgctcggtgtaacaggctactttttttccctccatgttttttcaaatgtaatgattgaacaatcaagtttgtgatttac

SEQ ID NO: 64815 - protein, 353 aa, Triticum aestivum
  peptide (1)..(353): Ceres Seq. ID no. 14302853
  misc_feature (64)..(353): Homolog of NCBI NO: 7484468 NR Description: late embryonic abundant protein EMB7 - white
  misc_feature (27)..(353): Homolog of NCBI NO: 30685319 NR Description: late embryogenesis abundant protein -related
  misc_feature (27)..(353): Homolog of NCBI NO: 11994465 NR Description: contains similarity to late embryogenesis
  misc_feature (9)..(318): Homolog of NCBI NO: 34905934 NR Description: similar to root cap protein
  misc_feature (8)..(320): Homolog of NCBI NO: 4514635 NR Description: root cap protein 1 [Zea mays]
  misc_feature (8)..(318): Homolog of NCBI NO: 34905940 NR Description: similar to root cap protein
  misc_feature (11)..(318): Homolog of NCBI NO: 34905930 NR Description: similar to root cap protein
  misc_feature (9)..(318): Homolog of NCBI NO: 34905936 NR Description: similar to root cap protein
  misc_feature (7)..(353): Homolog of NCBI NO: 4514637 NR Description: root cap protein 2 [Zea mays]
  misc_feature (6)..(353): Homolog of NCBI NO: 21741738 NR Description: OSJNBa0073L04.2 [Oryza sativa (japonica
MASVRRPCAVALLACAAAFLVTVGAQPKDNPILSDPNVVPIYMSPGAQPTVVSCYNQSSPSQAPECMIPVRRCPAGCRDLCYVHCPSCKLVCMCELAGTECYDPRFVGGDGNKFLFHGRRDADFCLLSDANLHINAHFIGKRNVKAARDFTWVQALGIRFGGHRLYLGVKRTVTWDNAVDRLVITFDGVPVELDAAPAASWSPASAPALSVFRIGKANGVVVRLDGRFRIVANAVPVTEEDSRVHDYGLTADDSLAHLNVAFKFNSISADVHGVLGQTYRPDYVSAGVDMGAKIPVMGGAAKYQVSDIFGTDCEVARFAGEDVVRVGAVDMIDEPADTMCGSGKGSAGLVCKK

SEQ ID NO: 64816 - protein, 311 aa, Triticum aestivum
  peptide (1)..(311): Ceres Seq. ID no. 14302854
  misc_feature (22)..(311): Homolog of NCBI NO: 7484468 NR Description: late embryonic abundant protein EMB7 - white
  misc_feature (1)..(311): Homolog of NCBI NO: 30685319 NR Description: late embryogenesis abundant protein -related
  misc_feature (1)..(311): Homolog of NCBI NO: 11994465 NR Description: contains similarity to late embryogenesis
  misc_feature (1)..(276): Homolog of NCBI NO: 34905934 NR Description: similar to root cap protein
  misc_feature (1)..(278): Homolog of NCBI NO: 4514635 NR Description: root cap protein 1 [Zea mays]
  misc_feature (1)..(276): Homolog of NCBI NO: 34905940 NR Description: similar to root cap protein
  misc_feature (1)..(276): Homolog of NCBI NO: 34905930 NR Description: similar to root cap protein
  misc_feature (1)..(276): Homolog of NCBI NO: 34905936 NR Description: similar to root cap protein
  misc_feature (1)..(311): Homolog of NCBI NO: 4514637 NR Description: root cap protein 2 [Zea mays]
  misc_feature (1)..(311): Homolog of NCBI NO: 21741738 NR Description: OSJNBa0073L04.2 [Oryza sativa (japonica
MSPGAQPTVVSCYNQSSPSQAPECMIPVRRCPAGCRDLCYVHCPSCKLVCMCELAGTECYDPRFVGGDGNKFLFHGRRDADFCLLSDANLHINAHFIGKRNVKAARDFTWVQALGIRFGGHRLYLGVKRTVTWDNAVDRLVITFDGVPVELDAAPAASWSPASAPALSVFRIGKANGVVVRLDGRFRIVANAVPVTEEDSRVHDYGLTADDSLAHLNVAFKFNSISADVHGVLGQTYRPDYVSAGVDMGAKIPVMGGAAKYQVSDIFGTDCEVARFAGEDVVRVGAVDMIDEPADTMCGSGKGSAGLVCKK

SEQ ID NO: 64817 - protein, 287 aa, Triticum aestivum
  peptide (1)..(287): Ceres Seq. ID no. 14302855
  misc_feature (1)..(287): Homolog of NCBI NO: 7484468 NR Description: late embryonic abundant protein EMB7 - white
  misc_feature (1)..(287): Homolog of NCBI NO: 30685319 NR Description: late embryogenesis abundant protein -related
  misc_feature (1)..(287): Homolog of NCBI NO: 11994465 NR Description: contains similarity to late embryogenesis
  misc_feature (1)..(252): Homolog of NCBI NO: 34905934 NR Description: similar to root cap protein
  misc_feature (1)..(254): Homolog of NCBI NO: 4514635 NR Description: root cap protein 1 [Zea mays]
  misc_feature (1)..(252): Homolog of NCBI NO: 34905940 NR Description: similar to root cap protein
  misc_feature (1)..(252): Homolog of NCBI NO: 34905930 NR Description: similar to root cap protein
  misc_feature (1)..(252): Homolog of NCBI NO: 34905936 NR Description: similar to root cap protein
  misc_feature (1)..(287): Homolog of NCBI NO: 4514637 NR Description: root cap protein 2 [Zea mays]
  misc_feature (1)..(287): Homolog of NCBI NO: 21741738 NR Description: OSJNBa0073L04.2 [Oryza sativa (japonica
MIPVRRCPAGCRDLCYVHCPSCKLVCMCELAGTECYDPRFVGGDGNKFLFHGRRDADFCLLSDANLHINAHFIGKRNVKAARDFTWVQALGIRFGGHRLYLGVKRTVTWDNAVDRLVITFDGVPVELDAAPAASWSPASAPALSVFRIGKANGVVVRLDGRFRIVANAVPVTEEDSRVHDYGLTADDSLAHLNVAFKFNSISADVHGVLGQTYRPDYVSAGVDMGAKIPVMGGAAKYQVSDIFGTDCEVARFAGEDVVRVGAVDMIDEPADTMCGSGKGSAGLVCKK

SEQ ID NO: 64818 - DNA, 1284 bp, Triticum aestivum
  misc_feature (1)..(1284): Ceres Seq. ID no. 15179788
acccacgacgcggacactactttgtacgcaggcagcgtctttccccttcctcttttgcctcccatctcccctctccgctcccactccacagtccacccagccgcggccggaagagcaggaggacgggatgagctccgggacggggaaggtggtgtgcgtcaccggcgcctcgggctacatcgcctcctggctcgtcaagttcctcctccagcgcggctacaccgtccgcgccaccgtcagggacaccgccgaccccaagaaaacattgcacctgcaggccctggatggagccaaggacaggctgcacttgtttaaagcaagcttgttggaagaaggcaccttcgatgatgctgttgccggctgcgattgtgtcttccacacggcatctcccttttatcacaatgtcaaggatcccaaggctgagttacttgatccagcagtcaatggaacgctcaatgttctccgttcctgcaagaaggcctctatcaagagagtgatcgtaacctcatccatggctgctgttgcctacaatgggaagccaaggactcctgatgtagtagttgacgagacatggttttcaagtgcagaggtctgcgaaaagaataagcaatggtatgtgctatccaagacccttgccgaggaggctgcatggaagtacgcaaatgataatggattagaaataattacaataaacccaacaatggtcatcggtcccctgttgcagcctacactgaatactagcacagaagcaatattgaagtttataaatggatcatcttctacatacgccaatttctgctttggatggataaacgttaaagatgttgccctggcacatatccttgcatatgaagttccttcagcaaacggaagatattgtatggttgaaagagtcattcaccactcggaccttgtcaagatcatacacgagatgtatcctgaatttccagtgccagacaagtgtgcagatgatgcgccgtttgccccaatctaccaggtatcaaaggacaggataagaagtctgggcatggagctgacccccctggagacgagcctcaaggagactatcgagagcttgagagagaaaggatttgtcacttctgagtcgagccatctgtgaaactttctttgctttggcatcactagtggcagacgctagatgcacacatgtttatgtgcacctgaaataaatcgaggcatagtgtattcttgagacatgtatttgtggatctgctgtgtttcaatggattcaagttcggagaatgtataaaaaaaaaaaaaaaa

SEQ ID NO: 64819 - protein, 372 aa, Triticum aestivum
  peptide (1)..(372): Ceres Seq. ID no. 15179789
  misc_feature (51)..(282): Pfam Name: 3-beta hydroxysteroid dehydrogenase/isomerase family Pfam Description: 3-beta hydroxysteroid dehydrogenase/isomerase
  misc_feature (43)..(365): Homolog of NCBI NO: 5852203 NR Description: aldehyde reductase [Vigna radiata]
  misc_feature (49)..(365): Homolog of NCBI NO: 25405464 NR Description: hypothetical protein F5D21.12 [imported] -
  misc_feature (43)..(365): Homolog of NCBI NO: 30694964 NR Description: cinnamyl-alcohol dehydrogenase (CAD), putative
  misc_feature (43)..(365): Homolog of NCBI NO: 7431406 NR Description: probable cinnamyl-alcohol dehydrogenase (EC
  misc_feature (44)..(365): Homolog of NCBI NO: 7431409 NR Description: cinnamyl-alcohol dehydrogenase (EC 1.1.1.195) -
  misc_feature (43)..(365): Homolog of NCBI NO: 7488627 NR Description: probable cinnamyl-alcohol dehydrogenase (EC
  misc_feature (43)..(366): Homolog of NCBI NO: 37029996 NR Description: NADPH-dependent cinnamyl alcohol dehydrogenase
  misc_feature (44)..(364): Homolog of NCBI NO: 21594240 NR Description: cinnamyl-alcohol dehydrogenase-like protein
  misc_feature (44)..(364): Homolog of NCBI NO: 15239741 NR Description: cinnamyl-alcohol dehydrogenase (CAD), putative
  misc_feature (35)..(372): Homolog of NCBI NO: 34913420 NR Description: putative cinnamyl-alcohol dehydrogenase
PTTRTLLCTQAASFPFLFCLPSPLSAPTPQSTQPRPEEQEDGMSSGTGKVVCVTGASGYIASWLVKFLLQRGYTVRATVRDTADPKKTLHLQALDGAKDRLHLFKASLLEEGTFDDAVAGCDCVFHTASPFYHNVKDPKAELLDPAVNGTLNVLRSCKKASIKRVIVTSSMAAVAYNGKPRTPDVVVDETWFSSAEVCEKNKQWYVLSKTLAEEAAWKYANDNGLEIITINPTMVIGPLLQPTLNTSTEAILKFINGSSSTYANFCFGWINVKDVALAHILAYEVPSANGRYCMVERVIHHSDLVKIIHEMYPEFPVPDKCADDAPFAPIYQVSKDRIRSLGMELTPLETSLKETIESLREKGFVTSESSHL

SEQ ID NO: 64820 - protein, 330 aa, Triticum aestivum
  peptide (1)..(330): Ceres Seq. ID no. 15179790
  misc_feature (9)..(240): Pfam Name: 3-beta hydroxysteroid dehydrogenase/isomerase family Pfam Description: 3-beta hydroxysteroid dehydrogenase/isomerase
  misc_feature (1)..(323): Homolog of NCBI NO: 5852203 NR Description: aldehyde reductase [Vigna radiata]
  misc_feature (7)..(323): Homolog of NCBI NO: 25405464 NR Description: hypothetical protein F5D21.12 [imported] -
  misc_feature (1)..(323): Homolog of NCBI NO: 30694964 NR Description: cinnamyl-alcohol dehydrogenase (CAD), putative
  misc_feature (1)..(323): Homolog of NCBI NO: 7431406 NR Description: probable cinnamyl-alcohol dehydrogenase (EC
  misc_feature (2)..(323): Homolog of NCBI NO: 7431409 NR Description: cinnamyl-alcohol dehydrogenase (EC 1.1.1.195) -
  misc_feature (1)..(323): Homolog of NCBI NO: 7488627 NR Description: probable cinnamyl-alcohol dehydrogenase (EC
  misc_feature (1)..(324): Homolog of NCBI NO: 37029996 NR Description: NADPH-dependent cinnamyl alcohol dehydrogenase
  misc_feature (2)..(322): Homolog of NCBI NO: 21594240 NR Description: cinnamyl-alcohol dehydrogenase-like protein
  misc_feature (2)..(322): Homolog of NCBI NO: 15239741 NR Description: cinnamyl-alcohol dehydrogenase (CAD), putative
  misc_feature (1)..(330): Homolog of NCBI NO: 34913420 NR Description: putative cinnamyl-alcohol dehydrogenase
MSSGTGKVVCVTGASGYIASWLVKFLLQRGYTVRATVRDTADPKKTLHLQALDGAKDRLHLFKASLLEEGTFDDAVAGCDCVFHTASPFYHNVKDPKAELLDPAVNGTLNVLRSCKKASIKRVIVTSSMAAVAYNGKPRTPDVVVDETWFSSAEVCEKNKQWYVLSKTLAEEAAWKYANDNGLEIITINPTMVIGPLLQPTLNTSTEAILKFINGSSSTYANFCFGWINVKDVALAHILAYEVPSANGRYCMVERVIHHSDLVKIIHEMYPEFPVPDKCADDAPFAPIYQVSKDRIRSLGMELTPLETSLKETIESLREKGFVTSESSHL

SEQ ID NO: 64821 - protein, 202 aa, Triticum aestivum
  peptide (1)..(202): Ceres Seq. ID no. 15179791
  misc_feature (1)..(112): Pfam Name: 3-beta hydroxysteroid dehydrogenase/isomerase family Pfam Description: 3-beta hydroxysteroid dehydrogenase/isomerase
  misc_feature (1)..(195): Homolog of NCBI NO: 5852203 NR Description: aldehyde reductase [Vigna radiata]
  misc_feature (1)..(195): Homolog of NCBI NO: 25405464 NR Description: hypothetical protein F5D21.12 [imported] -
  misc_feature (1)..(195): Homolog of NCBI NO: 30694964 NR Description: cinnamyl-alcohol dehydrogenase (CAD), putative
  misc_feature (1)..(195): Homolog of NCBI NO: 7431406 NR Description: probable cinnamyl-alcohol dehydrogenase (EC
  misc_feature (1)..(195): Homolog of NCBI NO: 7431409 NR Description: cinnamyl-alcohol dehydrogenase (EC 1.1.1.195) -
  misc_feature (1)..(195): Homolog of NCBI NO: 7488627 NR Description: probable cinnamyl-alcohol dehydrogenase (EC
  misc_feature (1)..(196): Homolog of NCBI NO: 37029996 NR Description: NADPH-dependent cinnamyl alcohol dehydrogenase
  misc_feature (1)..(194): Homolog of NCBI NO: 21594240 NR Description: cinnamyl-alcohol dehydrogenase-like protein
  misc_feature (1)..(194): Homolog of NCBI NO: 15239741 NR Description: cinnamyl-alcohol dehydrogenase (CAD), putative
  misc_feature (1)..(202): Homolog of NCBI NO: 34913420 NR Description: putative cinnamyl-alcohol dehydrogenase
MAAVAYNGKPRTPDVVVDETWFSSAEVCEKNKQWYVLSKTLAEEAAWKYANDNGLEIITINPTMVIGPLLQPTLNTSTEAILKFINGSSSTYANFCFGWINVKDVALAHILAYEVPSANGRYCMVERVIHHSDLVKIIHEMYPEFPVPDKCADDAPFAPIYQVSKDRIRSLGMELTPLETSLKETIESLREKGFVTSESSHL

SEQ ID NO: 64822 - DNA, 1345 bp, Triticum aestivum
  misc_feature (1)..(1345): Ceres Seq. ID no. 13503553
ttttccggtaccaaacgtcaccttcttcccagcttcctcctccgtccacccacgccgccgacgcgcctccgccggtccggtctacatataccagcgccctcgccatcccccatttccttcctccccaacccgccattttccgtcctcaccgagacggttcccatccccgcgcatctgcctctgccgtctccgcccggtgccatcttcttcgctcactccgcgcaggccaactaatctttctgatcggccggccggtcgaaatgggccacgagggagccaagtacggcgacgacggccgccccacctgcgactgcctcctcttcgaccttgatgacacgctctacccggtgggatcaggcatcggcctcgacgtcatgaagaacatccaagaatacatggtcgagaagctcggcatcgacaagagcatcagccacgagctctgcatcctgctgtacaagcagtacggaaccaccatggccggtctgcgggctgtcgggtaccagttcgactacgatgatttccacggctttgttcatggaaggttggcctacgaaaagctcaagcctgaccctgtgctcaggaacatccttctgagcctaccaatccgcaaactcgtgttcacgaatggtgacaggctccatgcttcgagggccatgaagaggcttgggatcgaggactgctttgagggagttctgtgctttgagacattgaacccgccatcgcccactcctgcgccagccagcaaagttgagatctttgatataatgaagcacctggctcatccggagcctggggttgagctgccaaggtcaccaatcctgtgcaaaccgaatatagatgcaatgctgcatgccctcaagcttgccgacatcaatcctcagactactatattttttgatgacagcgtcaggaacatccaggccgggaagcaaatcggaatgcacactgtcctggttggaacttctgaaaagattaaaggtgctgaccatgccttggaaagcctccacaacatgaaggaagcgtttccagaactgtgggaggaggctgtgaaggatgaggacgtcaggaaatcgagcaaagttggaatcgagacatcggtgatcgcttaaaatccctcatgaactgactcatggttttgggcaaagggcacatgagacgaccagatccagtatctgtttgtctgacagtagacatgctgattagaccaagagaaaattgttgtaatcgttaagggaactgatgccactttcgttatgtttgtcccttgtaataagaaataaaatgttctgaacctcgctgtaactccgttcacggggcaatagacctgctatgctagtactatttg

SEQ ID NO: 64823 - protein, 368 aa, Triticum aestivum
  peptide (1)..(368): Ceres Seq. ID no. 13503554
  misc_feature (103)..(321): Pfam Name: haloacid dehalogenase-like hydrolase Pfam Description: haloacid dehalogenase-like hydrolase
  misc_feature (100)..(368): Homolog of NCBI NO: 8885554 NR Description: ripening-related protein-like; hydrolase-like
  misc_feature (103)..(364): Homolog of NCBI NO: 21618155 NR Description: putative ripening-related protein-like
  misc_feature (103)..(364): Homolog of NCBI NO: 30697236 NR Description: haloacid dehalogenase-like hydrolase family
  misc_feature (103)..(364): Homolog of NCBI NO: 30697234 NR Description: haloacid dehalogenase-like hydrolase family
  misc_feature (93)..(368): Homolog of NCBI NO: 21593165 NR Description: unknown [Arabidopsis thaliana]
  misc_feature (93)..(368): Homolog of NCBI NO: 15241720 NR Description: haloacid dehalogenase-like hydrolase family
  misc_feature (235)..(368): Homolog of NCBI NO: 7406669 NR Description: putative ripening-related protein [Vitis vinifera]
  misc_feature (93)..(238): Homolog of NCBI NO: 7406669 NR Description: putative ripening-related protein [Vitis vinifera]
  misc_feature (270)..(368): Homolog of NCBI NO: 34906034 NR Description: P0518C01.30 [Oryza sativa (japonica
  misc_feature (92)..(241): Homolog of NCBI NO: 34906034 NR Description: P0518C01.30 [Oryza sativa (japonica
FRYQTSPSSQLPPPSTHAADAPPPVRSTYTSALAIPHFLPPQPAIFRPHRDGSHPRASASAVSARCHLLRSLRAGQLIFLIGRPVEMGHEGAKYGDDGRPTCDCLLFDLDDTLYPVGSGIGLDVMKNIQEYMVEKLGIDKSISHELCILLYKQYGTTMAGLRAVGYQFDYDDFHGFVHGRLAYEKLKPDPVLRNILLSLPIRKLVFTNGDRLHASRAMKRLGIEDCFEGVLCFETLNPPSPTPAPASKVEIFDIMKHLAHPEPGVELPRSPILCKPNIDAMLHALKLADINPQTTIFFDDSVRNIQAGKQIGMHTVLVGTSEKIKGADHALESLHNMKEAFPELWEEAVKDEDVRKSSKVGIETSVIA

SEQ ID NO: 64824 - protein, 282 aa, Triticum aestivum
  peptide (1)..(282): Ceres Seq. ID no. 13503555
  misc_feature (17)..(235): Pfam Name: haloacid dehalogenase-like hydrolase Pfam Description: haloacid dehalogenase-like hydrolase
  misc_feature (14)..(282): Homolog of NCBI NO: 8885554 NR Description: ripening-related protein-like; hydrolase-like
  misc_feature (17)..(278): Homolog of NCBI NO: 21618155 NR Description: putative ripening-related protein-like
  misc_feature (17)..(278): Homolog of NCBI NO: 30697236 NR Description: haloacid dehalogenase-like hydrolase family
  misc_feature (17)..(278): Homolog of NCBI NO: 30697234 NR Description: haloacid dehalogenase-like hydrolase family
  misc_feature (7)..(282): Homolog of NCBI NO: 21593165 NR Description: unknown [Arabidopsis thaliana]
  misc_feature (7)..(282): Homolog of NCBI NO: 15241720 NR Description: haloacid dehalogenase-like hydrolase family
  misc_feature (149)..(282): Homolog of NCBI NO: 7406669 NR Description: putative ripening-related protein [Vitis vinifera]
  misc_feature (7)..(152): Homolog of NCBI NO: 7406669 NR Description: putative ripening-related protein [Vitis vinifera]
  misc_feature (184)..(282): Homolog of NCBI NO: 34906034 NR Description: P0518C01.30 [Oryza sativa (japonica
  misc_feature (6)..(155): Homolog of NCBI NO: 34906034 NR Description: P0518C01.30 [Oryza sativa (japonica
MGHEGAKYGDDGRPTCDCLLFDLDDTLYPVGSGIGLDVMKNIQEYMVEKLGIDKSISHELCILLYKQYGTTMAGLRAVGYQFDYDDFHGFVHGRLAYEKLKPDPVLRNILLSLPIRKLVFTNGDRLHASRAMKRLGIEDCFEGVLCFETLNPPSPTPAPASKVEIFDIMKHLAHPEPGVELPRSPILCKPNIDAMLHALKLADINPQTTIFFDDSVRNIQAGKQIGMHTVLVGTSEKIKGADHALESLHNMKEAFPELWEEAVKDEDVRKSSKVGIETSVIA

SEQ ID NO: 64825 - protein, 244 aa, Triticum aestivum
  peptide (1)..(244): Ceres Seq. ID no. 13503556
  misc_feature (1)..(197): Pfam Name: haloacid dehalogenase-like hydrolase Pfam Description: haloacid dehalogenase-like hydrolase
  misc_feature (1)..(244): Homolog of NCBI NO: 8885554 NR Description: ripening-related protein-like; hydrolase-like
  misc_feature (1)..(240): Homolog of NCBI NO: 21618155 NR Description: putative ripening-related protein-like
  misc_feature (1)..(240): Homolog of NCBI NO: 30697236 NR Description: haloacid dehalogenase-like hydrolase family
  misc_feature (1)..(240): Homolog of NCBI NO: 30697234 NR Description: haloacid dehalogenase-like hydrolase family
  misc_feature (1)..(244): Homolog of NCBI NO: 21593165 NR Description: unknown [Arabidopsis thaliana]
  misc_feature (1)..(244): Homolog of NCBI NO: 15241720 NR Description: haloacid dehalogenase-like hydrolase family
  misc_feature (111)..(244): Homolog of NCBI NO: 7406669 NR Description: putative ripening-related protein [Vitis vinifera]
  misc_feature (1)..(114): Homolog of NCBI NO: 7406669 NR Description: putative ripening-related protein [Vitis vinifera]
  misc_feature (146)..(244): Homolog of NCBI NO: 34906034 NR Description: P0518C01.30 [Oryza sativa (japonica
  misc_feature (1)..(117): Homolog of NCBI NO: 34906034 NR Description: P0518C01.30 [Oryza sativa (japonica
MKNIQEYMVEKLGIDKSISHELCILLYKQYGTTMAGLRAVGYQFDYDDFHGFVHGRLAYEKLKPDPVLRNILLSLPIRKLVFTNGDRLHASRAMKRLGIEDCFEGVLCFETLNPPSPTPAPASKVEIFDIMKHLAHPEPGVELPRSPILCKPNIDAMLHALKLADINPQTTIFFDDSVRNIQAGKQIGMHTVLVGTSEKIKGADHALESLHNMKEAFPELWEEAVKDEDVRKSSKVGIETSVIA

SEQ ID NO: 64826 - DNA, 1896 bp, Triticum aestivum
  misc_feature (1)..(1896): Ceres Seq. ID no. 15169643
atcgcgtcacatccgagggaggcaaaaccctaggcagatccctcccgaagcctaccgcgaccttccgcccccggaggagatgcagggcggcaaccacatgctcctcgaggagcccgtccgcctcgcctccgtcctcgcccccgccaagcccaaagttttcccatccctcactaagattgttgggacgcttgggcccaactcgcactcagtcgaagtgattgaagaatgtctcactgctgggatgtcagttgcgcggtttgatttctcttggaaggatgctacttatcatcaggagaccctcgacaatctgaggaaagcggcacagaatgtgaagaagttatgtcctataatgctggatacagtgggtccagaaattcaggttcacaattcaactggtggagcaatcgagttgataggggggaatcatgtcacaataacaccagatctttctaaagctccttcggctgatatcctaccaattaaatttggcgatcttgcaaaagttgtgaagaagggtgatactcttttcattggtcaatatcttttcacaggaagtgaaacaacatctctatggcttgaagttacggagacttctggtgcagaagtgatttgttacgtgaagaacacagctacactgtcagggcccattttcactctgcatgtttcacaagtacatatcagtatgcccactttgagtgaatatgataaacaggtcatatcaacgtgggggctgcaaaacagtgttgacattatatcgctttcccatacccgctcttctgaagatgtcagggagcttagagcctttttaaaatctcatgatcttcaagacacacagatatatgcgaaggttgaaaatgctgagggtttggagcattttgatgaaattctccaagaggcggatggtatcatcatatcgcgaggagacctgggaattgacctcccaccagagagggtgttcatgtcccaaaagactggtattcataaatgcaacatggccggcaaacctgtgatcattactagagttgtggacagcatgattgacaatctgcgccctactcgcgcagaagctactgatgttgcaaatgctgtcctagatggaactgatggcattttgctcggtgcggagacacttcgagggcagtatcctgttgacgctgtgcgtactgtgggcagaatatgtgcagaagctgagaccgtgtataaccagtcacttcacttcaagaaagtagtgaggcatgtaggtgaaccaatggtccatgaagaatctgtggcatcatcagcggttcgttctgcaatgaaggtaaaagctgctgcaattgttgtgttcaccttctcggggagagctgctaggttaattgctaaatacagggccccaatgccagttttagcagttgtgttcccgcgtgagggctctgatccatcgaagtggcgttcttatggcacgacacaggcgaggcaatgtttttctgtgagaggtgtctaccctttgatggggagtactgacgatgctgaaactggtgggctcaccaaggaagaatacgggataaaacttgcactgaactatggccggtcagtaggcataataaagccatacgacagggtgattatttttgaaaagatcggtgattcctctgttgtcaagatcatcgagtgcgacgattctgaaagatgaatgacccttctcaggcaacagtttcaactatacgcctgagattgcctcctctttttgttctccattcactttgaccagagataaaagagtagtatagcacgacaaggttgtcatgtttagcaccttggtattttagatttacatacttgttgccctaataaagtgaagagagctcattcactcaaacatccaagttttggacaaaattataggattgttgagat

SEQ ID NO: 64827 - protein, 556 aa, Triticum aestivum
  peptide (1)..(556): Ceres Seq. ID no. 15169644
  misc_feature (421)..(550): Pfam Name: Pyruvate kinase, alpha/beta domain Pfam Description: Pyruvate kinase, alpha/beta domain
  misc_feature (81)..(553): Homolog of NCBI NO: 25287747 NR Description: probable pyruvate kinase [imported] - Arabidopsis
  misc_feature (64)..(553): Homolog of NCBI NO: 20562907 NR Description: pyruvate kinase-like [Deschampsia antarctica]
  misc_feature (41)..(553): Homolog of NCBI NO: 11260409 NR Description: pyruvate kinase-like protein - Arabidopsis
  misc_feature (31)..(553): Homolog of NCBI NO: 23308151 NR Description: At2g36580/F1O11.21 [Arabidopsis thaliana]
  misc_feature (31)..(553): Homolog of NCBI NO: 18409740 NR Description: pyruvate kinase, putative [Arabidopsis thaliana]
  misc_feature (31)..(553): Homolog of NCBI NO: 21537122 NR Description: putative pyruvate kinase [Arabidopsis thaliana]
  misc_feature (31)..(553): Homolog of NCBI NO: 18404169 NR Description: pyruvate kinase, putative [Arabidopsis thaliana]
SRHIRGRQNPRQIPPEAYRDLPPPEEMQGGNHMLLEEPVRLASVLAPAKPKVFPSLTKIVGTLGPNSHSVEVIEECLTAGMSVARFDFSWKDATYHQETLDNLRKAAQNVKKLCPIMLDTVGPEIQVHNSTGGAIELIGGNHVTITPDLSKAPSADILPIKFGDLAKVVKKGDTLFIGQYLFTGSETTSLWLEVTETSGAEVICYVKNTATLSGPIFTLHVSQVHISMPTLSEYDKQVISTWGLQNSVDIISLSHTRSSEDVRELRAFLKSHDLQDTQIYAKVENAEGLEHFDEILQEADGIIISRGDLGIDLPPERVFMSQKTGIHKCNMAGKPVIITRVVDSMIDNLRPTRAEATDVANAVLDGTDGILLGAETLRGQYPVDAVRTVGRICAEAETVYNQSLHFKKVVRHVGEPMVHEESVASSAVRSAMKVKAAAIVVFTFSGRAARLIAKYRAPMPVLAVVFPREGSDPSKWRSYGTTQARQCFSVRGVYPLMGSTDDAETGGLTKEEYGIKLALNYGRSVGIIKPYDRVIIFEKIGDSSVVKIIECDDSER

SEQ ID NO: 64828 - protein, 530 aa, Triticum aestivum
  peptide (1)..(530): Ceres Seq. ID no. 15169645
  misc_feature (395)..(524): Pfam Name: Pyruvate kinase, alpha/beta domain Pfam Description: Pyruvate kinase, alpha/beta domain
  misc_feature (55)..(527): Homolog of NCBI NO: 25287747 NR Description: probable pyruvate kinase [imported] - Arabidopsis
  misc_feature (38)..(527): Homolog of NCBI NO: 20562907 NR Description: pyruvate kinase-like [Deschampsia antarctica]
  misc_feature (15)..(527): Homolog of NCBI NO: 11260409 NR Description: pyruvate kinase-like protein - Arabidopsis
  misc_feature (5)..(527): Homolog of NCBI NO: 23308151 NR Description: At2g36580/F1O11.21 [Arabidopsis thaliana]
  misc_feature (5)..(527): Homolog of NCBI NO: 18409740 NR Description: pyruvate kinase, putative [Arabidopsis thaliana]
  misc_feature (5)..(527): Homolog of NCBI NO: 21537122 NR Description: putative pyruvate kinase [Arabidopsis thaliana]
  misc_feature (5)..(527): Homolog of NCBI NO: 18404169 NR Description: pyruvate kinase, putative [Arabidopsis thaliana]
MQGGNHMLLEEPVRLASVLAPAKPKVFPSLTKIVGTLGPNSHSVEVIEECLTAGMSVARFDFSWKDATYHQETLDNLRKAAQNVKKLCPIMLDTVGPEIQVHNSTGGAIELIGGNHVTITPDLSKAPSADILPIKFGDLAKVVKKGDTLFIGQYLFTGSETTSLWLEVTETSGAEVICYVKNTATLSGPIFTLHVSQVHISMPTLSEYDKQVISTWGLQNSVDIISLSHTRSSEDVRELRAFLKSHDLQDTQIYAKVENAEGLEHFDEILQEADGIIISRGDLGIDLPPERVFMSQKTGIHKCNMAGKPVIITRVVDSMIDNLRPTRAEATDVANAVLDGTDGILLGAETLRGQYPVDAVRTVGRICAEAETVYNQSLHFKKVVRHVGEPMVHEESVASSAVRSAMKVKAAAIVVFTFSGRAARLIAKYRAPMPVLAVVFPREGSDPSKWRSYGTTQARQCFSVRGVYPLMGSTDDAETGGLTKEEYGIKLALNYGRSVGIIKPYDRVIIFEKIGDSSVVKIIECDDSER

SEQ ID NO: 64829 - protein, 524 aa, Triticum aestivum
  peptide (1)..(524): Ceres Seq. ID no. 15169646
  misc_feature (389)..(518): Pfam Name: Pyruvate kinase, alpha/beta domain Pfam Description: Pyruvate kinase, alpha/beta domain
  misc_feature (49)..(521): Homolog of NCBI NO: 25287747 NR Description: probable pyruvate kinase [imported] - Arabidopsis
  misc_feature (32)..(521): Homolog of NCBI NO: 20562907 NR Description: pyruvate kinase-like [Deschampsia antarctica]
  misc_feature (9)..(521): Homolog of NCBI NO: 11260409 NR Description: pyruvate kinase-like protein - Arabidopsis
  misc_feature (1)..(521): Homolog of NCBI NO: 23308151 NR Description: At2g36580/F1O11.21 [Arabidopsis thaliana]
  misc_feature (1)..(521): Homolog of NCBI NO: 18409740 NR Description: pyruvate kinase, putative [Arabidopsis thaliana]
  misc_feature (1)..(521): Homolog of NCBI NO: 21537122 NR Description: putative pyruvate kinase [Arabidopsis thaliana]
  misc_feature (1)..(521): Homolog of NCBI NO: 18404169 NR Description: pyruvate kinase, putative [Arabidopsis thaliana]
MLLEEPVRLASVLAPAKPKVFPSLTKIVGTLGPNSHSVEVIEECLTAGMSVARFDFSWKDATYHQETLDNLRKAAQNVKKLCPIMLDTVGPEIQVHNSTGGAIELIGGNHVTITPDLSKAPSADILPIKFGDLAKVVKKGDTLFIGQYLFTGSETTSLWLEVTETSGAEVICYVKNTATLSGPIFTLHVSQVHISMPTLSEYDKQVISTWGLQNSVDIISLSHTRSSEDVRELRAFLKSHDLQDTQIYAKVENAEGLEHFDEILQEADGIIISRGDLGIDLPPERVFMSQKTGIHKCNMAGKPVIITRVVDSMIDNLRPTRAEATDVANAVLDGTDGILLGAETLRGQYPVDAVRTVGRICAEAETVYNQSLHFKKVVRHVGEPMVHEESVASSAVRSAMKVKAAAIVVFTFSGRAARLIAKYRAPMPVLAVVFPREGSDPSKWRSYGTTQARQCFSVRGVYPLMGSTDDAETGGLTKEEYGIKLALNYGRSVGIIKPYDRVIIFEKIGDSSVVKIIECDDSER

SEQ ID NO: 64830 - DNA, 900 bp, Triticum aestivum
  misc_feature (1)..(900): Ceres Seq. ID no. 13584899
ccctggcaagcttatcggcaatggcggaaccggtgaagctcatcggcgccttcggcagcccgttcgtccaccgcgccgaggtggccctgcgcctcaagggcgtcccattcgagctcatccttgaagacctcaacaacaagagtgagctgctgctgaagcacaaccccatccacaagacggtgccggtgctcctccatggtgaccggccggccgtcttagagtccctcctcatcgtcgagtatgtggatgaggctttcgacggcccgccgctcctccccgtcgacccctacgggagggccatggctcgcttctgggcccaattcatcgagcaaaagtgctcgaggccgttctggatggcggtgtggttggacgacggggaggcgcgggaggggttcgtgagggacaccaaggagaatctggcgctgctggatgcgcggctgcaggggaagcggttcttcgccggcgacgccgttgggtacctggacctggcggcctgcgggctggcgcacctgctgggcgtgatcgaggaggtggccggggcgagcattgttggcgcgggcgagttccccgcactgcgccggtgggcggaggactacacctccgacgcgaccgtcgccgcgtgcctaccgcggagggagcagctcgccgcacacttcgccgggaagaaggaccgaatcaagctcgccgtcagcgcgatggtggggcgggcgtagttgtcagtttggggcatcgatcaacacagcaggcgtcggcaaaatattcagattacgtactgtattatgatttgtgatttgtctgttatgtgtgtgttccctatggtgcgtatactaaaataaaattcatattagtatttgttgcaacgaaatttatgtcaaattatagtcaaaagtacggaattgc

SEQ ID NO: 64831 - protein, 236 aa, Triticum aestivum
  peptide (1)..(236): Ceres Seq. ID no. 13584900
  misc_feature (11)..(83): Pfam Name: Glutathione S-transferase, N-terminal domain Pfam Description: Glutathione S-transferase, N-terminal domain
  misc_feature (8)..(232): Homolog of NCBI NO: 19386816 NR Description: putative glutathione S-transferase GST 24
  misc_feature (7)..(231): Homolog of NCBI NO: 4468798 NR Description: GST7 protein [Zea mays]
  misc_feature (11)..(231): Homolog of NCBI NO: 19386820 NR Description: putative glutathione S-transferase GST 24
  misc_feature (7)..(233): Homolog of NCBI NO: 19386819 NR Description: putative glutathione S-transferase GST 24
  misc_feature (10)..(235): Homolog of NCBI NO: 19386822 NR Description: putative glutathione S-transferase GST 24
  misc_feature (11)..(232): Homolog of NCBI NO: 11385509 NR Description: glutathione S-transferase GST 29 [Zea mays]
  misc_feature (7)..(233): Homolog of NCBI NO: 34896730 NR Description: putative glutathione transferase
  misc_feature (1)..(235): Homolog of NCBI NO: 13699857 NR Description: glutathione S-transferase GST 24 [Zea mays]
  misc_feature (7)..(233): Homolog of NCBI NO: 19386818 NR Description: putative glutathione S-transferase GST 24
  misc_feature (11)..(231): Homolog of NCBI NO: 11385507 NR Description: glutathione S-transferase GST 28 [Zea mays]
LASLSAMAEPVKLIGAFGSPFVHRAEVALRLKGVPFELILEDLNNKSELLLKHNPIHKTVPVLLHGDRPAVLESLLIVEYVDEAFDGPPLLPVDPYGRAMARFWAQFIEQKCSRPFWMAVWLDDGEAREGFVRDTKENLALLDARLQGKRFFAGDAVGYLDLAACGLAHLLGVIEEVAGASIVGAGEFPALRRWAEDYTSDATVAACLPRREQLAAHFAGKKDRIKLAVSAMVGRA

SEQ ID NO: 64832 - protein, 230 aa, Triticum aestivum
  peptide (1)..(230): Ceres Seq. ID no. 13584901
  misc_feature (5)..(77): Pfam Name: Glutathione S-transferase, N-terminal domain Pfam Description: Glutathione S-transferase, N-terminal domain
  misc_feature (2)..(226): Homolog of NCBI NO: 19386816 NR Description: putative glutathione S-transferase GST 24
  misc_feature (1)..(225): Homolog of NCBI NO: 4468798 NR Description: GST7 protein [Zea mays]
  misc_feature (5)..(225): Homolog of NCBI NO: 19386820 NR Description: putative glutathione S-transferase GST 24
  misc_feature (1)..(227): Homolog of NCBI NO: 19386819 NR Description: putative glutathione S-transferase GST 24
  misc_feature (4)..(229): Homolog of NCBI NO: 19386822 NR Description: putative glutathione S-transferase GST 24
  misc_feature (5)..(226): Homolog of NCBI NO: 11385509 NR Description: glutathione S-transferase GST 29 [Zea mays]
  misc_feature (1)..(227): Homolog of NCBI NO: 34896730 NR Description: putative glutathione transferase
  misc_feature (1)..(229): Homolog of NCBI NO: 13699857 NR Description: glutathione S-transferase GST 24 [Zea mays]
  misc_feature (1)..(227): Homolog of NCBI NO: 19386818 NR Description: putative glutathione S-transferase GST 24
  misc_feature (5)..(225): Homolog of NCBI NO: 11385507 NR Description: glutathione S-transferase GST 28 [Zea mays]
MAEPVKLIGAFGSPFVHRAEVALRLKGVPFELILEDLNNKSELLLKHNPIHKTVPVLLHGDRPAVLESLLIVEYVDEAFDGPPLLPVDPYGRAMARFWAQFIEQKCSRPFWMAVWLDDGEAREGFVRDTKENLALLDARLQGKRFFAGDAVGYLDLAACGLAHLLGVIEEVAGASIVGAGEFPALRRWAEDYTSDATVAACLPRREQLAAHFAGKKDRIKLAVSAMVGRA

SEQ ID NO: 64833 - protein, 137 aa, Triticum aestivum
  peptide (1)..(137): Ceres Seq. ID no. 13584902
  misc_feature (1)..(133): Homolog of NCBI NO: 19386816 NR Description: putative glutathione S-transferase GST 24
  misc_feature (1)..(132): Homolog of NCBI NO: 4468798 NR Description: GST7 protein [Zea mays]
  misc_feature (1)..(132): Homolog of NCBI NO: 19386820 NR Description: putative glutathione S-transferase GST 24
  misc_feature (1)..(134): Homolog of NCBI NO: 19386819 NR Description: putative glutathione S-transferase GST 24
  misc_feature (1)..(136): Homolog of NCBI NO: 19386822 NR Description: putative glutathione S-transferase GST 24
  misc_feature (1)..(133): Homolog of NCBI NO: 11385509 NR Description: glutathione S-transferase GST 29 [Zea mays]
  misc_feature (1)..(134): Homolog of NCBI NO: 34896730 NR Description: putative glutathione transferase
  misc_feature (1)..(136): Homolog of NCBI NO: 13699857 NR Description: glutathione S-transferase GST 24 [Zea mays]
  misc_feature (1)..(134): Homolog of NCBI NO: 19386818 NR Description: putative glutathione S-transferase GST 24
  misc_feature (1)..(132): Homolog of NCBI NO: 11385507 NR Description: glutathione S-transferase GST 28 [Zea mays]
MARFWAQFIEQKCSRPFWMAVWLDDGEAREGFVRDTKENLALLDARLQGKRFFAGDAVGYLDLAACGLAHLLGVIEEVAGASIVGAGEFPALRRWAEDYTSDATVAACLPRREQLAAHFAGKKDRIKLAVSAMVGRA

SEQ ID NO: 64834 - DNA, 1890 bp, Triticum aestivum
  misc_feature (1)..(1890): Ceres Seq. ID no. 13503498
cctaatcgaaaaccacgagcggaggcacgtgagcgctgcgcgaagaggaggactcgcagccgcctccaccctcctctgctgatccaatcaggtcaacgcgtgcgccccctccctcctctgctgcggctgctgcggcttagatctccctcttcaatctggagagataggaggattctgagaagcaaaccgagtgggactcctcgaatcaagtccgtgccttcatcagcaaaagaatccccgagtgcccaatccaatacagttcttcgcgtattcgaatcagattatgaagtccggcggtacacctgagaataatcggactgtcgccgaagctccgtatcttcctcctccggcattgggtctttttaagtcgtccaagattgattttgcctatatggaggcctgtagcctagcctggacaatgagcttatggagtctagctatacacccagcatatctgtgctcgctagttctcagagctttgcctaggctgctacgcctcactccaagttcactgaagaaattctgcaagcatcctccactgatcaagactatggagggcgcatcgcctgagctgcctcaggacatcttgatgagcatcttggccaccctcgagatccctgacctcatccgtgccgggtcggtctgctcctcatggcgctccacgtacttgaggctgcgcagccttgggcactacacgcgcccccagacgccgtgcctcctctacacatctgaatctgctggcgagagcgttgcttgcctctacagcctcgcggagaagcggacgtacaagctgactcttccagggccgcctatcagaaataggcatctgattgggtcctcgcaaggcttgcttgttacagttgatgacagatctgagatgcaccttgtcaatcccatcactggtgaacagattgatctcccttcggtgatcaccatcgagcatgtgaaacccagctataatgactccggtgctcttcaccagtacgagtactcatgccacaccgcaaaaagggtttacggtccgccatcgatcttggctcttggagagctgaggaacaagctccactataaagcttttgtgttttctgatgcatgcaatggatacattgtggcgctcatacacaatccagccagtcagctctcggttgcaagggcaggggatgatagttggatatggctgccaccatacaccaactatgacgattgcatttacaagaacggcctgctgtacgcagtcacttcatatggacaaattcacgcttttgacctaagtagccctgttgtcacgatgaagatgattacacgggagccagagcctgatgaccggtttctgaatacttacattgtacaagctccatggggcaatcttcttcaggtgtggagattatatgagcactgtgatttagaacccgagcctggggcatctgtgttttggagcactggaaaattcaaaatatatgaagtcgatgcttcttcaggagagaaaattaagaaaaccagttgcttgcgcgaccatgtgttgtttcttgggcacaatcaatcactttgtcttgctgctcaagactatccggctctcaagggaaaccatgcctactttaccgatgacagtgtgctttggacaaggggattcaagaacagtccccgtgatatgggaattctcgacttgggtaataacagcagggaggaacttgtgtcttcccagctttgctccaactgcccagctccggtgtggattacacccaatcttagaaagatgaacttggcattcaatgaataggttttagcttcctttatctataattatatgtaataattatttagtttggtaggcggtggtcctgtgttgatgaaccctgtactcgtacacttgaaccactttttaagaagttc

SEQ ID NO: 64835 - protein, 497 aa, Triticum aestivum
  peptide (1)..(497): Ceres Seq. ID no. 15223233
  misc_feature (90)..(486): Homolog of NCBI NO: 13937296 NR Description: unknown protein [Oryza sativa]
  misc_feature (139)..(443): Homolog of NCBI NO: 38345140 NR Description: OSJNBb0050N09.7 [Oryza sativa (japonica
  misc_feature (201)..(486): Homolog of NCBI NO: 34905340 NR Description: OJ9990_A01.18 [Oryza sativa (japonica
  misc_feature (93)..(488): Homolog of NCBI NO: 34915188 NR Description: unknown protein [Oryza sativa (japonica
  misc_feature (139)..(489): Homolog of NCBI NO: 38345136 NR Description: OSJNBb0050N09.2 [Oryza sativa (japonica
  misc_feature (96)..(222): Homolog of NCBI NO: 34894778 NR Description: P0537A05.16 [Oryza sativa (japonica
  misc_feature (97)..(373): Homolog of NCBI NO: 34905340 NR Description: OJ9990_A01.18 [Oryza sativa (japonica
  misc_feature (269)..(441): Homolog of NCBI NO: 34905018 NR Description: P0456B03.17 [Oryza sativa (japonica
  misc_feature (96)..(269): Homolog of NCBI NO: 34905018 NR Description: P0456B03.17 [Oryza sativa (japonica
  misc_feature (23)..(493): Homolog of NCBI NO: 29150381 NR Description: hypothetical protein [Oryza sativa (japonica
MKSGGTPENNRTVAEAPYLPPPALGLFKSSKIDFAYMEACSLAWTMSLWSLAIHPAYLCSLVLRALPRLLRLTPSSLKKFCKHPPLIKTMEGASPELPQDILMSILATLEIPDLIRAGSVCSSWRSTYLRLRSLGHYTRPQTPCLLYTSESAGESVACLYSLAEKRTYKLTLPGPPIRNRHLIGSSQGLLVTVDDRSEMHLVNPITGEQIDLPSVITIEHVKPSYNDSGALHQYEYSCHTAKRVYGPPSILALGELRNKLHYKAFVFSDACNGYIVALIHNPASQLSVARAGDDSWIWLPPYTNYDDCIYKNGLLYAVTSYGQIHAFDLSSPVVTMKMITREPEPDDRFLNTYIVQAPWGNLLQVWRLYEHCDLEPEPGASVFWSTGKFKIYEVDASSGEKIKKTSCLRDHVLFLGHNQSLCLAAQDYPALKGNHAYFTDDSVLWTRGFKNSPRDMGILDLGNNSREELVSSQLCSNCPAPVWITPNLRKMNLAFNE

SEQ ID NO: 64836 - protein, 461 aa, Triticum aestivum
  peptide (1)..(461): Ceres Seq. ID no. 15223234
  misc_feature (54)..(450): Homolog of NCBI NO: 13937296 NR Description: unknown protein [Oryza sativa]
  misc_feature (103)..(407): Homolog of NCBI NO: 38345140 NR Description: OSJNBb0050N09.7 [Oryza sativa (japonica
  misc_feature (165)..(450): Homolog of NCBI NO: 34905340 NR Description: OJ9990_A01.18 [Oryza sativa (japonica
  misc_feature (57)..(452): Homolog of NCBI NO: 34915188 NR Description: unknown protein [Oryza sativa (japonica
  misc_feature (103)..(453): Homolog of NCBI NO: 38345136 NR Description: OSJNBb0050N09.2 [Oryza sativa (japonica
  misc_feature (60)..(186): Homolog of NCBI NO: 34894778 NR Description: P0537A05.16 [Oryza sativa (japonica
  misc_feature (61)..(337): Homolog of NCBI NO: 34905340 NR Description: OJ9990_A01.18 [Oryza sativa (japonica
  misc_feature (233)..(405): Homolog of NCBI NO: 34905018 NR Description: P0456B03.17 [Oryza sativa (japonica
  misc_feature (60)..(233): Homolog of NCBI NO: 34905018 NR Description: P0456B03.17 [Oryza sativa (japonica
  misc_feature (1)..(457): Homolog of NCBI NO: 29150381 NR Description: hypothetical protein [Oryza sativa (japonica
MEACSLAWTMSLWSLAIHPAYLCSLVLRALPRLLRLTPSSLKKFCKHPPLIKTMEGASPELPQDILMSILATLEIPDLIRAGSVCSSWRSTYLRLRSLGHYTRPQTPCLLYTSESAGESVACLYSLAEKRTYKLTLPGPPIRNRHLIGSSQGLLVTVDDRSEMHLVNPITGEQIDLPSVITIEHVKPSYNDSGALHQYEYSCHTAKRVYGPPSILALGELRNKLHYKAFVFSDACNGYIVALIHNPASQLSVARAGDDSWIWLPPYTNYDDCIYKNGLLYAVTSYGQIHAFDLSSPVVTMKMITREPEPDDRFLNTYIVQAPWGNLLQVWRLYEHCDLEPEPGASVFWSTGKFKIYEVDASSGEKIKKTSCLRDHVLFLGHNQSLCLAAQDYPALKGNHAYFTDDSVLWTRGFKNSPRDMGILDLGNNSREELVSSQLCSNCPAPVWITPNLRKMNLAFNE

SEQ ID NO: 64837 - protein, 452 aa, Triticum aestivum
  peptide (1)..(452): Ceres Seq. ID no. 15223235
  misc_feature (45)..(441): Homolog of NCBI NO: 13937296 NR Description: unknown protein [Oryza sativa]
  misc_feature (94)..(398): Homolog of NCBI NO: 38345140 NR Description: OSJNBb0050N09.7 [Oryza sativa (japonica
  misc_feature (156)..(441): Homolog of NCBI NO: 34905340 NR Description: OJ9990_A01.18 [Oryza sativa (japonica
  misc_feature (48)..(443): Homolog of NCBI NO: 34915188 NR Description: unknown protein [Oryza sativa (japonica
  misc_feature (94)..(444): Homolog of NCBI NO: 38345136 NR Description: OSJNBb0050N09.2 [Oryza sativa (japonica
  misc_feature (51)..(177): Homolog of NCBI NO: 34894778 NR Description: P0537A05.16 [Oryza sativa (japonica
  misc_feature (52)..(328): Homolog of NCBI NO: 34905340 NR Description: OJ9990_A01.18 [Oryza sativa (japonica
  misc_feature (224)..(396): Homolog of NCBI NO: 34905018 NR Description: P0456B03.17 [Oryza sativa (japonica
  misc_feature (51)..(224): Homolog of NCBI NO: 34905018 NR Description: P0456B03.17 [Oryza sativa (japonica
  misc_feature (1)..(448): Homolog of NCBI NO: 29150381 NR Description: hypothetical protein [Oryza sativa (japonica
MSLWSLAIHPAYLCSLVLRALPRLLRLTPSSLKKFCKHPPLIKTMEGASPELPQDILMSILATLEIPDLIRAGSVCSSWRSTYLRLRSLGHYTRPQTPCLLYTSESAGESVACLYSLAEKRTYKLTLPGPPIRNRHLIGSSQGLLVTVDDRSEMHLVNPITGEQIDLPSVITIEHVKPSYNDSGALHQYEYSCHTAKRVYGPPSILALGELRNKLHYKAFVFSDACNGYIVALIHNPASQLSVARAGDDSWIWLPPYTNYDDCIYKNGLLYAVTSYGQIHAFDLSSPVVTMKMITREPEPDDRFLNTYIVQAPWGNLLQVWRLYEHCDLEPEPGASVFWSTGKFKIYEVDASSGEKIKKTSCLRDHVLFLGHNQSLCLAAQDYPALKGNHAYFTDDSVLWTRGFKNSPRDMGILDLGNNSREELVSSQLCSNCPAPVWITPNLRKMNLAFNE

SEQ ID NO: 64838 - DNA, 1574 bp, Triticum aestivum
  misc_feature (1)..(1574): Ceres Seq. ID no. 12618349
ccctactccctactctctcctactccttccccttcctactccactgacggacgggactcggccttcttcttgccttcctctcccccctcccccctcccgccgccgccttcctccgccggggctggttcagctactaactgcggccgggggaaggagaaaggccgcgtctttcccggccacctttcggctcgcccccagcccacgcgggagccggattgggatggagtcggcggccggcggcgggctgggcagcatgcgcgcggtgctcgccatcctccagtggtggggcttcaacgtcaccgtcatcatcatcaacaaatggatcttccagaagctggatttcaagttccccctgacggtgtcctgcgtccacttcatatgctcttccatcggggcatacgtcgcgatccacgtgctcaaggcgaagccgctgattcaggtcgagcccgaggaccgctggaagaggatcttccccatgtccttcgtgttctgcatgaacatcgtgctcgggaacgtcagcctgcgctacatcccggtctccttcatgcagactatcaaatcgttcacccctgcaaccacagttattctgcagtggttggtttggagcaagcacttcgagtggcgcatatgggcttcgctggtcccgatagtcggggggatcctcctaacctcaatgacagagctcagcttcaacatttttggtttctgtgctgccatgattggctgcctcgccacgtctaccaagaccatcttggcagagtccctgctccatggatacaaatttgacagcattaacacagtgtactacatggcaccctttgccaccatgatactggctctaccagcaatgttgcttgaaggaggtggcgtaatcgactggttctacacgcacgactctgtcttttcttcgctgattatcatcctaggctcaggggtgcttgcgttttgcctcaacttctccatcttctacgtgatccattcaaccaccgctgtgaccttcaatgttgctggcaaccttaaagttgctgtcgccgtgttggtctcgtggttgatcttccggaacccaatctcccccatgaatgcaattggatgcgcaatcacgctcgtcggctgtactttctatgggtatgtgaggcatctcatctcccaacagcaggctgctgcgcccctagggagccaaggaacgaactcgccgagaagtcgggtggagatgctcccccttgtaggcgacaaggaagataaggtctagcaaggcaatactcccatattcaagagccgttcatttcagcggttgacggtacattacagtttggcacacagatgctgagttgagggaggccagtaaattggtaggggggcaacacttttttgtgaagctacattatgttgtactcgggcaaactgcgagggtttgttcagttactagttctcatagggttactagttatctacttaatcaaatccccccggacaattcgtgcgattaggatggtgcttctgttttcttgttttgctgccatatgtttagaccttaaactgctggtatgaaaattaatggcattatgatacgagcc

SEQ ID NO: 64839 - protein, 415 aa, Triticum aestivum
  peptide (1)..(415): Ceres Seq. ID no. 12618350
  misc_feature (101)..(225): Pfam Name: Integral membrane protein DUF6 Pfam Description: Integral membrane protein DUF6
  misc_feature (74)..(224): Homolog of NCBI NO: 15229717 NR Description: integral membrane protein, putative; protein id:
  misc_feature (226)..(374): Homolog of NCBI NO: 15229717 NR Description: integral membrane protein, putative; protein id:
  misc_feature (91)..(375): Homolog of NCBI NO: 17064798 NR Description: phosphate/phosphoenolpyruvate translocator-like
  misc_feature (91)..(375): Homolog of NCBI NO: 15237644 NR Description: phosphate/phosphoenolpyruvate translocator - like
  misc_feature (64)..(374): Homolog of NCBI NO: 27476065 NR Description: Putative phosphate/phosphoenolpyruvate
  misc_feature (91)..(374): Homolog of NCBI NO: 30681126 NR Description: phosphate translocator-related [Arabidopsis
  misc_feature (91)..(374): Homolog of NCBI NO: 9759107 NR Description: phosphate/phosphoenolpyruvate translocator
  misc_feature (86)..(415): Homolog of NCBI NO: 15219121 NR Description: glucose 6 phosphate/phosphate translocator,
  misc_feature (83)..(415): Homolog of NCBI NO: 18411611 NR Description: expressed protein
  misc_feature (73)..(415): Homolog of NCBI NO: 38567832 NR Description: OSJNBb0020J19.10 [Oryza sativa (japonica
PTPYSLLLLPLPTPLTDGTRPSSCLPLPPPPSRRRLPPPGLVQLLTAAGGRRKAASFPATFRLAPSPRGSRIGMESAAGGGLGSMRAVLAILQWWGFNVTVIIINKWIFQKLDFKFPLTVSCVHFICSSIGAYVAIHVLKAKPLIQVEPEDRWKRIFPMSFVFCMNIVLGNVSLRYIPVSFMQTIKSFTPATTVILQWLVWSKHFEWRIWASLVPIVGGILLTSMTELSFNIFGFCAAMIGCLATSTKTILAESLLHGYKFDSINTVYYMAPFATMILALPAMLLEGGGVIDWFYTHDSVFSSLIIILGSGVLAFCLNFSIFYVIHSTTAVTFNVAGNLKVAVAVLVSWLIFRNPISPMNAIGCAITLVGCTFYGYVRHLISQQQAAAPLGSQGTNSPRSRVEMLPLVGDKEDKV

SEQ ID NO: 64840 - protein, 342 aa, Triticum aestivum
  peptide (1)..(342): Ceres Seq. ID no. 12618351
  misc_feature (28)..(152): Pfam Name: Integral membrane protein DUF6 Pfam Description: Integral membrane protein DUF6
  misc_feature (1)..(151): Homolog of NCBI NO: 15229717 NR Description: integral membrane protein, putative; protein id:
  misc_feature (153)..(301): Homolog of NCBI NO: 15229717 NR Description: integral membrane protein, putative; protein id:
  misc_feature (18)..(302): Homolog of NCBI NO: 17064798 NR Description: phosphate/phosphoenolpyruvate translocator-like
  misc_feature (18)..(302): Homolog of NCBI NO: 15237644 NR Description: phosphate/phosphoenolpyruvate translocator - like
  misc_feature (1)..(301): Homolog of NCBI NO: 27476065 NR Description: Putative phosphate/phosphoenolpyruvate
  misc_feature (18)..(301): Homolog of NCBI NO: 30681126 NR Description: phosphate translocator-related [Arabidopsis
  misc_feature (18)..(301): Homolog of NCBI NO: 9759107 NR Description: phosphate/phosphoenolpyruvate translocator
  misc_feature (13)..(342): Homolog of NCBI NO: 15219121 NR Description: glucose 6 phosphate/phosphate translocator,
  misc_feature (10)..(342): Homolog of NCBI NO: 18411611 NR Description: expressed protein
  misc_feature (1)..(342): Homolog of NCBI NO: 38567832 NR Description: OSJNBb0020J19.10 [Oryza sativa (japonica
MESAAGGGLGSMRAVLAILQWWGFNVTVIIINKWIFQKLDFKFPLTVSCVHFICSSIGAYVAIHVLKAKPLIQVEPEDRWKRIFPMSFVFCMNIVLGNVSLRYIPVSFMQTIKSFTPATTVILQWLVWSKHFEWRIWASLVPIVGGILLTSMTELSFNIFGFCAAMIGCLATSTKTILAESLLHGYKFDSINTVYYMAPFATMILALPAMLLEGGGVIDWFYTHDSVFSSLIIILGSGVLAFCLNFSIFYVIHSTTAVTFNVAGNLKVAVAVLVSWLIFRNPISPMNAIGCAITLVGCTFYGYVRHLISQQQAAAPLGSQGTNSPRSRVEMLPLVGDKEDKV

SEQ ID NO: 64841 - protein, 331 aa, Triticum aestivum
  peptide (1)..(331): Ceres Seq. ID no. 12618352
  misc_feature (17)..(141): Pfam Name: Integral membrane protein DUF6 Pfam Description: Integral membrane protein DUF6
  misc_feature (1)..(140): Homolog of NCBI NO: 15229717 NR Description: integral membrane protein, putative; protein id:
  misc_feature (142)..(290): Homolog of NCBI NO: 15229717 NR Description: integral membrane protein, putative; protein id:
  misc_feature (7)..(291): Homolog of NCBI NO: 17064798 NR Description: phosphate/phosphoenolpyruvate translocator-like
  misc_feature (7)..(291): Homolog of NCBI NO: 15237644 NR Description: phosphate/phosphoenolpyruvate translocator - like
  misc_feature (1)..(290): Homolog of NCBI NO: 27476065 NR Description: Putative phosphate/phosphoenolpyruvate
  misc_feature (7)..(290): Homolog of NCBI NO: 30681126 NR Description: phosphate translocator-related [Arabidopsis
  misc_feature (7)..(290): Homolog of NCBI NO: 9759107 NR Description: phosphate/phosphoenolpyruvate translocator
  misc_feature (2)..(331): Homolog of NCBI NO: 15219121 NR Description: glucose 6 phosphate/phosphate translocator,
  misc_feature (1)..(331): Homolog of NCBI NO: 18411611 NR Description: expressed protein
  misc_feature (1)..(331): Homolog of NCBI NO: 38567832 NR Description: OSJNBb0020J19.10 [Oryza sativa (japonica
MRAVLAILQWWGFNVTVIIINKWIFQKLDFKFPLTVSCVHFICSSIGAYVAIHVLKAKPLIQVEPEDRWKRIFPMSFVFCMNIVLGNVSLRYIPVSFMQTIKSFTPATTVILQWLVWSKHFEWRIWASLVPIVGGILLTSMTELSFNIFGFCAAMIGCLATSTKTILAESLLHGYKFDSINTVYYMAPFATMILALPAMLLEGGGVIDWFYTHDSVFSSLIIILGSGVLAFCLNFSIFYVIHSTTAVTFNVAGNLKVAVAVLVSWLIFRNPISPMNAIGCAITLVGCTFYGYVRHLISQQQAAAPLGSQGTNSPRSRVEMLPLVGDKEDKV

SEQ ID NO: 64842 - DNA, 1236 bp, Triticum aestivum
  misc_feature (1)..(1236): Ceres Seq. ID no. 13597324
gcttgttctatagcttggccgctcgggaggtcaagccgcccgccctcccgtaaaccctatcttctcctgttccccttcgtccccggccggcgacgacgccgcgcgcgcagcgaacccagcccctcctccggttgcagtaagcaaggaaggatgagtaggcgctggagccggaccatttacgttgggaacctcccaggggatatcagggagcgggaggtggaggatctgttctacaagtatggacggatagttgaaattgacttgaaggtccccccaaggccacctggctttgcttttgttgagtttgaagatccccgtgatgctgaagatgcgattcatggtcgagatggttacaactttgatgggaatcgtctgcgggttgaacttgcacatggcgggagggccaactcttcatcccttccgaacagctatggtggcggaggacgccgtggtggtgtctctaggcatacagagtatcgtgttctggttactggactaccttcttctgcatcatgtcaagatctaaaggatcatatgagaaaggctggtgatgtttgtttctctgaggtgtatcgtggagggtggtggtactattggrattgttgattatannaactatgatgatatgaagtatgctataaggaagcttgatgatactgaatttaaaaatgccttctctcgagcgcctataagggtaaaggagtatgctggaaaaagcagccgctcctattcacgcagccgtagcagaagccgaagtggcagctacagcaggagtccaagtccaaagaaaaaaccatcacgtcgttcagcgtcaagatctcggtcgagatcagtttcttcccattcaaggtcaccgtcaaaggaacgctctccatcaagatcaccagcaaaatcccaatcccctgtcgccgcatctcccgtcgtcaatggtgaagcagcaagccccaagagggacccaagcaagagcccatcacgttcccggtctcctgatgccaaatcagagtaaaactgatgcgaggttaggggcggtgagaggcggagccatgggcttcaaattcttcatattttgtcttcgccgacttctgcatccgctgttatagtactatctgtgttcggttattctaggttccttgatgtttctgtaaaacttgtttggatggatttttgagatttatgtactctcttcattgtcagcatttttacttggattattatctatgcatggtcgttggttcg

SEQ ID NO: 64843 - protein, 201 aa, Triticum aestivum
  peptide (1)..(201): Ceres Seq. ID no. 15222073
  misc_feature (51)..(192): Homolog of NCBI NO: 5815236 NR Description: splicing factor SR1B [Arabidopsis thaliana]
  misc_feature (51)..(191): Homolog of NCBI NO: 4775270 NR Description: SF2/ASF-like splicing modulator Srp30
  misc_feature (51)..(192): Homolog of NCBI NO: 30678395 NR Description: pre-mRNA splicing factor SF2 (SR1 protein)
  misc_feature (51)..(192): Homolog of NCBI NO: 2443473 NR Description: ASF/SF2 homolog [Arabidopsis thaliana]
  misc_feature (51)..(192): Homolog of NCBI NO: 34894608 NR Description: putative pre-mRNA splicing factor SF2
  misc_feature (51)..(192): Homolog of NCBI NO: 12324445 NR Description: putative splicing factor; 53460-55514
  misc_feature (51)..(192): Homolog of NCBI NO: 2129717 NR Description: splicing factor SF-2 homolog - Arabidopsis
  misc_feature (51)..(192): Homolog of NCBI NO: 5815235 NR Description: splicing factor SR1 [Arabidopsis thaliana]
  misc_feature (51)..(192): Homolog of NCBI NO: 30678391 NR Description: pre-mRNA splicing factor SF2 (SR1 protein)
  misc_feature (48)..(194): Homolog of NCBI NO: 33146854 NR Description: putative pre-mRNA splicing factor SF2
  misc_feature (200)..(200): Xaa is any aa, unknown or other
ACSIAWPLGRSSRPPSRKPYLLLFPFVPGRRRRRARSEPSPSSGCSKQGRMSRRWSRTIYVGNLPGDIREREVEDLFYKYGRIVEIDLKVPPRPPGFAFVEFEDPRDAEDAIHGRDGYNFDGNRLRVELAHGGRANSSSLPNSYGGGGRRGGVSRHTEYRVLVTGLPSSASCQDLKDHMRKAGDVCFSEVYRGGWWYYWXC

SEQ ID NO: 64844 - protein, 151 aa, Triticum aestivum
  peptide (1)..(151): Ceres Seq. ID no. 15222074
  misc_feature (13)..(118): Homolog of NCBI NO: 5815236 NR Description: splicing factor SR1B [Arabidopsis thaliana]
  misc_feature (13)..(127): Homolog of NCBI NO: 4775270 NR Description: SF2/ASF-like splicing modulator Srp30
  misc_feature (13)..(118): Homolog of NCBI NO: 30678395 NR Description: pre-mRNA splicing factor SF2 (SR1 protein)
  misc_feature (13)..(118): Homolog of NCBI NO: 2443473 NR Description: ASF/SF2 homolog [Arabidopsis thaliana]
  misc_feature (10)..(119): Homolog of NCBI NO: 34894608 NR Description: putative pre-mRNA splicing factor SF2
  misc_feature (10)..(142): Homolog of NCBI NO: 12324445 NR Description: putative splicing factor; 53460-55514
  misc_feature (13)..(146): Homolog of NCBI NO: 2129717 NR Description: splicing factor SF-2 homolog - Arabidopsis
  misc_feature (13)..(146): Homolog of NCBI NO: 5815235 NR Description: splicing factor SR1 [Arabidopsis thaliana]
  misc_feature (13)..(146): Homolog of NCBI NO: 30678391 NR Description: pre-mRNA splicing factor SF2 (SR1 protein)
  misc_feature (10)..(151): Homolog of NCBI NO: 33146854 NR Description: putative pre-mRNA splicing factor SF2
  misc_feature (16)..(16): Xaa is any aa, unknown or other
  misc_feature (21)..(21): Xaa is any aa, unknown or other
MFVSLRCIVEGGGTIXIVDYXNYDDMKYAIRKLDDTEFKNAFSRAPIRVKEYAGKSSRSYSRSRSRSRSGSYSRSPSPKKKPSRRSASRSRSRSVSSHSRSPSKERSPSRSPAKSQSPVAASPVVNGEAASPKRDPSKSPSRSRSPDAKSE

SEQ ID NO: 64845 - protein, 151 aa, Triticum aestivum
  peptide (1)..(151): Ceres Seq. ID no. 15222075
  misc_feature (1)..(142): Homolog of NCBI NO: 5815236 NR Description: splicing factor SR1B [Arabidopsis thaliana]
  misc_feature (1)..(141): Homolog of NCBI NO: 4775270 NR Description: SF2/ASF-like splicing modulator Srp30
  misc_feature (1)..(142): Homolog of NCBI NO: 30678395 NR Description: pre-mRNA splicing factor SF2 (SR1 protein)
  misc_feature (1)..(142): Homolog of NCBI NO: 2443473 NR Description: ASF/SF2 homolog [Arabidopsis thaliana]
  misc_feature (1)..(142): Homolog of NCBI NO: 34894608 NR Description: putative pre-mRNA splicing factor SF2
  misc_feature (1)..(142): Homolog of NCBI NO: 12324445 NR Description: putative splicing factor; 53460-55514
  misc_feature (1)..(142): Homolog of NCBI NO: 2129717 NR Description: splicing factor SF-2 homolog - Arabidopsis
  misc_feature (1)..(142): Homolog of NCBI NO: 5815235 NR Description: splicing factor SR1 [Arabidopsis thaliana]
  misc_feature (1)..(142): Homolog of NCBI NO: 30678391 NR Description: pre-mRNA splicing factor SF2 (SR1 protein)
  misc_feature (1)..(144): Homolog of NCBI NO: 33146854 NR Description: putative pre-mRNA splicing factor SF2
  misc_feature (150)..(150): Xaa is any aa, unknown or other
MSRRWSRTIYVGNLPGDIREREVEDLFYKYGRIVEIDLKVPPRPPGFAFVEFEDPRDAEDAIHGRDGYNFDGNRLRVELAHGGRANSSSLPNSYGGGGRRGGVSRHTEYRVLVTGLPSSASCQDLKDHMRKAGDVCFSEVYRGGWWYYWXC

SEQ ID NO: 64846 - DNA, 1103 bp, Triticum aestivum
  misc_feature (1)..(1103): Ceres Seq. ID no. 15173069
cagctatttctgctccttccaatgcagcattatctctggtgatcagagacaaaagtagtggagattctggttctgtgaaacagactcgttttaccgagatggtagctgtgcagatttacagagtagcctttcttattatgaaattcctctgcagtcaagccaaagaggcagtaaaaagggcaggagaattagaatttgtcgatcttgcacattttcctgaacttcccatgccagatattcttcatggtctgcaggatcaagtggtttctatcgttacggaagtactgggggcaaatggatcgagcgccctcagcggggagaccgatagggtatgccgtcttctgttggtgacccttgaggcatcgctctacatggaactgtgtgtgtcccagtcatgcagcatcaggccagtgctgggccggttcgaagatttctccaagggaattaaggcgatgcttcacgctttggagaaacattccagtttgaaaccattggttaggtcactcgctcagattacgacactgctgtatcctgggcttgctcaaagcaacttcctcaccatgtaatcagtgtgtagattgcatctctgcggctggttaagtcttttgctatggttcatacttcatagatggaaacaggttcagtaaaatcgacccgtttacagtggagccctgagtttaatctgctgctatggttatgagtgaatctacactttaaactatgtctatatacatccgtatgtagtccatatcgaaatctctaaaaagacttatactccctccgttctaaattactcgtcgcagaaatggatgtatctagaactaaaatacatctagatatattcatacctgcgacaagtaattcggaacggagggggtatttaggaatggagggagtagatgaaatcgtttagtcagctaacatgtcacataacgttcatgcatgtatttttctgtatgcttgcatgcatgtatgtacagtaggaaaactatcaagagtttccacccgttctgagcgacatgtcagtggtggaatggcaccctgctatacgtacggtgaatatggtgaatgcgtattattgtctgctagttatggtctgaatc

SEQ ID NO: 64847 - protein, 187 aa, Triticum aestivum
  peptide (1)..(187): Ceres Seq. ID no. 15173070
  misc_feature (2)..(178): Homolog of NCBI NO: 15234782 NR Description: expressed protein [Arabidopsis thaliana]
  misc_feature (1)..(166): Homolog of NCBI NO: 21306600 NR Description: Hypothetical protein [Oryza sativa (japonica
AISAPSNAALSLVIRDKSSGDSGSVKQTRFTEMVAVQIYRVAFLIMKFLCSQAKEAVKRAGELEFVDLAHFPELPMPDILHGLQDQVVSIVTEVLGANGSSALSGETDRVCRLLLVTLEASLYMELCVSQSCSIRPVLGRFEDFSKGIKAMLHALEKHSSLKPLVRSLAQITTLLYPGLAQSNFLTM

SEQ ID NO: 64848 - protein, 155 aa, Triticum aestivum
  peptide (1)..(155): Ceres Seq. ID no. 15173071
  misc_feature (1)..(146): Homolog of NCBI NO: 15234782 NR Description: expressed protein [Arabidopsis thaliana]
  misc_feature (1)..(134): Homolog of NCBI NO: 21306600 NR Description: Hypothetical protein [Oryza sativa (japonica
MVAVQIYRVAFLIMKFLCSQAKEAVKRAGELEFVDLAHFPELPMPDILHGLQDQVVSIVTEVLGANGSSALSGETDRVCRLLLVTLEASLYMELCVSQSCSIRPVLGRFEDFSKGIKAMLHALEKHSSLKPLVRSLAQITTLLYPGLAQSNFLTM

SEQ ID NO: 64849 - protein, 142 aa, Triticum aestivum
  peptide (1)..(142): Ceres Seq. ID no. 15173072
  misc_feature (1)..(133): Homolog of NCBI NO: 15234782 NR Description: expressed protein [Arabidopsis thaliana]
  misc_feature (1)..(121): Homolog of NCBI NO: 21306600 NR Description: Hypothetical protein [Oryza sativa (japonica
MKFLCSQAKEAVKRAGELEFVDLAHFPELPMPDILHGLQDQVVSIVTEVLGANGSSALSGETDRVCRLLLVTLEASLYMELCVSQSCSIRPVLGRFEDFSKGIKAMLHALEKHSSLKPLVRSLAQITTLLYPGLAQSNFLTM

SEQ ID NO: 64850 - DNA, 1748 bp, Triticum aestivum
  misc_feature (1)..(1748): Ceres Seq. ID no. 13597843
aatttcgtttcccattttgtacgcagctaataattctcgagcagcgttgcctgcacgcccagcctgtggtaaaaaacaagacccgccgtgtcacccgctcaaaagcttcctcgaccgcgggcataatccatccgagactcctagccgatcgtgcaccaaccagatgacgaccccgaccgtcgtgctgctgccggtctgggccgccggccacctcatgtccatgctcgacgccggcaagcggctgctcgcgcgcagcggcggcgcgctgtcgctcacggtgctcgtcatgccggcgccgggggagaaccacaggtgcgaggtcgccgcccacatacagagggaggaggcgtccggcctggacatccgcttccaccacctccccgccgtcgagcccccgacggactgcctgggcatcgaggagttcgtctcccggttcgtgcagctccacgcggcccacgtgaaggcggccgtctccggcctggcgtgccccgtggccgcgctcgtcctcgacttcttctgcacgaccatgctcgacgtgtcccgggagctcgccgtaccggcctacgtgtacatcaccgccgacgccgccttctgcgcgctcctcctgcgcctgccggcgctccacgaggaggtggccgtcgagttcgaggagatggagggcatggtgggcgtgcctggcctgccgccggtgccgccgtcgtccctcccggttccggtgatggacaagaagaaccccaactacacgtggttcatgtaccacggcaggcgtttcacggaggccaagggcgtcatcatcaacacggtcaccgagctggagcagagcgttcttgcagccatcggcgacggctggtgcgcgcccggatttcctgccccggcggtctatccagtaggccccgtgctctccgtgaccccgccagcggagcagccgcacgaatgcgtgcggtggctggacgcgcagcctccggcgtccgtggtgctcctctgcttcggcagcatggggttctccacggcggcacaggcgcacgagatagcccacgggctggagcgcagcgggcaccgcttcctgtgggctctgcgcggcccgccggctgccggcgcgggaccaggacagccctcggacgcggacctcggggagctgctcccggaggggttcctggagaggacgaaggagaagggcctggtgtggccgacgaaggccccgcagaaggagatcctggcgcacgccgccgtggggggcttcgtgacgcacggcgggtggaactcgaccctggagagcctgtggttcggcgtgccgatggtgccgtggccgctgtacgcggagcagcacctcaacgcgttcacgctggtggcctacatgggcgtggccgtggccatggaggtggaccggaagaggaacaactttgtcgccgcgtcggagctggagcgggccgtgaaggcgctcatggagcgcgactccgaggaggggaagagggcgagggagaaggccgcggagatgaaggccgcgtgccggaaggccgtcgaggagggcgggtcctcctactctgccctcgggaggctctctgaggcgataatcaaaggcgccagtaagtaattgacgaacatccggagacgaacttggagagtgtgggtgctctgtggttgcagttcttgttctgcctgccgatcattccgagttgtgtgccggcatcgcgagcaatccacctccggtagagagccttaataaaaccacatgctcctcgtttggtctc

SEQ ID NO: 64851 - protein, 529 aa, Triticum aestivum
  peptide (1)..(529): Ceres Seq. ID no. 13597844
  misc_feature (59)..(525): Pfam Name: UDP-glucoronosyl and UDP-glucosyl transferase Pfam Description: UDP-glucoronosyl and UDP-glucosyl transferase
  misc_feature (69)..(525): Homolog of NCBI NO: 2501491 NR Description: Flavonol 3-O-glucosyltransferase 1 (UDP-glucose
  misc_feature (235)..(421): Homolog of NCBI NO: 19911213 NR Description: glucosyltransferase like protein [Vigna angularis]
  misc_feature (50)..(528): Homolog of NCBI NO: 22535568 NR Description: putative glucosyltransferase
  misc_feature (55)..(528): Homolog of NCBI NO: 34394676 NR Description: putative glucosyltransferase
  misc_feature (59)..(521): Homolog of NCBI NO: 34394688 NR Description: putative glucosyltransferase
  misc_feature (55)..(525): Homolog of NCBI NO: 34898742 NR Description: putative betanidin 6-O-glucosyltransferase
  misc_feature (55)..(527): Homolog of NCBI NO: 34394653 NR Description: putative glucosyltransferase-3
  misc_feature (58)..(528): Homolog of NCBI NO: 34394680 NR Description: putative glucosyltransferase
  misc_feature (55)..(527): Homolog of NCBI NO: 34394651 NR Description: putative glucosyltransferase
  misc_feature (55)..(523): Homolog of NCBI NO: 34394683 NR Description: putative flavonol 3-O-glucosyltransferase
ISFPILYAANNSRAALPARPACGKKQDPPCHPLKSFLDRGHNPSETPSRSCTNQMTTPTVVLLPVWAAGHLMSMLDAGKRLLARSGGALSLTVLVMPAPGENHRCEVAAHIQREEASGLDIRFHHLPAVEPPTDCLGIEEFVSRFVQLHAAHVKAAVSGLACPVAALVLDFFCTTMLDVSRELAVPAYVYITADAAFCALLLRLPALHEEVAVEFEEMEGMVGVPGLPPVPPSSLPVPVMDKKNPNYTWFMYHGRRFTEAKGVIINTVTELEQSVLAAIGDGWCAPGFPAPAVYPVGPVLSVTPPAEQPHECVRWLDAQPPASVVLLCFGSMGFSTAAQAHEIAHGLERSGHRFLWALRGPPAAGAGPGQPSDADLGELLPEGFLERTKEKGLVWPTKAPQKEILAHAAVGGFVTHGGWNSTLESLWFGVPMVPWPLYAEQHLNAFTLVAYMGVAVAMEVDRKRNNFVAASELERAVKALMERDSEEGKRAREKAAEMKAACRKAVEEGGSSYSALGRLSEAIIKGASK

SEQ ID NO: 64852 - protein, 475 aa, Triticum aestivum
  peptide (1)..(475): Ceres Seq. ID no. 13597845
  misc_feature (5)..(471): Pfam Name: UDP-glucoronosyl and UDP-glucosyl transferase Pfam Description: UDP-glucoronosyl and UDP-glucosyl transferase
  misc_feature (15)..(471): Homolog of NCBI NO: 2501491 NR Description: Flavonol 3-O-glucosyltransferase 1 (UDP-glucose
  misc_feature (181)..(367): Homolog of NCBI NO: 19911213 NR Description: glucosyltransferase like protein [Vigna angularis]
  misc_feature (1)..(474): Homolog of NCBI NO: 22535568 NR Description: putative glucosyltransferase
  misc_feature (1)..(474): Homolog of NCBI NO: 34394676 NR Description: putative glucosyltransferase
  misc_feature (5)..(467): Homolog of NCBI NO: 34394688 NR Description: putative glucosyltransferase
  misc_feature (1)..(471): Homolog of NCBI NO: 34898742 NR Description: putative betanidin 6-O-glucosyltransferase
  misc_feature (1)..(473): Homolog of NCBI NO: 34394653 NR Description: putative glucosyltransferase-3
  misc_feature (4)..(474): Homolog of NCBI NO: 34394680 NR Description: putative glucosyltransferase
  misc_feature (1)..(473): Homolog of NCBI NO: 34394651 NR Description: putative glucosyltransferase
  misc_feature (1)..(469): Homolog of NCBI NO: 34394683 NR Description: putative flavonol 3-O-glucosyltransferase
MTTPTVVLLPVWAAGHLMSMLDAGKRLLARSGGALSLTVLVMPAPGENHRCEVAAHIQREEASGLDIRFHHLPAVEPPTDCLGIEEFVSRFVQLHAAHVKAAVSGLACPVAALVLDFFCTTMLDVSRELAVPAYVYITADAAFCALLLRLPALHEEVAVEFEEMEGMVGVPGLPPVPPSSLPVPVMDKKNPNYTWFMYHGRRFTEAKGVIINTVTELEQSVLAAIGDGWCAPGFPAPAVYPVGPVLSVTPPAEQPHECVRWLDAQPPASVVLLCFGSMGFSTAAQAHEIAHGLERSGHRFLWALRGPPAAGAGPGQPSDADLGELLPEGFLERTKEKGLVWPTKAPQKEILAHAAVGGFVTHGGWNSTLESLWFGVPMVPWPLYAEQHLNAFTLVAYMGVAVAMEVDRKRNNFVAASELERAVKALMERDSEEGKRAREKAAEMKAACRKAVEEGGSSYSALGRLSEAIIKGASK

SEQ ID NO: 64853 - protein, 458 aa, Triticum aestivum
  peptide (1)..(458): Ceres Seq. ID no. 13597846
  misc_feature (1)..(454): Pfam Name: UDP-glucoronosyl and UDP-glucosyl transferase Pfam Description: UDP-glucoronosyl and UDP-glucosyl transferase
  misc_feature (1)..(454): Homolog of NCBI NO: 2501491 NR Description: Flavonol 3-O-glucosyltransferase 1 (UDP-glucose
  misc_feature (164)..(350): Homolog of NCBI NO: 19911213 NR Description: glucosyltransferase like protein [Vigna angularis]
  misc_feature (1)..(457): Homolog of NCBI NO: 22535568 NR Description: putative glucosyltransferase
  misc_feature (1)..(457): Homolog of NCBI NO: 34394676 NR Description: putative glucosyltransferase
  misc_feature (1)..(450): Homolog of NCBI NO: 34394688 NR Description: putative glucosyltransferase
  misc_feature (1)..(454): Homolog of NCBI NO: 34898742 NR Description: putative betanidin 6-O-glucosyltransferase
  misc_feature (1)..(456): Homolog of NCBI NO: 34394653 NR Description: putative glucosyltransferase-3
  misc_feature (1)..(457): Homolog of NCBI NO: 34394680 NR Description: putative glucosyltransferase
  misc_feature (1)..(456): Homolog of NCBI NO: 34394651 NR Description: putative glucosyltransferase
  misc_feature (1)..(452): Homolog of NCBI NO: 34394683 NR Description: putative flavonol 3-O-glucosyltransferase
MSMLDAGKRLLARSGGALSLTVLVMPAPGENHRCEVAAHIQREEASGLDIRFHHLPAVEPPTDCLGIEEFVSRFVQLHAAHVKAAVSGLACPVAALVLDFFCTTMLDVSRELAVPAYVYITADAAFCALLLRLPALHEEVAVEFEEMEGMVGVPGLPPVPPSSLPVPVMDKKNPNYTWFMYHGRRFTEAKGVIINTVTELEQSVLAAIGDGWCAPGFPAPAVYPVGPVLSVTPPAEQPHECVRWLDAQPPASVVLLCFGSMGFSTAAQAHEIAHGLERSGHRFLWALRGPPAAGAGPGQPSDADLGELLPEGFLERTKEKGLVWPTKAPQKEILAHAAVGGFVTHGGWNSTLESLWFGVPMVPWPLYAEQHLNAFTLVAYMGVAVAMEVDRKRNNFVAASELERAVKALMERDSEEGKRAREKAAEMKAACRKAVEEGGSSYSALGRLSEAIIKGASK

SEQ ID NO: 64854 - DNA, 1079 bp, Triticum aestivum
  misc_feature (1)..(1079): Ceres Seq. ID no. 12587737
aaggacgattctgctcgcgccgccggttccccgatggcggaggactcaggcgccatcctccgccacatctcctccctcaaggacatgcttgacaaggtcaatgaagaaattgaacagaatatacaaaggaccagggaaagagagtcagaaatagtgaagcattctgaaactgaaaaggactatctcgtgaaggaatctgagctaatgaaaggagtatcggttgctgagtttgaacttgatgggcttatgcaagtggaagctgctggaacagattcacttaaagcgatggagggcaatttggaattccggaaagctactctgaatgcaattacgaaactattctacgataaaatggaaaggttcatcgctgaatctaaagacttccaagttaacatgcttggaggttcaattgaggatttacctctcctactaaaggaaagagattcactagagaatgagagtgagaacttgaggatgaagatcaacgccatacaaagttcatcaaaggaatacattgctgagattcttgaggaggtaaatgtggaaaattcagttctggagtctgatgtacagtataggatttcggaatacatggaaattctcaaggatataaacaacctgaagattctatttagttcgagcaattcttaagaagggtcttcattgttgcaggctcatgacccatcaaagttgccacatgtttcttgtgtcttcagtatgccattttggtttggctgtcaagaatcttcagcaagctcaatggaagtaccttgtacatgtttcttctgtcgagaaggttacaccagatctagcacgaatttactgcactaccaaacatgtattggtcctggattgtatatacagttcagttaacctctgtactttagatttcaagctgagggatagtaggaaaaggcaaagtgcctaggaatgcagattggaaaaacagcagtgtcttttgtgggcaattgttgtttttcaaatctgatcgaggagatgtgagaacgtcagatattgcgagaaattgttagtaatggaatagttggttcatcttaagggaatgtaccagtgaagaaagg

SEQ ID NO: 64855 - protein, 216 aa, Triticum aestivum
  peptide (1)..(216): Ceres Seq. ID no. 12587738
  misc_feature (14)..(100): Homolog of NCBI NO: 25373190 NR Description: protein T1F9.6 [imported] - Arabidopsis thaliana
  misc_feature (14)..(100): Homolog of NCBI NO: 15219928 NR Description: hypothetical protein; protein id: At1g61450.1
KDDSARAAGSPMAEDSGAILRHISSLKDMLDKVNEEIEQNIQRTRERESEIVKHSETEKDYLVKESELMKGVSVAEFELDGLMQVEAAGTDSLKAMEGNLEFRKATLNAITKLFYDKMERFIAESKDFQVNMLGGSIEDLPLLLKERDSLENESENLRMKINAIQSSSKEYIAEILEEVNVENSVLESDVQYRISEYMEILKDINNLKILFSSSNS

SEQ ID NO: 64856 - protein, 205 aa, Triticum aestivum
  peptide (1)..(205): Ceres Seq. ID no. 12587739
  misc_feature (3)..(89): Homolog of NCBI NO: 25373190 NR Description: protein T1F9.6 [imported] - Arabidopsis thaliana
  misc_feature (3)..(89): Homolog of NCBI NO: 15219928 NR Description: hypothetical protein; protein id: At1g61450.1
MAEDSGAILRHISSLKDMLDKVNEEIEQNIQRTRERESEIVKHSETEKDYLVKESELMKGVSVAEFELDGLMQVEAAGTDSLKAMEGNLEFRKATLNAITKLFYDKMERFIAESKDFQVNMLGGSIEDLPLLLKERDSLENESENLRMKINAIQSSSKEYIAEILEEVNVENSVLESDVQYRISEYMEILKDINNLKILFSSSNS

SEQ ID NO: 64857 - protein, 188 aa, Triticum aestivum
  peptide (1)..(188): Ceres Seq. ID no. 12587740
  misc_feature (1)..(72): Homolog of NCBI NO: 25373190 NR Description: protein T1F9.6 [imported] - Arabidopsis thaliana
  misc_feature (1)..(72): Homolog of NCBI NO: 15219928 NR Description: hypothetical protein; protein id: At1g61450.1
MLDKVNEEIEQNIQRTRERESEIVKHSETEKDYLVKESELMKGVSVAEFELDGLMQVEAAGTDSLKAMEGNLEFRKATLNAITKLFYDKMERFIAESKDFQVNMLGGSIEDLPLLLKERDSLENESENLRMKINAIQSSSKEYIAEILEEVNVENSVLESDVQYRISEYMEILKDINNLKILFSSSNS

SEQ ID NO: 64858 - DNA, 1274 bp, Triticum aestivum
  misc_feature (1)..(1274): Ceres Seq. ID no. 13597847
accgttcccgacctcattttttacagagactccggcgactccagtccatcgctcgtggaaaatctcagggtcaaagcaggaggcacaccttgatggcgcccctggagtcaggctcctcacagctcttcttcgacagcagtgcgatcgacggcccgttcgatgtctacgagtgcggtaccttggcaggcaccagagtcgtgccagatccacctccacctggaacctcttatggcaagcagagaagttccaggaatgctaaaaaggctcgtcgtgttcatggctctgaggaggtcgaggactgctggaacaggctattcttggaaggatatcaagccgatgtccgcgtatcgacgggcgatggcagccagatcttatcgcattcgtgcattcttggcatcagatctccggttctgagaagtatgttggaagaagctagaattgaacatggtttcagaaacatcctgatttccggtgtcccatcagaagtagtccgtgtcttcatcagatttctgtattcttcacgctttgagcagggtgagatgaagaagtatgcccttcatttgctcgtactctctcatgttttctcggtacaatcgctgaagatcgtctgcaccgaccagctcgagaggttttttcttgctcctgataacgtggtggacgttctacaactggctagactctgtgacgcaccaaggctctcgctcatctgtacccgtatgatcgttggagatttcaagaccatctctctgtcagaagggtggaaagtgatgagacgggccaacccaagcctggagcaagagcttcttgagtttcttgttgaagtggacacaagaaggcaagaaagagctaaaaggatggaggaaaagaaggtttatcttcagttgtatgaagctatggaagctcttgttcatatatgccgagacggttgtaggacgattggcccctgggatcagaaactcaagggcagtcaggttgtttgcaagtttcctgcctgcaagggcatcgagttgctcgtgcgccatttctcggcatgcaaaaaacgtgtgcctcgcggctgcgccaactgcaagcgcatgtggcagcttcttgagctgcattctcgaatgtgttccacaccagacacctgcagggttcctctatgcaggtgaggtcttgtctttgttggtcaggatcatttcatttagacacacaagttttctaggttaatacaacagatgtttgctttcataaaaaaaaaaaaaaaaaagcttatcgataccgtcgacctcgagggg

SEQ ID NO: 64859 - protein, 381 aa, Triticum aestivum
  peptide (1)..(381): Ceres Seq. ID no. 13597848
  misc_feature (105)..(208): Pfam Name: BTB/POZ domain Pfam Description: BTB/POZ domain
  misc_feature (111)..(381): Homolog of NCBI NO: 18408618 NR Description: expressed protein [Arabidopsis thaliana]
  misc_feature (102)..(381): Homolog of NCBI NO: 15242656 NR Description: expressed protein [Arabidopsis thaliana]
  misc_feature (67)..(380): Homolog of NCBI NO: 21537174 NR Description: unknown [Arabidopsis thaliana]
  misc_feature (67)..(380): Homolog of NCBI NO: 26453150 NR Description: unknown protein [Arabidopsis thaliana]
  misc_feature (67)..(380): Homolog of NCBI NO: 18420081 NR Description: expressed protein [Arabidopsis thaliana]
  misc_feature (67)..(380): Homolog of NCBI NO: 7485765 NR Description: hypothetical protein F19F18.100 - Arabidopsis
  misc_feature (34)..(276): Homolog of NCBI NO: 29367535 NR Description: unknown [Oryza sativa (japonica cultivar-group)]
  misc_feature (48)..(381): Homolog of NCBI NO: 15240763 NR Description: expressed protein [Arabidopsis thaliana]
  misc_feature (61)..(380): Homolog of NCBI NO: 15221235 NR Description: hypothetical protein [Arabidopsis thaliana]
  misc_feature (51)..(351): Homolog of NCBI NO: 34907566 NR Description: B1078G07.24 [Oryza sativa (japonica
RSRPHFLQRLRRLQSIARGKSQGQSRRHTLMAPLESGSSQLFFDSSAIDGPFDVYECGTLAGTRVVPDPPPPGTSYGKQRSSRNAKKARRVHGSEEVEDCWNRLFLEGYQADVRVSTGDGSQILSHSCILGIRSPVLRSMLEEARIEHGFRNILISGVPSEVVRVFIRFLYSSRFEQGEMKKYALHLLVLSHVFSVQSLKIVCTDQLERFFLAPDNVVDVLQLARLCDAPRLSLICTRMIVGDFKTISLSEGWKVMRRANPSLEQELLEFLVEVDTRRQERAKRMEEKKVYLQLYEAMEALVHICRDGCRTIGPWDQKLKGSQVVCKFPACKGIELLVRHFSACKKRVPRGCANCKRMWQLLELHSRMCSTPDTCRVPLCR

SEQ ID NO: 64860 - protein, 351 aa, Triticum aestivum
  peptide (1)..(351): Ceres Seq. ID no. 13597849
  misc_feature (75)..(178): Pfam Name: BTB/POZ domain Pfam Description: BTB/POZ domain
  misc_feature (81)..(351): Homolog of NCBI NO: 18408618 NR Description: expressed protein [Arabidopsis thaliana]
  misc_feature (72)..(351): Homolog of NCBI NO: 15242656 NR Description: expressed protein [Arabidopsis thaliana]
  misc_feature (37)..(350): Homolog of NCBI NO: 21537174 NR Description: unknown [Arabidopsis thaliana]
  misc_feature (37)..(350): Homolog of NCBI NO: 18420081 NR Description: expressed protein [Arabidopsis thaliana]
  misc_feature (37)..(350): Homolog of NCBI NO: 26453150 NR Description: unknown protein [Arabidopsis thaliana]
  misc_feature (37)..(350): Homolog of NCBI NO: 7485765 NR Description: hypothetical protein F19F18.100 - Arabidopsis
  misc_feature (4)..(246): Homolog of NCBI NO: 29367535 NR Description: unknown [Oryza sativa (japonica cultivar-group)]
  misc_feature (18)..(351): Homolog of NCBI NO: 15240763 NR Description: expressed protein [Arabidopsis thaliana]
  misc_feature (31)..(350): Homolog of NCBI NO: 15221235 NR Description: hypothetical protein [Arabidopsis thaliana]
  misc_feature (21)..(321): Homolog of NCBI NO: 34907566 NR Description: B1078G07.24 [Oryza sativa (japonica
MAPLESGSSQLFFDSSAIDGPFDVYECGTLAGTRVVPDPPPPGTSYGKQRSSRNAKKARRVHGSEEVEDCWNRLFLEGYQADVRVSTGDGSQILSHSCILGIRSPVLRSMLEEARIEHGFRNILISGVPSEVVRVFIRFLYSSRFEQGEMKKYALHLLVLSHVFSVQSLKIVCTDQLERFFLAPDNVVDVLQLARLCDAPRLSLICTRMIVGDFKTISLSEGWKVMRRANPSLEQELLEFLVEVDTRRQERAKRMEEKKVYLQLYEAMEALVHICRDGCRTIGPWDQKLKGSQVVCKFPACKGIELLVRHFSACKKRVPRGCANCKRMWQLLELHSRMCSTPDTCRVPLCR

SEQ ID NO: 64861 - protein, 242 aa, Triticum aestivum
  peptide (1)..(242): Ceres Seq. ID no. 13597850
  misc_feature (1)..(69): Pfam Name: BTB/POZ domain Pfam Description: BTB/POZ domain
  misc_feature (1)..(242): Homolog of NCBI NO: 18408618 NR Description: expressed protein [Arabidopsis thaliana]
  misc_feature (1)..(242): Homolog of NCBI NO: 15242656 NR Description: expressed protein [Arabidopsis thaliana]
  misc_feature (1)..(241): Homolog of NCBI NO: 21537174 NR Description: unknown [Arabidopsis thaliana]
  misc_feature (1)..(241): Homolog of NCBI NO: 18420081 NR Description: expressed protein [Arabidopsis thaliana]
  misc_feature (1)..(241): Homolog of NCBI NO: 26453150 NR Description: unknown protein [Arabidopsis thaliana]
  misc_feature (1)..(241): Homolog of NCBI NO: 7485765 NR Description: hypothetical protein F19F18.100 - Arabidopsis
  misc_feature (1)..(137): Homolog of NCBI NO: 29367535 NR Description: unknown [Oryza sativa (japonica cultivar-group)]
  misc_feature (1)..(242): Homolog of NCBI NO: 15240763 NR Description: expressed protein [Arabidopsis thaliana]
  misc_feature (1)..(241): Homolog of NCBI NO: 15221235 NR Description: hypothetical protein [Arabidopsis thaliana]
  misc_feature (1)..(212): Homolog of NCBI NO: 34907566 NR Description: B1078G07.24 [Oryza sativa (japonica
MLEEARIEHGFRNILISGVPSEVVRVFIRFLYSSRFEQGEMKKYALHLLVLSHVFSVQSLKIVCTDQLERFFLAPDNVVDVLQLARLCDAPRLSLICTRMIVGDFKTISLSEGWKVMRRANPSLEQELLEFLVEVDTRRQERAKRMEEKKVYLQLYEAMEALVHICRDGCRTIGPWDQKLKGSQVVCKFPACKGIELLVRHFSACKKRVPRGCANCKRMWQLLELHSRMCSTPDTCRVPLCR

SEQ ID NO: 64862 - DNA, 1580 bp, Triticum aestivum
  misc_feature (1)..(1580): Ceres Seq. ID no. 15224517
gactttcgtgcaaacatccattcttcctctcagccttaagcgaaaaaaccctagcactggacgacctccaaaaccctagagccgtccccaatggcgagccacgaaaccgacccgtcccctgccgccccctccaagaagaagaagaggcactccaagaagcgcaaggccatcgaagtcactgtagatgcctcctttcctggcgccgccgcccccgtcgtcggctactttccgacgggctacgacccccttgcggccgcagagcccccacgtgcgcggttgttccgccacgagaagcaccataaccgcgtcgagctagtggtccgcgcccctggtggaggccccgacttcgtcggccggagctacgccggcgaggccgctgcgccgcagctctgcggctacgccctcggcgtcctcgacaaggccaccagcactctgaagattgtccccatcgcctccaacaagattttgaggctagagccacactttgaagtgcagcaaccggctcattcacaacagtcagcagcagaagcaggttcttctgtagcagatactgaattgaacagacaagatcttacccaggcttatgggaccaagaaagataaggataaggataataagtggaagtcactaaaagaacaaaggaatgacccttctgcttatttggaccttgatcttggagagtccaagaccactgcagatgccactgatagtcaggcatcaatggaagttcgcaacattccaccttatgatcctgctgcagatacatctgaaaaggcatatctttttgatgagatcattccaaaaaatatacggccacaccttcttgatattgtgggacactttgaatcgggagaatttggtttgaaaggctatgggagttttgtctcgaatcgtgtgaataagttgcaggaacttcagggtgaagatcaggaaaggcttgcttggatactatcctatatcacacatctcctgtccttgttggcgcgcaacagctccatgtccaagcagaaaagaaaagaaaaagaccagaccatccgtggaccaatgatcccacaggcggtgcaccgcaagctgttgctgatgttcacggagccagggtcttcttccttgtcgacagagaaacacgagcttctgatcaattacattttagtactcacactttttgctgatgacttcagatctgaacctacggatatatgtgcggacttgaaaatgaaccgccagatgcttaaaccatattatgaccagctgggatgcaagtccgtgtcaacaggtgcttttaaaccagtttttatgacacttccagcacccctcaagttcccacaacaagtcacaaggagaaggcggcgaaaataaccatcttagttattggtttccatttgatatggttgtgataggaaaggtatgcattgccaccgtcgaacctatgtgccctcagctcagtttcaccaatgtagtggagaaaatgatgaaggtggttgttctgtttttgttttctattgtcacttgggaattgctacgagaggaaccatattactgatatataatttgcttgctaccgaaatttgttttttgatgct

SEQ ID NO: 64863 - protein, 421 aa, Triticum aestivum
  peptide (1)..(421): Ceres Seq. ID no. 15224518
  misc_feature (1)..(421): Homolog of NCBI NO: 15231416 NR Description: expressed protein [Arabidopsis thaliana]
MASHETDPSPAAPSKKKKRHSKKRKAIEVTVDASFPGAAAPVVGYFPTGYDPLAAAEPPRARLFRHEKHHNRVELVVRAPGGGPDFVGRSYAGEAAAPQLCGYALGVLDKATSTLKIVPIASNKILRLEPHFEVQQPAHSQQSAAEAGSSVADTELNRQDLTQAYGTKKDKDKDNKWKSLKEQRNDPSAYLDLDLGESKTTADATDSQASMEVRNIPPYDPAADTSEKAYLFDEIIPKNIRPHLLDIVGHFESGEFGLKGYGSFVSNRVNKLQELQGEDQERLAWILSYITHLLSLLARNSSMSKQKRKEKDQTIRGPMIPQAVHRKLLLMFTEPGSSSLSTEKHELLINYILVLTLFADDFRSEPTDICADLKMNRQMLKPYYDQLGCKSVSTGAFKPVFMTLPAPLKFPQQVTRRRRRK

SEQ ID NO: 64864 - protein, 211 aa, Triticum aestivum
  peptide (1)..(211): Ceres Seq. ID no. 15224519
  misc_feature (1)..(211): Homolog of NCBI NO: 15231416 NR Description: expressed protein [Arabidopsis thaliana]
MEVRNIPPYDPAADTSEKAYLFDEIIPKNIRPHLLDIVGHFESGEFGLKGYGSFVSNRVNKLQELQGEDQERLAWILSYITHLLSLLARNSSMSKQKRKEKDQTIRGPMIPQAVHRKLLLMFTEPGSSSLSTEKHELLINYILVLTLFADDFRSEPTDICADLKMNRQMLKPYYDQLGCKSVSTGAFKPVFMTLPAPLKFPQQVTRRRRRK

SEQ ID NO: 64865 - DNA, 1376 bp, Triticum aestivum
  misc_feature (1)..(1376): Ceres Seq. ID no. 13598635
aactcaacacgccaaggcaaagcaccagtagtcacacaagagaaaagcaagagcagcaagcagcacagagctagagaaaagaggagcgtctcatcgggaggaggagaaagaaaaagcgagcgaggatgtgtggcggagcgatcctcgccgagctcatcccgggcgcgccggcgcggcgcgccacgtccggccatggccacgtctggccgggcaagggcgccaagcagaccaaggccgccgcggccgacgacttcgaggccgcgttccgggagttcaacgaggactctgatgtggaggacgacgtcgtgatggtgatggagcggcgggaggaggtggccgagagcaagcccttcgtgttcgccgcttcgcccaagaagcagcagcaggaggaggaggaggcggcgcccgtccgccgcaggaagccggcgcagtaccggggcgtgcggcgccggccgtggggcaagtgggccgccgagatccgcgaccccgtcaagggcgtccgcgtctggctcggcaccttcccctccgccgaggccgccgcgctcgcctacgacgaagccgcgcgcgccatccgcgggcccagggccaagctcaacttctcctcctcctctgccgtcgccgccgcggccccgggagcgcgcaagcgcggccgcgccgcgccccccgctgccaagccagcgccggtcatcaccctcgtcgacgatgaggaggagcacgcgtcgtccttcgtcaagcacgaggccgaggcgagcgagggctccgagtccagcggcgccctccccgacttctcgtggcagggcatatcggcgttcgacgaggccccggcgtaccccgccccggagccggagaccgagcagctgacaaagcgggcgaggacgacggaggcggaagacaccgacgagggcatgtcggcccacccggcatcagactccgactccgacgcgctcttcgacgccctcctcttcgccgaccagttcgccttcttcaacggcggcgcctacgagtccctcgacagcctcttcagcgccgacgccgtgcagagcagcgccaccgccaccgccgtgaacgaggcggccctggggctctggaccttcgacgacgactgcctcgtcgacgagtgcagcctgtcgttctagatcttgttccgtgtgcgtccgttcatgtcatgagatgcggtggtgtaaatagagtagcttgccttgtgatgaaatccgttcgtccgtcgtcgcttcttggatcagcaagcgatgatggattctgtgtaagagtttggcatcgtcgtgaaagattttgcctacgccttcgatgcaaaagctcgacttccgtttctgaaatgttcaaaaaaaaaaaaaaaaaacggcacgagaagcttatcg

SEQ ID NO: 64866 - protein, 336 aa, Triticum aestivum
  peptide (1)..(336): Ceres Seq. ID no. 13598636
  misc_feature (100)..(162): Pfam Name: AP2 domain Pfam Description: AP2 domain
  misc_feature (1)..(325): Homolog of NCBI NO: 15217291 NR Description: Putative AP2 domain containing protein [Oryza
  misc_feature (1)..(328): Homolog of NCBI NO: 15217289 NR Description: Putative AP2 domain containing transcription
  misc_feature (1)..(336): Homolog of NCBI NO: 15217288 NR Description: Putative EREBP-like protein [Oryza sativa]
MCGGAILAELIPGAPARRATSGHGHVWPGKGAKQTKAAAADDFEAAFREFNEDSDVEDDVVMVMERREEVAESKPFVFAASPKKQQQEEEEAAPVRRRKPAQYRGVRRRPWGKWAAEIRDPVKGVRVWLGTFPSAEAAALAYDEAARAIRGPRAKLNFSSSSAVAAAAPGARKRGRAAPPAAKPAPVITLVDDEEEHASSFVKHEAEASEGSESSGALPDFSWQGISAFDEAPAYPAPEPETEQLTKRARTTEAEDTDEGMSAHPASDSDSDALFDALLFADQFAFFNGGAYESLDSLFSADAVQSSATATAVNEAALGLWTFDDDCLVDECSLSF

SEQ ID NO: 64867 - protein, 275 aa, Triticum aestivum
  peptide (1)..(275): Ceres Seq. ID no. 13598637
  misc_feature (39)..(101): Pfam Name: AP2 domain Pfam Description: AP2 domain
  misc_feature (1)..(264): Homolog of NCBI NO: 15217291 NR Description: Putative AP2 domain containing protein [Oryza
  misc_feature (1)..(267): Homolog of NCBI NO: 15217289 NR Description: Putative AP2 domain containing transcription
  misc_feature (1)..(275): Homolog of NCBI NO: 15217288 NR Description: Putative EREBP-like protein [Oryza sativa]
MVMERREEVAESKPFVFAASPKKQQQEEEEAAPVRRRKPAQYRGVRRRPWGKWAAEIRDPVKGVRVWLGTFPSAEAAALAYDEAARAIRGPRAKLNFSSSSAVAAAAPGARKRGRAAPPAAKPAPVITLVDDEEEHASSFVKHEAEASEGSESSGALPDFSWQGISAFDEAPAYPAPEPETEQLTKRARTTEAEDTDEGMSAHPASDSDSDALFDALLFADQFAFFNGGAYESLDSLFSADAVQSSATATAVNEAALGLWTFDDDCLVDECSLSF

SEQ ID NO: 64868 - protein, 273 aa, Triticum aestivum
  peptide (1)..(273): Ceres Seq. ID no. 13598638
  misc_feature (37)..(99): Pfam Name: AP2 domain Pfam Description: AP2 domain
  misc_feature (1)..(262): Homolog of NCBI NO: 15217291 NR Description: Putative AP2 domain containing protein [Oryza
  misc_feature (1)..(265): Homolog of NCBI NO: 15217289 NR Description: Putative AP2 domain containing transcription
  misc_feature (1)..(273): Homolog of NCBI NO: 15217288 NR Description: Putative EREBP-like protein [Oryza sativa]
MERREEVAESKPFVFAASPKKQQQEEEEAAPVRRRKPAQYRGVRRRPWGKWAAEIRDPVKGVRVWLGTFPSAEAAALAYDEAARAIRGPRAKLNFSSSSAVAAAAPGARKRGRAAPPAAKPAPVITLVDDEEEHASSFVKHEAEASEGSESSGALPDFSWQGISAFDEAPAYPAPEPETEQLTKRARTTEAEDTDEGMSAHPASDSDSDALFDALLFADQFAFFNGGAYESLDSLFSADAVQSSATATAVNEAALGLWTFDDDCLVDECSLSF

SEQ ID NO: 64869 - DNA, 1155 bp, Triticum aestivum
  misc_feature (1)..(1155): Ceres Seq. ID no. 13597851
accgatcatttccacccgacgcttccaccgcccgaatccagccagccagccagccaggcgaagctgcgaggatgtaccgagatcccaatcccttcgacgagggcgccgacgacagcgccttctccaatgggggaggacgcggtggtgccgctggtggtggtggcggcaagtcgcagttccagtttcgcccgacggagcccgtcggattcggcgccggtggcaacggggacgccgccgtcgacatcccccttgacaacatgaacggttcgaatggcaagcaaagtgagctctcgcagtggcaggcagatctcaagaggcgagaggcggacataaagaggagggaggaagctctcaagagtgctggggtgcccatggaggacaagaactggccgccattcttcccaatcatccaccacgacattgcccatgaaataccagccaacgcgcagcggttgcagtatcttgcttttgctagctggctcggcatcgtgctttgcctcgtttggaatttcattgctgtcacagtctgttggatcagagggggggactctaaactgtttttcctggctactatctacggtatgcttggagtacctttgtcctacttgatgtggtataggcctctgtaccgtgcaatgagaactgacagcgcattcagctttgggtggtttttcctttgttacatgctccacattggcttttgtataattgctgccattgctccgccgatcgtatttcgtgggaagtcattaacgggtatactggctgcaatcgataccttctctgatcatgcattagttgggatactttactttgttggatttgccttgttttcactggagacagttgtgagcatttgggttcttcagagagtatacatgtatttcagagggcacaagtgaagcgggcaacggaagaaaatacagaagtccaccggtgtcatcggagcgtgctgcggttctgtgcatacatatgagtacatgccattctttgtatgttatggtagttatgggaataatttgcctcagaaattcagaagtttgtttatttgttgcaagagagtagaagtgtaacaaacgttgtattagtgttatctcttgaactgtctgttgtttaaaaccttggatcttacctatataaactgcatgttgttgg

SEQ ID NO: 64870 - protein, 299 aa, Triticum aestivum
  peptide (1)..(299): Ceres Seq. ID no. 15222209
  misc_feature (125)..(299): Pfam Name: SCAMP family Pfam Description: SCAMP family
  misc_feature (27)..(299): Homolog of NCBI NO: 7109232 NR Description: secretory carrier membrane protein [Oryza sativa]
  misc_feature (27)..(299): Homolog of NCBI NO: 34899754 NR Description: putative secretory carrier membrane protein
  misc_feature (77)..(299): Homolog of NCBI NO: 15226410 NR Description: secretory carrier-associated membrane protein
  misc_feature (27)..(297): Homolog of NCBI NO: 15220305 NR Description: secretory carrier membrane protein -related
  misc_feature (27)..(299): Homolog of NCBI NO: 3941289 NR Description: similarity to SCAMP37 [Pisum sativum]
  misc_feature (22)..(299): Homolog of NCBI NO: 15219893 NR Description: secretory carrier membrane protein [Arabidopsis
  misc_feature (25)..(299): Homolog of NCBI NO: 15222550 NR Description: secretory carrier membrane protein -related
  misc_feature (24)..(96): Homolog of NCBI NO: 38567965 NR Description: OSJNBa0093F12.6 [Oryza sativa (japonica
  misc_feature (109)..(289): Homolog of NCBI NO: 38567965 NR Description: OSJNBa0093F12.6 [Oryza sativa (japonica
  misc_feature (24)..(299): Homolog of NCBI NO: 38347080 NR Description: OSJNBa0006A01.21 [Oryza sativa (japonica
RSFPPDASTARIQPASQPGEAARMYRDPNPFDEGADDSAFSNGGGRGGAAGGGGGKSQFQFRPTEPVGFGAGGNGDAAVDIPLDNMNGSNGKQSELSQWQADLKRREADIKRREEALKSAGVPMEDKNWPPFFPIIHHDIAHEIPANAQRLQYLAFASWLGIVLCLVWNFIAVTVCWIRGGDSKLFFLATIYGMLGVPLSYLMWYRPLYRAMRTDSAFSFGWFFLCYMLHIGFCIIAAIAPPIVFRGKSLTGILAAIDTFSDHALVGILYFVGFALFSLETVVSIWVLQRVYMYFRGHK

SEQ ID NO: 64871 - protein, 276 aa, Triticum aestivum
  peptide (1)..(276): Ceres Seq. ID no. 15222210
  misc_feature (102)..(276): Pfam Name: SCAMP family Pfam Description: SCAMP family
  misc_feature (4)..(276): Homolog of NCBI NO: 7109232 NR Description: secretory carrier membrane protein [Oryza sativa]
  misc_feature (4)..(276): Homolog of NCBI NO: 34899754 NR Description: putative secretory carrier membrane protein
  misc_feature (54)..(276): Homolog of NCBI NO: 15226410 NR Description: secretory carrier-associated membrane protein
  misc_feature (4)..(274): Homolog of NCBI NO: 15220305 NR Description: secretory carrier membrane protein -related
  misc_feature (4)..(276): Homolog of NCBI NO: 3941289 NR Description: similarity to SCAMP37 [Pisum sativum]
  misc_feature (1)..(276): Homolog of NCBI NO: 15219893 NR Description: secretory carrier membrane protein [Arabidopsis
  misc_feature (2)..(276): Homolog of NCBI NO: 15222550 NR Description: secretory carrier membrane protein -related
  misc_feature (1)..(73): Homolog of NCBI NO: 38567965 NR Description: OSJNBa0093F12.6 [Oryza sativa (japonica
  misc_feature (86)..(266): Homolog of NCBI NO: 38567965 NR Description: OSJNBa0093F12.6 [Oryza sativa (japonica
  misc_feature (1)..(276): Homolog of NCBI NO: 38347080 NR Description: OSJNBa0006A01.21 [Oryza sativa (japonica
MYRDPNPFDEGADDSAFSNGGGRGGAAGGGGGKSQFQFRPTEPVGFGAGGNGDAAVDIPLDNMNGSNGKQSELSQWQADLKRREADIKRREEALKSAGVPMEDKNWPPFFPIIHHDIAHEIPANAQRLQYLAFASWLGIVLCLVWNFIAVTVCWIRGGDSKLFFLATIYGMLGVPLSYLMWYRPLYRAMRTDSAFSFGWFFLCYMLHIGFCIIAAIAPPIVFRGKSLTGILAAIDTFSDHALVGILYFVGFALFSLETVVSIWVLQRVYMYFRGHK

SEQ ID NO: 64872 - protein, 214 aa, Triticum aestivum
  peptide (1)..(214): Ceres Seq. ID no. 15222211
  misc_feature (40)..(214): Pfam Name: SCAMP family Pfam Description: SCAMP family
  misc_feature (1)..(214): Homolog of NCBI NO: 7109232 NR Description: secretory carrier membrane protein [Oryza sativa]
  misc_feature (1)..(214): Homolog of NCBI NO: 34899754 NR Description: putative secretory carrier membrane protein
  misc_feature (1)..(214): Homolog of NCBI NO: 15226410 NR Description: secretory carrier-associated membrane protein
  misc_feature (1)..(212): Homolog of NCBI NO: 15220305 NR Description: secretory carrier membrane protein -related
  misc_feature (1)..(214): Homolog of NCBI NO: 3941289 NR Description: similarity to SCAMP37 [Pisum sativum]
  misc_feature (1)..(214): Homolog of NCBI NO: 15219893 NR Description: secretory carrier membrane protein [Arabidopsis
  misc_feature (1)..(214): Homolog of NCBI NO: 15222550 NR Description: secretory carrier membrane protein -related
  misc_feature (1)..(11): Homolog of NCBI NO: 38567965 NR Description: OSJNBa0093F12.6 [Oryza sativa (japonica
  misc_feature (24)..(204): Homolog of NCBI NO: 38567965 NR Description: OSJNBa0093F12.6 [Oryza sativa (japonica
  misc_feature (1)..(214): Homolog of NCBI NO: 38347080 NR Description: OSJNBa0006A01.21 [Oryza sativa (japonica
MNGSNGKQSELSQWQADLKRREADIKRREEALKSAGVPMEDKNWPPFFPIIHHDIAHEIPANAQRLQYLAFASWLGIVLCLVWNFIAVTVCWIRGGDSKLFFLATIYGMLGVPLSYLMWYRPLYRAMRTDSAFSFGWFFLCYMLHIGFCIIAAIAPPIVFRGKSLTGILAAIDTFSDHALVGILYFVGFALFSLETVVSIWVLQRVYMYFRGHK

SEQ ID NO: 64873 - DNA, 1809 bp, Triticum aestivum
  misc_feature (1)..(1809): Ceres Seq. ID no. 13597532
attaaacccattcacccctttcctaagccctccccgctcccacccgaccgctcgaccatgtccaccaggaaggacgccggcccctcgccggcggcggcgcccgccaccgcgcctgccctaacgccttccccattcatgcccatgtgtcagatgcggcgggatgagtgcgcagacctcctcaagctgatctccggcgtctcgcgccctctcgaggacgtcgtggcggatttcctcgcccgcgtcccgcccgagcgccgcctccgcttcggttccgccatcaagtttctcctcgaggacaaggtgatgtttcaaccagctgagcgtttaattgcactcgcaattcttcatcaagggtattcctcacagctgacaaatccgtttgttccattcttaataaatgttgcctgtgatgaaatttctgagagaccagaacgtgtttttctccagcttttgctaacttcagctaatggggacaacaacaaggagatcttgaaacagtctgcagaagattacttgaaggagccttcttatgcatctcaggtgttgctgccaagagaccagcttgaaagccaatactcctgcaatgatgttcagctgcagacatacactagttgcgcagctgctacggttagaagtgctattcctgacccagatgtttcccaaagctgcggtgattcatcaggattatcaccgaccaaactaaatagagataatgtggtgacaaatttacttcaacaaacaccactgagaggattgtctcctccatggattaggccctctccccccagacttgaaatacttgaaggggagttgcagtggttgaacctggacaacaaccatgagctactatgggatggtagcatgtgtgctgacactagccgaggagcttcaatccgtgatttggtcggaagagcctgtaaaggaccacttgcacctgcccaacaagagcaagttgttttagatttagccagggactggaagctagtttatcattgcggaatgacaccagagaagcttcccgaccttgttgaacataatccactcattgctgttgatgttctttcaaagctgatcaattgtcctgacatggattcttatttcaatgttcttgtgcacatggaaatgagcctgcattcaatggaagttgtaaacaggcttactacagcagtagatctaccaccaggattcattcatgactacatctcaaattgtattcggtcatgccaaaatatcaaggataagtacatgcaaaacagacttgtgagactagtttgtgtttttctacaaagtctcattcggaacaagataataaatgttgaagatctattcattgaggtacaagccttctgcattgcgttttctcgaataagagaagcagctggtttgttcaggcttctcaaatctctagagtgaagaaggttgtatgagttaccggagttcagctctataaacaaattttttcatgctgtacattcatagtcttatattttcgtgttgatctgccaattcagggttgtacttcatagatcatagctcttgttgatgtatttattgtcattaagctgttgccctcacctaaagaaaggtcaaaagatatcagaactattacccaggctttgatagttccgctgaatcattttgatgtggacttaaaccacatgttctttaggtgagacaaattagcaattacctttagcctgttgaaagatagctgaacaatgggcgcctgcttctcagttgaggctcccgagtacaagtaatttgagagatttcttaatttaaattcagatgtaaagactagttgtactc

SEQ ID NO: 64874 - protein, 470 aa, Triticum aestivum
  peptide (1)..(470): Ceres Seq. ID no. 15222122
  misc_feature (367)..(470): Homolog of NCBI NO: 34875640 NR Description: similar to DNA segment, Chr 1, Brigham & Womens
  misc_feature (260)..(470): Homolog of NCBI NO: 24762515 NR Description: CG13567-PB [Drosophila melanogaster]
  misc_feature (198)..(470): Homolog of NCBI NO: 26334389 NR Description: unnamed protein product [Mus musculus]
  misc_feature (27)..(470): Homolog of NCBI NO: 37588935 NR Description: C40 protein [Homo sapiens]
  misc_feature (27)..(470): Homolog of NCBI NO: 40538809 NR Description: hypothetical protein C40 [Homo sapiens]
  misc_feature (27)..(470): Homolog of NCBI NO: 6048964 NR Description: unknown [Homo sapiens]
  misc_feature (27)..(470): Homolog of NCBI NO: 26553441 NR Description: DNA segment, Chr 1, Brigham & Women's Genetics
  misc_feature (48)..(470): Homolog of NCBI NO: 21539503 NR Description: putative protein [Arabidopsis thaliana]
  misc_feature (48)..(470): Homolog of NCBI NO: 30686822 NR Description: expressed protein [Arabidopsis thaliana]
  misc_feature (48)..(470): Homolog of NCBI NO: 15238813 NR Description: expressed protein [Arabidopsis thaliana]
IKPIHPFPKPSPLPPDRSTMSTRKDAGPSPAAAPATAPALTPSPFMPMCQMRRDECADLLKLISGVSRPLEDVVADFLARVPPERRLRFGSAIKFLLEDKVMFQPAERLIALAILHQGYSSQLTNPFVPFLINVACDEISERPERVFLQLLLTSANGDNNKEILKQSAEDYLKEPSYASQVLLPRDQLESQYSCNDVQLQTYTSCAAATVRSAIPDPDVSQSCGDSSGLSPTKLNRDNVVTNLLQQTPLRGLSPPWIRPSPPRLEILEGELQWLNLDNNHELLWDGSMCADTSRGASIRDLVGRACKGPLAPAQQEQVVLDLARDWKLVYHCGMTPEKLPDLVEHNPLIAVDVLSKLINCPDMDSYFNVLVHMEMSLHSMEVVNRLTTAVDLPPGFIHDYISNCIRSCQNIKDKYMQNRLVRLVCVFLQSLIRNKIINVEDLFIEVQAFCIAFSRIREAAGLFRLLKSLE

SEQ ID NO: 64875 - protein, 451 aa, Triticum aestivum
  peptide (1)..(451): Ceres Seq. ID no. 15222123
  misc_feature (348)..(451): Homolog of NCBI NO: 34875640 NR Description: similar to DNA segment, Chr 1, Brigham & Womens
  misc_feature (241)..(451): Homolog of NCBI NO: 24762515 NR Description: CG13567-PB [Drosophila melanogaster]
  misc_feature (179)..(451): Homolog of NCBI NO: 26334389 NR Description: unnamed protein product [Mus musculus]
  misc_feature (8)..(451): Homolog of NCBI NO: 40538809 NR Description: hypothetical protein C40 [Homo sapiens]
  misc_feature (8)..(451): Homolog of NCBI NO: 37588935 NR Description: C40 protein [Homo sapiens]
  misc_feature (8)..(451): Homolog of NCBI NO: 6048964 NR Description: unknown [Homo sapiens]
  misc_feature (8)..(451): Homolog of NCBI NO: 26553441 NR Description: DNA segment, Chr 1, Brigham & Women's Genetics
  misc_feature (29)..(451): Homolog of NCBI NO: 21539503 NR Description: putative protein [Arabidopsis thaliana]
  misc_feature (29)..(451): Homolog of NCBI NO: 30686822 NR Description: expressed protein [Arabidopsis thaliana]
  misc_feature (29)..(451): Homolog of NCBI NO: 15238813 NR Description: expressed protein [Arabidopsis thaliana]
MSTRKDAGPSPAAAPATAPALTPSPFMPMCQMRRDECADLLKLISGVSRPLEDVVADFLARVPPERRLRFGSAIKFLLEDKVMFQPAERLIALAILHQGYSSQLTNPFVPFLINVACDEISERPERVFLQLLLTSANGDNNKEILKQSAEDYLKEPSYASQVLLPRDQLESQYSCNDVQLQTYTSCAAATVRSAIPDPDVSQSCGDSSGLSPTKLNRDNVVTNLLQQTPLRGLSPPWIRPSPPRLEILEGELQWLNLDNNHELLWDGSMCADTSRGASIRDLVGRACKGPLAPAQQEQVVLDLARDWKLVYHCGMTPEKLPDLVEHNPLIAVDVLSKLINCPDMDSYFNVLVHMEMSLHSMEVVNRLTTAVDLPPGFIHDYISNCIRSCQNIKDKYMQNRLVRLVCVFLQSLIRNKIINVEDLFIEVQAFCIAFSRIREAAGLFRLLKSLE

SEQ ID NO: 64876 - protein, 425 aa, Triticum aestivum
  peptide (1)..(425): Ceres Seq. ID no. 15222124
  misc_feature (322)..(425): Homolog of NCBI NO: 34875640 NR Description: similar to DNA segment, Chr 1, Brigham & Womens
  misc_feature (215)..(425): Homolog of NCBI NO: 24762515 NR Description: CG13567-PB [Drosophila melanogaster]
  misc_feature (153)..(425): Homolog of NCBI NO: 26334389 NR Description: unnamed protein product [Mus musculus]
  misc_feature (1)..(425): Homolog of NCBI NO: 40538809 NR Description: hypothetical protein C40 [Homo sapiens]
  misc_feature (1)..(425): Homolog of NCBI NO: 37588935 NR Description: C40 protein [Homo sapiens]
  misc_feature (1)..(425): Homolog of NCBI NO: 6048964 NR Description: unknown [Homo sapiens]
  misc_feature (1)..(425): Homolog of NCBI NO: 26553441 NR Description: DNA segment, Chr 1, Brigham & Women's Genetics
  misc_feature (3)..(425): Homolog of NCBI NO: 21539503 NR Description: putative protein [Arabidopsis thaliana]
  misc_feature (3)..(425): Homolog of NCBI NO: 30686822 NR Description: expressed protein [Arabidopsis thaliana]
  misc_feature (3)..(425): Homolog of NCBI NO: 15238813 NR Description: expressed protein [Arabidopsis thaliana]
MPMCQMRRDECADLLKLISGVSRPLEDVVADFLARVPPERRLRFGSAIKFLLEDKVMFQPAERLIALAILHQGYSSQLTNPFVPFLINVACDEISERPERVFLQLLLTSANGDNNKEILKQSAEDYLKEPSYASQVLLPRDQLESQYSCNDVQLQTYTSCAAATVRSAIPDPDVSQSCGDSSGLSPTKLNRDNVVTNLLQQTPLRGLSPPWIRPSPPRLEILEGELQWLNLDNNHELLWDGSMCADTSRGASIRDLVGRACKGPLAPAQQEQVVLDLARDWKLVYHCGMTPEKLPDLVEHNPLIAVDVLSKLINCPDMDSYFNVLVHMEMSLHSMEVVNRLTTAVDLPPGFIHDYISNCIRSCQNIKDKYMQNRLVRLVCVFLQSLIRNKIINVEDLFIEVQAFCIAFSRIREAAGLFRLLKSLE

SEQ ID NO: 64877 - DNA, 1277 bp, Triticum aestivum
  misc_feature (1)..(1277): Ceres Seq. ID no. 13590776
tacctttccaccccctccattccacccagacagcccgacccgctcctcagctcacctcacgccgtaacctaagccaggttttcctcctccacctccacctccaccggcatcacctcggacgcgcggcggcgtgcagccatggcgatggtggcacaggcgggcttcggcctcacccgcgtcgtcatgctcgtcggcgcgggcgtggccggctccgtcgtcctacgaaacggccgcctctcggagatcctcaccgagatacaggagtttctggagaagggggagatgggtaagggaggaggcggtggtgcggaccacggcatcaacgacgcgctcaacgaggtgcgccaacttgctatgcaggtacgcaatctaggttctccacgttcgataactgttctcagtggaggttctggacaaacaggagtatcaggactaatagtacctgcagcaactgttggagcactgggttatggttatatgtggtggaaaggcatctcctttggggacttaatgtatgtcaccaagcaaaacatggctaatgttgtttcaaatatgactaaacatctggagcaagttcagagctctcttgctgctgctaaaaagcatttgacacaacgcattgagaagttggatgacaaattggatcagcagaaggcgctttctgggcaaataaaagatgatgttactggcgcacgactgaagcttgagaatattggttcagagattaagaacatcaaagaattggtctggggactggatgagaagatggattcaatggaagccaaacagaatttttcatgcgctggtgtgatgtacctctgccaattcatagagcaaagtggtgggaaactccctgaacgcctggaaggcattgaaccatcagcgaagcgatttgaaacaattggcatacaggggttgcaactagccatagaaacagggaattttagtgatttcagcaatgctgattccactgacaagataagcaggtccaactcgttaaagtctgccaactaattttcttcggggttggcgagacatgtatccagattcgttacttagtggaacattgtaaagggagattcttgctggataaaatgtaaagagtcccagcctttttgttatttgcttgcaggaagtgctgtttgttaaatttgaaaacgtgtgcgaagtagtagctactatggaatctagaccagatgttattctggcatcacttatgccttgcatttttatgcaatacttgccgtaaataaatggacgacacttcagtttccttg

SEQ ID NO: 64878 - protein, 291 aa, Triticum aestivum
  peptide (1)..(291): Ceres Seq. ID no. 13590777
  misc_feature (11)..(257): Homolog of NCBI NO: 22329773 NR Description: expressed protein [Arabidopsis thaliana]
  misc_feature (11)..(291): Homolog of NCBI NO: 30688826 NR Description: expressed protein [Arabidopsis thaliana]
  misc_feature (10)..(217): Homolog of NCBI NO: 34894218 NR Description: P0439B06.30 [Oryza sativa (japonica
  misc_feature (3)..(229): Homolog of NCBI NO: 18390460 NR Description: expressed protein [Arabidopsis thaliana]
  misc_feature (3)..(242): Homolog of NCBI NO: 7487252 NR Description: hypothetical protein At2g02730 [imported] -
  misc_feature (3)..(242): Homolog of NCBI NO: 15227027 NR Description: expressed protein [Arabidopsis thaliana]
  misc_feature (3)..(289): Homolog of NCBI NO: 25361065 NR Description: protein T7N9.6 [imported] - Arabidopsis thaliana
  misc_feature (3)..(289): Homolog of NCBI NO: 21537323 NR Description: unknown [Arabidopsis thaliana]
  misc_feature (3)..(289): Homolog of NCBI NO: 18396143 NR Description: bZIP family transcription factor [Arabidopsis
  misc_feature (1)..(266): Homolog of NCBI NO: 34906300 NR Description: unnamed protein product [Oryza sativa (japonica
MAMVAQAGFGLTRVVMLVGAGVAGSVVLRNGRLSEILTEIQEFLEKGEMGKGGGGGADHGINDALNEVRQLAMQVRNLGSPRSITVLSGGSGQTGVSGLIVPAATVGALGYGYMWWKGISFGDLMYVTKQNMANVVSNMTKHLEQVQSSLAAAKKHLTQRIEKLDDKLDQQKALSGQIKDDVTGARLKLENIGSEIKNIKELVWGLDEKMDSMEAKQNFSCAGVMYLCQFIEQSGGKLPERLEGIEPSAKRFETIGIQGLQLAIETGNFSDFSNADSTDKISRSNSLKSAN

SEQ ID NO: 64879 - protein, 289 aa, Triticum aestivum
  peptide (1)..(289): Ceres Seq. ID no. 13590778
  misc_feature (9)..(255): Homolog of NCBI NO: 22329773 NR Description: expressed protein [Arabidopsis thaliana]
  misc_feature (9)..(289): Homolog of NCBI NO: 30688826 NR Description: expressed protein [Arabidopsis thaliana]
  misc_feature (8)..(215): Homolog of NCBI NO: 34894218 NR Description: P0439B06.30 [Oryza sativa (japonica
  misc_feature (1)..(227): Homolog of NCBI NO: 18390460 NR Description: expressed protein [Arabidopsis thaliana]
  misc_feature (1)..(240): Homolog of NCBI NO: 7487252 NR Description: hypothetical protein At2g02730 [imported] -
  misc_feature (1)..(240): Homolog of NCBI NO: 15227027 NR Description: expressed protein [Arabidopsis thaliana]
  misc_feature (1)..(287): Homolog of NCBI NO: 25361065 NR Description: protein T7N9.6 [imported] - Arabidopsis thaliana
  misc_feature (1)..(287): Homolog of NCBI NO: 21537323 NR Description: unknown [Arabidopsis thaliana]
  misc_feature (1)..(287): Homolog of NCBI NO: 18396143 NR Description: bZIP family transcription factor [Arabidopsis
  misc_feature (1)..(264): Homolog of NCBI NO: 34906300 NR Description: unnamed protein product [Oryza sativa (japonica
MVAQAGFGLTRVVMLVGAGVAGSVVLRNGRLSEILTEIQEFLEKGEMGKGGGGGADHGINDALNEVRQLAMQVRNLGSPRSITVLSGGSGQTGVSGLIVPAATVGALGYGYMWWKGISFGDLMYVTKQNMANVVSNMTKHLEQVQSSLAAAKKHLTQRIEKLDDKLDQQKALSGQIKDDVTGARLKLENIGSEIKNIKELVWGLDEKMDSMEAKQNFSCAGVMYLCQFIEQSGGKLPERLEGIEPSAKRFETIGIQGLQLAIETGNFSDFSNADSTDKISRSNSLKSAN

SEQ ID NO: 64880 - protein, 276 aa, Triticum aestivum
  peptide (1)..(276): Ceres Seq. ID no. 13590779
  misc_feature (1)..(242): Homolog of NCBI NO: 22329773 NR Description: expressed protein [Arabidopsis thaliana]
  misc_feature (1)..(276): Homolog of NCBI NO: 30688826 NR Description: expressed protein [Arabidopsis thaliana]
  misc_feature (1)..(202): Homolog of NCBI NO: 34894218 NR Description: P0439B06.30 [Oryza sativa (japonica
  misc_feature (1)..(214): Homolog of NCBI NO: 18390460 NR Description: expressed protein [Arabidopsis thaliana]
  misc_feature (1)..(227): Homolog of NCBI NO: 7487252 NR Description: hypothetical protein At2g02730 [imported] -
  misc_feature (1)..(227): Homolog of NCBI NO: 15227027 NR Description: expressed protein [Arabidopsis thaliana]
  misc_feature (1)..(274): Homolog of NCBI NO: 25361065 NR Description: protein T7N9.6 [imported] - Arabidopsis thaliana
  misc_feature (1)..(274): Homolog of NCBI NO: 21537323 NR Description: unknown [Arabidopsis thaliana]
  misc_feature (1)..(274): Homolog of NCBI NO: 18396143 NR Description: bZIP family transcription factor [Arabidopsis
  misc_feature (1)..(251): Homolog of NCBI NO: 34906300 NR Description: unnamed protein product [Oryza sativa (japonica
MLVGAGVAGSVVLRNGRLSEILTEIQEFLEKGEMGKGGGGGADHGINDALNEVRQLAMQVRNLGSPRSITVLSGGSGQTGVSGLIVPAATVGALGYGYMWWKGISFGDLMYVTKQNMANVVSNMTKHLEQVQSSLAAAKKHLTQRIEKLDDKLDQQKALSGQIKDDVTGARLKLENIGSEIKNIKELVWGLDEKMDSMEAKQNFSCAGVMYLCQFIEQSGGKLPERLEGIEPSAKRFETIGIQGLQLAIETGNFSDFSNADSTDKISRSNSLKSAN

SEQ ID NO: 64881 - DNA, 1096 bp, Triticum aestivum
  misc_feature (1)..(1096): Ceres Seq. ID no. 13655804
gcaaaccaacagctgctactccagcatccacccatccatccatctctcatcttcttcttcttgcaacgaaacgagagcatctagcttacagcgagctaaagattcgaacgatggccgttcttgtggcgaggcaggggcgcgagctgcagcggtacagcgcgagcacccgcgggcgcatcgtggtggggtgcatcccctaccgggtgcgcggcggcggcggcgagggcgagggcgagctggaggtgctggtgatcagctcgcagaaggggcacggcatgatgttccccaagggcgggtgggagctggacgagtccatggacgacgccgcccggcgcgaggccctggaggaggccggcgtccgcggggagatgggcaaggtgctcggctgctggcactaccagagccgccgctaccagaccacctacgagggcatcatgtacccgctccgcgtcaccgacgagctccagcagtggcccgagatggcctcccgcaagcgcacctgggccacggtgcagcaggtcatggagggatgccagcactgctggatgcgggaggcgctcgaggagctcgtcgcccggcacgccaagccgcagtccgccctgtgaacgatcaagcaagcgggcgggtggggtgactggagctcgagcgcgcgcgactctcgcgagaagaggcctggagcgagcaccaacgtccgtccgtccgtcgtcctcgtcgtctctctctcctttcctcggtgcagcggcaggcctgccggcgtgtccggcgtcgtacgacgaccggaccggagcatatatttggccgcccttgccggagagacggactggggacgatggcacgcgcgcgtcaaccctttctcgaggcgtagagtcgtcgtcgtcgtcgccgcggcaaataatagggacgaacttagaaatgtgtagatcgaaagcgaacggggcacgaaaacttgacaaaacaccgcccttcctggtggtacgagcaagctcacgattctttctttaggctcttggagtaaaagatcaatcaaattgtaaattaatttaagtagccgcttttctgtggcacgctcgatcaatcaaacgattactacaatctg

SEQ ID NO: 64882 - protein, 210 aa, Triticum aestivum
  peptide (1)..(210): Ceres Seq. ID no. 13655805
QTNSCYSSIHPSIHLSSSSSCNETRASSLQRAKDSNDGRSCGEAGARAAAVQREHPRAHRGGVHPLPGARRRRRGRGRAGGAGDQLAEGARHDVPQGRVGAGRVHGRRRPARGPGGGRRPRGDGQGARLLALPEPPLPDHLRGHHVPAPRHRRAPAVARDGLPQAHLGHGAAGHGGMPALLDAGGARGARRPARQAAVRPVNDQASGRVG

SEQ ID NO: 64883 - protein, 200 aa, Triticum aestivum
  peptide (1)..(200): Ceres Seq. ID no. 13655806
  misc_feature (58)..(192): Pfam Name: NUDIX domain Pfam Description: NUDIX domain
  misc_feature (37)..(188): Homolog of NCBI NO: 18399682 NR Description: MutT/nudix family protein [Arabidopsis thaliana]
  misc_feature (37)..(186): Homolog of NCBI NO: 34900054 NR Description: MutT-like protein~contains ESTs
  misc_feature (37)..(186): Homolog of NCBI NO: 38175436 NR Description: MutT-like protein [Oryza sativa (japonica
  misc_feature (59)..(192): Homolog of NCBI NO: 31747031 NR Description: MutT-like protein [Cucumis sativus]
  misc_feature (33)..(190): Homolog of NCBI NO: 15221055 NR Description: MutT/nudix family protein [Arabidopsis thaliana]
  misc_feature (40)..(197): Homolog of NCBI NO: 25367539 NR Description: unknown protein [imported] - Arabidopsis thaliana
  misc_feature (40)..(197): Homolog of NCBI NO: 22330598 NR Description: MutT/nudix family protein [Arabidopsis thaliana]
  misc_feature (37)..(192): Homolog of NCBI NO: 15223919 NR Description: MutT/nudix family protein [Arabidopsis thaliana]
  misc_feature (37)..(198): Homolog of NCBI NO: 21595695 NR Description: unknown [Arabidopsis thaliana]
  misc_feature (34)..(198): Homolog of NCBI NO: 18379275 NR Description: MutT/nudix family protein [Arabidopsis thaliana]
KPTAATPASTHPSISHLLLLATKREHLAYSELKIRTMAVLVARQGRELQRYSASTRGRIVVGCIPYRVRGGGGEGEGELEVLVISSQKGHGMMFPKGGWELDESMDDAARREALEEAGVRGEMGKVLGCWHYQSRRYQTTYEGIMYPLRVTDELQQWPEMASRKRTWATVQQVMEGCQHCWMREALEELVARHAKPQSAL

SEQ ID NO: 64884 - protein, 164 aa, Triticum aestivum
  peptide (1)..(164): Ceres Seq. ID no. 13655807
  misc_feature (22)..(156): Pfam Name: NUDIX domain Pfam Description: NUDIX domain
  misc_feature (1)..(152): Homolog of NCBI NO: 18399682 NR Description: MutT/nudix family protein [Arabidopsis thaliana]
  misc_feature (1)..(150): Homolog of NCBI NO: 34900054 NR Description: MutT-like protein~contains ESTs
  misc_feature (1)..(150): Homolog of NCBI NO: 38175436 NR Description: MutT-like protein [Oryza sativa (japonica
  misc_feature (23)..(156): Homolog of NCBI NO: 31747031 NR Description: MutT-like protein [Cucumis sativus]
  misc_feature (1)..(154): Homolog of NCBI NO: 15221055 NR Description: MutT/nudix family protein [Arabidopsis thaliana]
  misc_feature (4)..(161): Homolog of NCBI NO: 25367539 NR Description: unknown protein [imported] - Arabidopsis thaliana
  misc_feature (4)..(161): Homolog of NCBI NO: 22330598 NR Description: MutT/nudix family protein [Arabidopsis thaliana]
  misc_feature (1)..(156): Homolog of NCBI NO: 15223919 NR Description: MutT/nudix family protein [Arabidopsis thaliana]
  misc_feature (1)..(162): Homolog of NCBI NO: 21595695 NR Description: unknown [Arabidopsis thaliana]
  misc_feature (1)..(162): Homolog of NCBI NO: 18379275 NR Description: MutT/nudix family protein [Arabidopsis thaliana]
MAVLVARQGRELQRYSASTRGRIVVGCIPYRVRGGGGEGEGELEVLVISSQKGHGMMFPKGGWELDESMDDAARREALEEAGVRGEMGKVLGCWHYQSRRYQTTYEGIMYPLRVTDELQQWPEMASRKRTWATVQQVMEGCQHCWMREALEELVARHAKPQSAL

SEQ ID NO: 64885 - DNA, 1188 bp, Triticum aestivum
  misc_feature (1)..(1188): Ceres Seq. ID no. 15170682
aattcttaaccctagaaacagagcgcaggagggccagccgcaaccgggacaaaagcggaaacaagccaacccaagcctcgattcctcctccatcgccgcggcagaagctcgaggtccagaagggagcgcgagaagcttgcgtgaaggactcagccatggcgagcgcggatctgctgcggagggaggaggagttctacgagtccctgttcgattccgccaaaggcgatgccgctgccgccaagacgcgtgggcagatgattgagaggaagattgaagccttggaggacatggcaaccaaggttagtaaccggaggtctcgcagatggttgaatgatcgcttgctgattgagctcgtccctcgtcttcatgttgaagaaatcaaaggcctctttgcccctccgccatttggtgaggaagcaccactgtcagcattttgcaggacaagtgttggtgagtgggatgccttcaggagcattgacatggacgttgaggcaagatttatgcaacggatgaaacaatcctcagctaagcagaagaatcttgtgaatgaagatgagtcaattgtgctgaatgcttggcgccgtatagattgccaaacaagagaagctatgaagagaaacttcctacctgaactgcttgaaatatatgaggaacggatcagggccttcattgaagacactaccgataaagatgtgcttgtgttgaatgtccaggacccatttcagaggttgctattacatggtgtgtgcgagttctacaacgtaacgtctacgacaacgggtactgtgcaagatggaaagccgtggaagacgacaacaatcaagaagcgttcggggacgggtgttgcccccatgatcacattggttagtttcctgagaacaaagaagaatgggtcacacgttgcctcgtgaggactggaagccccatattctggccatgagcccatgatcatgctcctgggagaagcaaaagttgtttctttaggttttgcttaggatgtacacagatgtaaattaattaccaatttactatgcttcgtctaaagaggtgacaaggcatgcaagtgatgagtcacttcgcagccaagcaagtactgtacctgtttcgcgttaaaccttaccttactgccagcttactggtggtggtgccaaacaatggttttcaactgacttctgatttacatggttc

SEQ ID NO: 64886 - protein, 302 aa, Triticum aestivum
  peptide (1)..(302): Ceres Seq. ID no. 15170683
  misc_feature (52)..(253): Homolog of NCBI NO: 25372999 NR Description: hypothetical protein F15K9.15 [imported] -
  misc_feature (52)..(298): Homolog of NCBI NO: 18379075 NR Description: expressed protein [Arabidopsis thaliana]
FLTLETERRRASRNRDKSGNKPTQASIPPPSPRQKLEVQKGAREACVKDSAMASADLLRREEEFYESLFDSAKGDAAAAKTRGQMIERKIEALEDMATKVSNRRSRRWLNDRLLIELVPRLHVEEIKGLFAPPPFGEEAPLSAFCRTSVGEWDAFRSIDMDVEARFMQRMKQSSAKQKNLVNEDESIVLNAWRRIDCQTREAMKRNFLPELLEIYEERIRAFIEDTTDKDVLVLNVQDPFQRLLLHGVCEFYNVTSTTTGTVQDGKPWKTTTIKKRSGTGVAPMITLVSFLRTKKNGSHVAS

SEQ ID NO: 64887 - protein, 251 aa, Triticum aestivum
  peptide (1)..(251): Ceres Seq. ID no. 15170684
  misc_feature (1)..(202): Homolog of NCBI NO: 25372999 NR Description: hypothetical protein F15K9.15 [imported] -
  misc_feature (1)..(247): Homolog of NCBI NO: 18379075 NR Description: expressed protein [Arabidopsis thaliana]
MASADLLRREEEFYESLFDSAKGDAAAAKTRGQMIERKIEALEDMATKVSNRRSRRWLNDRLLIELVPRLHVEEIKGLFAPPPFGEEAPLSAFCRTSVGEWDAFRSIDMDVEARFMQRMKQSSAKQKNLVNEDESIVLNAWRRIDCQTREAMKRNFLPELLEIYEERIRAFIEDTTDKDVLVLNVQDPFQRLLLHGVCEFYNVTSTTTGTVQDGKPWKTTTIKKRSGTGVAPMITLVSFLRTKKNGSHVAS

SEQ ID NO: 64888 - protein, 218 aa, Triticum aestivum
  peptide (1)..(218): Ceres Seq. ID no. 15170685
  misc_feature (1)..(169): Homolog of NCBI NO: 25372999 NR Description: hypothetical protein F15K9.15 [imported] -
  misc_feature (1)..(214): Homolog of NCBI NO: 18379075 NR Description: expressed protein [Arabidopsis thaliana]
MIERKIEALEDMATKVSNRRSRRWLNDRLLIELVPRLHVEEIKGLFAPPPFGEEAPLSAFCRTSVGEWDAFRSIDMDVEARFMQRMKQSSAKQKNLVNEDESIVLNAWRRIDCQTREAMKRNFLPELLEIYEERIRAFIEDTTDKDVLVLNVQDPFQRLLLHGVCEFYNVTSTTTGTVQDGKPWKTTTIKKRSGTGVAPMITLVSFLRTKKNGSHVAS

SEQ ID NO: 64889 - DNA, 1545 bp, Triticum aestivum
  misc_feature (1)..(1545): Ceres Seq. ID no. 14302768
acacgttgctcgctgctcggagagaggttcacacggctgcggttgtctcgtcgccgtcttggtctccccgtcccggtccgcgcgtcgcggttctcacatgaccaccgggccgcgctagttttcacggcgtggccatggccgtcgtcgtctgcgtcaccggcgccggcggcttcatcggctcctggatcgtcaagctcctcctcgcccgcggctacgccgtccgcggcacctcccgccgcgccgatgaccccaagaacgcgcacctgtgggcgctcgacggcgcggcggagcggctgacgatggtgcaggtcgacctgctcgaccgggccagcctccgcgccgccttccacggctgcgacggcgttatccacaccgcatcaccgatgcacgacacccccgaggagatcatcgagccggtgatcaccgggacgctcaacgtggtggagatggccgcggacgccggcgtccggcgcgtggtgctgtcctccaccatcggcaccatgtacatgaacccccaccgcgacccggacgcgccgctcgacgagtcgtgctggagcgacctcgactactgcaaacaaaccaagaactggtactgctacgccaagacgatcgcggagcggggcgcgtgggaggcggcgcgggcgctggggctggacctggcggtggtgatcccggtggtgacgctgggcgagctgctgcagccgagcatgaacaccagcaccaggcacatactcaagtacctcaccggcgaggccaaggcgtacgtcaacgagtcgcacgcctacgtgcatgtcaaggacgccgccgaggcgcacgtcagggtgctcgaggcgcccaacgccgggggacggcgctacgtctgcgccgagaggacgctgcaccgcggcgagctctgccggatcctcgccgggctcttcccggagtacccgattcccacaagatgtaaggacgaggtaaatccgccaaagaagggttacaagtacaccaaccagcctctgaaggaccttggcatgaagttcacccctgtgcaagaatacctctatgaagcggtgaaatccctgcaagagaagggattcattcagaaggcttctggcaacaaggggcttgctagtagagggagttcgccgcctcaaaattcaacggcgcccgtgtttatgtcgaaactttgatgggcttctgcacaaagtaacaatgcagttcgccgtcatgtgaattgtaattcatttgattaagtgatatgttgctggacagttcttgtatgtggcaaactgccaactttgtgtagtagcgccgtgttgcctggaacagtacaccgctacagagcaacttcagtgatgcatgccaaatattttccctggtcgatgttcttctaccaccacctagttgttcaccttgtctgactcagcgggtacaaaaacccgatcaagttggcacttggcagcagagcatacaagcgtgccctctttggagtctcgttcggagagtgatgctgttttggccaacttctgcttgttgttggtcgtgatcttgtttatgcgctttctc

SEQ ID NO: 64890 - protein, 344 aa, Triticum aestivum
  peptide (1)..(344): Ceres Seq. ID no. 14302769
  misc_feature (5)..(313): Pfam Name: 3-beta hydroxysteroid dehydrogenase/isomerase family Pfam Description: 3-beta hydroxysteroid dehydrogenase/isomerase
  misc_feature (5)..(315): Homolog of NCBI NO: 40233135 NR Description: cinnamoyl CoA reductase [Populus tomentosa]
  misc_feature (5)..(315): Homolog of NCBI NO: 7431407 NR Description: cinnamoyl-CoA reductase (EC 1.2.1.44) CCR - cider
  misc_feature (5)..(315): Homolog of NCBI NO: 2960364 NR Description: cinnamoyl CoA reductase [Populus balsamifera
  misc_feature (5)..(315): Homolog of NCBI NO: 25140432 NR Description: cinnamoyl CoA reductase [Hordeum vulgare]
  misc_feature (5)..(321): Homolog of NCBI NO: 9964087 NR Description: cinnamoyl CoA reductase [Lolium perenne]
  misc_feature (5)..(315): Homolog of NCBI NO: 9998901 NR Description: cinnamoyl-CoA reductase [Populus balsamifera
  misc_feature (4)..(315): Homolog of NCBI NO: 25140434 NR Description: cinnamoyl CoA reductase [Solanum tuberosum]
  misc_feature (5)..(315): Homolog of NCBI NO: 28544959 NR Description: cinnamoyl-CoA reductase [Zea mays]
  misc_feature (5)..(315): Homolog of NCBI NO: 3668115 NR Description: cinnamoyl-CoA reductase [Zea mays]
  misc_feature (5)..(315): Homolog of NCBI NO: 28544965 NR Description: cinnamoyl-CoA reductase [Zea mays]
MAVVVCVTGAGGFIGSWIVKLLLARGYAVRGTSRRADDPKNAHLWALDGAAERLTMVQVDLLDRASLRAAFHGCDGVIHTASPMHDTPEEIIEPVITGTLNVVEMAADAGVRRVVLSSTIGTMYMNPHRDPDAPLDESCWSDLDYCKQTKNWYCYAKTIAERGAWEAARALGLDLAVVIPVVTLGELLQPSMNTSTRHILKYLTGEAKAYVNESHAYVHVKDAAEAHVRVLEAPNAGGRRYVCAERTLHRGELCRILAGLFPEYPIPTRCKDEVNPPKKGYKYTNQPLKDLGMKFTPVQEYLYEAVKSLQEKGFIQKASGNKGLASRGSSPPQNSTAPVFMSKL

SEQ ID NO: 64891 - protein, 289 aa, Triticum aestivum
  peptide (1)..(289): Ceres Seq. ID no. 14302770
  misc_feature (1)..(258): Pfam Name: 3-beta hydroxysteroid dehydrogenase/isomerase family Pfam Description: 3-beta hydroxysteroid dehydrogenase/isomerase
  misc_feature (1)..(260): Homolog of NCBI NO: 40233135 NR Description: cinnamoyl CoA reductase [Populus tomentosa]
  misc_feature (1)..(260): Homolog of NCBI NO: 7431407 NR Description: cinnamoyl-CoA reductase (EC 1.2.1.44) CCR - cider
  misc_feature (1)..(260): Homolog of NCBI NO: 2960364 NR Description: cinnamoyl CoA reductase [Populus balsamifera
  misc_feature (1)..(260): Homolog of NCBI NO: 25140432 NR Description: cinnamoyl CoA reductase [Hordeum vulgare]
  misc_feature (1)..(266): Homolog of NCBI NO: 9964087 NR Description: cinnamoyl CoA reductase [Lolium perenne]
  misc_feature (1)..(260): Homolog of NCBI NO: 9998901 NR Description: cinnamoyl-CoA reductase [Populus balsamifera
  misc_feature (1)..(260): Homolog of NCBI NO: 25140434 NR Description: cinnamoyl CoA reductase [Solanum tuberosum]
  misc_feature (1)..(260): Homolog of NCBI NO: 28544959 NR Description: cinnamoyl-CoA reductase [Zea mays]
  misc_feature (1)..(260): Homolog of NCBI NO: 3668115 NR Description: cinnamoyl-CoA reductase [Zea mays]
  misc_feature (1)..(260): Homolog of NCBI NO: 28544965 NR Description: cinnamoyl-CoA reductase [Zea mays]
MVQVDLLDRASLRAAFHGCDGVIHTASPMHDTPEEIIEPVITGTLNVVEMAADAGVRRVVLSSTIGTMYMNPHRDPDAPLDESCWSDLDYCKQTKNWYCYAKTIAERGAWEAARALGLDLAVVIPVVTLGELLQPSMNTSTRHILKYLTGEAKAYVNESHAYVHVKDAAEAHVRVLEAPNAGGRRYVCAERTLHRGELCRILAGLFPEYPIPTRCKDEVNPPKKGYKYTNQPLKDLGMKFTPVQEYLYEAVKSLQEKGFIQKASGNKGLASRGSSPPQNSTAPVFMSKL

SEQ ID NO: 64892 - protein, 261 aa, Triticum aestivum
  peptide (1)..(261): Ceres Seq. ID no. 14302771
  misc_feature (1)..(230): Pfam Name: 3-beta hydroxysteroid dehydrogenase/isomerase family Pfam Description: 3-beta hydroxysteroid dehydrogenase/isomerase
  misc_feature (1)..(232): Homolog of NCBI NO: 40233135 NR Description: cinnamoyl CoA reductase [Populus tomentosa]
  misc_feature (1)..(232): Homolog of NCBI NO: 7431407 NR Description: cinnamoyl-CoA reductase (EC 1.2.1.44) CCR - cider
  misc_feature (1)..(232): Homolog of NCBI NO: 2960364 NR Description: cinnamoyl CoA reductase [Populus balsamifera
  misc_feature (1)..(232): Homolog of NCBI NO: 25140432 NR Description: cinnamoyl CoA reductase [Hordeum vulgare]
  misc_feature (1)..(238): Homolog of NCBI NO: 9964087 NR Description: cinnamoyl CoA reductase [Lolium perenne]
  misc_feature (1)..(232): Homolog of NCBI NO: 9998901 NR Description: cinnamoyl-CoA reductase [Populus balsamifera
  misc_feature (1)..(232): Homolog of NCBI NO: 25140434 NR Description: cinnamoyl CoA reductase [Solanum tuberosum]
  misc_feature (1)..(232): Homolog of NCBI NO: 28544959 NR Description: cinnamoyl-CoA reductase [Zea mays]
  misc_feature (1)..(232): Homolog of NCBI NO: 3668115 NR Description: cinnamoyl-CoA reductase [Zea mays]
  misc_feature (1)..(232): Homolog of NCBI NO: 28544965 NR Description: cinnamoyl-CoA reductase [Zea mays]
MHDTPEEIIEPVITGTLNVVEMAADAGVRRVVLSSTIGTMYMNPHRDPDAPLDESCWSDLDYCKQTKNWYCYAKTIAERGAWEAARALGLDLAVVIPVVTLGELLQPSMNTSTRHILKYLTGEAKAYVNESHAYVHVKDAAEAHVRVLEAPNAGGRRYVCAERTLHRGELCRILAGLFPEYPIPTRCKDEVNPPKKGYKYTNQPLKDLGMKFTPVQEYLYEAVKSLQEKGFIQKASGNKGLASRGSSPPQNSTAPVFMSKL

SEQ ID NO: 64893 - DNA, 1720 bp, Triticum aestivum
  misc_feature (1)..(1720): Ceres Seq. ID no. 14303546
acttgctatccagctcctgctaccctaacaatggcagtggctggtgccccacctgttctccagctcctgccccaacaatggcagctgattctagccatcctcctcgtcccactcggcttcctcctccttcggggaaggtcgggctccggcctgaagctcccaccgggccccatgaggctgcctttcgtgggcaacctgcaccagatcgggccactgccgcaccggagcctggctgcgctggcccggcggcatgggcctgtgatgatgctgcggctgggcatggtgccgacggtggtgctgacatcgccagaggcggcccgggaagccctcaagaccaaggatgatgactgcagcagccgtcccctgtcggcagggccagggctgctgtcttacggctacaaggacgtggccttctcgccgtggagcgactacgtccgcgagatgcgcaagttgttcatcatcgagctgctcagcaggcggcgcgtgcagtctgcctactacgcgagggatgcacagatcgacaagctgattgagaccctcaccgtggtggggccgaacccggtacccctggaggcccacatcttcgccaccatggaccggattgtgggcttgttcgcgttcggcgagagctacgcgggggagcagttcaaggggcagtttgtgcccttactcaacgcaaccatggacatgttgggtagcttctctgcccaagacttcttccccaacgccgttggccgcctcatcgaccgcatcaccggcgtcaaagcccaccgccagagggtctttcgtcagctcgaccgcttctttgagcatatcatcgagcagtgcgatgggagaaaggccaccggcggcggcggatcggacctggtgcaggagctgctggacatcatgaaaaggcccgccgcctccgctgcaggaaccttcaccagagatcatgtcaaggccattctcatgaacacattcattggtagcattgacaccaccacagtgaccataacctgggcaatggcagagctgatccggaaaccaagggttctgcaaagggcacaacttgagattaggactgccgctggaggaggcagcagagtgcaccaagctgacatgcccaaaatgagctacctgaggatggtgctgtccgagaccctacggctgcatcccccagcaacactactcgtaccgagagagacgctgcggccgatccaggtggctggctacgacatcccagccaagacccaggtcattgtcaatgcgtgggccatcagcagggacccttccgcgtggaaggaccccgaggagtttaacccggagcggttccaggacactgacgtggacttcaacggcagccacttcgagttcatccccttcggcgcgggccgccggatctgccccgggctggccatgggggtggcaaacgccgagtacatccttgccaacttgctctactgcttcaactgggcgctgcccaacggggtgagccgggagggtgtgaacatggaggaggaaggggtgctcacttaccggaagaagacctcactcatgctcgtgccaacaccttaccacccagcccaggagaaagaggaggagtattagtactcacttatttttctatatattctgttcctcgtgcattatcatttgttgttgttgttgttgttgttgttgttgtttattttaataaatcaatatgaataaaattctcaaattccgttccccgtacatc

SEQ ID NO: 64894 - protein, 529 aa, Triticum aestivum
  peptide (1)..(529): Ceres Seq. ID no. 14303547
  misc_feature (27)..(516): Homolog of NCBI NO: 13878390 NR Description: Cytochrome P450 71B10
  misc_feature (27)..(519): Homolog of NCBI NO: 15231538 NR Description: cytochrome P450 family [Arabidopsis thaliana]
  misc_feature (29)..(519): Homolog of NCBI NO: 15231542 NR Description: cytochrome p450 family [Arabidopsis thaliana]
  misc_feature (31)..(516): Homolog of NCBI NO: 25282603 NR Description: cytochrome P450 monooxygenase [imported] -
  misc_feature (31)..(516): Homolog of NCBI NO: 15222174 NR Description: cytochrome P450 family [Arabidopsis thaliana]
  misc_feature (33)..(519): Homolog of NCBI NO: 16507125 NR Description: cytochrome P450 [Citrus sinensis]
  misc_feature (17)..(523): Homolog of NCBI NO: 27817968 NR Description: putative cytochrome P450 71E1
  misc_feature (19)..(516): Homolog of NCBI NO: 37788136 NR Description: cytochrome P450 protein CYP71E [Manihot esculenta]
  misc_feature (11)..(519): Homolog of NCBI NO: 5915841 NR Description: Cytochrome P450 71E1 (4-hydroxyphenylacetaldehyde
  misc_feature (20)..(519): Homolog of NCBI NO: 34897434 NR Description: putative cytochrome P450 [Oryza sativa (japonica
TCYPAPATLTMAVAGAPPVLQLLPQQWQLILAILLVPLGFLLLRGRSGSGLKLPPGPMRLPFVGNLHQIGPLPHRSLAALARRHGPVMMLRLGMVPTVVLTSPEAAREALKTKDDDCSSRPLSAGPGLLSYGYKDVAFSPWSDYVREMRKLFIIELLSRRRVQSAYYARDAQIDKLIETLTVVGPNPVPLEAHIFATMDRIVGLFAFGESYAGEQFKGQFVPLLNATMDMLGSFSAQDFFPNAVGRLIDRITGVKAHRQRVFRQLDRFFEHIIEQCDGRKATGGGGSDLVQELLDIMKRPAASAAGTFTRDHVKAILMNTFIGSIDTTTVTITWAMAELIRKPRVLQRAQLEIRTAAGGGSRVHQADMPKMSYLRMVLSETLRLHPPATLLVPRETLRPIQVAGYDIPAKTQVIVNAWAISRDPSAWKDPEEFNPERFQDTDVDFNGSHFEFIPFGAGRRICPGLAMGVANAEYILANLLYCFNWALPNGVSREGVNMEEEGVLTYRKKTSLMLVPTPYHPAQEKEEEY

SEQ ID NO: 64895 - protein, 519 aa, Triticum aestivum
  peptide (1)..(519): Ceres Seq. ID no. 14303548
  misc_feature (17)..(506): Homolog of NCBI NO: 13878390 NR Description: Cytochrome P450 71B10
  misc_feature (17)..(509): Homolog of NCBI NO: 15231538 NR Description: cytochrome P450 family [Arabidopsis thaliana]
  misc_feature (19)..(509): Homolog of NCBI NO: 15231542 NR Description: cytochrome p450 family [Arabidopsis thaliana]
  misc_feature (21)..(506): Homolog of NCBI NO: 25282603 NR Description: cytochrome P450 monooxygenase [imported] -
  misc_feature (21)..(506): Homolog of NCBI NO: 15222174 NR Description: cytochrome P450 family [Arabidopsis thaliana]
  misc_feature (23)..(509): Homolog of NCBI NO: 16507125 NR Description: cytochrome P450 [Citrus sinensis]
  misc_feature (7)..(513): Homolog of NCBI NO: 27817968 NR Description: putative cytochrome P450 71E1
  misc_feature (9)..(506): Homolog of NCBI NO: 37788136 NR Description: cytochrome P450 protein CYP71E [Manihot esculenta]
  misc_feature (1)..(509): Homolog of NCBI NO: 5915841 NR Description: Cytochrome P450 71E1 (4-hydroxyphenylacetaldehyde
  misc_feature (10)..(509): Homolog of NCBI NO: 34897434 NR Description: putative cytochrome P450 [Oryza sativa (japonica
MAVAGAPPVLQLLPQQWQLILAILLVPLGFLLLRGRSGSGLKLPPGPMRLPFVGNLHQIGPLPHRSLAALARRHGPVMMLRLGMVPTVVLTSPEAAREALKTKDDDCSSRPLSAGPGLLSYGYKDVAFSPWSDYVREMRKLFIIELLSRRRVQSAYYARDAQIDKLIETLTVVGPNPVPLEAHIFATMDRIVGLFAFGESYAGEQFKGQFVPLLNATMDMLGSFSAQDFFPNAVGRLIDRITGVKAHRQRVFRQLDRFFEHIIEQCDGRKATGGGGSDLVQELLDIMKRPAASAAGTFTRDHVKAILMNTFIGSIDTTTVTITWAMAELIRKPRVLQRAQLEIRTAAGGGSRVHQADMPKMSYLRMVLSETLRLHPPATLLVPRETLRPIQVAGYDIPAKTQVIVNAWAISRDPSAWKDPEEFNPERFQDTDVDFNGSHFEFIPFGAGRRICPGLAMGVANAEYILANLLYCFNWALPNGVSREGVNMEEEGVLTYRKKTSLMLVPTPYHPAQEKEEEY

SEQ ID NO: 64896 - protein, 472 aa, Triticum aestivum
  peptide (1)..(472): Ceres Seq. ID no. 14303549
  misc_feature (1)..(459): Homolog of NCBI NO: 13878390 NR Description: Cytochrome P450 71B10
  misc_feature (1)..(462): Homolog of NCBI NO: 15231538 NR Description: cytochrome P450 family [Arabidopsis thaliana]
  misc_feature (1)..(462): Homolog of NCBI NO: 15231542 NR Description: cytochrome p450 family [Arabidopsis thaliana]
  misc_feature (1)..(459): Homolog of NCBI NO: 25282603 NR Description: cytochrome P450 monooxygenase [imported] -
  misc_feature (1)..(459): Homolog of NCBI NO: 15222174 NR Description: cytochrome P450 family [Arabidopsis thaliana]
  misc_feature (1)..(462): Homolog of NCBI NO: 16507125 NR Description: cytochrome P450 [Citrus sinensis]
  misc_feature (1)..(466): Homolog of NCBI NO: 27817968 NR Description: putative cytochrome P450 71E1
  misc_feature (1)..(459): Homolog of NCBI NO: 37788136 NR Description: cytochrome P450 protein CYP71E [Manihot esculenta]
  misc_feature (1)..(462): Homolog of NCBI NO: 5915841 NR Description: Cytochrome P450 71E1 (4-hydroxyphenylacetaldehyde
  misc_feature (1)..(462): Homolog of NCBI NO: 34897434 NR Description: putative cytochrome P450 [Oryza sativa (japonica
MRLPFVGNLHQIGPLPHRSLAALARRHGPVMMLRLGMVPTVVLTSPEAAREALKTKDDDCSSRPLSAGPGLLSYGYKDVAFSPWSDYVREMRKLFIIELLSRRRVQSAYYARDAQIDKLIETLTVVGPNPVPLEAHIFATMDRIVGLFAFGESYAGEQFKGQFVPLLNATMDMLGSFSAQDFFPNAVGRLIDRITGVKAHRQRVFRQLDRFFEHIIEQCDGRKATGGGGSDLVQELLDIMKRPAASAAGTFTRDHVKAILMNTFIGSIDTTTVTITWAMAELIRKPRVLQRAQLEIRTAAGGGSRVHQADMPKMSYLRMVLSETLRLHPPATLLVPRETLRPIQVAGYDIPAKTQVIVNAWAISRDPSAWKDPEEFNPERFQDTDVDFNGSHFEFIPFGAGRRICPGLAMGVANAEYILANLLYCFNWALPNGVSREGVNMEEEGVLTYRKKTSLMLVPTPYHPAQEKEEEY

SEQ ID NO: 64897 - DNA, 1233 bp, Triticum aestivum
  misc_feature (1)..(1233): Ceres Seq. ID no. 12617583
gcggctgcgggtgcgcgtgcagaggggacgacagagagagaagaggagccaacctccgccgccacggcttccgcgtgctaggaagacgaagcagagcggcagcaaagagagggaggccgcgatggaggtgggcttcctggggctgggcatcatgggcaaggcaatggcggccaacctcctccgccacggcttccgcgtcaccgtctggaaccggaccctctccaagtgcgacgagctcgtcgcgatgggtgccgccgtcggggacacgccggcgtccgtcgtcgccaagtgcaagtacaccatcgccatgctctccgatcccagcgccgcgctatctgttgttttcgacaaggatggcgtgctcgagcaaatcggagagggcaagggctacgtggacatgtccactgtcgatgctgcaacttcttgcaagataagcgaggcggttaaacaaaagggcggagcttttgttgaagctccagtttcagggagcaagaagccagctgaagatggccaattggtcattcttgctgcaggcgacaaggcactatatgatgatatggtccctgcatttgatgtacttgggaagaagtcgttctttctgggggagatgggaaatggagcaaagatgaaactggtggtcaacatgatcatgggaagtatgatgaatgctttttctgagggactctgtttggctgacaaaagtgggttgagcccccagacgcttcttgatgtcctggatctcggtgcaatcgcaaatccgatgttcaagatgaaagggccttcaatgctgcagggcagctacaatccagcatttcccctgaaacatcagcagaaggatatgaggctggctctgtcgttgggagatgaaaatgccgtgtccatgccagtggcagctgctgccaatgaggcattcaagaaagcaagaagcttgggacttggtgacctggattttcccgcggtgcacgaggttctgaaaggcactggtggttcaggctaaagcgtgattgggggctgaatgtttaaaaccacatgccatgggcatgcagatattcttgtagttcgtccaacccatgtggcttatcatcgtactattgatatgtacattcaacagttgatgctggattgtgctgtacgatgttttttttctagcaaggcttgtgcatgaacgaaccattgggatttgggacttgaatgccgccacgccagatggaaatataagtgcaagttctgtct

SEQ ID NO: 64898 - protein, 331 aa, Triticum aestivum
  peptide (1)..(331): Ceres Seq. ID no. 12617584
  misc_feature (42)..(202): Pfam Name: NAD binding domain of 6-phosphogluconate dehydrogenase Pfam Description: NAD binding domain of 6-phosphogluconate
  misc_feature (42)..(321): Homolog of NCBI NO: 13277568 NR Description: Similar to RIKEN cDNA 3930401K13 gene [Homo
  misc_feature (44)..(325): Homolog of NCBI NO: 39996474 NR Description: 3-hydroxyisobutyrate dehydrogenase family protein
  misc_feature (34)..(111): Homolog of NCBI NO: 8778467 NR Description: F1L3.35 [Arabidopsis thaliana]
  misc_feature (111)..(325): Homolog of NCBI NO: 8778467 NR Description: F1L3.35 [Arabidopsis thaliana]
  misc_feature (44)..(325): Homolog of NCBI NO: 23054597 NR Description: hypothetical protein [Geobacter metallireducens]
  misc_feature (34)..(325): Homolog of NCBI NO: 18394513 NR Description: Expressed protein
  misc_feature (41)..(266): Homolog of NCBI NO: 15146314 NR Description: AT3g25530/MWL2_15 [Arabidopsis thaliana]
  misc_feature (41)..(325): Homolog of NCBI NO: 18404556 NR Description: expressed protein
  misc_feature (41)..(325): Homolog of NCBI NO: 15375068 NR Description: gamma hydroxybutyrate dehydrogenase [Arabidopsis
  misc_feature (41)..(331): Homolog of NCBI NO: 29368238 NR Description: gamma hydroxybutyrate dehydrogenase-like protein
RLRVRVQRGRQREKRSQPPPPRLPRARKTKQSGSKEREAAMEVGFLGLGIMGKAMAANLLRHGFRVTVWNRTLSKCDELVAMGAAVGDTPASVVAKCKYTIAMLSDPSAALSVVFDKDGVLEQIGEGKGYVDMSTVDAATSCKISEAVKQKGGAFVEAPVSGSKKPAEDGQLVILAAGDKALYDDMVPAFDVLGKKSFFLGEMGNGAKMKLVVNMIMGSMMNAFSEGLCLADKSGLSPQTLLDVLDLGAIANPMFKMKGPSMLQGSYNPAFPLKHQQKDMRLALSLGDENAVSMPVAAAANEAFKKARSLGLGDLDFPAVHEVLKGTGGSG

SEQ ID NO: 64899 - protein, 291 aa, Triticum aestivum
  peptide (1)..(291): Ceres Seq. ID no. 12617585
  misc_feature (2)..(162): Pfam Name: NAD binding domain of 6-phosphogluconate dehydrogenase Pfam Description: NAD binding domain of 6-phosphogluconate
  misc_feature (2)..(281): Homolog of NCBI NO: 13277568 NR Description: Similar to RIKEN cDNA 3930401K13 gene [Homo
  misc_feature (4)..(285): Homolog of NCBI NO: 39996474 NR Description: 3-hydroxyisobutyrate dehydrogenase family protein
  misc_feature (1)..(71): Homolog of NCBI NO: 8778467 NR Description: F1L3.35 [Arabidopsis thaliana]
  misc_feature (71)..(285): Homolog of NCBI NO: 8778467 NR Description: F1L3.35 [Arabidopsis thaliana]
  misc_feature (4)..(285): Homolog of NCBI NO: 23054597 NR Description: hypothetical protein [Geobacter metallireducens]
  misc_feature (1)..(285): Homolog of NCBI NO: 18394513 NR Description: Expressed protein
  misc_feature (1)..(226): Homolog of NCBI NO: 15146314 NR Description: AT3g25530/MWL2_15 [Arabidopsis thaliana]
  misc_feature (1)..(285): Homolog of NCBI NO: 18404556 NR Description: expressed protein
  misc_feature (1)..(285): Homolog of NCBI NO: 15375068 NR Description: gamma hydroxybutyrate dehydrogenase [Arabidopsis
  misc_feature (1)..(291): Homolog of NCBI NO: 29368238 NR Description: gamma hydroxybutyrate dehydrogenase-like protein
MEVGFLGLGIMGKAMAANLLRHGFRVTVWNRTLSKCDELVAMGAAVGDTPASVVAKCKYTIAMLSDPSAALSVVFDKDGVLEQIGEGKGYVDMSTVDAATSCKISEAVKQKGGAFVEAPVSGSKKPAEDGQLVILAAGDKALYDDMVPAFDVLGKKSFFLGEMGNGAKMKLVVNMIMGSMMNAFSEGLCLADKSGLSPQTLLDVLDLGAIANPMFKMKGPSMLQGSYNPAFPLKHQQKDMRLALSLGDENAVSMPVAAAANEAFKKARSLGLGDLDFPAVHEVLKGTGGSG

SEQ ID NO: 64900 - protein, 281 aa, Triticum aestivum
  peptide (1)..(281): Ceres Seq. ID no. 12617586
  misc_feature (1)..(152): Pfam Name: NAD binding domain of 6-phosphogluconate dehydrogenase Pfam Description: NAD binding domain of 6-phosphogluconate
  misc_feature (1)..(271): Homolog of NCBI NO: 13277568 NR Description: Similar to RIKEN cDNA 3930401K13 gene [Homo
  misc_feature (1)..(275): Homolog of NCBI NO: 39996474 NR Description: 3-hydroxyisobutyrate dehydrogenase family protein
  misc_feature (1)..(61): Homolog of NCBI NO: 8778467 NR Description: F1L3.35 [Arabidopsis thaliana]
  misc_feature (61)..(275): Homolog of NCBI NO: 8778467 NR Description: F1L3.35 [Arabidopsis thaliana]
  misc_feature (1)..(275): Homolog of NCBI NO: 23054597 NR Description: hypothetical protein [Geobacter metallireducens]
  misc_feature (1)..(275): Homolog of NCBI NO: 18394513 NR Description: Expressed protein
  misc_feature (1)..(216): Homolog of NCBI NO: 15146314 NR Description: AT3g25530/MWL2_15 [Arabidopsis thaliana]
  misc_feature (1)..(275): Homolog of NCBI NO: 18404556 NR Description: expressed protein
  misc_feature (1)..(275): Homolog of NCBI NO: 15375068 NR Description: gamma hydroxybutyrate dehydrogenase [Arabidopsis
  misc_feature (1)..(281): Homolog of NCBI NO: 29368238 NR Description: gamma hydroxybutyrate dehydrogenase-like protein
MGKAMAANLLRHGFRVTVWNRTLSKCDELVAMGAAVGDTPASVVAKCKYTIAMLSDPSAALSVVFDKDGVLEQIGEGKGYVDMSTVDAATSCKISEAVKQKGGAFVEAPVSGSKKPAEDGQLVILAAGDKALYDDMVPAFDVLGKKSFFLGEMGNGAKMKLVVNMIMGSMMNAFSEGLCLADKSGLSPQTLLDVLDLGAIANPMFKMKGPSMLQGSYNPAFPLKHQQKDMRLALSLGDENAVSMPVAAAANEAFKKARSLGLGDLDFPAVHEVLKGTGGSG

SEQ ID NO: 64901 - DNA, 1237 bp, Triticum aestivum
  misc_feature (1)..(1237): Ceres Seq. ID no. 13655808
cctagaacatcctaatcgaaaagattacaataataaacacacatgacacatctcctctctcgctctccctcccaggcagcatccaaagaagcggctagctttgctgctgctgctccaaccgaaaaggcgaggggagacggaggaggggcggccgtggggaggagcgtgaggccgcgagctccagctccagctcaaccctgaagaagaaggcctctccccttcccccgagctcaagcccagagcaaagctcacttatgtctgcctatggagtcatctacaactgatgccggtgataagcatttggagagctacctgacattgggtttgacagtatcgcagtcaaagaaagggaataccaagtttccaaaggtcctgtcgcttcttgccacatatctgggcagatcagttcagaagaatgaagaattactaggttcaaatggaataaaggaggcagccaccatctttcatggccagaaggtgccagatctcagtatacagctctatgcagaacgcatcttcaagtatgctgagtgcagtccatcctgctttgtgttggcacttrtctacatggagagatatctacagcagccaaatgtgtacatgacgcccttcagcgttcatcgcttgctgattacaagtgtggtggttgctgccaaattcacagatgacgcgtttttcaacaatgcattctacgctagagtgggaggaatccgcacaatcgagatgaatcggcttgaactggatttgttatttaatctggacttcaggctgaaagtgaacctagagacgtttgggagctactgcttgcaactggagaaacatgcaccggtgtcaccagagagactgccggttcaggttcatcgtgtcaatggatctaaagatttgagctatagcaacagcagcgccgacgagttttgccagagcaagcttgtaagctacagcagccaggctctccaaggatgcagctgaccaatctatttatggcctaaagttttgcaaagcatgtgacctgattactgataattcttttagatctgacatttgtgcattcagattgcattaagttgttctgagggtgtttgattagtagggattcgattctgctttacttgtgtaacactgtaattcttgcaaaccactttgtttaaaatgttcacaatctagttgggaaacaccaggtctgaatattattcagtcctgtgattccaatgccgcggttttaccggatctgctgccc

SEQ ID NO: 64902 - protein, 234 aa, Triticum aestivum
  peptide (1)..(234): Ceres Seq. ID no. 15220555
  misc_feature (36)..(170): Pfam Name: Cyclin, N-terminal domain Pfam Description: Cyclin, N-terminal domain
  misc_feature (34)..(185): Homolog of NCBI NO: 15240306 NR Description: cyclin family [Arabidopsis thaliana]
  misc_feature (24)..(185): Homolog of NCBI NO: 15232360 NR Description: cyclin family [Arabidopsis thaliana]
  misc_feature (65)..(194): Homolog of NCBI NO: 6729043 NR Description: hypothetical protein [Arabidopsis thaliana]
  misc_feature (34)..(184): Homolog of NCBI NO: 37536902 NR Description: hypothetical protein [Oryza sativa (japonica
  misc_feature (34)..(185): Homolog of NCBI NO: 15240794 NR Description: cyclin family [Arabidopsis thaliana]
  misc_feature (6)..(185): Homolog of NCBI NO: 15233185 NR Description: cyclin family [Arabidopsis thaliana]
  misc_feature (35)..(185): Homolog of NCBI NO: 15224950 NR Description: cyclin family [Arabidopsis thaliana]
  misc_feature (1)..(185): Homolog of NCBI NO: 21593009 NR Description: unknown [Arabidopsis thaliana]
  misc_feature (1)..(185): Homolog of NCBI NO: 15229382 NR Description: cyclin family [Arabidopsis thaliana]
  misc_feature (20)..(185): Homolog of NCBI NO: 25493992 NR Description: PREG-like protein [imported] - Picea mariana
  misc_feature (100)..(100): Xaa is any aa, unknown or other
MESSTTDAGDKHLESYLTLGLTVSQSKKGNTKFPKVLSLLATYLGRSVQKNEELLGSNGIKEAATIFHGQKVPDLSIQLYAERIFKYAECSPSCFVLALXYMERYLQQPNVYMTPFSVHRLLITSVVVAAKFTDDAFFNNAFYARVGGIRTIEMNRLELDLLFNLDFRLKVNLETFGSYCLQLEKHAPVSPERLPVQVHRVNGSKDLSYSNSSADEFCQSKLVSYSSQALQGCS

SEQ ID NO: 64903 - protein, 133 aa, Triticum aestivum
  peptide (1)..(133): Ceres Seq. ID no. 15220556
  misc_feature (1)..(69): Pfam Name: Cyclin, N-terminal domain Pfam Description: Cyclin, N-terminal domain
  misc_feature (1)..(84): Homolog of NCBI NO: 15240306 NR Description: cyclin family [Arabidopsis thaliana]
  misc_feature (1)..(84): Homolog of NCBI NO: 15232360 NR Description: cyclin family [Arabidopsis thaliana]
  misc_feature (1)..(93): Homolog of NCBI NO: 6729043 NR Description: hypothetical protein [Arabidopsis thaliana]
  misc_feature (1)..(83): Homolog of NCBI NO: 37536902 NR Description: hypothetical protein [Oryza sativa (japonica
  misc_feature (1)..(84): Homolog of NCBI NO: 15240794 NR Description: cyclin family [Arabidopsis thaliana]
  misc_feature (1)..(84): Homolog of NCBI NO: 15233185 NR Description: cyclin family [Arabidopsis thaliana]
  misc_feature (1)..(84): Homolog of NCBI NO: 15224950 NR Description: cyclin family [Arabidopsis thaliana]
  misc_feature (1)..(84): Homolog of NCBI NO: 21593009 NR Description: unknown [Arabidopsis thaliana]
  misc_feature (1)..(84): Homolog of NCBI NO: 15229382 NR Description: cyclin family [Arabidopsis thaliana]
  misc_feature (1)..(84): Homolog of NCBI NO: 25493992 NR Description: PREG-like protein [imported] - Picea mariana
MERYLQQPNVYMTPFSVHRLLITSVVVAAKFTDDAFFNNAFYARVGGIRTIEMNRLELDLLFNLDFRLKVNLETFGSYCLQLEKHAPVSPERLPVQVHRVNGSKDLSYSNSSADEFCQSKLVSYSSQALQGCS

SEQ ID NO: 64904 - protein, 122 aa, Triticum aestivum
  peptide (1)..(122): Ceres Seq. ID no. 15220557
  misc_feature (1)..(58): Pfam Name: Cyclin, N-terminal domain Pfam Description: Cyclin, N-terminal domain
  misc_feature (1)..(73): Homolog of NCBI NO: 15240306 NR Description: cyclin family [Arabidopsis thaliana]
  misc_feature (1)..(73): Homolog of NCBI NO: 15232360 NR Description: cyclin family [Arabidopsis thaliana]
  misc_feature (1)..(82): Homolog of NCBI NO: 6729043 NR Description: hypothetical protein [Arabidopsis thaliana]
  misc_feature (1)..(72): Homolog of NCBI NO: 37536902 NR Description: hypothetical protein [Oryza sativa (japonica
  misc_feature (1)..(73): Homolog of NCBI NO: 15240794 NR Description: cyclin family [Arabidopsis thaliana]
  misc_feature (1)..(73): Homolog of NCBI NO: 15233185 NR Description: cyclin family [Arabidopsis thaliana]
  misc_feature (1)..(73): Homolog of NCBI NO: 15224950 NR Description: cyclin family [Arabidopsis thaliana]
  misc_feature (1)..(73): Homolog of NCBI NO: 21593009 NR Description: unknown [Arabidopsis thaliana]
  misc_feature (1)..(73): Homolog of NCBI NO: 15229382 NR Description: cyclin family [Arabidopsis thaliana]
  misc_feature (1)..(73): Homolog of NCBI NO: 25493992 NR Description: PREG-like protein [imported] - Picea mariana
MTPFSVHRLLITSVVVAAKFTDDAFFNNAFYARVGGIRTIEMNRLELDLLFNLDFRLKVNLETFGSYCLQLEKHAPVSPERLPVQVHRVNGSKDLSYSNSSADEFCQSKLVSYSSQALQGCS

SEQ ID NO: 64905 - DNA, 1368 bp, Triticum aestivum
  misc_feature (1)..(1368): Ceres Seq. ID no. 13656160
ctagaacatcctaatcgaaaaaattgctctggttaatggatctgaatttgcaattatctctcttatagactcagagaatgacttcaggattccagaatcattgccatgccttcatgataaggtacttgcagcagcagctgaagcagctatgagcatctcgatagaccagaaaggaaagcagaatccagcagcaggagttattggtggcattattaaaggattaaaaggaaaagcggatgaaaatgcaaacctgagaaaaagtttcaattcccaaacccccagtgaactattggagtcaattttcttgaaaggaccatatgttgaaccatcactagcttatcctgatgatccaatagaagaactgtcaattgatgacatagaaattgatgatgaagtgcccctatcccctccgccagcatcatcctctgcttgtcacatgaataagaaagcaacagtagaggacgagagagcgaaactgtttgaagggtcaagtgatgctgacaaaccaagaatgagaagtacccaagaaattctcaccaaatataagtttggcggggatgcaacagcagcagctgcccatgcgaaggataagctcatgcagcggcaggagaaactcgagagaataagccagcggaccgcagagcttcaagacggggcggaaaatttcgcctcgctcgcccaggagctcgcgaaaacaatggagaacaagaagtggtggaaactgtaacctattcggggttttcacatcactgcatcctatcctacacaaagtacgtccagctctcggtacttgggaatgccttatttgccggttgttatttatcgtggcatggttccgcccattccgccccgcctttgtgctgtgtatatttatgttcatggacaactgcagcttgtcaaggtgattgtctaccttgccactaggttgactcactcactgacagacagacagacagcatggcttgtttggatgcattagcttaggtttatgttgtatatcaccatgtaatcatatgcaccatgggtggaaagcgtggggcggaacctacttgccgtacatgatttcttttgggtggtcattcagtcgttcgttctgtctgtaaaggtaaaaggagacaataaaccgaacggcttacattgagaaacttcaaagagcctgtgtggcattgttagttggtggtatctgatgtgacaccttctcactaatacttgaactgtggttatcaagttgcaatgtgtatgtttttgttttttgttttttgtttaaaaaaaaaaaaaaaaaaaaaaaaaaaaaaaaaaaaaaaaaataaaaaaaaaaaaaaaaaagygtttawacacratammgtyggamctsgagggggggcccgg

SEQ ID NO: 64906 - protein, 192 aa, Triticum aestivum
  peptide (1)..(192): Ceres Seq. ID no. 15219805
  misc_feature (124)..(184): Pfam Name: Synaptobrevin Pfam Description: Synaptobrevin
  misc_feature (1)..(188): Homolog of NCBI NO: 38345401 NR Description: OSJNBa0017B10.7 [Oryza sativa (japonica
  misc_feature (1)..(192): Homolog of NCBI NO: 15239173 NR Description: transducin / WD-40 repeat protein family
  misc_feature (1)..(192): Homolog of NCBI NO: 34898238 NR Description: P0034A04.30 [Oryza sativa (japonica
MSISIDQKGKQNPAAGVIGGIIKGLKGKADENANLRKSFNSQTPSELLESIFLKGPYVEPSLAYPDDPIEELSIDDIEIDDEVPLSPPPASSSACHMNKKATVEDERAKLFEGSSDADKPRMRSTQEILTKYKFGGDATAAAAHAKDKLMQRQEKLERISQRTAELQDGAENFASLAQELAKTMENKKWWKL

SEQ ID NO: 64907 - protein, 96 aa, Triticum aestivum
  peptide (1)..(96): Ceres Seq. ID no. 15219806
  misc_feature (28)..(88): Pfam Name: Synaptobrevin Pfam Description: Synaptobrevin
  misc_feature (1)..(92): Homolog of NCBI NO: 38345401 NR Description: OSJNBa0017B10.7 [Oryza sativa (japonica
  misc_feature (1)..(96): Homolog of NCBI NO: 15239173 NR Description: transducin / WD-40 repeat protein family
  misc_feature (1)..(96): Homolog of NCBI NO: 34898238 NR Description: P0034A04.30 [Oryza sativa (japonica
MNKKATVEDERAKLFEGSSDADKPRMRSTQEILTKYKFGGDATAAAAHAKDKLMQRQEKLERISQRTAELQDGAENFASLAQELAKTMENKKWWKL

SEQ ID NO: 64908 - DNA, 1654 bp, Triticum aestivum
  misc_feature (1)..(1654): Ceres Seq. ID no. 13656161
accgatctcgcctcgccaagcccaccaaccggctcacgccgcatcgcatcgcgatccagcgttcctctcgagccttccatccagagccctcccaaacccctccgccgaccccccgagcccccgcccgccgccgccgccgccgcgccggagatggtgtacatcggcgcgcacggcgtggagacgctgaagcgctacaggtacagcggccaggaccactcggtggtggccaagtacgtgctgcagcccttctggagccgctgcgtcaccctcttcccgctctggatgccaccaaacatgatcacactcatgggatttatgtttctacttacatcttcgctgcttagctatatttattcaccccaccttgacacagctccccctcggtgggtccatcttgcccatggaatacttctcttcttgtaccagacttttgatgccgttgatggtaaacaagcaaggcgcaccagctcatcaagtcctctaggagaactttttgatcatggatgtgatgcccttgcctgcgcttttgaagccttggcccttggaagcaccttgatgtgtggaaggttgacattctgttactgggtggttgctgctgtcccattttatctggcaacatgggaacactactttacaaatactcttattcttcctgtaataaatggaccaacggaaggcctgatgctgatctatgtctcccacctttttacctgttttactggtgctgaatggtgggcgcaagattttcggaaatccctccctcttattagtttggttccacttccatttgttccagaaatccccttatatgttatcgtgctgattctgatgatcacgtttgctgtaatcccaacagttggatccaatattggtaatgtccaaaaagttgttgatgcacggaaagggagcatggaattagcattggcaatgctccttccatttattgcgctgttggctggagttgctgtctggtgttatctctctccttcagatatcatgaggaaccagccacatctgcttgtgatcggaactggttctgcctttggatatttggttggaaggatgatacttgctcatttatgtgacgagcccaaaggtctaaaaacaggaatgtgcatggctctggtgtttcttccatttgctattgcaaatgctctcaccgccaagattaacaatgggacccctttggctgatgagcttttggttattcttctgtactgtgcaacctcagtgggtctttacatgcatcttgccatttcggtttgtcatgaaatcaaggatgctcttggaatctattgcttcaggatagccagaaaagaggcttgaatttgcctgaatccctacgtagcatttgaagcattctgccttccagacattgtccgtctgcattcacaagtcttaacattacaacaacgtatagccatggatgctcaacgaatcctgtcattggaactccatggccaccggttattcatcatgctaaatgcagatatgcagatagatatatcttgtgtggactgtaatgcagatttgtgttaagtagcatatgtacatgtggtgcggtcggtgtaatgtacgtcatgggtagggaagcggtagctttcttaacttaaactagatggtgggatgaccgatgtttctaagattgtgttcc

SEQ ID NO: 64909 - protein, 441 aa, Triticum aestivum
  peptide (1)..(441): Ceres Seq. ID no. 15219807
  misc_feature (136)..(273): Pfam Name: CDP-alcohol phosphatidyltransferase Pfam Description: CDP-alcohol phosphatidyltransferase
  misc_feature (52)..(439): Homolog of NCBI NO: 2425056 NR Description: LipB [Dictyostelium discoideum]
  misc_feature (51)..(441): Homolog of NCBI NO: 27762264 NR Description: aminoalcoholphosphotransferase [Brassica napus]
  misc_feature (51)..(380): Homolog of NCBI NO: 18390098 NR Description: aminoalcoholphosphotransferase [Sorghum bicolor]
  misc_feature (51)..(441): Homolog of NCBI NO: 5917787 NR Description: aminoalcoholphosphotransferase [Brassica rapa]
  misc_feature (51)..(441): Homolog of NCBI NO: 15229490 NR Description: aminoalcoholphosphotransferase, putative
  misc_feature (51)..(439): Homolog of NCBI NO: 30313359 NR Description: aminoalcoholphosphotransferase [Brassica rapa
  misc_feature (51)..(441): Homolog of NCBI NO: 3927806 NR Description: aminoalcoholphosphotransferase [Pimpinella
  misc_feature (51)..(441): Homolog of NCBI NO: 15222885 NR Description: aminoalcoholphosphotransferase [Arabidopsis
  misc_feature (51)..(441): Homolog of NCBI NO: 7488522 NR Description: ethanolaminephosphotransferase homolog - turnip
  misc_feature (51)..(441): Homolog of NCBI NO: 7488701 NR Description: probable ethanolaminephosphotransferase (EC
TDLASPSPPTGSRRIASRSSVPLEPSIQSPPKPLRRPPEPPPAAAAAAPEMVYIGAHGVETLKRYRYSGQDHSVVAKYVLQPFWSRCVTLFPLWMPPNMITLMGFMFLLTSSLLSYIYSPHLDTAPPRWVHLAHGILLFLYQTFDAVDGKQARRTSSSSPLGELFDHGCDALACAFEALALGSTLMCGRLTFCYWVVAAVPFYLATWEHYFTNTLILPVINGPTEGLMLIYVSHLFTCFTGAEWWAQDFRKSLPLISLVPLPFVPEIPLYVIVLILMITFAVIPTVGSNIGNVQKVVDARKGSMELALAMLLPFIALLAGVAVWCYLSPSDIMRNQPHLLVIGTGSAFGYLVGRMILAHLCDEPKGLKTGMCMALVFLPFAIANALTAKINNGTPLADELLVILLYCATSVGLYMHLAISVCHEIKDALGIYCFRIARKEA

SEQ ID NO: 64910 - protein, 391 aa, Triticum aestivum
  peptide (1)..(391): Ceres Seq. ID no. 15219808
  misc_feature (86)..(223): Pfam Name: CDP-alcohol phosphatidyltransferase Pfam Description: CDP-alcohol phosphatidyltransferase
  misc_feature (2)..(389): Homolog of NCBI NO: 2425056 NR Description: LipB [Dictyostelium discoideum]
  misc_feature (1)..(391): Homolog of NCBI NO: 27762264 NR Description: aminoalcoholphosphotransferase [Brassica napus]
  misc_feature (1)..(330): Homolog of NCBI NO: 18390098 NR Description: aminoalcoholphosphotransferase [Sorghum bicolor]
  misc_feature (1)..(391): Homolog of NCBI NO: 5917787 NR Description: aminoalcoholphosphotransferase [Brassica rapa]
  misc_feature (1)..(391): Homolog of NCBI NO: 15229490 NR Description: aminoalcoholphosphotransferase, putative
  misc_feature (1)..(389): Homolog of NCBI NO: 30313359 NR Description: aminoalcoholphosphotransferase [Brassica rapa
  misc_feature (1)..(391): Homolog of NCBI NO: 3927806 NR Description: aminoalcoholphosphotransferase [Pimpinella
  misc_feature (1)..(391): Homolog of NCBI NO: 15222885 NR Description: aminoalcoholphosphotransferase [Arabidopsis
  misc_feature (1)..(391): Homolog of NCBI NO: 7488522 NR Description: ethanolaminephosphotransferase homolog - turnip
  misc_feature (1)..(391): Homolog of NCBI NO: 7488701 NR Description: probable ethanolaminephosphotransferase (EC
MVYIGAHGVETLKRYRYSGQDHSVVAKYVLQPFWSRCVTLFPLWMPPNMITLMGFMFLLTSSLLSYIYSPHLDTAPPRWVHLAHGILLFLYQTFDAVDGKQARRTSSSSPLGELFDHGCDALACAFEALALGSTLMCGRLTFCYWVVAAVPFYLATWEHYFTNTLILPVINGPTEGLMLIYVSHLFTCFTGAEWWAQDFRKSLPLISLVPLPFVPEIPLYVIVLILMITFAVIPTVGSNIGNVQKVVDARKGSMELALAMLLPFIALLAGVAVWCYLSPSDIMRNQPHLLVIGTGSAFGYLVGRMILAHLCDEPKGLKTGMCMALVFLPFAIANALTAKINNGTPLADELLVILLYCATSVGLYMHLAISVCHEIKDALGIYCFRIARKEA

SEQ ID NO: 64911 - protein, 347 aa, Triticum aestivum
  peptide (1)..(347): Ceres Seq. ID no. 15219809
  misc_feature (42)..(179): Pfam Name: CDP-alcohol phosphatidyltransferase Pfam Description: CDP-alcohol phosphatidyltransferase
  misc_feature (1)..(345): Homolog of NCBI NO: 2425056 NR Description: LipB [Dictyostelium discoideum]
  misc_feature (1)..(347): Homolog of NCBI NO: 27762264 NR Description: aminoalcoholphosphotransferase [Brassica napus]
  misc_feature (1)..(286): Homolog of NCBI NO: 18390098 NR Description: aminoalcoholphosphotransferase [Sorghum bicolor]
  misc_feature (1)..(347): Homolog of NCBI NO: 5917787 NR Description: aminoalcoholphosphotransferase [Brassica rapa]
  misc_feature (1)..(347): Homolog of NCBI NO: 15229490 NR Description: aminoalcoholphosphotransferase, putative
  misc_feature (1)..(345): Homolog of NCBI NO: 30313359 NR Description: aminoalcoholphosphotransferase [Brassica rapa
  misc_feature (1)..(347): Homolog of NCBI NO: 3927806 NR Description: aminoalcoholphosphotransferase [Pimpinella
  misc_feature (1)..(347): Homolog of NCBI NO: 15222885 NR Description: aminoalcoholphosphotransferase [Arabidopsis
  misc_feature (1)..(347): Homolog of NCBI NO: 7488522 NR Description: ethanolaminephosphotransferase homolog - turnip
  misc_feature (1)..(347): Homolog of NCBI NO: 7488701 NR Description: probable ethanolaminephosphotransferase (EC
MPPNMITLMGFMFLLTSSLLSYIYSPHLDTAPPRWVHLAHGILLFLYQTFDAVDGKQARRTSSSSPLGELFDHGCDALACAFEALALGSTLMCGRLTFCYWVVAAVPFYLATWEHYFTNTLILPVINGPTEGLMLIYVSHLFTCFTGAEWWAQDFRKSLPLISLVPLPFVPEIPLYVIVLILMITFAVIPTVGSNIGNVQKVVDARKGSMELALAMLLPFIALLAGVAVWCYLSPSDIMRNQPHLLVIGTGSAFGYLVGRMILAHLCDEPKGLKTGMCMALVFLPFAIANALTAKINNGTPLADELLVILLYCATSVGLYMHLAISVCHEIKDALGIYCFRIARKEA

SEQ ID NO: 64912 - DNA, 1175 bp, Triticum aestivum
  misc_feature (1)..(1175): Ceres Seq. ID no. 13662758
attcggcctccagccctttaaaccccacaaaaccctagacttcgcagcgagcagccgtcgtccgatccccacagaaacaccaaagcccgagccatgtcgtcggcgtccctcgccgccaggctcctccgccgcgccgccthttcgtcgcgggcctccaccctatcccgacgctgcgcccactcctccgcgacgtcccgcgcgcccgtttcgcttgcccgtttccaccccgccgccgcctccccttcagggaccactgcccgccgcttcctgtcgtcgcagtccccggcgtcttcctccaagatctccccggacgagaacctgaggcgggtcatcgactccgagatcgagtgcgtcgtcgaatcggaggagggctccgcgcagcaaattgatccaccagaagacttcccctttgagataattgataaccctggtgatcagtccatcgttctcaaaagagagcttgcaggagagactattaaagctactgtctacacaaattttgatactgaggaagatttgaacaatgaggactctggtgctgagaatgatgatgactcatttaagccagcacttcagatggttgtcactgttgagaaaccaggaggctcaatcctggaatttgagtgcaactttaatgatgatgaactggcaattgaaaatatgaggttgctgaatcgcgatgccaagtttactgagaatgcatatgaggggccacaattctctgatctggacgagagcttgcagaagtcctttcacaggtatcttgaggtgagggggatcaagcactcgctgcatgactggctgcacgagtacatgatgagcaaggatgagaaggagtacgtggtttggttgaagaacatgagagagttcatcgagaaatgagtgccactgcccgtcattctcttttaatagaaagaacatgcctggtgctctatgtcaaacctgtctgatcataattgtgccttgctttctggcacaccaagtctcggtggacgctgagctggatttatattttgctggacctgtttagctgtagaaaagtttcggcatcttatctttcgatgtttaacctgtgatccgttcagatatgatcagttcatgtattttcagccgtgagtatattgctacgtacgttctagaagaaaaaaaaaaaaaaaaaagcttatcgataccgt

SEQ ID NO: 64913 - protein, 262 aa, Triticum aestivum
  peptide (1)..(262): Ceres Seq. ID no. 15220188
  misc_feature (80)..(260): Pfam Name: Mitochondrial glycoprotein Pfam Description: Mitochondrial glycoprotein
  misc_feature (1)..(262): Homolog of NCBI NO: 34895742 NR Description: P0019D06.29 [Oryza sativa (japonica
  misc_feature (8)..(261): Homolog of NCBI NO: 15239320 NR Description: expressed protein [Arabidopsis thaliana]
  misc_feature (12)..(260): Homolog of NCBI NO: 34895730 NR Description: P0019D06.23 [Oryza sativa (japonica
  misc_feature (12)..(262): Homolog of NCBI NO: 7487698 NR Description: hypothetical protein At2g39790 [imported] -
  misc_feature (5)..(262): Homolog of NCBI NO: 21593469 NR Description: unknown [Arabidopsis thaliana]
  misc_feature (5)..(262): Homolog of NCBI NO: 18405164 NR Description: expressed protein [Arabidopsis thaliana]
  misc_feature (20)..(262): Homolog of NCBI NO: 18410318 NR Description: expressed protein [Arabidopsis thaliana]
  misc_feature (1)..(262): Homolog of NCBI NO: 11357566 NR Description: hypothetical protein F1I16.10 - Arabidopsis
  misc_feature (10)..(262): Homolog of NCBI NO: 21592321 NR Description: unknown [Arabidopsis thaliana]
  misc_feature (10)..(262): Homolog of NCBI NO: 15241669 NR Description: expressed protein [Arabidopsis thaliana]
  misc_feature (16)..(16): Xaa is any aa, unknown or other
MSSASLAARLLRRAAXSSRASTLSRRCAHSSATSRAPVSLARFHPAAASPSGTTARRFLSSQSPASSSKISPDENLRRVIDSEIECVVESEEGSAQQIDPPEDFPFEIIDNPGDQSIVLKRELAGETIKATVYTNFDTEEDLNNEDSGAENDDDSFKPALQMVVTVEKPGGSILEFECNFNDDELAIENMRLLNRDAKFTENAYEGPQFSDLDESLQKSFHRYLEVRGIKHSLHDWLHEYMMSKDEKEYVVWLKNMREFIEK

SEQ ID NO: 64914 - DNA, 1379 bp, Triticum aestivum
  misc_feature (1)..(1379): Ceres Seq. ID no. 13598527
actcacctcacctcatctcacctgccatcgatatcgctcccttatcccgaaccccaaatccccctctccggtccggcgcctccgtctctctcgccgaacaccatgggctccgacttcaaggccatccctctgatcgatatcagcccgctcgtcgagaagatcgacgaccctgccatggccggcgacgagggtctcctcgacgtcgtccggatgctggacgacgcttgcagggaggccgggttcttctatgtgaaaggccatgggatttcggagtcgctaatgacggaagtcagggatgtcacacgcaagttctttcagctccctcgcgaggaaaaactgaagatcaaaatgacacctcagagtggatatagaggatatcagagagtgggagaaaatgttaccaagggtaaacctgatatgcatgaagcaattgattgctacacgcctatcgaaccaggcagatatggagatcttgctaaaccaatggaaggatctaatttgtggccagattatccatcaaattttgatgcgctgctggaaaactatataagccttctacgagatctttcaaggaagatcatgagaggcatagccttggcactgggtgcgccgttggattctttcgaaggcggagtggcgggagatgctttctgggttctcaggttaattggctatccagtctcagatgacatcccacaagaggaacgcactgatattggatgtggagctcatacagattatggtcttctgacattggtgaatcaggatgatgatatatgtgctcttgaggtcagaaaccagtccggtgagtggatatacgccaagccggtccctggaaccttcgtttgcaacatcggcgacatgctgaaggtttggtcgaatgggatataccagcccacgctccacagagtcgtcaataactcccctcgctaccgtgtatctgtcgccttcttctacgagtcgaacttcgacgctgcggtggaacctgtagagttctgccgggagaaaacgggcggcgttgccaagtatgagaaggtggtgtatggggagcacctagtgcagaaagtcctcaccaacttcgtcatgtaacagtttgggggaggggaggtgaaagcctgaaagggaacaaatttctgtagctgtactgaaaatgatccatcaataaaacccttcgacaaatcagcctcctttctggtcggacaaagtaactgtcccggtgtatcgtgaccaggcaaggcagcacatgaggatttcctctcatctggctttctcgctttgcttgcgttctgcggatcgaaccctcacaactggttcacaatccgttgtaatttcgtgacgacaatgtaaatgcaaccaccaatatgtcttgttgttacttc

SEQ ID NO: 64915 - protein, 362 aa, Triticum aestivum
  peptide (1)..(362): Ceres Seq. ID no. 15222359
  misc_feature (217)..(320): Pfam Name: 2OG-Fe(II) oxygenase superfamily Pfam Description: 2OG-Fe(II) oxygenase superfamily
  misc_feature (41)..(331): Homolog of NCBI NO: 15599386 NR Description: probable iron/ascorbate oxidoreductase
  misc_feature (38)..(331): Homolog of NCBI NO: 23130050 NR Description: hypothetical protein [Nostoc punctiforme]
  misc_feature (35)..(362): Homolog of NCBI NO: 11255902 NR Description: flavonol synthase-like protein - Arabidopsis
  misc_feature (45)..(360): Homolog of NCBI NO: 15229181 NR Description: oxidoreductase (din11), putative [Arabidopsis
  misc_feature (35)..(360): Homolog of NCBI NO: 19423910 NR Description: unknown protein [Arabidopsis thaliana]
  misc_feature (35)..(360): Homolog of NCBI NO: 22331716 NR Description: oxidoreductase (din11), putative [Arabidopsis
  misc_feature (35)..(360): Homolog of NCBI NO: 11255891 NR Description: hypothetical protein T9C5.210 - Arabidopsis
  misc_feature (35)..(362): Homolog of NCBI NO: 21554579 NR Description: flavonol synthase-like protein [Arabidopsis
  misc_feature (35)..(362): Homolog of NCBI NO: 18409039 NR Description: oxidoreductase (din11), putative [Arabidopsis
  misc_feature (35)..(360): Homolog of NCBI NO: 6984228 NR Description: putative flavonol synthase-like protein
THLTSSHLPSISLPYPEPQIPLSGPAPPSLSPNTMGSDFKAIPLIDISPLVEKIDDPAMAGDEGLLDVVRMLDDACREAGFFYVKGHGISESLMTEVRDVTRKFFQLPREEKLKIKMTPQSGYRGYQRVGENVTKGKPDMHEAIDCYTPIEPGRYGDLAKPMEGSNLWPDYPSNFDALLENYISLLRDLSRKIMRGIALALGAPLDSFEGGVAGDAFWVLRLIGYPVSDDIPQEERTDIGCGAHTDYGLLTLVNQDDDICALEVRNQSGEWIYAKPVPGTFVCNIGDMLKVWSNGIYQPTLHRVVNNSPRYRVSVAFFYESNFDAAVEPVEFCREKTGGVAKYEKVVYGEHLVQKVLTNFVM

SEQ ID NO: 64916 - protein, 328 aa, Triticum aestivum
  peptide (1)..(328): Ceres Seq. ID no. 15222360
  misc_feature (183)..(286): Pfam Name: 2OG-Fe(II) oxygenase superfamily Pfam Description: 2OG-Fe(II) oxygenase superfamily
  misc_feature (7)..(297): Homolog of NCBI NO: 15599386 NR Description: probable iron/ascorbate oxidoreductase
  misc_feature (4)..(297): Homolog of NCBI NO: 23130050 NR Description: hypothetical protein [Nostoc punctiforme]
  misc_feature (1)..(328): Homolog of NCBI NO: 11255902 NR Description: flavonol synthase-like protein - Arabidopsis
  misc_feature (11)..(326): Homolog of NCBI NO: 15229181 NR Description: oxidoreductase (din11), putative [Arabidopsis
  misc_feature (1)..(326): Homolog of NCBI NO: 22331716 NR Description: oxidoreductase (din11), putative [Arabidopsis
  misc_feature (1)..(326): Homolog of NCBI NO: 19423910 NR Description: unknown protein [Arabidopsis thaliana]
  misc_feature (1)..(326): Homolog of NCBI NO: 11255891 NR Description: hypothetical protein T9C5.210 - Arabidopsis
  misc_feature (1)..(328): Homolog of NCBI NO: 21554579 NR Description: flavonol synthase-like protein [Arabidopsis
  misc_feature (1)..(328): Homolog of NCBI NO: 18409039 NR Description: oxidoreductase (din11), putative [Arabidopsis
  misc_feature (1)..(326): Homolog of NCBI NO: 6984228 NR Description: putative flavonol synthase-like protein
MGSDFKAIPLIDISPLVEKIDDPAMAGDEGLLDVVRMLDDACREAGFFYVKGHGISESLMTEVRDVTRKFFQLPREEKLKIKMTPQSGYRGYQRVGENVTKGKPDMHEAIDCYTPIEPGRYGDLAKPMEGSNLWPDYPSNFDALLENYISLLRDLSRKIMRGIALALGAPLDSFEGGVAGDAFWVLRLIGYPVSDDIPQEERTDIGCGAHTDYGLLTLVNQDDDICALEVRNQSGEWIYAKPVPGTFVCNIGDMLKVWSNGIYQPTLHRVVNNSPRYRVSVAFFYESNFDAAVEPVEFCREKTGGVAKYEKVVYGEHLVQKVLTNFVM

SEQ ID NO: 64917 - protein, 304 aa, Triticum aestivum
  peptide (1)..(304): Ceres Seq. ID no. 15222361
  misc_feature (159)..(262): Pfam Name: 2OG-Fe(II) oxygenase superfamily Pfam Description: 2OG-Fe(II) oxygenase superfamily
  misc_feature (1)..(273): Homolog of NCBI NO: 15599386 NR Description: probable iron/ascorbate oxidoreductase
  misc_feature (1)..(273): Homolog of NCBI NO: 23130050 NR Description: hypothetical protein [Nostoc punctiforme]
  misc_feature (1)..(304): Homolog of NCBI NO: 11255902 NR Description: flavonol synthase-like protein - Arabidopsis
  misc_feature (1)..(302): Homolog of NCBI NO: 15229181 NR Description: oxidoreductase (din11), putative [Arabidopsis
  misc_feature (1)..(302): Homolog of NCBI NO: 19423910 NR Description: unknown protein [Arabidopsis thaliana]
  misc_feature (1)..(302): Homolog of NCBI NO: 22331716 NR Description: oxidoreductase (din11), putative [Arabidopsis
  misc_feature (1)..(302): Homolog of NCBI NO: 11255891 NR Description: hypothetical protein T9C5.210 - Arabidopsis
  misc_feature (1)..(304): Homolog of NCBI NO: 21554579 NR Description: flavonol synthase-like protein [Arabidopsis
  misc_feature (1)..(304): Homolog of NCBI NO: 18409039 NR Description: oxidoreductase (din11), putative [Arabidopsis
  misc_feature (1)..(302): Homolog of NCBI NO: 6984228 NR Description: putative flavonol synthase-like protein
MAGDEGLLDVVRMLDDACREAGFFYVKGHGISESLMTEVRDVTRKFFQLPREEKLKIKMTPQSGYRGYQRVGENVTKGKPDMHEAIDCYTPIEPGRYGDLAKPMEGSNLWPDYPSNFDALLENYISLLRDLSRKIMRGIALALGAPLDSFEGGVAGDAFWVLRLIGYPVSDDIPQEERTDIGCGAHTDYGLLTLVNQDDDICALEVRNQSGEWIYAKPVPGTFVCNIGDMLKVWSNGIYQPTLHRVVNNSPRYRVSVAFFYESNFDAAVEPVEFCREKTGGVAKYEKVVYGEHLVQKVLTNFVM

SEQ ID NO: 64918 - DNA, 506 bp, Triticum aestivum
  misc_feature (1)..(506): Ceres Seq. ID no. 13597861
cagagagttccgtttcttttctccccctcttcctcgcagaaggagcggcaagtaatccggtcgaattgataggggagacgaggagcagcgatggccgccgctcgagcccgatggcggttcctcgcgctgcccctcgcgctgctcctcgcgatcggctcgtcgcgcggcctcgacgcggcgcccaagccccccgtccccaaggccatctccgacctgagggaggcgatcgtcaaggggctggggctccagtcggaggagctcaaggtgtccgggttcgacgtgagggacgcgctggtggggcatgcggtggcgtacgagttcgacatggaggtcgggaggaaggccgtgccggtgcgactgctcgaggacgtcaaccggtgggacttcgtcgacctgcccatcttccggtcccaggccgacgccgacgacacggcgctcgccgagatcgggcgggggagcttcgaccccacgctgtgttaaacacaataaagttggaactggagggg

SEQ ID NO: 64919 - protein, 168 aa, Triticum aestivum
  peptide (1)..(168): Ceres Seq. ID no. 13597862
ESSVSFLPLFLAEGAASNPVELIGETRSSDGRRSSPMAVPRAAPRAAPRDRLVARPRRGAQAPRPQGHLRPEGGDRQGAGAPVGGAQGVRVRREGRAGGACGGVRVRHGGREEGRAGATARGRQPVGLRRPAHLPVPGRRRRHGARRDRAGELRPHAVLNTIKLELEG

SEQ ID NO: 64920 - protein, 132 aa, Triticum aestivum
  peptide (1)..(132): Ceres Seq. ID no. 13597863
MAVPRAAPRAAPRDRLVARPRRGAQAPRPQGHLRPEGGDRQGAGAPVGGAQGVRVRREGRAGGACGGVRVRHGGREEGRAGATARGRQPVGLRRPAHLPVPGRRRRHGARRDRAGELRPHAVLNTIKLELEG

SEQ ID NO: 64921 - protein, 129 aa, Triticum aestivum
  peptide (1)..(129): Ceres Seq. ID no. 13597864
  misc_feature (12)..(113): Homolog of NCBI NO: 28393303 NR Description: unknown protein [Arabidopsis thaliana]
  misc_feature (3)..(128): Homolog of NCBI NO: 34909866 NR Description: OSJNBb0053G03.14 [Oryza sativa (japonica
MAAARARWRFLALPLALLLAIGSSRGLDAAPKPPVPKAISDLREAIVKGLGLQSEELKVSGFDVRDALVGHAVAYEFDMEVGRKAVPVRLLEDVNRWDFVDLPIFRSQADADDTALAEIGRGSFDPTLC

SEQ ID NO: 64922 - DNA, 1491 bp, Triticum aestivum
  misc_feature (1)..(1491): Ceres Seq. ID no. 15169655
actaccaccgccgccgccgccctccccagcccccagatctccacccctcccatctgcaatggcggccgcttcgtcgctccacgtcgccgccccggccgccaccccgcgggtgggatctgccggccccaaatccgcgtcagcggcgaggagcgtgcgcgtggccagatcgggcgcggcggtgcgccctggaggcaggctggtggcttgcgccgccgttgcaaccaaggctgatgcgccggcgagcgaggcggcgtccaagtctgaaggtcatgaggtattgctgtttgaggctcttcgtgagggtttgatggaagagatgcaagcggatccaacggtgtgtgtctttggtgaagatgtcggtcactatgggggttcttacaaggtgaccaagggtttggctgatatgtttggagaccttcgtgttcttgacacaccaattgctgagaactcgttcaccggcatgggagttggagcaggaatgaaggggctgaggcctgttgttgaaggcatgaacatgggcttccttctccttgcttacaaccaaatctcaaacaactgcggtatgcttcattacacctctggcggccagttcaagataccacttgtgatccgaggtcctggtggtgttggtcgtcagcttggtgcagagcattcgcagcgcctggagtcatacttccagtcaatccctggtctccagatggttgcttgctccactccttacaatgccaagggtttaatgaaggctgccataaggagcgagaaccctgtcgtgctatttgagcacgtccttctgtacaacctgaaggagaaaattccggatgaggagtacactctatgcctggaggaggctgagatggtacggcctggtgagcatgtgaccatcctcacatactcgcgtatgaggtaccatgtgatgcaggctgcaaagacgctggtgaacaaagggtacgatcctgaggtgattgacattaggtcgttgaagccattcgatctgcacacaataggcaactccatcaagaagacccaccgcgtgctgattgtggaggagtgcatgcgcactggcgggattggcgccagtctgagatcggccatcatcgacaacttctgggactaccttgacgcccccatcatgtgcctgtcatctcaggacgtgccgacaccctacgccgcaactttggaggatgcgaccgtcgtgcagcctgcccagattgttgcggccgttgagcaaatatgccaatagggcgtcgtctgtttcagcatcgttaatttgtatctgccctggcttggaagaacctttaatttgtcatttttgccttgtagcgaggtgttcattgtggtataggcttgtatccattttttattcctgcttgagttaacacttgagctacataactgtactgtattatgctgaatgctactagggtctgaactcgggtttattggaagaaatctttgaatatcctgggcaaggtataactatgtgttttggct

SEQ ID NO: 64923 - protein, 412 aa, Triticum aestivum
  peptide (1)..(412): Ceres Seq. ID no. 15169656
  misc_feature (92)..(268): Pfam Name: Transketolase, pyridine binding domain Pfam Description: Transketolase, pyridine binding domain
  misc_feature (91)..(410): Homolog of NCBI NO: 16330037 NR Description: pyruvate dehydrogenase E1 beta subunit
  misc_feature (91)..(410): Homolog of NCBI NO: 23041427 NR Description: hypothetical protein [Trichodesmium erythraeum
  misc_feature (91)..(410): Homolog of NCBI NO: 17227618 NR Description: pyruvate dehydrogenase E1 beta subunit [Nostoc
  misc_feature (91)..(412): Homolog of NCBI NO: 22297748 NR Description: pyruvate dehydrogenase E1 component beta subunit
  misc_feature (91)..(412): Homolog of NCBI NO: 22711921 NR Description: pyruvate dehydrogenase E1 component beta subunit
  misc_feature (126)..(412): Homolog of NCBI NO: 2982328 NR Description: pyruvate dehydrogenase E1 beta subunit [Picea
  misc_feature (56)..(412): Homolog of NCBI NO: 2454184 NR Description: pyruvate dehydrogenase E1 beta subunit
  misc_feature (56)..(412): Homolog of NCBI NO: 15220670 NR Description: pyruvate dehydrogenase E1 beta subunit -related
  misc_feature (40)..(412): Homolog of NCBI NO: 21593379 NR Description: putative pyruvate dehydrogenase E1 beta subunit
  misc_feature (40)..(412): Homolog of NCBI NO: 15226781 NR Description: pyruvate dehydrogenase E1 beta subunit -related
LPPPPPPSPAPRSPPLPSAMAAASSLHVAAPAATPRVGSAGPKSASAARSVRVARSGAAVRPGGRLVACAAVATKADAPASEAASKSEGHEVLLFEALREGLMEEMQADPTVCVFGEDVGHYGGSYKVTKGLADMFGDLRVLDTPIAENSFTGMGVGAGMKGLRPVVEGMNMGFLLLAYNQISNNCGMLHYTSGGQFKIPLVIRGPGGVGRQLGAEHSQRLESYFQSIPGLQMVACSTPYNAKGLMKAAIRSENPVVLFEHVLLYNLKEKIPDEEYTLCLEEAEMVRPGEHVTILTYSRMRYHVMQAAKTLVNKGYDPEVIDIRSLKPFDLHTIGNSIKKTHRVLIVEECMRTGGIGASLRSAIIDNFWDYLDAPIMCLSSQDVPTPYAATLEDATVVQPAQIVAAVEQICQ

SEQ ID NO: 64924 - protein, 393 aa, Triticum aestivum
  peptide (1)..(393): Ceres Seq. ID no. 15169657
  misc_feature (73)..(249): Pfam Name: Transketolase, pyridine binding domain Pfam Description: Transketolase, pyridine binding domain
  misc_feature (72)..(391): Homolog of NCBI NO: 16330037 NR Description: pyruvate dehydrogenase E1 beta subunit
  misc_feature (72)..(391): Homolog of NCBI NO: 23041427 NR Description: hypothetical protein [Trichodesmium erythraeum
  misc_feature (72)..(391): Homolog of NCBI NO: 17227618 NR Description: pyruvate dehydrogenase E1 beta subunit [Nostoc
  misc_feature (72)..(393): Homolog of NCBI NO: 22297748 NR Description: pyruvate dehydrogenase E1 component beta subunit
  misc_feature (72)..(393): Homolog of NCBI NO: 22711921 NR Description: pyruvate dehydrogenase E1 component beta subunit
  misc_feature (107)..(393): Homolog of NCBI NO: 2982328 NR Description: pyruvate dehydrogenase E1 beta subunit [Picea
  misc_feature (37)..(393): Homolog of NCBI NO: 2454184 NR Description: pyruvate dehydrogenase E1 beta subunit
  misc_feature (37)..(393): Homolog of NCBI NO: 15220670 NR Description: pyruvate dehydrogenase E1 beta subunit -related
  misc_feature (21)..(393): Homolog of NCBI NO: 21593379 NR Description: putative pyruvate dehydrogenase E1 beta subunit
  misc_feature (21)..(393): Homolog of NCBI NO: 15226781 NR Description: pyruvate dehydrogenase E1 beta subunit -related
MAAASSLHVAAPAATPRVGSAGPKSASAARSVRVARSGAAVRPGGRLVACAAVATKADAPASEAASKSEGHEVLLFEALREGLMEEMQADPTVCVFGEDVGHYGGSYKVTKGLADMFGDLRVLDTPIAENSFTGMGVGAGMKGLRPVVEGMNMGFLLLAYNQISNNCGMLHYTSGGQFKIPLVIRGPGGVGRQLGAEHSQRLESYFQSIPGLQMVACSTPYNAKGLMKAAIRSENPVVLFEHVLLYNLKEKIPDEEYTLCLEEAEMVRPGEHVTILTYSRMRYHVMQAAKTLVNKGYDPEVIDIRSLKPFDLHTIGNSIKKTHRVLIVEECMRTGGIGASLRSAIIDNFWDYLDAPIMCLSSQDVPTPYAATLEDATVVQPAQIVAAVEQICQ

SEQ ID NO: 64925 - protein, 310 aa, Triticum aestivum
  peptide (1)..(310): Ceres Seq. ID no. 15169658
  misc_feature (1)..(166): Pfam Name: Transketolase, pyridine binding domain Pfam Description: Transketolase, pyridine binding domain
  misc_feature (1)..(308): Homolog of NCBI NO: 16330037 NR Description: pyruvate dehydrogenase E1 beta subunit
  misc_feature (1)..(308): Homolog of NCBI NO: 23041427 NR Description: hypothetical protein [Trichodesmium erythraeum
  misc_feature (1)..(308): Homolog of NCBI NO: 17227618 NR Description: pyruvate dehydrogenase E1 beta subunit [Nostoc
  misc_feature (1)..(310): Homolog of NCBI NO: 22297748 NR Description: pyruvate dehydrogenase E1 component beta subunit
  misc_feature (1)..(310): Homolog of NCBI NO: 22711921 NR Description: pyruvate dehydrogenase E1 component beta subunit
  misc_feature (24)..(310): Homolog of NCBI NO: 2982328 NR Description: pyruvate dehydrogenase E1 beta subunit [Picea
  misc_feature (1)..(310): Homolog of NCBI NO: 2454184 NR Description: pyruvate dehydrogenase E1 beta subunit
  misc_feature (1)..(310): Homolog of NCBI NO: 15220670 NR Description: pyruvate dehydrogenase E1 beta subunit -related
  misc_feature (1)..(310): Homolog of NCBI NO: 21593379 NR Description: putative pyruvate dehydrogenase E1 beta subunit
  misc_feature (1)..(310): Homolog of NCBI NO: 15226781 NR Description: pyruvate dehydrogenase E1 beta subunit -related
MEEMQADPTVCVFGEDVGHYGGSYKVTKGLADMFGDLRVLDTPIAENSFTGMGVGAGMKGLRPVVEGMNMGFLLLAYNQISNNCGMLHYTSGGQFKIPLVIRGPGGVGRQLGAEHSQRLESYFQSIPGLQMVACSTPYNAKGLMKAAIRSENPVVLFEHVLLYNLKEKIPDEEYTLCLEEAEMVRPGEHVTILTYSRMRYHVMQAAKTLVNKGYDPEVIDIRSLKPFDLHTIGNSIKKTHRVLIVEECMRTGGIGASLRSAIIDNFWDYLDAPIMCLSSQDVPTPYAATLEDATVVQPAQIVAAVEQICQ

SEQ ID NO: 64926 - DNA, 1702 bp, Triticum aestivum
  misc_feature (1)..(1702): Ceres Seq. ID no. 14302832
attttcacatcaaaatttctcctctttctatccatggccacggacgcacagcaccagcgacacagccgcaacggcggcgtgcacaccggccaccacttcctcatcgtggcctacggcatccagagccacctcaacccgtgccgcgtcctcgcgcaccgcctcgcgcgcctccacggcgtcgacggctccggggccgtcctcgccacggtctccctcccggtgtccgctcaccgccgcatgttcccttcgtccggagacgtcgacaatgatgataaagccaccgacggcgtcgtctcttacgctccatactccgacggcctcgacgacggctccatggccagggacggcgaggcgagggcgcgcagccgccaggccacctttgagagcctgtcagccgtcgtcgccaccctcgccgcacgtggccggccggtgacgtgtgtcgtttgcagcatggttctccccgcggcgctggacgtcgcgcgtgagcacggcatcccgctggccgtgtactggatccaaccggccaccgtgctcgccgcgtactaccactacttccacggccacggcgacctcctcgcgtcccacgccgccgaccccgcgtacgaggtgtccctgcccgggctacaccgccctctccggatccgcgacttcccgtccttcctcgtcgacacgacgggcagcgagctggccaaggtcttcaacgaagcggcccgagaactgttcgagcacttgggcgatcacggctgcaccaaggttctcgtgaacactttcgacgagctggagccggcagcgctggcagccatgaaggagcacctagacgtgttcgccgtcgggccggtgatcgggtcctcctcggccgagccgcgcatccacctgttcaaccacgccggcgccgacgagaagaggtacatggagtggctgggtgcgcaggcggcgaggtcggtgctgtacgtttcatttgggagcatatggacgtacagcaagaagcaaatggaggagattgcgaacgggctgcggcggtgcgggcggccgtacctgctcgtcgtgcgcaatgacgggcggcaggaggacgtgagccggagcctagacgacctcgtgctagaggggcagggcatggtggtggagtggtgcgaccaacccaaggtcctgtcgcacgcgtccgtgggatgcttcgtcacgcactgcggctggaactcgacgctggaggccatggccctcggcgtgccggtcgtcgccgcgccaagcttgttcgaccagccgacgaacgccttcttgatagaggaggagtgggctgccggcgtcagaggggagcgcaacagcgagggcggcttcaccggggaggagctcgcaaggtgcgtcgagctgctcatgggtcatggcccgagggccattgagatcagggaaagagtggacgctctgaaagggatgacgcgagaggcggcggcttcgggcgggccggcggagcggagcctccgaagctttgtcatggcggccggttcaatcgtcggatgaagtttgcaggaatacaccaccaaatctgtccaaatcgattaagtggatgcatgctggagtggatcagctagctctctcgatcggtcggagttaaacaacatttaataaccgggattgctaaatctcagtcgacttcttggtcgatgatatattcgcaggatcttacgtgaagatcggtgcgaattttttt

SEQ ID NO: 64927 - protein, 503 aa, Triticum aestivum
  peptide (1)..(503): Ceres Seq. ID no. 14302833
  misc_feature (32)..(499): Pfam Name: UDP-glucoronosyl and UDP-glucosyl transferase Pfam Description: UDP-glucoronosyl and UDP-glucosyl transferase
  misc_feature (34)..(480): Homolog of NCBI NO: 4115561 NR Description: UDP-glucose:anthocyanin 5-O-glucosyltransferase
  misc_feature (32)..(495): Homolog of NCBI NO: 4115563 NR Description: UDP-glucose:anthocyanin 5-O-glucosyltransferase
  misc_feature (34)..(495): Homolog of NCBI NO: 4115559 NR Description: UDP-glucose:anthocysnin 5-O-glucosyltransferase
  misc_feature (22)..(495): Homolog of NCBI NO: 18414478 NR Description: UDP-glucose:indole-3-acetate
  misc_feature (22)..(495): Homolog of NCBI NO: 2149127 NR Description: UDP-glucose:indole-3-acetate
  misc_feature (32)..(499): Homolog of NCBI NO: 14192682 NR Description: cold-induced glucosyl transferase [Solanum
  misc_feature (32)..(495): Homolog of NCBI NO: 6683052 NR Description: anthocyanin 5-O-glucosyltransferase [Petunia x
  misc_feature (32)..(499): Homolog of NCBI NO: 20146093 NR Description: glucosyltransferase NTGT2 [Nicotiana tabacum]
  misc_feature (32)..(496): Homolog of NCBI NO: 40714353 NR Description: anthocyanin 5-O-glucosyltransferase [Iris
  misc_feature (31)..(495): Homolog of NCBI NO: 34906162 NR Description: putative anthocyanin 5-O-glucosyltransferase
IFTSKFLLFLSMATDAQHQRHSRNGGVHTGHHFLIVAYGIQSHLNPCRVLAHRLARLHGVDGSGAVLATVSLPVSAHRRMFPSSGDVDNDDKATDGVVSYAPYSDGLDDGSMARDGEARARSRQATFESLSAVVATLAARGRPVTCVVCSMVLPAALDVAREHGIPLAVYWIQPATVLAAYYHYFHGHGDLLASHAADPAYEVSLPGLHRPLRIRDFPSFLVDTTGSELAKVFNEAARELFEHLGDHGCTKVLVNTFDELEPAALAAMKEHLDVFAVGPVIGSSSAEPRIHLFNHAGADEKRYMEWLGAQAARSVLYVSFGSIWTYSKKQMEEIANGLRRCGRPYLLVVRNDGRQEDVSRSLDDLVLEGQGMVVEWCDQPKVLSHASVGCFVTHCGWNSTLEAMALGVPVVAAPSLFDQPTNAFLIEEEWAAGVRGERNSEGGFTGEELARCVELLMGHGPRAIEIRERVDALKGMTREAAASGGPAERSLRSFVMAAGSIVG

SEQ ID NO: 64928 - protein, 492 aa, Triticum aestivum
  peptide (1)..(492): Ceres Seq. ID no. 14302834
  misc_feature (21)..(488): Pfam Name: UDP-glucoronosyl and UDP-glucosyl transferase Pfam Description: UDP-glucoronosyl and UDP-glucosyl transferase
  misc_feature (23)..(469): Homolog of NCBI NO: 4115561 NR Description: UDP-glucose:anthocyanin 5-O-glucosyltransferase
  misc_feature (21)..(484): Homolog of NCBI NO: 4115563 NR Description: UDP-glucose:anthocyanin 5-O-glucosyltransferase
  misc_feature (23)..(484): Homolog of NCBI NO: 4115559 NR Description: UDP-glucose:anthocysnin 5-O-glucosyltransferase
  misc_feature (11)..(484): Homolog of NCBI NO: 18414478 NR Description: UDP-glucose:indole-3-acetate
  misc_feature (11)..(484): Homolog of NCBI NO: 2149127 NR Description: UDP-glucose:indole-3-acetate
  misc_feature (21)..(488): Homolog of NCBI NO: 14192682 NR Description: cold-induced glucosyl transferase [Solanum
  misc_feature (21)..(484): Homolog of NCBI NO: 6683052 NR Description: anthocyanin 5-O-glucosyltransferase [Petunia x
  misc_feature (21)..(488): Homolog of NCBI NO: 20146093 NR Description: glucosyltransferase NTGT2 [Nicotiana tabacum]
  misc_feature (21)..(485): Homolog of NCBI NO: 40714353 NR Description: anthocyanin 5-O-glucosyltransferase [Iris
  misc_feature (20)..(484): Homolog of NCBI NO: 34906162 NR Description: putative anthocyanin 5-O-glucosyltransferase
MATDAQHQRHSRNGGVHTGHHFLIVAYGIQSHLNPCRVLAHRLARLHGVDGSGAVLATVSLPVSAHRRMFPSSGDVDNDDKATDGVVSYAPYSDGLDDGSMARDGEARARSRQATFESLSAVVATLAARGRPVTCVVCSMVLPAALDVAREHGIPLAVYWIQPATVLAAYYHYFHGHGDLLASHAADPAYEVSLPGLHRPLRIRDFPSFLVDTTGSELAKVFNEAARELFEHLGDHGCTKVLVNTFDELEPAALAAMKEHLDVFAVGPVIGSSSAEPRIHLFNHAGADEKRYMEWLGAQAARSVLYVSFGSIWTYSKKQMEEIANGLRRCGRPYLLVVRNDGRQEDVSRSLDDLVLEGQGMVVEWCDQPKVLSHASVGCFVTHCGWNSTLEAMALGVPVVAAPSLFDQPTNAFLIEEEWAAGVRGERNSEGGFTGEELARCVELLMGHGPRAIEIRERVDALKGMTREAAASGGPAERSLRSFVMAAGSIVG

SEQ ID NO: 64929 - protein, 424 aa, Triticum aestivum
  peptide (1)..(424): Ceres Seq. ID no. 14302835
  misc_feature (1)..(420): Pfam Name: UDP-glucoronosyl and UDP-glucosyl transferase Pfam Description: UDP-glucoronosyl and UDP-glucosyl transferase
  misc_feature (1)..(401): Homolog of NCBI NO: 4115561 NR Description: UDP-glucose:anthocyanin 5-O-glucosyltransferase
  misc_feature (1)..(416): Homolog of NCBI NO: 4115563 NR Description: UDP-glucose:anthocyanin 5-O-glucosyltransferase
  misc_feature (1)..(416): Homolog of NCBI NO: 4115559 NR Description: UDP-glucose:anthocysnin 5-O-glucosyltransferase
  misc_feature (1)..(416): Homolog of NCBI NO: 18414478 NR Description: UDP-glucose:indole-3-acetate
  misc_feature (1)..(416): Homolog of NCBI NO: 2149127 NR Description: UDP-glucose:indole-3-acetate
  misc_feature (1)..(420): Homolog of NCBI NO: 14192682 NR Description: cold-induced glucosyl transferase [Solanum
  misc_feature (1)..(416): Homolog of NCBI NO: 6683052 NR Description: anthocyanin 5-O-glucosyltransferase [Petunia x
  misc_feature (1)..(420): Homolog of NCBI NO: 20146093 NR Description: glucosyltransferase NTGT2 [Nicotiana tabacum]
  misc_feature (1)..(417): Homolog of NCBI NO: 40714353 NR Description: anthocyanin 5-O-glucosyltransferase [Iris
  misc_feature (1)..(416): Homolog of NCBI NO: 34906162 NR Description: putative anthocyanin 5-O-glucosyltransferase
MFPSSGDVDNDDKATDGVVSYAPYSDGLDDGSMARDGEARARSRQATFESLSAVVATLAARGRPVTCVVCSMVLPAALDVAREHGIPLAVYWIQPATVLAAYYHYFHGHGDLLASHAADPAYEVSLPGLHRPLRIRDFPSFLVDTTGSELAKVFNEAARELFEHLGDHGCTKVLVNTFDELEPAALAAMKEHLDVFAVGPVIGSSSAEPRIHLFNHAGADEKRYMEWLGAQAARSVLYVSFGSIWTYSKKQMEEIANGLRRCGRPYLLVVRNDGRQEDVSRSLDDLVLEGQGMVVEWCDQPKVLSHASVGCFVTHCGWNSTLEAMALGVPVVAAPSLFDQPTNAFLIEEEWAAGVRGERNSEGGFTGEELARCVELLMGHGPRAIEIRERVDALKGMTREAAASGGPAERSLRSFVMAAGSIVG

SEQ ID NO: 64930 - DNA, 1958 bp, Triticum aestivum
  misc_feature (1)..(1958): Ceres Seq. ID no. 15169647
atcccgcatcgcatcgcactaggtctcggacattcctctttctctcccttgcttggggaagaagaagaagaagaagagagggctcccgacgccgtcgcccctcgccgccgatctgatctcaggagccagcgaagatgcattccaccaatctgctcctcgaggagcccatccggatggtctccatcctcgagccatccaagccgaacttcttcccggcgatgacgaagatcgtggggacgctgggtcccaagtcccggtccgttgaggccatctccgcctgtctaaaggccggcatgtctgtggcccgtttcgatttctcgtggggggatgccgcgtaccaccaggagacactcgagaacctcaagctcgccatcaaggccaccaagaagctatgtgctgttatgctcgacactgttggccctgagttgcaagtggtgaacaagagtgaagtcacaatctcgcttgaagagaacgagtctgttgttctcacccctcacaagggccaggaggcctcttccaagttgctccctatcaacttcgctggactcgccaaggctgtgaagcccggagccacaatattcgttgggcaatatttgttcacgggcagtgagactacatcagtttggctggaggtttctgaagttcaaggggatgacgtggtttgcgtgatcaagaactcagctaccctggctgggtcactcttcacattgcactgctcccagatccatatcgacatgcccacgctgtctgatgaggataaagatgttatgaaaaaatggggtgctccaaacaagattgacttcctctctctttcttatacaaggcacgcagaagatgtgcggcaagcacgggagttcctctctaagttaggtgatcttagccaaactctgatttttgccaaaattgagaatgtggagggcttgaaccattttgatgagatcctggaggaagcggatggtatcattctgtcaagagggaaccttggaattgatcttccacctgaaaaggtgttcttatttcagaagtctgctctgcacaagtgcaacatggctggaaagcctgctgttgttactcgtgttgtggacagtatgacggacaacctaaggcctactcgtgcggaggcaactgatgtggcaaatgcggtgctggatggtagtgatgccattctccttggtgccgagactctccgtgggttgtatccagttgagactatttcaacagtgggcagaatttgtgctgaggctgagaaggttttcaaccaagatttgtacttcaagcgaactgtgaaatatgtgggagaacccatgacccacttggagtctattgcttcctctgcagtgcgggctgctattaaagttaaggcttcggtcatcatttgcttcacctcatctggacgggctgcaaggctaattgccaagtacaggcccaccatgcctgtcctctctgttgtcattcctcgtctgaaaacaaatcaattgaagtggagcttcacaggtgcatttgaggcaagacaatcactcatagttagaggcctctttcccatgcttgccgatccacgtcatccggctgaatctactagcactacaaatgaatcagtgttgaaggttgctcttgaccacggcaaagcatccggtgtgatcaagtcgcatgaccgcgttgtcgtgtgccagaaagtgggagattcctctgtcgtgaagatcattgagctggacgactaggcaaaattagtctttgctcagggcttgccagatttttgactaggccaaaacgttgcttggtggctatgtataattctatctatagttttgcaaaacgagcagtttttcctatggtgtcatcataggatccgcggttaccattcgaaaacctacgctagttattatggatatgtcctcagattttactgcagtgtagcgagtaaatgatctgatggaataatgatatcaaaactttgtgac

SEQ ID NO: 64931 - protein, 527 aa, Triticum aestivum
  peptide (1)..(527): Ceres Seq. ID no. 15169648
  misc_feature (37)..(380): Pfam Name: Pyruvate kinase, barrel domain Pfam Description: Pyruvate kinase, barrel domain
  misc_feature (12)..(449): Homolog of NCBI NO: 4033429 NR Description: Pyruvate kinase (PK)
  misc_feature (30)..(523): Homolog of NCBI NO: 34903274 NR Description: unnamed protein product [Oryza sativa (japonica
  misc_feature (30)..(523): Homolog of NCBI NO: 2497543 NR Description: Pyruvate kinase, cytosolic isozyme
  misc_feature (54)..(527): Homolog of NCBI NO: 25287747 NR Description: probable pyruvate kinase [imported] - Arabidopsis
  misc_feature (14)..(527): Homolog of NCBI NO: 11260409 NR Description: pyruvate kinase-like protein - Arabidopsis
  misc_feature (1)..(527): Homolog of NCBI NO: 23308151 NR Description: At2g36580/F1O11.21 [Arabidopsis thaliana]
  misc_feature (1)..(527): Homolog of NCBI NO: 21537122 NR Description: putative pyruvate kinase [Arabidopsis thaliana]
  misc_feature (1)..(527): Homolog of NCBI NO: 18404169 NR Description: pyruvate kinase, putative [Arabidopsis thaliana]
  misc_feature (1)..(527): Homolog of NCBI NO: 18409740 NR Description: pyruvate kinase, putative [Arabidopsis thaliana]
  misc_feature (37)..(527): Homolog of NCBI NO: 20562907 NR Description: pyruvate kinase-like [Deschampsia antarctica]
MHSTNLLLEEPIRMVSILEPSKPNFFPAMTKIVGTLGPKSRSVEAISACLKAGMSVARFDFSWGDAAYHQETLENLKLAIKATKKLCAVMLDTVGPELQVVNKSEVTISLEENESVVLTPHKGQEASSKLLPINFAGLAKAVKPGATIFVGQYLFTGSETTSVWLEVSEVQGDDVVCVIKNSATLAGSLFTLHCSQIHIDMPTLSDEDKDVMKKWGAPNKIDFLSLSYTRHAEDVRQAREFLSKLGDLSQTLIFAKIENVEGLNHFDEILEEADGIILSRGNLGIDLPPEKVFLFQKSALHKCNMAGKPAVVTRVVDSMTDNLRPTRAEATDVANAVLDGSDAILLGAETLRGLYPVETISTVGRICAEAEKVFNQDLYFKRTVKYVGEPMTHLESIASSAVRAAIKVKASVIICFTSSGRAARLIAKYRPTMPVLSVVIPRLKTNQLKWSFTGAFEARQSLIVRGLFPMLADPRHPAESTSTTNESVLKVALDHGKASGVIKSHDRVVVCQKVGDSSVVKIIELDD

SEQ ID NO: 64932 - protein, 514 aa, Triticum aestivum
  peptide (1)..(514): Ceres Seq. ID no. 15169649
  misc_feature (24)..(367): Pfam Name: Pyruvate kinase, barrel domain Pfam Description: Pyruvate kinase, barrel domain
  misc_feature (1)..(436): Homolog of NCBI NO: 4033429 NR Description: Pyruvate kinase (PK)
  misc_feature (17)..(510): Homolog of NCBI NO: 34903274 NR Description: unnamed protein product [Oryza sativa (japonica
  misc_feature (17)..(510): Homolog of NCBI NO: 2497543 NR Description: Pyruvate kinase, cytosolic isozyme
  misc_feature (41)..(514): Homolog of NCBI NO: 25287747 NR Description: probable pyruvate kinase [imported] - Arabidopsis
  misc_feature (1)..(514): Homolog of NCBI NO: 11260409 NR Description: pyruvate kinase-like protein - Arabidopsis
  misc_feature (1)..(514): Homolog of NCBI NO: 23308151 NR Description: At2g36580/F1O11.21 [Arabidopsis thaliana]
  misc_feature (1)..(514): Homolog of NCBI NO: 21537122 NR Description: putative pyruvate kinase [Arabidopsis thaliana]
  misc_feature (1)..(514): Homolog of NCBI NO: 18404169 NR Description: pyruvate kinase, putative [Arabidopsis thaliana]
  misc_feature (1)..(514): Homolog of NCBI NO: 18409740 NR Description: pyruvate kinase, putative [Arabidopsis thaliana]
  misc_feature (24)..(514): Homolog of NCBI NO: 20562907 NR Description: pyruvate kinase-like [Deschampsia antarctica]
MVSILEPSKPNFFPAMTKIVGTLGPKSRSVEAISACLKAGMSVARFDFSWGDAAYHQETLENLKLAIKATKKLCAVMLDTVGPELQVVNKSEVTISLEENESVVLTPHKGQEASSKLLPINFAGLAKAVKPGATIFVGQYLFTGSETTSVWLEVSEVQGDDVVCVIKNSATLAGSLFTLHCSQIHIDMPTLSDEDKDVMKKWGAPNKIDFLSLSYTRHAEDVRQAREFLSKLGDLSQTLIFAKIENVEGLNHFDEILEEADGIILSRGNLGIDLPPEKVFLFQKSALHKCNMAGKPAVVTRVVDSMTDNLRPTRAEATDVANAVLDGSDAILLGAETLRGLYPVETISTVGRICAEAEKVFNQDLYFKRTVKYVGEPMTHLESIASSAVRAAIKVKASVIICFTSSGRAARLIAKYRPTMPVLSVVIPRLKTNQLKWSFTGAFEARQSLIVRGLFPMLADPRHPAESTSTTNESVLKVALDHGKASGVIKSHDRVVVCQKVGDSSVVKIIELDD

SEQ ID NO: 64933 - protein, 499 aa, Triticum aestivum
  peptide (1)..(499): Ceres Seq. ID no. 15169650
  misc_feature (9)..(352): Pfam Name: Pyruvate kinase, barrel domain Pfam Description: Pyruvate kinase, barrel domain
  misc_feature (1)..(421): Homolog of NCBI NO: 4033429 NR Description: Pyruvate kinase (PK)
  misc_feature (2)..(495): Homolog of NCBI NO: 34903274 NR Description: unnamed protein product [Oryza sativa (japonica
  misc_feature (2)..(495): Homolog of NCBI NO: 2497543 NR Description: Pyruvate kinase, cytosolic isozyme
  misc_feature (26)..(499): Homolog of NCBI NO: 25287747 NR Description: probable pyruvate kinase [imported] - Arabidopsis
  misc_feature (1)..(499): Homolog of NCBI NO: 11260409 NR Description: pyruvate kinase-like protein - Arabidopsis
  misc_feature (1)..(499): Homolog of NCBI NO: 23308151 NR Description: At2g36580/F1O11.21 [Arabidopsis thaliana]
  misc_feature (1)..(499): Homolog of NCBI NO: 21537122 NR Description: putative pyruvate kinase [Arabidopsis thaliana]
  misc_feature (1)..(499): Homolog of NCBI NO: 18404169 NR Description: pyruvate kinase, putative [Arabidopsis thaliana]
  misc_feature (1)..(499): Homolog of NCBI NO: 18409740 NR Description: pyruvate kinase, putative [Arabidopsis thaliana]
  misc_feature (9)..(499): Homolog of NCBI NO: 20562907 NR Description: pyruvate kinase-like [Deschampsia antarctica]
MTKIVGTLGPKSRSVEAISACLKAGMSVARFDFSWGDAAYHQETLENLKLAIKATKKLCAVMLDTVGPELQVVNKSEVTISLEENESVVLTPHKGQEASSKLLPINFAGLAKAVKPGATIFVGQYLFTGSETTSVWLEVSEVQGDDVVCVIKNSATLAGSLFTLHCSQIHIDMPTLSDEDKDVMKKWGAPNKIDFLSLSYTRHAEDVRQAREFLSKLGDLSQTLIFAKIENVEGLNHFDEILEEADGIILSRGNLGIDLPPEKVFLFQKSALHKCNMAGKPAVVTRVVDSMTDNLRPTRAEATDVANAVLDGSDAILLGAETLRGLYPVETISTVGRICAEAEKVFNQDLYFKRTVKYVGEPMTHLESIASSAVRAAIKVKASVIICFTSSGRAARLIAKYRPTMPVLSVVIPRLKTNQLKWSFTGAFEARQSLIVRGLFPMLADPRHPAESTSTTNESVLKVALDHGKASGVIKSHDRVVVCQKVGDSSVVKIIELDD

SEQ ID NO: 64934 - DNA, 1017 bp, Triticum aestivum
  misc_feature (1)..(1017): Ceres Seq. ID no. 15226273
cacagactcagagcgaagggacgacgagacgcacctgccaggtctacacgcgccgccgcctccaggaccctctgcccctcgccgccgcctccaggaccccctgcccctcgccgccgcaggcaccgcgccgcctccgtcctccactgcagcaggcagcagattgaagttatggccctggttaataagcttggtaatctgctcaagaaggccaccagctcgaacccgactctctatcaggcgataagatgcatgtcatcctcgaagctcttcgtaggagggctttcctttaacacagacgagggcagtctgagagatgctttttcccattatggggaaattattgatgctaagattatcgtagaccgcgacactggcaggtctagaggttttggctttataacttatgcagcagaagaacaggcttcatctgccatcatggccttggatggaaaggatctacatggacgcaacctacgggttagtgctgccactgagaggaccgctggcttccgtaatggtgctggttatggaggtggtggtggcggctttggaggaggaggatatggcggtggtggctatggaggaggtggttatggtagcaacagtggtggtggcggcgacaactttgctgccggcaactttggtggtgccagtggcttcggtggaaacccagctggaaaccatggtgctcctgcaggttccaccggtggtgatgagttctccctcggcacccctggttccacctttgaaagcaccaagaatgacgatgtcatggacgacctcttcaaggatgatgaacctgacaagtacgccagcaagaatgtctagggctccagtctgcatctccttctgcaagtccctagttatgtaccttggataagtgtgaggtgaatgatcctccagaccagagactactttcttgatgactgtctagagaccaaaataacttatgcgttgaggtgacaatgagaatgcacgttcagtttacctgatttagctttttttttctctcttcac

SEQ ID NO: 64935 - protein, 275 aa, Triticum aestivum
  peptide (1)..(275): Ceres Seq. ID no. 15226274
  misc_feature (89)..(160): Pfam Name: RNA recognition motif. (a.k.a. RRM, RBD, or RNP domain) Pfam Description: RNA recognition motif. (a.k.a. RRM, RBD, or RNP
  misc_feature (88)..(238): Homolog of NCBI NO: 7439981 NR Description: glycine-rich RNA-binding protein GRP1 - wheat
  misc_feature (57)..(198): Homolog of NCBI NO: 30682622 NR Description: glycine-rich RNA-binding protein (AtGRP2)
  misc_feature (57)..(206): Homolog of NCBI NO: 15236359 NR Description: glycine-rich RNA-binding protein (AtGRP2)
  misc_feature (60)..(243): Homolog of NCBI NO: 15822705 NR Description: RNA-binding protein precursor [Solanum tuberosum]
  misc_feature (57)..(247): Homolog of NCBI NO: 1084415 NR Description: RNA-binding protein - wood tobacco
  misc_feature (57)..(237): Homolog of NCBI NO: 15822705 NR Description: RNA-binding protein precursor [Solanum tuberosum]
  misc_feature (57)..(249): Homolog of NCBI NO: 15221187 NR Description: glycine-rich RNA-binding protein [Arabidopsis
  misc_feature (57)..(254): Homolog of NCBI NO: 15822703 NR Description: RNA-binding protein precursor [Nicotiana tabacum]
  misc_feature (73)..(275): Homolog of NCBI NO: 15239505 NR Description: RNA-binding protein, putative [Arabidopsis
  misc_feature (57)..(254): Homolog of NCBI NO: 15239505 NR Description: RNA-binding protein, putative [Arabidopsis
HRLRAKGRRDAPARSTRAAASRTLCPSPPPPGPPAPRRRRHRAASVLHCSRQQIEVMALVNKLGNLLKKATSSNPTLYQAIRCMSSSKLFVGGLSFNTDEGSLRDAFSHYGEIIDAKIIVDRDTGRSRGFGFITYAAEEQASSAIMALDGKDLHGRNLRVSAATERTAGFRNGAGYGGGGGGFGGGGYGGGGYGGGGYGSNSGGGGDNFAAGNFGGASGFGGNPAGNHGAPAGSTGGDEFSLGTPGSTFESTKNDDVMDDLFKDDEPDKYASKNV

SEQ ID NO: 64936 - protein, 219 aa, Triticum aestivum
  peptide (1)..(219): Ceres Seq. ID no. 15226275
  misc_feature (33)..(104): Pfam Name: RNA recognition motif. (a.k.a. RRM, RBD, or RNP domain) Pfam Description: RNA recognition motif. (a.k.a. RRM, RBD, or RNP
  misc_feature (32)..(182): Homolog of NCBI NO: 7439981 NR Description: glycine-rich RNA-binding protein GRP1 - wheat
  misc_feature (1)..(142): Homolog of NCBI NO: 30682622 NR Description: glycine-rich RNA-binding protein (AtGRP2)
  misc_feature (1)..(150): Homolog of NCBI NO: 15236359 NR Description: glycine-rich RNA-binding protein (AtGRP2)
  misc_feature (4)..(187): Homolog of NCBI NO: 15822705 NR Description: RNA-binding protein precursor [Solanum tuberosum]
  misc_feature (1)..(191): Homolog of NCBI NO: 1084415 NR Description: RNA-binding protein - wood tobacco
  misc_feature (1)..(181): Homolog of NCBI NO: 15822705 NR Description: RNA-binding protein precursor [Solanum tuberosum]
  misc_feature (1)..(193): Homolog of NCBI NO: 15221187 NR Description: glycine-rich RNA-binding protein [Arabidopsis
  misc_feature (1)..(198): Homolog of NCBI NO: 15822703 NR Description: RNA-binding protein precursor [Nicotiana tabacum]
  misc_feature (17)..(219): Homolog of NCBI NO: 15239505 NR Description: RNA-binding protein, putative [Arabidopsis
  misc_feature (1)..(198): Homolog of NCBI NO: 15239505 NR Description: RNA-binding protein, putative [Arabidopsis
MALVNKLGNLLKKATSSNPTLYQAIRCMSSSKLFVGGLSFNTDEGSLRDAFSHYGEIIDAKIIVDRDTGRSRGFGFITYAAEEQASSAIMALDGKDLHGRNLRVSAATERTAGFRNGAGYGGGGGGFGGGGYGGGGYGGGGYGSNSGGGGDNFAAGNFGGASGFGGNPAGNHGAPAGSTGGDEFSLGTPGSTFESTKNDDVMDDLFKDDEPDKYASKNV

SEQ ID NO: 64937 - protein, 192 aa, Triticum aestivum
  peptide (1)..(192): Ceres Seq. ID no. 15226276
  misc_feature (6)..(77): Pfam Name: RNA recognition motif. (a.k.a. RRM, RBD, or RNP domain) Pfam Description: RNA recognition motif. (a.k.a. RRM, RBD, or RNP
  misc_feature (5)..(155): Homolog of NCBI NO: 7439981 NR Description: glycine-rich RNA-binding protein GRP1 - wheat
  misc_feature (1)..(115): Homolog of NCBI NO: 30682622 NR Description: glycine-rich RNA-binding protein (AtGRP2)
  misc_feature (1)..(123): Homolog of NCBI NO: 15236359 NR Description: glycine-rich RNA-binding protein (AtGRP2)
  misc_feature (1)..(160): Homolog of NCBI NO: 15822705 NR Description: RNA-binding protein precursor [Solanum tuberosum]
  misc_feature (1)..(164): Homolog of NCBI NO: 1084415 NR Description: RNA-binding protein - wood tobacco
  misc_feature (1)..(154): Homolog of NCBI NO: 15822705 NR Description: RNA-binding protein precursor [Solanum tuberosum]
  misc_feature (1)..(166): Homolog of NCBI NO: 15221187 NR Description: glycine-rich RNA-binding protein [Arabidopsis
  misc_feature (1)..(171): Homolog of NCBI NO: 15822703 NR Description: RNA-binding protein precursor [Nicotiana tabacum]
  misc_feature (1)..(192): Homolog of NCBI NO: 15239505 NR Description: RNA-binding protein, putative [Arabidopsis
  misc_feature (1)..(171): Homolog of NCBI NO: 15239505 NR Description: RNA-binding protein, putative [Arabidopsis
MSSSKLFVGGLSFNTDEGSLRDAFSHYGEIIDAKIIVDRDTGRSRGFGFITYAAEEQASSAIMALDGKDLHGRNLRVSAATERTAGFRNGAGYGGGGGGFGGGGYGGGGYGGGGYGSNSGGGGDNFAAGNFGGASGFGGNPAGNHGAPAGSTGGDEFSLGTPGSTFESTKNDDVMDDLFKDDEPDKYASKNV

SEQ ID NO: 64938 - DNA, 1416 bp, Triticum aestivum
  misc_feature (1)..(1416): Ceres Seq. ID no. 13598528
atttttctccaaaaccctcccggctactccccttctcgtctttttcttgtagtaccacatcgcaaaacaagagaaaaatccggaccttgcggctttcccccttgctcggctgctaaccggattcgcgtctcaggctcgggatccgggcgttccgtgcgatgggcggcggcggcggcggcggcggcggcggcgcggaggaggagctgacggcgcaggagacggcgctctacgaccgccagatccgcgtctggggcgtcgatgcccagaagaggctaagtaaggcgcatgtgcttgtgtgcggcgtcaacggtactactattgagttctgcaagaacattgttctagcaggagttggcagtttatcattgatggacgatcacatggtcacagaggatgatctcaattcaaacttcctaattcctcatgatgagagtgtgtatggtggtaaatcacgggcagaggtttgctgcgagtccttaaaagatttcaatccaatggtccgagttgctgttgcaaaaggtaacccatcactaattgatggaacattcattgacatgttcgacattattgtagtcagctgcgcatctcttaaaacaaagttgtttattaatgacaactgccggaagagaagcaagcatattgccttctactctgtagagtgcaaggattcttgtggtgaaatatttgttgatctgcaggaccatagctatcttcagaagaagcctggaggagaacctgaacagcaggagttgaaatatcctagtctgcaggaagctatttctgtgccctggaaggatctgtccaaaagaacaactaaattgtactacgcaatgagagtcttggaaagttatgaatcatctgaagggcgcgaccctggtgagacatcactttctgatctgcctgcagttttggctcggaggaaggatatgtgtgatagaatgtctgtggacgagtctaaaattcctacgtctcttctggaacggcttctagcagctgggaaaaaggaacatcctcctgtatgtgcaatccttggtggcattcttggtcaggaggtgatcaaatcaatatcttgcaagggcgatccgatcaagaatttcttttacttcgacgatgctgatggtaaaggggccatggaggacatccccccaactcctgaagactaaatcacgtgatacctaactctcatccgacatggcttgctgataattgtacccaatcattagagtcgaacatgtgacaactctagttcagtggctgaggctggaaactcaactcagcactttagtgtttttattattgtacttagcgttcgttttagcgttggcatcatgctatggcacctgggtactgcgatgaacagaactgacattctcgtccaaagaatttcaaagctgaaggcaggcatgctattgaatg

SEQ ID NO: 64939 - protein, 334 aa, Triticum aestivum
  peptide (1)..(334): Ceres Seq. ID no. 13598529
  misc_feature (40)..(178): Pfam Name: ThiF family Pfam Description: ThiF family
  misc_feature (195)..(330): Homolog of NCBI NO: 9790247 NR Description: ubiquitin-like 1 (sentrin) activating enzyme
  misc_feature (5)..(188): Homolog of NCBI NO: 9790247 NR Description: ubiquitin-like 1 (sentrin) activating enzyme
  misc_feature (96)..(328): Homolog of NCBI NO: 25494393 NR Description: probable ubiquitin activating enzyme 2
  misc_feature (14)..(328): Homolog of NCBI NO: 21554965 NR Description: ubiquitin activating enzyme [Arabidopsis thaliana]
  misc_feature (14)..(328): Homolog of NCBI NO: 30695912 NR Description: SUMO activating enzyme 1b (SAE1b) [Arabidopsis
  misc_feature (10)..(328): Homolog of NCBI NO: 3647283 NR Description: ubiquitin activating enzyme [Lycopersicon
  misc_feature (14)..(328): Homolog of NCBI NO: 18423184 NR Description: SUMO activating enzyme 1b (SAE1b) [Arabidopsis
  misc_feature (14)..(328): Homolog of NCBI NO: 22652852 NR Description: SUMO activating enzyme 1b [Arabidopsis thaliana]
  misc_feature (14)..(328): Homolog of NCBI NO: 7488411 NR Description: ubiquitin-activating enzyme homolog F13M23.80 -
  misc_feature (14)..(328): Homolog of NCBI NO: 18416454 NR Description: SUMO activating enzyme, putative [Arabidopsis
MGGGGGGGGGGAEEELTAQETALYDRQIRVWGVDAQKRLSKAHVLVCGVNGTTIEFCKNIVLAGVGSLSLMDDHMVTEDDLNSNFLIPHDESVYGGKSRAEVCCESLKDFNPMVRVAVAKGNPSLIDGTFIDMFDIIVVSCASLKTKLFINDNCRKRSKHIAFYSVECKDSCGEIFVDLQDHSYLQKKPGGEPEQQELKYPSLQEAISVPWKDLSKRTTKLYYAMRVLESYESSEGRDPGETSLSDLPAVLARRKDMCDRMSVDESKIPTSLLERLLAAGKKEHPPVCAILGGILGQEVIKSISCKGDPIKNFFYFDDADGKGAMEDIPPTPED

SEQ ID NO: 64940 - protein, 264 aa, Triticum aestivum
  peptide (1)..(264): Ceres Seq. ID no. 13598530
  misc_feature (1)..(108): Pfam Name: ThiF family Pfam Description: ThiF family
  misc_feature (125)..(260): Homolog of NCBI NO: 9790247 NR Description: ubiquitin-like 1 (sentrin) activating enzyme
  misc_feature (1)..(118): Homolog of NCBI NO: 9790247 NR Description: ubiquitin-like 1 (sentrin) activating enzyme
  misc_feature (26)..(258): Homolog of NCBI NO: 25494393 NR Description: probable ubiquitin activating enzyme 2
  misc_feature (1)..(258): Homolog of NCBI NO: 21554965 NR Description: ubiquitin activating enzyme [Arabidopsis thaliana]
  misc_feature (1)..(258): Homolog of NCBI NO: 30695912 NR Description: SUMO activating enzyme 1b (SAE1b) [Arabidopsis
  misc_feature (1)..(258): Homolog of NCBI NO: 3647283 NR Description: ubiquitin activating enzyme [Lycopersicon
  misc_feature (1)..(258): Homolog of NCBI NO: 18423184 NR Description: SUMO activating enzyme 1b (SAE1b) [Arabidopsis
  misc_feature (1)..(258): Homolog of NCBI NO: 22652852 NR Description: SUMO activating enzyme 1b [Arabidopsis thaliana]
  misc_feature (1)..(258): Homolog of NCBI NO: 7488411 NR Description: ubiquitin-activating enzyme homolog F13M23.80 -
  misc_feature (1)..(258): Homolog of NCBI NO: 18416454 NR Description: SUMO activating enzyme, putative [Arabidopsis
MDDHMVTEDDLNSNFLIPHDESVYGGKSRAEVCCESLKDFNPMVRVAVAKGNPSLIDGTFIDMFDIIVVSCASLKTKLFINDNCRKRSKHIAFYSVECKDSCGEIFVDLQDHSYLQKKPGGEPEQQELKYPSLQEAISVPWKDLSKRTTKLYYAMRVLESYESSEGRDPGETSLSDLPAVLARRKDMCDRMSVDESKIPTSLLERLLAAGKKEHPPVCAILGGILGQEVIKSISCKGDPIKNFFYFDDADGKGAMEDIPPTPED

SEQ ID NO: 64941 - protein, 260 aa, Triticum aestivum
  peptide (1)..(260): Ceres Seq. ID no. 13598531
  misc_feature (1)..(104): Pfam Name: ThiF family Pfam Description: ThiF family
  misc_feature (121)..(256): Homolog of NCBI NO: 9790247 NR Description: ubiquitin-like 1 (sentrin) activating enzyme
  misc_feature (1)..(114): Homolog of NCBI NO: 9790247 NR Description: ubiquitin-like 1 (sentrin) activating enzyme
  misc_feature (22)..(254): Homolog of NCBI NO: 25494393 NR Description: probable ubiquitin activating enzyme 2
  misc_feature (1)..(254): Homolog of NCBI NO: 21554965 NR Description: ubiquitin activating enzyme [Arabidopsis thaliana]
  misc_feature (1)..(254): Homolog of NCBI NO: 30695912 NR Description: SUMO activating enzyme 1b (SAE1b) [Arabidopsis
  misc_feature (1)..(254): Homolog of NCBI NO: 3647283 NR Description: ubiquitin activating enzyme [Lycopersicon
  misc_feature (1)..(254): Homolog of NCBI NO: 18423184 NR Description: SUMO activating enzyme 1b (SAE1b) [Arabidopsis
  misc_feature (1)..(254): Homolog of NCBI NO: 22652852 NR Description: SUMO activating enzyme 1b [Arabidopsis thaliana]
  misc_feature (1)..(254): Homolog of NCBI NO: 7488411 NR Description: ubiquitin-activating enzyme homolog F13M23.80 -
  misc_feature (1)..(254): Homolog of NCBI NO: 18416454 NR Description: SUMO activating enzyme, putative [Arabidopsis
MVTEDDLNSNFLIPHDESVYGGKSRAEVCCESLKDFNPMVRVAVAKGNPSLIDGTFIDMFDIIVVSCASLKTKLFINDNCRKRSKHIAFYSVECKDSCGEIFVDLQDHSYLQKKPGGEPEQQELKYPSLQEAISVPWKDLSKRTTKLYYAMRVLESYESSEGRDPGETSLSDLPAVLARRKDMCDRMSVDESKIPTSLLERLLAAGKKEHPPVCAILGGILGQEVIKSISCKGDPIKNFFYFDDADGKGAMEDIPPTPED

SEQ ID NO: 64942 - DNA, 1292 bp, Triticum aestivum
  misc_feature (1)..(1292): Ceres Seq. ID no. 13597533
aaccaaacccaacggctccgcagtccgcaccaacccctccccctcgccccaaccgccgccctcctcgcctccaccggaagagctgctccccccgcaaccgggcggatcccgctaggcggaggcggagatccggcagccgccatggcggcgagcgacgtgcccatgagccccgagctcgagcaggtcgacggcgagatccaggacatcttccgcgccctacacaatgggttccagaagattgacaagatgaaggactccaacaggcagtccaagcagctggaagaactcactgggaagatgagggagtgcaagcgcttaatcaaggaatttgatcgtgtactcaaagatgaggagaaaagcaatacttctgaggtcaacaaacagctaaatgacaagaagcaatttatgatcaaggagttgaattcttatgtcaccatgaggaagacgtaccaaagtagccttggtaataagaggatcgaactattcgatgctggtaatgaccaggtagctgaagataacgttcaaatggcatcagaaatgtcaaatcaacaactgattgattctggaatgaaacaaatggaccaaacagaccaagctattgagcgttcgaaaatggttgttgcacaaactgttgatgttggagctcaaactgctacaactctaacacagcaaactgaccaaatgaagagaattggcaatgagctagattccgttcacttctcattgaagaaagctagtcaaatggtgaaagagattggtcgtcaggttgcaactgacaaatgcatcatggggtttctgtttttgatagtttgtggtgtgattgcgatcattgttgtcaagatcgtcaacccgcataacaagagcatcccagacatcccgggactggcgcctcctgcacctcctgcgcagaaccggaagctgctatccgtagatcctttcagaatgctctgagcattcgggaatggaagtctcgtgccatgcaggtctctcgctctgaagccaaaacacacgatgtcaactgttccattggtgcttgcttgtacattatacccgtatgtaattttctttgattggttcattctttccacactggttgctgttagcttcggattgttagtagcacttcggttgtgtggtgtttaaattgcctggctttcttggttgtgtacatgcgttagtggtgaccagtgagagttatgcgattaatgtttgctcgtataccttcctaaaaccagccgattctattcattatgagaatgtgaatgttggccatccattatcctggccttgtg

SEQ ID NO: 64943 - protein, 316 aa, Triticum aestivum
  peptide (1)..(316): Ceres Seq. ID no. 13597534
  misc_feature (125)..(259): Pfam Name: Vesicle transport v-SNARE protein Pfam Description: Vesicle transport v-SNARE protein
  misc_feature (50)..(260): Homolog of NCBI NO: 25370781 NR Description: F11A17.20 [imported] - Arabidopsis thaliana
  misc_feature (60)..(308): Homolog of NCBI NO: 25370781 NR Description: F11A17.20 [imported] - Arabidopsis thaliana
  misc_feature (55)..(308): Homolog of NCBI NO: 25370780 NR Description: hypothetical protein At2g35190 [imported] -
  misc_feature (55)..(308): Homolog of NCBI NO: 27805643 NR Description: Novel plant SNARE 11 (AtNPSN11)
  misc_feature (55)..(308): Homolog of NCBI NO: 18403771 NR Description: expressed protein [Arabidopsis thaliana]
  misc_feature (50)..(308): Homolog of NCBI NO: 22330102 NR Description: expressed protein [Arabidopsis thaliana]
  misc_feature (50)..(308): Homolog of NCBI NO: 21536876 NR Description: unknown [Arabidopsis thaliana]
  misc_feature (50)..(308): Homolog of NCBI NO: 18401508 NR Description: expressed protein [Arabidopsis thaliana]
  misc_feature (50)..(316): Homolog of NCBI NO: 34896946 NR Description: putative vesicle soluble NSF attachment protein
  misc_feature (50)..(316): Homolog of NCBI NO: 23237830 NR Description: contains ESTs
NQTQRLRSPHQPLPLAPTAALLASTGRAAPPATGRIPLGGGGDPAAAMAASDVPMSPELEQVDGEIQDIFRALHNGFQKIDKMKDSNRQSKQLEELTGKMRECKRLIKEFDRVLKDEEKSNTSEVNKQLNDKKQFMIKELNSYVTMRKTYQSSLGNKRIELFDAGNDQVAEDNVQMASEMSNQQLIDSGMKQMDQTDQAIERSKMVVAQTVDVGAQTATTLTQQTDQMKRIGNELDSVHFSLKKASQMVKEIGRQVATDKCIMGFLFLIVCGVIAIIVVKIVNPHNKSIPDIPGLAPPAPPAQNRKLLSVDPFRML

SEQ ID NO: 64944 - protein, 269 aa, Triticum aestivum
  peptide (1)..(269): Ceres Seq. ID no. 13597535
  misc_feature (78)..(212): Pfam Name: Vesicle transport v-SNARE protein Pfam Description: Vesicle transport v-SNARE protein
  misc_feature (3)..(213): Homolog of NCBI NO: 25370781 NR Description: F11A17.20 [imported] - Arabidopsis thaliana
  misc_feature (13)..(261): Homolog of NCBI NO: 25370781 NR Description: F11A17.20 [imported] - Arabidopsis thaliana
  misc_feature (8)..(261): Homolog of NCBI NO: 25370780 NR Description: hypothetical protein At2g35190 [imported] -
  misc_feature (8)..(261): Homolog of NCBI NO: 27805643 NR Description: Novel plant SNARE 11 (AtNPSN11)
  misc_feature (8)..(261): Homolog of NCBI NO: 18403771 NR Description: expressed protein [Arabidopsis thaliana]
  misc_feature (3)..(261): Homolog of NCBI NO: 22330102 NR Description: expressed protein [Arabidopsis thaliana]
  misc_feature (3)..(261): Homolog of NCBI NO: 21536876 NR Description: unknown [Arabidopsis thaliana]
  misc_feature (3)..(261): Homolog of NCBI NO: 18401508 NR Description: expressed protein [Arabidopsis thaliana]
  misc_feature (3)..(269): Homolog of NCBI NO: 34896946 NR Description: putative vesicle soluble NSF attachment protein
  misc_feature (3)..(269): Homolog of NCBI NO: 23237830 NR Description: contains ESTs
MAASDVPMSPELEQVDGEIQDIFRALHNGFQKIDKMKDSNRQSKQLEELTGKMRECKRLIKEFDRVLKDEEKSNTSEVNKQLNDKKQFMIKELNSYVTMRKTYQSSLGNKRIELFDAGNDQVAEDNVQMASEMSNQQLIDSGMKQMDQTDQAIERSKMVVAQTVDVGAQTATTLTQQTDQMKRIGNELDSVHFSLKKASQMVKEIGRQVATDKCIMGFLFLIVCGVIAIIVVKIVNPHNKSIPDIPGLAPPAPPAQNRKLLSVDPFRML

SEQ ID NO: 64945 - protein, 262 aa, Triticum aestivum
  peptide (1)..(262): Ceres Seq. ID no. 13597536
  misc_feature (71)..(205): Pfam Name: Vesicle transport v-SNARE protein Pfam Description: Vesicle transport v-SNARE protein
  misc_feature (1)..(206): Homolog of NCBI NO: 25370781 NR Description: F11A17.20 [imported] - Arabidopsis thaliana
  misc_feature (6)..(254): Homolog of NCBI NO: 25370781 NR Description: F11A17.20 [imported] - Arabidopsis thaliana
  misc_feature (1)..(254): Homolog of NCBI NO: 25370780 NR Description: hypothetical protein At2g35190 [imported] -
  misc_feature (1)..(254): Homolog of NCBI NO: 27805643 NR Description: Novel plant SNARE 11 (AtNPSN11)
  misc_feature (1)..(254): Homolog of NCBI NO: 18403771 NR Description: expressed protein [Arabidopsis thaliana]
  misc_feature (1)..(254): Homolog of NCBI NO: 22330102 NR Description: expressed protein [Arabidopsis thaliana]
  misc_feature (1)..(254): Homolog of NCBI NO: 21536876 NR Description: unknown [Arabidopsis thaliana]
  misc_feature (1)..(254): Homolog of NCBI NO: 18401508 NR Description: expressed protein [Arabidopsis thaliana]
  misc_feature (1)..(262): Homolog of NCBI NO: 34896946 NR Description: putative vesicle soluble NSF attachment protein
  misc_feature (1)..(262): Homolog of NCBI NO: 23237830 NR Description: contains ESTs
MSPELEQVDGEIQDIFRALHNGFQKIDKMKDSNRQSKQLEELTGKMRECKRLIKEFDRVLKDEEKSNTSEVNKQLNDKKQFMIKELNSYVTMRKTYQSSLGNKRIELFDAGNDQVAEDNVQMASEMSNQQLIDSGMKQMDQTDQAIERSKMVVAQTVDVGAQTATTLTQQTDQMKRIGNELDSVHFSLKKASQMVKEIGRQVATDKCIMGFLFLIVCGVIAIIVVKIVNPHNKSIPDIPGLAPPAPPAQNRKLLSVDPFRML

SEQ ID NO: 64946 - DNA, 1053 bp, Triticum aestivum
  misc_feature (1)..(1053): Ceres Seq. ID no. 12586495
atatcaaatcagtcatacactatcattgttctcctttccatttcctatataagcacgcacctcacacgcttcttctccacccatccgaaaccacacccactagctcccagctgcagcaagcaagccaaacttgtgcgtgtgagtgagtgagcgagagctcagggaaaccaccctacaaagctccggctgagccacccaaccggccggcgacgatgccgatgctcatccccgacgacgtgcgcgccaaggcggagatctacaccggcgacgcagcggggcaggagaagacgcggctgatgctggctgacacggagcttcccagcggtctcctgccgctcaaggacatcatcgagtgcgggtacgtggaggagaccggcttcgtgtggctcaagcagaagaagcgggtggaccactacttcgtcaaggccggccgccatgtctcctacgccaccgaggtctccgccatcgccgagaagggccgcctgaagaagatctccggcgtcaaggccaaggagatgctcatctgggtcaacctccacgagatctgcgtcgacgacccgcccaccggcaagctccactgcaaggccatcggcggcctctcccgcagcttccccgtggaggcattcgaggccaccgacgacctgcccgtgcccgtcaccggacgtctcaagaagaagacagagaaagagagcaccgacaagaaagacgagaagaaggaggcagcagagaagccgaaggaggaggcagcagagaagcccaagggggcctccgtcgcccccgcccccgccgccgtcgacgagatcggtcagaaaatgaaggagatgaacacggaagcggtggcagccaagaactgatcggtggcggcgatggcgacggcggcacgtcatgatcggttacctagtcataaatttgtttcagaataacgcattgcattagcatgtcatcaaccacccacacatatgtatcacctgatccatcgatgagagttcagttcgacaacgatgtaatttcctcctgccttttttctggttttaatgtgatgaaatttaatgc

SEQ ID NO: 64947 - protein, 213 aa, Triticum aestivum
  peptide (1)..(213): Ceres Seq. ID no. 12586496
  misc_feature (4)..(149): Pfam Name: Protein of unknown function, DUF538 Pfam Description: Protein of unknown function, DUF538
  misc_feature (10)..(138): Homolog of NCBI NO: 34915430 NR Description: hypothetical protein~similar to Arabidopsis
  misc_feature (10)..(138): Homolog of NCBI NO: 34915418 NR Description: hypothetical protein~similar to Arabidopsis
  misc_feature (10)..(138): Homolog of NCBI NO: 33146557 NR Description: unknown protein [Oryza sativa (japonica
  misc_feature (10)..(138): Homolog of NCBI NO: 34915410 NR Description: hypothetical protein~similar to Arabidopsis
  misc_feature (10)..(143): Homolog of NCBI NO: 34903866 NR Description: unnamed protein product [Oryza sativa (japonica
  misc_feature (10)..(140): Homolog of NCBI NO: 34911878 NR Description: OSJNBb0032K15.16 [Oryza sativa (japonica
  misc_feature (4)..(165): Homolog of NCBI NO: 18405887 NR Description: expressed protein
  misc_feature (4)..(181): Homolog of NCBI NO: 18391006 NR Description: expressed protein
MPMLIPDDVRAKAEIYTGDAAGQEKTRLMLADTELPSGLLPLKDIIECGYVEETGFVWLKQKKRVDHYFVKAGRHVSYATEVSAIAEKGRLKKISGVKAKEMLIWVNLHEICVDDPPTGKLHCKAIGGLSRSFPVEAFEATDDLPVPVTGRLKKKTEKESTDKKDEKKEAAEKPKEEAAEKPKGASVAPAPAAVDEIGQKMKEMNTEAVAAKN

SEQ ID NO: 64948 - protein, 211 aa, Triticum aestivum
  peptide (1)..(211): Ceres Seq. ID no. 12586497
  misc_feature (2)..(147): Pfam Name: Protein of unknown function, DUF538 Pfam Description: Protein of unknown function, DUF538
  misc_feature (8)..(136): Homolog of NCBI NO: 34915430 NR Description: hypothetical protein~similar to Arabidopsis
  misc_feature (8)..(136): Homolog of NCBI NO: 34915418 NR Description: hypothetical protein~similar to Arabidopsis
  misc_feature (8)..(136): Homolog of NCBI NO: 33146557 NR Description: unknown protein [Oryza sativa (japonica
  misc_feature (8)..(136): Homolog of NCBI NO: 34915410 NR Description: hypothetical protein~similar to Arabidopsis
  misc_feature (8)..(141): Homolog of NCBI NO: 34903866 NR Description: unnamed protein product [Oryza sativa (japonica
  misc_feature (8)..(138): Homolog of NCBI NO: 34911878 NR Description: OSJNBb0032K15.16 [Oryza sativa (japonica
  misc_feature (2)..(163): Homolog of NCBI NO: 18405887 NR Description: expressed protein
  misc_feature (2)..(179): Homolog of NCBI NO: 18391006 NR Description: expressed protein
MLIPDDVRAKAEIYTGDAAGQEKTRLMLADTELPSGLLPLKDIIECGYVEETGFVWLKQKKRVDHYFVKAGRHVSYATEVSAIAEKGRLKKISGVKAKEMLIWVNLHEICVDDPPTGKLHCKAIGGLSRSFPVEAFEATDDLPVPVTGRLKKKTEKESTDKKDEKKEAAEKPKEEAAEKPKGASVAPAPAAVDEIGQKMKEMNTEAVAAKN

SEQ ID NO: 64949 - protein, 185 aa, Triticum aestivum
  peptide (1)..(185): Ceres Seq. ID no. 12586498
  misc_feature (1)..(121): Pfam Name: Protein of unknown function, DUF538 Pfam Description: Protein of unknown function, DUF538
  misc_feature (1)..(110): Homolog of NCBI NO: 34915430 NR Description: hypothetical protein~similar to Arabidopsis
  misc_feature (1)..(110): Homolog of NCBI NO: 34915418 NR Description: hypothetical protein~similar to Arabidopsis
  misc_feature (1)..(110): Homolog of NCBI NO: 33146557 NR Description: unknown protein [Oryza sativa (japonica
  misc_feature (1)..(110): Homolog of NCBI NO: 34915410 NR Description: hypothetical protein~similar to Arabidopsis
  misc_feature (1)..(115): Homolog of NCBI NO: 34903866 NR Description: unnamed protein product [Oryza sativa (japonica
  misc_feature (1)..(112): Homolog of NCBI NO: 34911878 NR Description: OSJNBb0032K15.16 [Oryza sativa (japonica
  misc_feature (1)..(137): Homolog of NCBI NO: 18405887 NR Description: expressed protein
  misc_feature (1)..(153): Homolog of NCBI NO: 18391006 NR Description: expressed protein
MLADTELPSGLLPLKDIIECGYVEETGFVWLKQKKRVDHYFVKAGRHVSYATEVSAIAEKGRLKKISGVKAKEMLIWVNLHEICVDDPPTGKLHCKAIGGLSRSFPVEAFEATDDLPVPVTGRLKKKTEKESTDKKDEKKEAAEKPKEEAAEKPKGASVAPAPAAVDEIGQKMKEMNTEAVAAKN

SEQ ID NO: 64950 - DNA, 902 bp, Triticum aestivum
  misc_feature (1)..(902): Ceres Seq. ID no. 15227083
aaaaaaaaacacatgcgccgtaatggcccttaggtgcgcggccggcggcggcggcggcggcggcgcctacctgacgccgcggaggagcagatgctgcggcgtcggctctgcgcgaccctcagccacgaccagggggacacgagggctcagcctcctcctgaggatcccgtcctcacaatactccgaagctccatgggcgttgcgctgctcgcctgattcccctcctctggagggtgaccagcattcagatcgaactggggcgctgggggcgctgaaggccatggtgtgcgacatgttcaggcccctggcgcgcaacatctcggatatccgatcccttcgcactgtctttgacctcgaggattatcaagtcggcatgctgtttggtgcttttcttggctgcgtcgggtgctaccagctgtggaaggctgctccttccatctttgttgatgctgcccttgcctatgcattctataaactgagcgttatgtcctcggaggtgcgccggcagggcaaatgcaatgatttgctgactcgcttgaaatttggtattgtggttattatggctactaaggacttcaggaagaactatgaactcttggatattgtcaagatgcctgttttctttctttatctttcgacattcatctttgatgtggcacgcatgaagaaatatgcaaagcattatctgattctcacagttaatttattgagaatgaagggcggagctcaagaattgttcagaataatgttttatccgagctatacatctccatatgatgattgcttccgtaggaaataaaatgtagacccctgagattgtgtggatctgtttatgtgagatttttatataagaatttttagtataatgtgtaataacatttatgtaatgctagtttacttgc

SEQ ID NO: 64951 - protein, 265 aa, Triticum aestivum
  peptide (1)..(265): Ceres Seq. ID no. 15227084
  misc_feature (10)..(241): Homolog of NCBI NO: 38344913 NR Description: OSJNBb0079B02.16 [Oryza sativa (japonica
KKNTCAVMALRCAAGGGGGGGAYLTPRRSRCCGVGSARPSATTRGTRGLSLLLRIPSSQYSEAPWALRCSPDSPPLEGDQHSDRTGALGALKAMVCDMFRPLARNISDIRSLRTVFDLEDYQVGMLFGAFLGCVGCYQLWKAAPSIFVDAALAYAFYKLSVMSSEVRRQGKCNDLLTRLKFGIVVIMATKDFRKNYELLDIVKMPVFFLYLSTFIFDVARMKKYAKHYLILTVNLLRMKGGAQELFRIMFYPSYTSPYDDCFRRK

SEQ ID NO: 64952 - protein, 258 aa, Triticum aestivum
  peptide (1)..(258): Ceres Seq. ID no. 15227085
  misc_feature (3)..(234): Homolog of NCBI NO: 38344913 NR Description: OSJNBb0079B02.16 [Oryza sativa (japonica
MALRCAAGGGGGGGAYLTPRRSRCCGVGSARPSATTRGTRGLSLLLRIPSSQYSEAPWALRCSPDSPPLEGDQHSDRTGALGALKAMVCDMFRPLARNISDIRSLRTVFDLEDYQVGMLFGAFLGCVGCYQLWKAAPSIFVDAALAYAFYKLSVMSSEVRRQGKCNDLLTRLKFGIVVIMATKDFRKNYELLDIVKMPVFFLYLSTFIFDVARMKKYAKHYLILTVNLLRMKGGAQELFRIMFYPSYTSPYDDCFRRK

SEQ ID NO: 64953 - protein, 172 aa, Triticum aestivum
  peptide (1)..(172): Ceres Seq. ID no. 15227086
  misc_feature (1)..(148): Homolog of NCBI NO: 38344913 NR Description: OSJNBb0079B02.16 [Oryza sativa (japonica
MVCDMFRPLARNISDIRSLRTVFDLEDYQVGMLFGAFLGCVGCYQLWKAAPSIFVDAALAYAFYKLSVMSSEVRRQGKCNDLLTRLKFGIVVIMATKDFRKNYELLDIVKMPVFFLYLSTFIFDVARMKKYAKHYLILTVNLLRMKGGAQELFRIMFYPSYTSPYDDCFRRK

SEQ ID NO: 64954 - DNA, 1888 bp, Triticum aestivum
  misc_feature (1)..(1888): Ceres Seq. ID no. 13597865
tttcgttctttgggtgaattgtacccaacagcctcccaccccagtccccaccccgagcccgtgaaaccctagcgcattcgtacgccggcggcgatgtcgggctaccctttttacccgtacggccgcggtggcgtaggcgacgatgcgtcggcgatgtcggactacccttttcacccatacggccgtggtggggtaggcgacaatgcggcggcgaggtactcttcctacgagatcgacctcatcgcggcgcgctacgctggcgacccgtcatcctacccctacccctccgcctccggcggattcgacccgcatgtcggcgcgaggcgacccgcagatgttctctatcatcaatctattatgggaagccatagtactattgggcagagtgatgcattttattctccgaacactatggtcaaacgccctaggcttgaaagcagccttcctatttatccacagcgacctggggaaaaggagtgtgcwttctatatgaggaccagaacatgtaagtacgaagaaacctgcaaatttgaccatccacaatgggttccagagggcgggattccaaattggaaagagggtacaaaggctggggaatcctatcccgaacgtccaggggaaccaaattgtccttttyttgtaaagactggtgagtgtaagtttgggtctaaatgcaagttcamccatccaaagaaaaaggatgmcggaacagtggctggwccaggcgataaagagtctctattttctgctaattctaccttaccggtgaagccttctgakccttgtccggagtctstaatttctggtaattctaccttaccggtgaagccttctaaaccttgtccgcwctatgcaaaaggcaaatgcaaattaggaacaaattgtaagttcattcatgcaaaggatatggagccaccttcmrgtggtggaaatgaatctgaaaatacagcamctgctgaagcagcagggcaccatggygcagtgcatgattcagtttcagcawagaagytagcaccagttgctctggagcataactcaaagggcatgcctataagaccaggtgaagttgattgctcattttatattmmsmcskscagytscadytgtatgtgtwtrrwagaacatgtcggttcaaccatcctgaacgacatattcaagcatctgttgtccctggcgagatgctaaatccagctgtgaaattcctgccgagctttgattttcgcgtgacacatgtgccgattgaacctgagccaatcacctaccctcagaggcctggagaaactgtttgtgatttctataagaagacaggattttgtaaattttctgaaaaatgcaagtttcaccatccagttgatcggtctgcacctgattccattgcaaagtgggagccgtctcagcaacctgtgacgcttactgttgctggctttccaaggagagaggatgctgaggcttgtgcctattacatgaagaccggcgcatgcaagtttggcgtccagtgcaagtttgaccacccgccccttggggaggccattgccaaggtttcgaagcatggagaaggaaaggaaggtggaaagaagaaggtggtaggactgagttatgtcctggaaaattagacccgctcaagttccccgtccccatttccattccgagcatgtttccgtcatcagacctgtggtatagtatagtggcagcagcactgcaggagataaagcagagcacgctctgcctgtgcgcggttggttaacgttgttactcgtcatggctttacttactagctgacctctgaatctggtgtaccgttggttcctcgcttgcgcgggatagtagcaatggatgtctggctggtgcagtcgccatgccgtggtagtaagggtccgtgatggctgcc

SEQ ID NO: 64955 - protein, 363 aa, Triticum aestivum
  peptide (1)..(363): Ceres Seq. ID no. 15222218
  misc_feature (175)..(200): Pfam Name: Zinc finger C-x8-C-x5-C-x3-H type (and similar) Pfam Description: Zinc finger C-x8-C-x5-C-x3-H type (and similar)
  misc_feature (120)..(286): Homolog of NCBI NO: 11994409 NR Description: zinc finger protein-like [Arabidopsis thaliana]
  misc_feature (119)..(268): Homolog of NCBI NO: 22507458 NR Description: Unknown (protein for MGC:30371) [Mus musculus]
  misc_feature (133)..(230): Homolog of NCBI NO: 11994409 NR Description: zinc finger protein-like [Arabidopsis thaliana]
  misc_feature (146)..(230): Homolog of NCBI NO: 12321969 NR Description: zinc finger protein, putative, 5' partial;
  misc_feature (240)..(354): Homolog of NCBI NO: 22507458 NR Description: Unknown (protein for MGC:30371) [Mus musculus]
  misc_feature (77)..(230): Homolog of NCBI NO: 22507458 NR Description: Unknown (protein for MGC:30371) [Mus musculus]
  misc_feature (226)..(344): Homolog of NCBI NO: 22331028 NR Description: expressed protein [Arabidopsis thaliana]
  misc_feature (37)..(230): Homolog of NCBI NO: 22331028 NR Description: expressed protein [Arabidopsis thaliana]
  misc_feature (19)..(162): Homolog of NCBI NO: 34912676 NR Description: P0686E09.7 [Oryza sativa (japonica
  misc_feature (168)..(351): Homolog of NCBI NO: 34912676 NR Description: P0686E09.7 [Oryza sativa (japonica
  misc_feature (130)..(130): Xaa is any aa, unknown or other
  misc_feature (182)..(182): Xaa is any aa, unknown or other
  misc_feature (197)..(197): Xaa is any aa, unknown or other
  misc_feature (204)..(204): Xaa is any aa, unknown or other
  misc_feature (209)..(209): Xaa is any aa, unknown or other
  misc_feature (229)..(229): Xaa is any aa, unknown or other
  misc_feature (235)..(235): Xaa is any aa, unknown or other
  misc_feature (252)..(252): Xaa is any aa, unknown or other
  misc_feature (276)..(276): Xaa is any aa, unknown or other
  misc_feature (277)..(277): Xaa is any aa, unknown or other
  misc_feature (287)..(287): Xaa is any aa, unknown or other
  misc_feature (295)..(295): Xaa is any aa, unknown or other
  misc_feature (304)..(304): Xaa is any aa, unknown or other
  misc_feature (306)..(306): Xaa is any aa, unknown or other
  misc_feature (332)..(332): Xaa is any aa, unknown or other
  misc_feature (333)..(333): Xaa is any aa, unknown or other
  misc_feature (334)..(334): Xaa is any aa, unknown or other
  misc_feature (335)..(335): Xaa is any aa, unknown or other
  misc_feature (336)..(336): Xaa is any aa, unknown or other
  misc_feature (337)..(337): Xaa is any aa, unknown or other
  misc_feature (341)..(341): Xaa is any aa, unknown or other
  misc_feature (342)..(342): Xaa is any aa, unknown or other
MSGYPFYPYGRGGVGDDASAMSDYPFHPYGRGGVGDNAAARYSSYEIDLIAARYAGDPSSYPYPSASGGFDPHVGARRPADVLYHQSIMGSHSTIGQSDAFYSPNTMVKRPRLESSLPIYPQRPGEKECXFYMRTRTCKYEETCKFDHPQWVPEGGIPNWKEGTKAGESYPERPGEPNCPFXVKTGECKFGSKCKFXHPKKKDXGTVAXPGDKESLFSANSTLPVKPSXPCPESXISGNSTLPVKPSKPCPXYAKGKCKLGTNCKFIHAKDMEPPXXGGNESENTAXAEAAGHHXAVHDSVSAXKXAPVALEHNSKGMPIRPGEVDCSFYIXXXXXXCMCXXEHVGSTILNDIFKHLLSLARC

SEQ ID NO: 64956 - protein, 343 aa, Triticum aestivum
  peptide (1)..(343): Ceres Seq. ID no. 15222219
  misc_feature (155)..(180): Pfam Name: Zinc finger C-x8-C-x5-C-x3-H type (and similar) Pfam Description: Zinc finger C-x8-C-x5-C-x3-H type (and similar)
  misc_feature (100)..(266): Homolog of NCBI NO: 11994409 NR Description: zinc finger protein-like [Arabidopsis thaliana]
  misc_feature (99)..(248): Homolog of NCBI NO: 22507458 NR Description: Unknown (protein for MGC:30371) [Mus musculus]
  misc_feature (113)..(210): Homolog of NCBI NO: 11994409 NR Description: zinc finger protein-like [Arabidopsis thaliana]
  misc_feature (126)..(210): Homolog of NCBI NO: 12321969 NR Description: zinc finger protein, putative, 5' partial;
  misc_feature (220)..(334): Homolog of NCBI NO: 22507458 NR Description: Unknown (protein for MGC:30371) [Mus musculus]
  misc_feature (57)..(210): Homolog of NCBI NO: 22507458 NR Description: Unknown (protein for MGC:30371) [Mus musculus]
  misc_feature (206)..(324): Homolog of NCBI NO: 22331028 NR Description: expressed protein [Arabidopsis thaliana]
  misc_feature (17)..(210): Homolog of NCBI NO: 22331028 NR Description: expressed protein [Arabidopsis thaliana]
  misc_feature (1)..(142): Homolog of NCBI NO: 34912676 NR Description: P0686E09.7 [Oryza sativa (japonica
  misc_feature (148)..(331): Homolog of NCBI NO: 34912676 NR Description: P0686E09.7 [Oryza sativa (japonica
  misc_feature (110)..(110): Xaa is any aa, unknown or other
  misc_feature (162)..(162): Xaa is any aa, unknown or other
  misc_feature (177)..(177): Xaa is any aa, unknown or other
  misc_feature (184)..(184): Xaa is any aa, unknown or other
  misc_feature (189)..(189): Xaa is any aa, unknown or other
  misc_feature (209)..(209): Xaa is any aa, unknown or other
  misc_feature (215)..(215): Xaa is any aa, unknown or other
  misc_feature (232)..(232): Xaa is any aa, unknown or other
  misc_feature (256)..(256): Xaa is any aa, unknown or other
  misc_feature (257)..(257): Xaa is any aa, unknown or other
  misc_feature (267)..(267): Xaa is any aa, unknown or other
  misc_feature (275)..(275): Xaa is any aa, unknown or other
  misc_feature (284)..(284): Xaa is any aa, unknown or other
  misc_feature (286)..(286): Xaa is any aa, unknown or other
  misc_feature (312)..(312): Xaa is any aa, unknown or other
  misc_feature (313)..(313): Xaa is any aa, unknown or other
  misc_feature (314)..(314): Xaa is any aa, unknown or other
  misc_feature (315)..(315): Xaa is any aa, unknown or other
  misc_feature (316)..(316): Xaa is any aa, unknown or other
  misc_feature (317)..(317): Xaa is any aa, unknown or other
  misc_feature (321)..(321): Xaa is any aa, unknown or other
  misc_feature (322)..(322): Xaa is any aa, unknown or other
MSDYPFHPYGRGGVGDNAAARYSSYEIDLIAARYAGDPSSYPYPSASGGFDPHVGARRPADVLYHQSIMGSHSTIGQSDAFYSPNTMVKRPRLESSLPIYPQRPGEKECXFYMRTRTCKYEETCKFDHPQWVPEGGIPNWKEGTKAGESYPERPGEPNCPFXVKTGECKFGSKCKFXHPKKKDXGTVAXPGDKESLFSANSTLPVKPSXPCPESXISGNSTLPVKPSKPCPXYAKGKCKLGTNCKFIHAKDMEPPXXGGNESENTAXAEAAGHHXAVHDSVSAXKXAPVALEHNSKGMPIRPGEVDCSFYIXXXXXXCMCXXEHVGSTILNDIFKHLLSLARC

SEQ ID NO: 64957 - protein, 275 aa, Triticum aestivum
  peptide (1)..(275): Ceres Seq. ID no. 15222220
  misc_feature (87)..(112): Pfam Name: Zinc finger C-x8-C-x5-C-x3-H type (and similar) Pfam Description: Zinc finger C-x8-C-x5-C-x3-H type (and similar)
  misc_feature (32)..(198): Homolog of NCBI NO: 11994409 NR Description: zinc finger protein-like [Arabidopsis thaliana]
  misc_feature (31)..(180): Homolog of NCBI NO: 22507458 NR Description: Unknown (protein for MGC:30371) [Mus musculus]
  misc_feature (45)..(142): Homolog of NCBI NO: 11994409 NR Description: zinc finger protein-like [Arabidopsis thaliana]
  misc_feature (58)..(142): Homolog of NCBI NO: 12321969 NR Description: zinc finger protein, putative, 5' partial;
  misc_feature (152)..(266): Homolog of NCBI NO: 22507458 NR Description: Unknown (protein for MGC:30371) [Mus musculus]
  misc_feature (1)..(142): Homolog of NCBI NO: 22507458 NR Description: Unknown (protein for MGC:30371) [Mus musculus]
  misc_feature (138)..(256): Homolog of NCBI NO: 22331028 NR Description: expressed protein [Arabidopsis thaliana]
  misc_feature (1)..(142): Homolog of NCBI NO: 22331028 NR Description: expressed protein [Arabidopsis thaliana]
  misc_feature (1)..(74): Homolog of NCBI NO: 34912676 NR Description: P0686E09.7 [Oryza sativa (japonica
  misc_feature (80)..(263): Homolog of NCBI NO: 34912676 NR Description: P0686E09.7 [Oryza sativa (japonica
  misc_feature (42)..(42): Xaa is any aa, unknown or other
  misc_feature (94)..(94): Xaa is any aa, unknown or other
  misc_feature (109)..(109): Xaa is any aa, unknown or other
  misc_feature (116)..(116): Xaa is any aa, unknown or other
  misc_feature (121)..(121): Xaa is any aa, unknown or other
  misc_feature (141)..(141): Xaa is any aa, unknown or other
  misc_feature (147)..(147): Xaa is any aa, unknown or other
  misc_feature (164)..(164): Xaa is any aa, unknown or other
  misc_feature (188)..(188): Xaa is any aa, unknown or other
  misc_feature (189)..(189): Xaa is any aa, unknown or other
  misc_feature (199)..(199): Xaa is any aa, unknown or other
  misc_feature (207)..(207): Xaa is any aa, unknown or other
  misc_feature (216)..(216): Xaa is any aa, unknown or other
  misc_feature (218)..(218): Xaa is any aa, unknown or other
  misc_feature (244)..(244): Xaa is any aa, unknown or other
  misc_feature (245)..(245): Xaa is any aa, unknown or other
  misc_feature (246)..(246): Xaa is any aa, unknown or other
  misc_feature (247)..(247): Xaa is any aa, unknown or other
  misc_feature (248)..(248): Xaa is any aa, unknown or other
  misc_feature (249)..(249): Xaa is any aa, unknown or other
  misc_feature (253)..(253): Xaa is any aa, unknown or other
  misc_feature (254)..(254): Xaa is any aa, unknown or other
MGSHSTIGQSDAFYSPNTMVKRPRLESSLPIYPQRPGEKECXFYMRTRTCKYEETCKFDHPQWVPEGGIPNWKEGTKAGESYPERPGEPNCPFXVKTGECKFGSKCKFXHPKKKDXGTVAXPGDKESLFSANSTLPVKPSXPCPESXISGNSTLPVKPSKPCPXYAKGKCKLGTNCKFIHAKDMEPPXXGGNESENTAXAEAAGHHXAVHDSVSAXKXAPVALEHNSKGMPIRPGEVDCSFYIXXXXXXCMCXXEHVGSTILNDIFKHLLSLARC

SEQ ID NO: 64958 - DNA, 1242 bp, Triticum aestivum
  misc_feature (1)..(1242): Ceres Seq. ID no. 12586696
cgttcgtcagctcgctcaggcgcagcgcggctaaggctgcagcttcctttcctgctggggccagggggctcgttttcagctttctaaactgcgtctgtcttcaaaggggttttgggtgagagagacacccttcgtgtgcttccggtggtggagaagaagagttggcgcgtgccatgtcgcggtcgcgcacggtgcgtatctactgggacgatcccgacgtgacggactcgtccagcgaggacgacgagggctgcgccgctcggagggtgggaaggatggtgcgggagcttccgccggccccggcgccgctggtgcaggcggcggcggcggctccttcaccggagcagtgcagcgcgggagacgacgacctgccaaggcgtgttggtggatgtacccgtgcgcggaagaggctggccaagggcggcggctccgctgcgcagagcaccaagttccgcggcgtcaggcggcggccgtggggcaagtacgcggcggagatccgcgacccgtggcgcggcgtgcgcgtctggctcggcactttcgacaccgccgaggaggccgcgcgcgtgtacgacaacgcggccattcagctccgcggcgccaccgcgacgaccaacttctccacctcctccacgaattcggagggcgcccaggaggacctgacggcggccgggtacgagtccggcgcggagtcctcgcaggcggtgtcgtccccgacgtccgtgctccgcaaggtgccgtcgatgtcgtccttggcggaggacaggggcgactcggaggcctgtcaaggcgacgccgctgccggcagcagcctcagcgttccggaggagctgggcgagttcgtgccgttcgaggacgcgccggtctactccagcagcagcttctgggacttcgagccgcagtcggggttcctctacgccgagccgtcctcagccgaggaggcctcgtgggacgcgtccgccggcggcgagccgtgggccgcgccggtgcaggagaacgactacttccaggatttgcgcgacctgttcccgctcaaccagcttcccgcgattttctagatgggagcggcggagcttgcttccctatcttttttggtgtatgtcgagactcgagagtattttgtcgtgtacgtgtggtgtgtccccgtgtatttgtaacatgtccgtgtgcgttgctgctgtctgtgttgagtcgacgagaagaggaatgtacgatccgggtagagttttcactgctgtgctgggt

SEQ ID NO: 64959 - protein, 293 aa, Triticum aestivum
  peptide (1)..(293): Ceres Seq. ID no. 12586697
  misc_feature (90)..(155): Pfam Name: AP2 domain Pfam Description: AP2 domain
  misc_feature (5)..(185): Homolog of NCBI NO: 15225959 NR Description: putative AP2 domain transcription factor
  misc_feature (92)..(284): Homolog of NCBI NO: 15237053 NR Description: putative Ap2 domain protein; protein id:
  misc_feature (3)..(185): Homolog of NCBI NO: 22655200 NR Description: putative Ap2 domain protein [Arabidopsis thaliana]
  misc_feature (3)..(185): Homolog of NCBI NO: 15236595 NR Description: putative Ap2 domain protein
  misc_feature (4)..(184): Homolog of NCBI NO: 15234337 NR Description: putative protein; protein id: At4g27950.1
  misc_feature (1)..(184): Homolog of NCBI NO: 15238705 NR Description: putative protein; protein id: At5g53290.1
  misc_feature (1)..(216): Homolog of NCBI NO: 34898320 NR Description: Similar to Nicotiana tabacum mRNA for ERF1,
  misc_feature (7)..(194): Homolog of NCBI NO: 34904146 NR Description: unnamed protein product [Oryza sativa (japonica
  misc_feature (1)..(293): Homolog of NCBI NO: 33087077 NR Description: TSI-1-like protein [Oryza sativa (japonica
  misc_feature (1)..(293): Homolog of NCBI NO: 34911974 NR Description: P0694A04.17 [Oryza sativa (japonica
MSRSRTVRIYWDDPDVTDSSSEDDEGCAARRVGRMVRELPPAPAPLVQAAAAAPSPEQCSAGDDDLPRRVGGCTRARKRLAKGGGSAAQSTKFRGVRRRPWGKYAAEIRDPWRGVRVWLGTFDTAEEAARVYDNAAIQLRGATATTNFSTSSTNSEGAQEDLTAAGYESGAESSQAVSSPTSVLRKVPSMSSLAEDRGDSEACQGDAAAGSSLSVPEELGEFVPFEDAPVYSSSSFWDFEPQSGFLYAEPSSAEEASWDASAGGEPWAAPVQENDYFQDLRDLFPLNQLPAIF

SEQ ID NO: 64960 - protein, 284 aa, Triticum aestivum
  peptide (1)..(284): Ceres Seq. ID no. 12586698
MYPCAEEAGQGRRLRCAEHQVPRRQAAAVGQVRGGDPRPVARRARLARHFRHRRGGRARVRQRGHSAPRRHRDDQLLHLLHEFGGRPGGPDGGRVRVRRGVLAGGVVPDVRAPQGAVDVVLGGGQGRLGGLSRRRRCRQQPQRSGGAGRVRAVRGRAGLLQQQLLGLRAAVGVPLRRAVLSRGGLVGRVRRRRAVGRAGAGERLLPGFARPVPAQPASRDFLDGSGGACFPIFFGVCRDSRVFCRVRVVCPRVFVTCPCALLLSVLSRREEECTIRVEFSLLCW

SEQ ID NO: 64961 - protein, 259 aa, Triticum aestivum
  peptide (1)..(259): Ceres Seq. ID no. 12586699
  misc_feature (56)..(121): Pfam Name: AP2 domain Pfam Description: AP2 domain
  misc_feature (1)..(151): Homolog of NCBI NO: 15225959 NR Description: putative AP2 domain transcription factor
  misc_feature (58)..(250): Homolog of NCBI NO: 15237053 NR Description: putative Ap2 domain protein; protein id:
  misc_feature (1)..(151): Homolog of NCBI NO: 22655200 NR Description: putative Ap2 domain protein [Arabidopsis thaliana]
  misc_feature (1)..(151): Homolog of NCBI NO: 15236595 NR Description: putative Ap2 domain protein
  misc_feature (1)..(150): Homolog of NCBI NO: 15234337 NR Description: putative protein; protein id: At4g27950.1
  misc_feature (1)..(150): Homolog of NCBI NO: 15238705 NR Description: putative protein; protein id: At5g53290.1
  misc_feature (1)..(182): Homolog of NCBI NO: 34898320 NR Description: Similar to Nicotiana tabacum mRNA for ERF1,
  misc_feature (1)..(160): Homolog of NCBI NO: 34904146 NR Description: unnamed protein product [Oryza sativa (japonica
  misc_feature (1)..(259): Homolog of NCBI NO: 33087077 NR Description: TSI-1-like protein [Oryza sativa (japonica
  misc_feature (1)..(259): Homolog of NCBI NO: 34911974 NR Description: P0694A04.17 [Oryza sativa (japonica
MVRELPPAPAPLVQAAAAAPSPEQCSAGDDDLPRRVGGCTRARKRLAKGGGSAAQSTKFRGVRRRPWGKYAAEIRDPWRGVRVWLGTFDTAEEAARVYDNAAIQLRGATATTNFSTSSTNSEGAQEDLTAAGYESGAESSQAVSSPTSVLRKVPSMSSLAEDRGDSEACQGDAAAGSSLSVPEELGEFVPFEDAPVYSSSSFWDFEPQSGFLYAEPSSAEEASWDASAGGEPWAAPVQENDYFQDLRDLFPLNQLPAIF

SEQ ID NO: 64962 - DNA, 1476 bp, Triticum aestivum
  misc_feature (1)..(1476): Ceres Seq. ID no. 13597537
atgtcgctaccaatcactagcgtctcccgagcccaccaggacccgacccagatcttgccgttggcagctcaactcccgtgtaggtgagccggctactcccctcccacccccaccacccgagagtacacggcgcctcttcttcaaaagccctccctttttgttttctcggcgctcctcgggggttttggtccgccgaggaggggtttggtgcgcccggtaccggagaatcttggcgagaagtgcctagtttccgctaggctggttggtgggaggcgggtgcctggtgccgcggcttcagccatggaggcagtcgcaatgtcgccgtcctccgtctcgtcccacaacctcgacgccgcctccaccagcgacgacatgccgtcctcgcaagagggcctcctcttctcggacagcctcaaggacttgaggaatctgcggtcgcagctatactcagcggcagaatattttgaagtattctacacaaacaactcgcacagatctacggtggtgacgagtttaaaagactacgcagttgaggcactcgttagcacggttgaccatcttggctttgtgtcgtacaaggtggataatctcgtcaatgaaaaggctgacgaggttaatgaaacagaatttcgagtatcgtcggttgaacagagggtaaagatttgccggcaggcaattgaccaggagggaagatctcaacagtctcttcttatcagggcgccgcagtaccacaggcgttacatattaccaggcgtagatatagtggaatccgctatccatccagtttcagagcccacacggtacagcaggcaacatacgggtcgcaaaatgcgcaagtctcagtctaccatgtccactccagttagtaggcagacaacgatgaggagtgtccgttcacggtctccagcagttcgtgaaacacatcatcgatcacgatccatgtcgccgtctcgaaaagcgcgagctaaatcaccatcaccccaagtcgtgaacttgaatccgaaagaaacaagagcaggttcgccaataccaactattcccattcccctggcgcgatctgctacagttgcaagaagaccacctctggatccaaagcattttagacaaacctcgatgcaggtgcagtccgactatgaacaccagaaagagcgggagaaaagatcaagcaaaggcaggggcttcctcaagtcgctgctcacaagacgccggtggaggaatgacgagtcgctctacaattacttggacgagtactgatcgctgaaatgtcttagaccttgttccttgttgaccaatctcgttccttcatacatatgatgttcgagatctcagaccaaatctcattccttcatacatatagcttgtgtgtcatttccatgtgtttatagatacaatgcagacagaaacaccaccagtggtgctcatggcgttgcgcaagcgcatgacggatgaagcaaccaaatacagagcagcttccgt

SEQ ID NO: 64963 - protein, 317 aa, Triticum aestivum
  peptide (1)..(317): Ceres Seq. ID no. 15222125
  misc_feature (19)..(247): Homolog of NCBI NO: 18407012 NR Description: expressed protein [Arabidopsis thaliana]
  misc_feature (6)..(256): Homolog of NCBI NO: 15238265 NR Description: expressed protein [Arabidopsis thaliana]
  misc_feature (6)..(258): Homolog of NCBI NO: 21618229 NR Description: unknown [Arabidopsis thaliana]
  misc_feature (265)..(317): Homolog of NCBI NO: 34913914 NR Description: OSJNBa0066C06.8 [Oryza sativa (japonica
  misc_feature (18)..(236): Homolog of NCBI NO: 34913914 NR Description: OSJNBa0066C06.8 [Oryza sativa (japonica
  misc_feature (19)..(317): Homolog of NCBI NO: 30689382 NR Description: expressed protein [Arabidopsis thaliana]
  misc_feature (19)..(154): Homolog of NCBI NO: 10177091 NR Description: emb|CAB66408.1~gene_id:MOP9.13~strong similarity
  misc_feature (165)..(317): Homolog of NCBI NO: 10177091 NR Description: emb|CAB66408.1~gene_id:MOP9.13~strong similarity
  misc_feature (19)..(317): Homolog of NCBI NO: 15229112 NR Description: expressed protein [Arabidopsis thaliana]
  misc_feature (1)..(274): Homolog of NCBI NO: 34904432 NR Description: unnamed protein product [Oryza sativa (japonica
MEAVAMSPSSVSSHNLDAASTSDDMPSSQEGLLFSDSLKDLRNLRSQLYSAAEYFEVFYTNNSHRSTVVTSLKDYAVEALVSTVDHLGFVSYKVDNLVNEKADEVNETEFRVSSVEQRVKICRQAIDQEGRSQQSLLIRAPQYHRRYILPGVDIVESAIHPVSEPTRYSRQHTGRKMRKSQSTMSTPVSRQTTMRSVRSRSPAVRETHHRSRSMSPSRKARAKSPSPQVVNLNPKETRAGSPIPTIPIPLARSATVARRPPLDPKHFRQTSMQVQSDYEHQKEREKRSSKGRGFLKSLLTRRRWRNDESLYNYLDEY

SEQ ID NO: 64964 - protein, 312 aa, Triticum aestivum
  peptide (1)..(312): Ceres Seq. ID no. 15222126
  misc_feature (14)..(242): Homolog of NCBI NO: 18407012 NR Description: expressed protein [Arabidopsis thaliana]
  misc_feature (1)..(251): Homolog of NCBI NO: 15238265 NR Description: expressed protein [Arabidopsis thaliana]
  misc_feature (1)..(253): Homolog of NCBI NO: 21618229 NR Description: unknown [Arabidopsis thaliana]
  misc_feature (260)..(312): Homolog of NCBI NO: 34913914 NR Description: OSJNBa0066C06.8 [Oryza sativa (japonica
  misc_feature (13)..(231): Homolog of NCBI NO: 34913914 NR Description: OSJNBa0066C06.8 [Oryza sativa (japonica
  misc_feature (14)..(312): Homolog of NCBI NO: 30689382 NR Description: expressed protein [Arabidopsis thaliana]
  misc_feature (14)..(149): Homolog of NCBI NO: 10177091 NR Description: emb|CAB66408.1~gene_id:MOP9.13~strong similarity
  misc_feature (160)..(312): Homolog of NCBI NO: 10177091 NR Description: emb|CAB66408.1~gene_id:MOP9.13~strong similarity
  misc_feature (14)..(312): Homolog of NCBI NO: 15229112 NR Description: expressed protein [Arabidopsis thaliana]
  misc_feature (1)..(269): Homolog of NCBI NO: 34904432 NR Description: unnamed protein product [Oryza sativa (japonica
MSPSSVSSHNLDAASTSDDMPSSQEGLLFSDSLKDLRNLRSQLYSAAEYFEVFYTNNSHRSTVVTSLKDYAVEALVSTVDHLGFVSYKVDNLVNEKADEVNETEFRVSSVEQRVKICRQAIDQEGRSQQSLLIRAPQYHRRYILPGVDIVESAIHPVSEPTRYSRQHTGRKMRKSQSTMSTPVSRQTTMRSVRSRSPAVRETHHRSRSMSPSRKARAKSPSPQVVNLNPKETRAGSPIPTIPIPLARSATVARRPPLDPKHFRQTSMQVQSDYEHQKEREKRSSKGRGFLKSLLTRRRWRNDESLYNYLDEY

SEQ ID NO: 64965 - protein, 293 aa, Triticum aestivum
  peptide (1)..(293): Ceres Seq. ID no. 15222127
  misc_feature (1)..(223): Homolog of NCBI NO: 18407012 NR Description: expressed protein [Arabidopsis thaliana]
  misc_feature (1)..(232): Homolog of NCBI NO: 15238265 NR Description: expressed protein [Arabidopsis thaliana]
  misc_feature (1)..(234): Homolog of NCBI NO: 21618229 NR Description: unknown [Arabidopsis thaliana]
  misc_feature (241)..(293): Homolog of NCBI NO: 34913914 NR Description: OSJNBa0066C06.8 [Oryza sativa (japonica
  misc_feature (1)..(212): Homolog of NCBI NO: 34913914 NR Description: OSJNBa0066C06.8 [Oryza sativa (japonica
  misc_feature (1)..(293): Homolog of NCBI NO: 30689382 NR Description: expressed protein [Arabidopsis thaliana]
  misc_feature (1)..(130): Homolog of NCBI NO: 10177091 NR Description: emb|CAB66408.1~gene_id:MOP9.13~strong similarity
  misc_feature (141)..(293): Homolog of NCBI NO: 10177091 NR Description: emb|CAB66408.1~gene_id:MOP9.13~strong similarity
  misc_feature (1)..(293): Homolog of NCBI NO: 15229112 NR Description: expressed protein [Arabidopsis thaliana]
  misc_feature (1)..(250): Homolog of NCBI NO: 34904432 NR Description: unnamed protein product [Oryza sativa (japonica
MPSSQEGLLFSDSLKDLRNLRSQLYSAAEYFEVFYTNNSHRSTVVTSLKDYAVEALVSTVDHLGFVSYKVDNLVNEKADEVNETEFRVSSVEQRVKICRQAIDQEGRSQQSLLIRAPQYHRRYILPGVDIVESAIHPVSEPTRYSRQHTGRKMRKSQSTMSTPVSRQTTMRSVRSRSPAVRETHHRSRSMSPSRKARAKSPSPQVVNLNPKETRAGSPIPTIPIPLARSATVARRPPLDPKHFRQTSMQVQSDYEHQKEREKRSSKGRGFLKSLLTRRRWRNDESLYNYLDEY

SEQ ID NO: 64966 - DNA, 1383 bp, Triticum aestivum
  misc_feature (1)..(1383): Ceres Seq. ID no. 13597538
gaacatcctaatcgaaaacttctccggttgtgaggccccgtgctgcctcctcctctctgtctgtttctaccgacgccgccccagcccccgcgagagagaaaccctagcctagggttccacgcgccgccgccgccgccgccgacgtcgaccccgcctcgcccttcccccgagctcgccatggacgcgggccgcaagagggccgtgccggagggcgccaacggcggcgccgccgtcaagcgcgccagagaatcggagtcggttcaaacgggtgtaggaagcaaatcgaagccatgcaccaaatttttcagcactgctggttgtccctttggttcaagttgccattttctccataacttccctggaggtcaccaggctgtttcaaagatgaccaacttgggtggtccagctgtttcagctcctcaaggaagaatgcccatgggacctggtgttcctgatgggccacctacacccagcttgaagactcgcttgtgtaacaagtttaacacagcagaaggttgtaaatgggggaacaagtgtcattttgctcatggagagagggagctcggaaagcccatgctgttgaacaactcaatggcacctccaatgggaccaagacccaatggccacttccagcccccaccgatgcctggcccagacatggttcctccctcaacctttggcgcatcggccacagccaagatcagtgttgatgcatcccttgccggcgccattattgggaagggtggagtcaacacaaagcacatatccagaatgactggggccaagctggccatacgggataatgaggcagaccccaaccataaaaacattgagctcgaggggtcgtttgatcaggtcaaccatgccagtgcaatggtgaaagagctgattctccgcattggtggcaacgcccctcctcaagcaaagaacccagggagggggcctgcgggtggtggtgggggaagcaacttcaagaccaagctgtgcgacaacttcaacaaaggctcttgcacatttggagacagatgccacttcgcccatggtgagagtgaactgcgcaagtcggctgcggcttgagagatgcttttttttttatggcttttcatgattaatagtgattagcaaagcctgagctccaaatccgaggccattcacccatggtcatgttgagttgcataagcctgttgttgattgattgggagatactgtcatggcttcggtgtgatcagctcgctgtaactgatagatatccgagaatggatttgcttttgagatttattataggcttagtgtattgccgtcttttttctctctctgctccgcatccaatttttgtactgtttctaaggcattttaatatggcaaatttagcgattctattcc

SEQ ID NO: 64967 - protein, 299 aa, Triticum aestivum
  peptide (1)..(299): Ceres Seq. ID no. 13597539
  misc_feature (174)..(220): Pfam Name: KH domain Pfam Description: KH domain
  misc_feature (1)..(125): Homolog of NCBI NO: 15226988 NR Description: hypothetical protein [Arabidopsis thaliana]
  misc_feature (17)..(90): Homolog of NCBI NO: 9294110 NR Description: contains similarity to unknown
  misc_feature (1)..(94): Homolog of NCBI NO: 21555233 NR Description: unknown [Arabidopsis thaliana]
  misc_feature (1)..(94): Homolog of NCBI NO: 15240145 NR Description: KH domain/zinc finger protein [Arabidopsis
  misc_feature (1)..(90): Homolog of NCBI NO: 18399496 NR Description: KH domain/zinc finger protein [Arabidopsis
  misc_feature (101)..(299): Homolog of NCBI NO: 21555233 NR Description: unknown [Arabidopsis thaliana]
  misc_feature (101)..(299): Homolog of NCBI NO: 15240145 NR Description: KH domain/zinc finger protein [Arabidopsis
  misc_feature (101)..(296): Homolog of NCBI NO: 18399496 NR Description: KH domain/zinc finger protein [Arabidopsis
  misc_feature (101)..(296): Homolog of NCBI NO: 9294110 NR Description: contains similarity to unknown
  misc_feature (4)..(299): Homolog of NCBI NO: 5441893 NR Description: ESTs C99174(E10437),D22295(C10709) correspond to region of the predicted gene.~Similar to Arabidopsis thaliana BAC
MDAGRKRAVPEGANGGAAVKRARESESVQTGVGSKSKPCTKFFSTAGCPFGSSCHFLHNFPGGHQAVSKMTNLGGPAVSAPQGRMPMGPGVPDGPPTPSLKTRLCNKFNTAEGCKWGNKCHFAHGERELGKPMLLNNSMAPPMGPRPNGHFQPPPMPGPDMVPPSTFGASATAKISVDASLAGAIIGKGGVNTKHISRMTGAKLAIRDNEADPNHKNIELEGSFDQVNHASAMVKELILRIGGNAPPQAKNPGRGPAGGGGGSNFKTKLCDNFNKGSCTFGDRCHFAHGESELRKSAAA

SEQ ID NO: 64968 - protein, 230 aa, Triticum aestivum
  peptide (1)..(230): Ceres Seq. ID no. 13597540
  misc_feature (105)..(151): Pfam Name: KH domain Pfam Description: KH domain
  misc_feature (1)..(56): Homolog of NCBI NO: 15226988 NR Description: hypothetical protein [Arabidopsis thaliana]
  misc_feature (1)..(21): Homolog of NCBI NO: 9294110 NR Description: contains similarity to unknown
  misc_feature (1)..(25): Homolog of NCBI NO: 21555233 NR Description: unknown [Arabidopsis thaliana]
  misc_feature (1)..(25): Homolog of NCBI NO: 15240145 NR Description: KH domain/zinc finger protein [Arabidopsis
  misc_feature (1)..(21): Homolog of NCBI NO: 18399496 NR Description: KH domain/zinc finger protein [Arabidopsis
  misc_feature (32)..(230): Homolog of NCBI NO: 21555233 NR Description: unknown [Arabidopsis thaliana]
  misc_feature (32)..(230): Homolog of NCBI NO: 15240145 NR Description: KH domain/zinc finger protein [Arabidopsis
  misc_feature (32)..(227): Homolog of NCBI NO: 18399496 NR Description: KH domain/zinc finger protein [Arabidopsis
  misc_feature (32)..(227): Homolog of NCBI NO: 9294110 NR Description: contains similarity to unknown
  misc_feature (1)..(230): Homolog of NCBI NO: 5441893 NR Description: ESTs C99174(E10437),D22295(C10709) correspond to region of the predicted gene.~Similar to Arabidopsis thaliana BAC
MTNLGGPAVSAPQGRMPMGPGVPDGPPTPSLKTRLCNKFNTAEGCKWGNKCHFAHGERELGKPMLLNNSMAPPMGPRPNGHFQPPPMPGPDMVPPSTFGASATAKISVDASLAGAIIGKGGVNTKHISRMTGAKLAIRDNEADPNHKNIELEGSFDQVNHASAMVKELILRIGGNAPPQAKNPGRGPAGGGGGSNFKTKLCDNFNKGSCTFGDRCHFAHGESELRKSAAA

SEQ ID NO: 64969 - protein, 215 aa, Triticum aestivum
  peptide (1)..(215): Ceres Seq. ID no. 13597541
  misc_feature (90)..(136): Pfam Name: KH domain Pfam Description: KH domain
  misc_feature (158)..(211): Homolog of NCBI NO: 15912259 NR Description: At1g32359/F27G20.10 [Arabidopsis thaliana]
  misc_feature (1)..(61): Homolog of NCBI NO: 18398397 NR Description: MYB family transcription factor -related
  misc_feature (1)..(61): Homolog of NCBI NO: 15912259 NR Description: At1g32359/F27G20.10 [Arabidopsis thaliana]
  misc_feature (1)..(47): Homolog of NCBI NO: 34905220 NR Description: P0672D01.12 [Oryza sativa (japonica
  misc_feature (1)..(41): Homolog of NCBI NO: 15226988 NR Description: hypothetical protein [Arabidopsis thaliana]
  misc_feature (17)..(215): Homolog of NCBI NO: 21555233 NR Description: unknown [Arabidopsis thaliana]
  misc_feature (17)..(215): Homolog of NCBI NO: 15240145 NR Description: KH domain/zinc finger protein [Arabidopsis
  misc_feature (17)..(212): Homolog of NCBI NO: 18399496 NR Description: KH domain/zinc finger protein [Arabidopsis
  misc_feature (17)..(212): Homolog of NCBI NO: 9294110 NR Description: contains similarity to unknown
  misc_feature (1)..(215): Homolog of NCBI NO: 5441893 NR Description: ESTs C99174(E10437),D22295(C10709) correspond to region of the predicted gene.~Similar to Arabidopsis thaliana BAC
MPMGPGVPDGPPTPSLKTRLCNKFNTAEGCKWGNKCHFAHGERELGKPMLLNNSMAPPMGPRPNGHFQPPPMPGPDMVPPSTFGASATAKISVDASLAGAIIGKGGVNTKHISRMTGAKLAIRDNEADPNHKNIELEGSFDQVNHASAMVKELILRIGGNAPPQAKNPGRGPAGGGGGSNFKTKLCDNFNKGSCTFGDRCHFAHGESELRKSAAA

SEQ ID NO: 64970 - DNA, 1282 bp, Triticum aestivum
  misc_feature (1)..(1282): Ceres Seq. ID no. 13655896
aggaactcggagtattttggctctacaaagttcatcatcgagcacgcgatttccgtaaaagccacgtgttaagctttccaccaccagttcactcaccatagtccaacggaatctttcttccccctctactactagattgcctagagggtgctgactcgagtgcagtgtactgcgtttccttctcgtcgtcggtcttcttatctcatccccgactccgacgagcccaaccggcgacggatggcggcgacgaagctgagcagcgggcacgagatgccggccgtggggctcggcgtctggcggatggactccgccgccgtccgcggcctcatccactccgccctccgcgccggctaccgccacttcgactgcgccgctgactacaaaaacgaggctgaagttggcgatgcgctggcggaggcattccaaactgggcttgtcaagagggaggatcttttcatcactaccaagttgtggaactcagatcacggtcatgtggttgaagcctgcaaggatagcctgaagaagctgcgattggattatctagatctctaccttattcacttccctgtagctactaagcatactggagttggcacaactggcagtgctcttggtgatgatggtgtgcttgatatcgataccactatctcattggagacaacgtggcatgcaatggaagatcttgtttccatgggacttgttcgtagcataggaattagcaactacgacatattcctcaccagagactgcttggcgtacgccaagataaagcctgcggtcaaccaaatcgagacacacccttacttccagcgtgactctcttgtgaagttctgccagaagcacggaatctgcgtcaccgcacatacccccctgggtggctctaccgccaacaccgagtggttcggctcggtctcatgccttgacgaccctgtcatcaagtctctggctgagaaatacggcaagacgccggcgcagctggtcctccggtggggcctccagaggaacacagtggtcatccccaagacctccaaggtagagaggctggaggagaactttgcggtctccgacttcgacatctctggcgaggacatggagaagatcaaggcccttgaccgcaggtaccgcaccaaccagccggccaagttttggggcatcgacctctacgcttgattccactgcattatttgctacccggacaatagaatcaataatatgagagcttatcattaccttaaacgaacttgagttgtggatgatgtatttgcagcacgaccagtcacaa

SEQ ID NO: 64971 - protein, 310 aa, Triticum aestivum
  peptide (1)..(310): Ceres Seq. ID no. 13655897
  misc_feature (46)..(310): Homolog of NCBI NO: 19310934 NR Description: NADP dependent sorbitol 6-phosphate dehydrogenase
  misc_feature (46)..(310): Homolog of NCBI NO: 19310926 NR Description: NADP dependent sorbitol 6-phosphate dehydrogenase
  misc_feature (1)..(221): Homolog of NCBI NO: 32400786 NR Description: NADPH-dependent mannose 6-phosphate reductase
  misc_feature (1)..(310): Homolog of NCBI NO: 134153 NR Description: NADP-dependent D-sorbitol-6-phosphate
  misc_feature (1)..(310): Homolog of NCBI NO: 1835701 NR Description: NADPH-dependent mannose 6-phosphate reductase
  misc_feature (6)..(310): Homolog of NCBI NO: 21554266 NR Description: putative NADPH dependent mannose 6-phosphate
  misc_feature (6)..(310): Homolog of NCBI NO: 15226502 NR Description: mannose 6-phosphate reductase (NADPH-dependent),
  misc_feature (6)..(310): Homolog of NCBI NO: 10334991 NR Description: NADPH-dependent mannose 6-phosphate reductase
  misc_feature (6)..(310): Homolog of NCBI NO: 21592829 NR Description: putative NADPH dependent mannose 6-phosphate
  misc_feature (6)..(310): Homolog of NCBI NO: 15226489 NR Description: mannose 6-phosphate reductase (NADPH-dependent),
MAATKLSSGHEMPAVGLGVWRMDSAAVRGLIHSALRAGYRHFDCAADYKNEAEVGDALAEAFQTGLVKREDLFITTKLWNSDHGHVVEACKDSLKKLRLDYLDLYLIHFPVATKHTGVGTTGSALGDDGVLDIDTTISLETTWHAMEDLVSMGLVRSIGISNYDIFLTRDCLAYAKIKPAVNQIETHPYFQRDSLVKFCQKHGICVTAHTPLGGSTANTEWFGSVSCLDDPVIKSLAEKYGKTPAQLVLRWGLQRNTVVIPKTSKVERLEENFAVSDFDISGEDMEKIKALDRRYRTNQPAKFWGIDLYA

SEQ ID NO: 64972 - protein, 299 aa, Triticum aestivum
  peptide (1)..(299): Ceres Seq. ID no. 13655898
  misc_feature (35)..(299): Homolog of NCBI NO: 19310934 NR Description: NADP dependent sorbitol 6-phosphate dehydrogenase
  misc_feature (35)..(299): Homolog of NCBI NO: 19310926 NR Description: NADP dependent sorbitol 6-phosphate dehydrogenase
  misc_feature (1)..(210): Homolog of NCBI NO: 32400786 NR Description: NADPH-dependent mannose 6-phosphate reductase
  misc_feature (1)..(299): Homolog of NCBI NO: 134153 NR Description: NADP-dependent D-sorbitol-6-phosphate
  misc_feature (1)..(299): Homolog of NCBI NO: 1835701 NR Description: NADPH-dependent mannose 6-phosphate reductase
  misc_feature (1)..(299): Homolog of NCBI NO: 21554266 NR Description: putative NADPH dependent mannose 6-phosphate
  misc_feature (1)..(299): Homolog of NCBI NO: 15226502 NR Description: mannose 6-phosphate reductase (NADPH-dependent),
  misc_feature (1)..(299): Homolog of NCBI NO: 10334991 NR Description: NADPH-dependent mannose 6-phosphate reductase
  misc_feature (1)..(299): Homolog of NCBI NO: 21592829 NR Description: putative NADPH dependent mannose 6-phosphate
  misc_feature (1)..(299): Homolog of NCBI NO: 15226489 NR Description: mannose 6-phosphate reductase (NADPH-dependent),
MPAVGLGVWRMDSAAVRGLIHSALRAGYRHFDCAADYKNEAEVGDALAEAFQTGLVKREDLFITTKLWNSDHGHVVEACKDSLKKLRLDYLDLYLIHFPVATKHTGVGTTGSALGDDGVLDIDTTISLETTWHAMEDLVSMGLVRSIGISNYDIFLTRDCLAYAKIKPAVNQIETHPYFQRDSLVKFCQKHGICVTAHTPLGGSTANTEWFGSVSCLDDPVIKSLAEKYGKTPAQLVLRWGLQRNTVVIPKTSKVERLEENFAVSDFDISGEDMEKIKALDRRYRTNQPAKFWGIDLYA

SEQ ID NO: 64973 - protein, 289 aa, Triticum aestivum
  peptide (1)..(289): Ceres Seq. ID no. 13655899
  misc_feature (25)..(289): Homolog of NCBI NO: 19310934 NR Description: NADP dependent sorbitol 6-phosphate dehydrogenase
  misc_feature (25)..(289): Homolog of NCBI NO: 19310926 NR Description: NADP dependent sorbitol 6-phosphate dehydrogenase
  misc_feature (1)..(200): Homolog of NCBI NO: 32400786 NR Description: NADPH-dependent mannose 6-phosphate reductase
  misc_feature (1)..(289): Homolog of NCBI NO: 134153 NR Description: NADP-dependent D-sorbitol-6-phosphate
  misc_feature (1)..(289): Homolog of NCBI NO: 1835701 NR Description: NADPH-dependent mannose 6-phosphate reductase
  misc_feature (1)..(289): Homolog of NCBI NO: 21554266 NR Description: putative NADPH dependent mannose 6-phosphate
  misc_feature (1)..(289): Homolog of NCBI NO: 15226502 NR Description: mannose 6-phosphate reductase (NADPH-dependent),
  misc_feature (1)..(289): Homolog of NCBI NO: 10334991 NR Description: NADPH-dependent mannose 6-phosphate reductase
  misc_feature (1)..(289): Homolog of NCBI NO: 21592829 NR Description: putative NADPH dependent mannose 6-phosphate
  misc_feature (1)..(289): Homolog of NCBI NO: 15226489 NR Description: mannose 6-phosphate reductase (NADPH-dependent),
MDSAAVRGLIHSALRAGYRHFDCAADYKNEAEVGDALAEAFQTGLVKREDLFITTKLWNSDHGHVVEACKDSLKKLRLDYLDLYLIHFPVATKHTGVGTTGSALGDDGVLDIDTTISLETTWHAMEDLVSMGLVRSIGISNYDIFLTRDCLAYAKIKPAVNQIETHPYFQRDSLVKFCQKHGICVTAHTPLGGSTANTEWFGSVSCLDDPVIKSLAEKYGKTPAQLVLRWGLQRNTVVIPKTSKVERLEENFAVSDFDISGEDMEKIKALDRRYRTNQPAKFWGIDLYA

SEQ ID NO: 64974 - DNA, 1407 bp, Triticum aestivum
  misc_feature (1)..(1407): Ceres Seq. ID no. 13597866
gcaagcaaccacccatggacacgcccgtgccgaaacggcctcgcctcgtgccagcaccggcaccggcgcctcggacaatcgccgacatggccccggagatcctcctccgcctccctccagacgaccccccgcgccttgtgcgcgcctcccttgtctgctggcgctggcgccgcctcctcaccgacccggcgtacctccgccgctaccgcgcattccatcgaacacctcccatgctcggcttcgtcctcaacctgaaacagcactaccaaggcatggcccagctcgtccccacctcctccttccgccccgctgcctccgaccgccccggcctgaatgtgctggacgcccgccacggccgcgtgctcctccacaccgctcagggccagcgcctcgtcgtctgggaccccgtcacgggtgaagagtgcaagatcccccgcgtgccgtcctacgcgctcggcttcaacgcggccgtgctctgcgccgcggtcggctgcgaccacctcgactgtcatggcggacccttccgtgtcgccttcgtgggatgcggcgaacgcggcatcacgttcgcctgcacctactcgtcggaggccggtgcctggagccagcgaattgagatcgagcagccggcgtttgttgacgggcgaccgagcgtccttgtggggaacacgctctacttcacctgcgacccgtacctcagtttcaaaatgttggggtacaacatcgtcacgcaggaactctcggtgatctggccgccgtcccagcatgagtactactcttgcactgtcctcgtgaaagcggatgatggcaagctggggttcgccggcgtgcagaatggcacgctctacctgtggtcgatgaaggacggcgccgacggatatgtggaatgggtgcagcgcagagttatccagcacaagacgatgctccgtactcgtggcctctcgacgccacctgaggtcgttggcttcgcggatggtcacggattcattttcgtgaggacaggcaacacggtgttctccatggatctcaagtcaggccatgtccgtaaagtatacacctgcaggtcaagaaactacgacgtcatcgttgttccctacatgagcttctgcactccagatcgtgctatgggcagactgccatcgccacgaggacccactgtcatcctgtaacaaggacttgctgctcttggcttgttgcatagatgacgctcaaagtattttgctttcaaggtggactgtttaagtagttaccatggtcaatgttggtatgtttagtttacagtgtggcagttgaaacaaggaaaaaagtaatatgtaatcacggtcagtttagtatgttctctttgcagttgtgaagcttaagcaagactgatggttaattagtagaaaaaaaaaaaaaaaaaagcttatc

SEQ ID NO: 64975 - protein, 387 aa, Triticum aestivum
  peptide (1)..(387): Ceres Seq. ID no. 13597867
  misc_feature (155)..(378): Homolog of NCBI NO: 34394502 NR Description: hypothetical protein [Oryza sativa (japonica
  misc_feature (28)..(376): Homolog of NCBI NO: 35215058 NR Description: hypothetical protein [Oryza sativa (japonica
  misc_feature (28)..(370): Homolog of NCBI NO: 34394504 NR Description: unknown protein [Oryza sativa (japonica
  misc_feature (23)..(370): Homolog of NCBI NO: 34914028 NR Description: OJ1014_G12.29 [Oryza sativa (japonica
  misc_feature (20)..(377): Homolog of NCBI NO: 34394503 NR Description: unknown protein [Oryza sativa (japonica
  misc_feature (20)..(369): Homolog of NCBI NO: 34915424 NR Description: hypothetical protein~similar to Oryza sativa
  misc_feature (318)..(382): Homolog of NCBI NO: 34915428 NR Description: hypothetical protein~similar to Oryza sativa
  misc_feature (20)..(287): Homolog of NCBI NO: 34915428 NR Description: hypothetical protein~similar to Oryza sativa
  misc_feature (20)..(380): Homolog of NCBI NO: 33146558 NR Description: unknown protein [Oryza sativa (japonica
  misc_feature (20)..(382): Homolog of NCBI NO: 34915420 NR Description: contains EST C98814(E3124)~similar to Oryza
KQPPMDTPVPKRPRLVPAPAPAPRTIADMAPEILLRLPPDDPPRLVRASLVCWRWRRLLTDPAYLRRYRAFHRTPPMLGFVLNLKQHYQGMAQLVPTSSFRPAASDRPGLNVLDARHGRVLLHTAQGQRLVVWDPVTGEECKIPRVPSYALGFNAAVLCAAVGCDHLDCHGGPFRVAFVGCGERGITFACTYSSEAGAWSQRIEIEQPAFVDGRPSVLVGNTLYFTCDPYLSFKMLGYNIVTQELSVIWPPSQHEYYSCTVLVKADDGKLGFAGVQNGTLYLWSMKDGADGYVEWVQRRVIQHKTMLRTRGLSTPPEVVGFADGHGFIFVRTGNTVFSMDLKSGHVRKVYTCRSRNYDVIVVPYMSFCTPDRAMGRLPSPRGPTVIL

SEQ ID NO: 64976 - protein, 383 aa, Triticum aestivum
  peptide (1)..(383): Ceres Seq. ID no. 13597868
  misc_feature (151)..(374): Homolog of NCBI NO: 34394502 NR Description: hypothetical protein [Oryza sativa (japonica
  misc_feature (24)..(372): Homolog of NCBI NO: 35215058 NR Description: hypothetical protein [Oryza sativa (japonica
  misc_feature (24)..(366): Homolog of NCBI NO: 34394504 NR Description: unknown protein [Oryza sativa (japonica
  misc_feature (19)..(366): Homolog of NCBI NO: 34914028 NR Description: OJ1014_G12.29 [Oryza sativa (japonica
  misc_feature (16)..(373): Homolog of NCBI NO: 34394503 NR Description: unknown protein [Oryza sativa (japonica
  misc_feature (16)..(365): Homolog of NCBI NO: 34915424 NR Description: hypothetical protein~similar to Oryza sativa
  misc_feature (314)..(378): Homolog of NCBI NO: 34915428 NR Description: hypothetical protein~similar to Oryza sativa
  misc_feature (16)..(283): Homolog of NCBI NO: 34915428 NR Description: hypothetical protein~similar to Oryza sativa
  misc_feature (16)..(376): Homolog of NCBI NO: 33146558 NR Description: unknown protein [Oryza sativa (japonica
  misc_feature (16)..(378): Homolog of NCBI NO: 34915420 NR Description: contains EST C98814(E3124)~similar to Oryza
MDTPVPKRPRLVPAPAPAPRTIADMAPEILLRLPPDDPPRLVRASLVCWRWRRLLTDPAYLRRYRAFHRTPPMLGFVLNLKQHYQGMAQLVPTSSFRPAASDRPGLNVLDARHGRVLLHTAQGQRLVVWDPVTGEECKIPRVPSYALGFNAAVLCAAVGCDHLDCHGGPFRVAFVGCGERGITFACTYSSEAGAWSQRIEIEQPAFVDGRPSVLVGNTLYFTCDPYLSFKMLGYNIVTQELSVIWPPSQHEYYSCTVLVKADDGKLGFAGVQNGTLYLWSMKDGADGYVEWVQRRVIQHKTMLRTRGLSTPPEVVGFADGHGFIFVRTGNTVFSMDLKSGHVRKVYTCRSRNYDVIVVPYMSFCTPDRAMGRLPSPRGPTVIL

SEQ ID NO: 64977 - protein, 359 aa, Triticum aestivum
  peptide (1)..(359): Ceres Seq. ID no. 13597869
  misc_feature (127)..(350): Homolog of NCBI NO: 34394502 NR Description: hypothetical protein [Oryza sativa (japonica
  misc_feature (1)..(348): Homolog of NCBI NO: 35215058 NR Description: hypothetical protein [Oryza sativa (japonica
  misc_feature (1)..(342): Homolog of NCBI NO: 34394504 NR Description: unknown protein [Oryza sativa (japonica
  misc_feature (1)..(342): Homolog of NCBI NO: 34914028 NR Description: OJ1014_G12.29 [Oryza sativa (japonica
  misc_feature (1)..(349): Homolog of NCBI NO: 34394503 NR Description: unknown protein [Oryza sativa (japonica
  misc_feature (1)..(341): Homolog of NCBI NO: 34915424 NR Description: hypothetical protein~similar to Oryza sativa
  misc_feature (290)..(354): Homolog of NCBI NO: 34915428 NR Description: hypothetical protein~similar to Oryza sativa
  misc_feature (1)..(259): Homolog of NCBI NO: 34915428 NR Description: hypothetical protein~similar to Oryza sativa
  misc_feature (1)..(352): Homolog of NCBI NO: 33146558 NR Description: unknown protein [Oryza sativa (japonica
  misc_feature (1)..(354): Homolog of NCBI NO: 34915420 NR Description: contains EST C98814(E3124)~similar to Oryza
MAPEILLRLPPDDPPRLVRASLVCWRWRRLLTDPAYLRRYRAFHRTPPMLGFVLNLKQHYQGMAQLVPTSSFRPAASDRPGLNVLDARHGRVLLHTAQGQRLVVWDPVTGEECKIPRVPSYALGFNAAVLCAAVGCDHLDCHGGPFRVAFVGCGERGITFACTYSSEAGAWSQRIEIEQPAFVDGRPSVLVGNTLYFTCDPYLSFKMLGYNIVTQELSVIWPPSQHEYYSCTVLVKADDGKLGFAGVQNGTLYLWSMKDGADGYVEWVQRRVIQHKTMLRTRGLSTPPEVVGFADGHGFIFVRTGNTVFSMDLKSGHVRKVYTCRSRNYDVIVVPYMSFCTPDRAMGRLPSPRGPTVIL

SEQ ID NO: 64978 - DNA, 1251 bp, Triticum aestivum
  misc_feature (1)..(1251): Ceres Seq. ID no. 13598593
aatcgaaaatccaaactcacggctagccacccactagccacacttactgaacacaggtcagctaagccagcttagctcaggaaggtagcaatggccagggctttccccatgggagtggtggccgccgcggccgtgctggtggtgctgtgtgccgtcatttcttctgccgccgcgcagcctcgtccccctctgccaaagaactcccacatgatcaccccggggcggttcgggaagagggcccaggtgctctcctgcgacgacaccaaggacgggaacagcccctgcagcgccacctgcgacaagcgctgccccaacgagtgcgtcgtcatgtgcccaggctgcaagacatactgcttgtgtgacttttaccccggggtgtcatgtggcgacccgcgtttcacaggagccgacggcaacaacttctacttccacggcaagaaggaccaggacttctgtgtcatctccgatgctgacctccatatcaacgctcacttcatcggcaagcgcaacccagctatgagccgtgacttcacctggatccaagcgctgggcatccgcttcgctgatcaccgcatgtacatgggcgcccagaagaccaccaagtggaagaacgacgtcgaccgccttgagttgaacctcgatggagaatcattcaacatcgctacagacatcggggcaaagtggcagtccactgttgtgcctggcctgaccgtcacgaggaccaccgtgaccaatggcgtgagggtccagcttaagggtgtgtttgacatcatggctaaggtggtgcccatcacgcaggaggactcccgcgtccacaactacggtgtaactgacgatgacagcctcgcgcatctggacatcgggttcaagttctatgacctcaccgacgacgttcatggtgtccttggccagacctaccgccctgactacgtcaacaagctcagcgtgagcgctagcatgcctgtgatgggtggtgtagccagctacatctcctctgacattttctccaccgactgcaaggtcgctaggttcggacttagcaccggcatctccatggtcaccaccaccgcaaactaagcaattcctcaagacaacgtcacactgatgtaaccggcctatactgatgatgaacataggcctagaaataaaataatatgtgagaaatgtaatgtgtaacattgttttgtgccagrraaaaaaaaaaaaaaaaaaaaaatgtttaaacacaataaagttggaacgggagggggg

SEQ ID NO: 64979 - protein, 328 aa, Triticum aestivum
  peptide (1)..(328): Ceres Seq. ID no. 15222378
  misc_feature (69)..(327): Homolog of NCBI NO: 7484468 NR Description: late embryonic abundant protein EMB7 - white
  misc_feature (30)..(314): Homolog of NCBI NO: 30685319 NR Description: late embryogenesis abundant protein -related
  misc_feature (30)..(314): Homolog of NCBI NO: 11994465 NR Description: contains similarity to late embryogenesis
  misc_feature (1)..(319): Homolog of NCBI NO: 4514637 NR Description: root cap protein 2 [Zea mays]
  misc_feature (6)..(328): Homolog of NCBI NO: 21741738 NR Description: OSJNBa0073L04.18 [Oryza sativa (japonica
  misc_feature (1)..(314): Homolog of NCBI NO: 34905940 NR Description: similar to root cap protein
  misc_feature (18)..(315): Homolog of NCBI NO: 4514635 NR Description: root cap protein 1 [Zea mays]
  misc_feature (9)..(328): Homolog of NCBI NO: 34905934 NR Description: similar to root cap protein
  misc_feature (1)..(328): Homolog of NCBI NO: 34905936 NR Description: similar to root cap protein
  misc_feature (1)..(328): Homolog of NCBI NO: 34905930 NR Description: similar to root cap protein
MARAFPMGVVAAAAVLVVLCAVISSAAAQPRPPLPKNSHMITPGRFGKRAQVLSCDDTKDGNSPCSATCDKRCPNECVVMCPGCKTYCLCDFYPGVSCGDPRFTGADGNNFYFHGKKDQDFCVISDADLHINAHFIGKRNPAMSRDFTWIQALGIRFADHRMYMGAQKTTKWKNDVDRLELNLDGESFNIATDIGAKWQSTVVPGLTVTRTTVTNGVRVQLKGVFDIMAKVVPITQEDSRVHNYGVTDDDSLAHLDIGFKFYDLTDDVHGVLGQTYRPDYVNKLSVSASMPVMGGVASYISSDIFSTDCKVARFGLSTGISMVTTTAN

SEQ ID NO: 64980 - protein, 322 aa, Triticum aestivum
  peptide (1)..(322): Ceres Seq. ID no. 15222379
  misc_feature (63)..(321): Homolog of NCBI NO: 7484468 NR Description: late embryonic abundant protein EMB7 - white
  misc_feature (24)..(308): Homolog of NCBI NO: 30685319 NR Description: late embryogenesis abundant protein -related
  misc_feature (24)..(308): Homolog of NCBI NO: 11994465 NR Description: contains similarity to late embryogenesis
  misc_feature (1)..(313): Homolog of NCBI NO: 4514637 NR Description: root cap protein 2 [Zea mays]
  misc_feature (1)..(322): Homolog of NCBI NO: 21741738 NR Description: OSJNBa0073L04.18 [Oryza sativa (japonica
  misc_feature (1)..(308): Homolog of NCBI NO: 34905940 NR Description: similar to root cap protein
  misc_feature (12)..(309): Homolog of NCBI NO: 4514635 NR Description: root cap protein 1 [Zea mays]
  misc_feature (3)..(322): Homolog of NCBI NO: 34905934 NR Description: similar to root cap protein
  misc_feature (1)..(322): Homolog of NCBI NO: 34905936 NR Description: similar to root cap protein
  misc_feature (1)..(322): Homolog of NCBI NO: 34905930 NR Description: similar to root cap protein
MGVVAAAAVLVVLCAVISSAAAQPRPPLPKNSHMITPGRFGKRAQVLSCDDTKDGNSPCSATCDKRCPNECVVMCPGCKTYCLCDFYPGVSCGDPRFTGADGNNFYFHGKKDQDFCVISDADLHINAHFIGKRNPAMSRDFTWIQALGIRFADHRMYMGAQKTTKWKNDVDRLELNLDGESFNIATDIGAKWQSTVVPGLTVTRTTVTNGVRVQLKGVFDIMAKVVPITQEDSRVHNYGVTDDDSLAHLDIGFKFYDLTDDVHGVLGQTYRPDYVNKLSVSASMPVMGGVASYISSDIFSTDCKVARFGLSTGISMVTTTAN

SEQ ID NO: 64981 - protein, 289 aa, Triticum aestivum
  peptide (1)..(289): Ceres Seq. ID no. 15222380
  misc_feature (30)..(288): Homolog of NCBI NO: 7484468 NR Description: late embryonic abundant protein EMB7 - white
  misc_feature (1)..(275): Homolog of NCBI NO: 30685319 NR Description: late embryogenesis abundant protein -related
  misc_feature (1)..(275): Homolog of NCBI NO: 11994465 NR Description: contains similarity to late embryogenesis
  misc_feature (1)..(280): Homolog of NCBI NO: 4514637 NR Description: root cap protein 2 [Zea mays]
  misc_feature (1)..(289): Homolog of NCBI NO: 21741738 NR Description: OSJNBa0073L04.18 [Oryza sativa (japonica
  misc_feature (1)..(275): Homolog of NCBI NO: 34905940 NR Description: similar to root cap protein
  misc_feature (1)..(276): Homolog of NCBI NO: 4514635 NR Description: root cap protein 1 [Zea mays]
  misc_feature (1)..(289): Homolog of NCBI NO: 34905934 NR Description: similar to root cap protein
  misc_feature (1)..(289): Homolog of NCBI NO: 34905936 NR Description: similar to root cap protein
  misc_feature (1)..(289): Homolog of NCBI NO: 34905930 NR Description: similar to root cap protein
MITPGRFGKRAQVLSCDDTKDGNSPCSATCDKRCPNECVVMCPGCKTYCLCDFYPGVSCGDPRFTGADGNNFYFHGKKDQDFCVISDADLHINAHFIGKRNPAMSRDFTWIQALGIRFADHRMYMGAQKTTKWKNDVDRLELNLDGESFNIATDIGAKWQSTVVPGLTVTRTTVTNGVRVQLKGVFDIMAKVVPITQEDSRVHNYGVTDDDSLAHLDIGFKFYDLTDDVHGVLGQTYRPDYVNKLSVSASMPVMGGVASYISSDIFSTDCKVARFGLSTGISMVTTTAN

SEQ ID NO: 64982 - DNA, 1228 bp, Triticum aestivum
  misc_feature (1)..(1228): Ceres Seq. ID no. 13597870
tcatttccaaatccagccacctccacctctctctctctctctctctctctctctctctctctctccatgggcacgcttctccgccgcgtcctcctctccctcgcgctcctcgccgccgccgcgacccccggcgcggcggcggcggcggccaggctgtcgacgtcgtactacagccgcagctgcccccgcgtggagcagatcgtctcggacgtggtcgccgccaagcagcaggccaacccgtccacggcggcgggcacgctgcgcctcttcttccacgactgcttcgtctccggctgcgacgcctccgtcctcgtctccccgctctcctccgaccggaccccggagcgggccgcggagatcaacctctccctcccgggggacgccttcgacgccgtggcccgcgccaaggccgcgctggaggccgcctgcccgggcaccgtctcctgcgccgacatcctcgcgctggcggcgcgcgacctggtggggatcctgggcgggccgcggttccccgtcttcctcggccgccgcgacgcgcgccgctccgacgcgcgcgacgtggagggcaacctcccgcgcaccaacatgtcggcgcgcgccatgacggtcctgttcgcgcgcaagggcatcacgccgcaggagatggtggcgctggcgggcgcccacaccgtgggcttctcccactgctccgagttcgcgcaccgggtgtacaactacaagggcaagggcggcggcgccagcgggcacgacccgtcgctgaacccggagttcgcgcgggcgctgcagagctcctgcgccggctacgagagcaacccggacatctccatcttcaacgacatcgtgacgccgcgggacttcgacgagctctacttcaagaacctaccccgtggcctcgggctgctcgcctccgacgccgcgctgtgggagtacccgcccaccaaggtgttcgtccagcagtacgccgacaaccggaccgccttcttccaggacttcgccagggcgatgcagaagctgggcaccgtcggcgtcaagacggggcggcagggcgtcgtcaggcggcagtgcgacatcctcgactaagtccggcgaccgggcgcgttgctacaactttgcccgacgttgtaccgtcgctagtccggtgaaaattggcgatattaggattggattttggtgtgtctgctctctgatttctgaatgaactcgtgaattgtgatgttaaaaamaaaaaaaa

SEQ ID NO: 64983 - protein, 378 aa, Triticum aestivum
  peptide (1)..(378): Ceres Seq. ID no. 15222221
  misc_feature (28)..(221): Pfam Name: HlyD family secretion protein Pfam Description: HlyD family secretion protein
  misc_feature (21)..(378): Homolog of NCBI NO: 23018788 NR Description: hypothetical protein [Thermobifida fusca]
ISKSSHLHLSLSLSLSLSLSLHGHASPPRPPLPRAPRRRRDPRRGGGGGQAVDVVLQPQLPPRGADRLGRGRRQAAGQPVHGGGHAAPLLPRLLRLRLRRLRPRLPALLRPDPGAGRGDQPLPPGGRLRRRGPRQGRAGGRLPGHRLLRRHPRAGGARPGGDPGRAAVPRLPRPPRRAPLRRARRGGQPPAHQHVGARHDGPVRAQGHHAAGDGGAGGRPHRGLLPLLRVRAPGVQLQGQGRRRQRARPVAEPGVRAGAAELLRRLREQPGHLHLQRHRDAAGLRRALLQEPTPWPRAARLRRRAVGVPAHQGVRPAVRRQPDRLLPGLRQGDAEAGHRRRQDGAAGRRQAAVRHPRLSPATGRVATTLPDVVPSLVR

SEQ ID NO: 64984 - protein, 358 aa, Triticum aestivum
  peptide (1)..(358): Ceres Seq. ID no. 15222222
  misc_feature (68)..(322): Pfam Name: Peroxidase Pfam Description: Peroxidase
  misc_feature (13)..(356): Homolog of NCBI NO: 15226205 NR Description: peroxidase, putative [Arabidopsis thaliana]
  misc_feature (75)..(358): Homolog of NCBI NO: 1890317 NR Description: peroxidase ATP26a [Arabidopsis thaliana]
  misc_feature (34)..(355): Homolog of NCBI NO: 15221670 NR Description: peroxidase, putative [Arabidopsis thaliana]
  misc_feature (27)..(358): Homolog of NCBI NO: 15242580 NR Description: peroxidase, putative [Arabidopsis thaliana]
  misc_feature (48)..(358): Homolog of NCBI NO: 14334600 NR Description: putative peroxidase [Arabidopsis thaliana]
  misc_feature (46)..(355): Homolog of NCBI NO: 15236620 NR Description: peroxidase, putative [Arabidopsis thaliana]
  misc_feature (48)..(358): Homolog of NCBI NO: 15232929 NR Description: peroxidase, putative [Arabidopsis thaliana]
  misc_feature (39)..(355): Homolog of NCBI NO: 21593687 NR Description: peroxidase [Arabidopsis thaliana]
  misc_feature (30)..(355): Homolog of NCBI NO: 18422742 NR Description: peroxidase, putative [Arabidopsis thaliana]
  misc_feature (30)..(355): Homolog of NCBI NO: 9759442 NR Description: peroxidase [Arabidopsis thaliana]
SFPNPATSTSLSLSLSLSLSLSMGTLLRRVLLSLALLAAAATPGAAAAAARLSTSYYSRSCPRVEQIVSDVVAAKQQANPSTAAGTLRLFFHDCFVSGCDASVLVSPLSSDRTPERAAEINLSLPGDAFDAVARAKAALEAACPGTVSCADILALAARDLVGILGGPRFPVFLGRRDARRSDARDVEGNLPRTNMSARAMTVLFARKGITPQEMVALAGAHTVGFSHCSEFAHRVYNYKGKGGGASGHDPSLNPEFARALQSSCAGYESNPDISIFNDIVTPRDFDELYFKNLPRGLGLLASDAALWEYPPTKVFVQQYADNRTAFFQDFARAMQKLGTVGVKTGRQGVVRRQCDILD

SEQ ID NO: 64985 - protein, 336 aa, Triticum aestivum
  peptide (1)..(336): Ceres Seq. ID no. 15222223
  misc_feature (46)..(300): Pfam Name: Peroxidase Pfam Description: Peroxidase
  misc_feature (1)..(334): Homolog of NCBI NO: 15226205 NR Description: peroxidase, putative [Arabidopsis thaliana]
  misc_feature (53)..(336): Homolog of NCBI NO: 1890317 NR Description: peroxidase ATP26a [Arabidopsis thaliana]
  misc_feature (12)..(333): Homolog of NCBI NO: 15221670 NR Description: peroxidase, putative [Arabidopsis thaliana]
  misc_feature (5)..(336): Homolog of NCBI NO: 15242580 NR Description: peroxidase, putative [Arabidopsis thaliana]
  misc_feature (26)..(336): Homolog of NCBI NO: 14334600 NR Description: putative peroxidase [Arabidopsis thaliana]
  misc_feature (24)..(333): Homolog of NCBI NO: 15236620 NR Description: peroxidase, putative [Arabidopsis thaliana]
  misc_feature (26)..(336): Homolog of NCBI NO: 15232929 NR Description: peroxidase, putative [Arabidopsis thaliana]
  misc_feature (17)..(333): Homolog of NCBI NO: 21593687 NR Description: peroxidase [Arabidopsis thaliana]
  misc_feature (8)..(333): Homolog of NCBI NO: 18422742 NR Description: peroxidase, putative [Arabidopsis thaliana]
  misc_feature (8)..(333): Homolog of NCBI NO: 9759442 NR Description: peroxidase [Arabidopsis thaliana]
MGTLLRRVLLSLALLAAAATPGAAAAAARLSTSYYSRSCPRVEQIVSDVVAAKQQANPSTAAGTLRLFFHDCFVSGCDASVLVSPLSSDRTPERAAEINLSLPGDAFDAVARAKAALEAACPGTVSCADILALAARDLVGILGGPRFPVFLGRRDARRSDARDVEGNLPRTNMSARAMTVLFARKGITPQEMVALAGAHTVGFSHCSEFAHRVYNYKGKGGGASGHDPSLNPEFARALQSSCAGYESNPDISIFNDIVTPRDFDELYFKNLPRGLGLLASDAALWEYPPTKVFVQQYADNRTAFFQDFARAMQKLGTVGVKTGRQGVVRRQCDILD

SEQ ID NO: 64986 - DNA, 1061 bp, Triticum aestivum
  misc_feature (1)..(1061): Ceres Seq. ID no. 13597542
accagtgcggtatacaccccggttgactagcgctgatttgctccctctccagctccggctcccagatcgagacggcggcggcggcggcgatgggcgcccacccttacgtgccggcgagcctggacctcccgggctacgtgccgctgcgcctcacccagctcgagatcctcggggcctacctcggcacctccctcttcgtcctcgtcgccgtctggctcctctccgggagatgccgcaggttgtccggcaccgaccgcctgctcatgtgctggtgggcgttcaccggcctcacccacatactcatcgagggccccttcgtcttcacccccgatttcttcaccaagaccaaccccaacttcttcgacgaagtctggaaggagtacagcaagggtgactccaggtacgtcgccagggacaccgccaccgtcaccgtcgaaggaatcacggccgtgctgaaaggccctgcctcgctgctcgcagtctatgccattgcatcacgcaagtcctacagccacatcctccagttcgccgtgtgcctcggtcagctctacggatgcatcgtctacttcaccaccgcctacttggacggcttcaacttctgggccagtccgttctacttctgggcatatttcatcggcgcaaacagttcatgggttgtgataccgttgctgatcgccacaaggagctggaagaggatctgcgcagcgattcatcaaagtgagaagatcaagactaagtaattcctgcagcagacaggatttggttgcaaccaggacacactgaacttcttattttacggctagaaatttgttggcttatattgtaccctttgcaaactacattgcctgaaacaagtatgttgtactactggattgtgttgtaacatcaaggagggcggctgtttattgctgcaaatgaaaattatatgccacccttgcatgggcaatcaccattgcacatactatcaggcaactagtagtaagaggccgggtgttgctcattatactttgtatccgattgagactatattttgagttaataaaagcaccttttatttgggt

SEQ ID NO: 64987 - protein, 216 aa, Triticum aestivum
  peptide (1)..(216): Ceres Seq. ID no. 13597543
  misc_feature (18)..(215): Pfam Name: Emopamil binding protein Pfam Description: Emopamil binding protein
  misc_feature (4)..(203): Homolog of NCBI NO: 12848900 NR Description: unnamed protein product [Mus musculus]
  misc_feature (4)..(216): Homolog of NCBI NO: 6681255 NR Description: phenylalkylamine Ca2+ antagonist (emopamil)
  misc_feature (4)..(206): Homolog of NCBI NO: 18202586 NR Description: 3-beta-hydroxysteroid-delta(8),delta(7)-isomerase delta-isomerase) (Delta8-delta7 sterol isomerase) (D8-D7 sterol
  misc_feature (4)..(216): Homolog of NCBI NO: 16923992 NR Description: phenylalkylamine Ca2+ antagonist (emopamil)
  misc_feature (4)..(206): Homolog of NCBI NO: 5729810 NR Description: emopamil binding protein (sterol isomerase)
  misc_feature (4)..(216): Homolog of NCBI NO: 33417065 NR Description: Unknown (protein for MGC:68833) [Xenopus laevis]
  misc_feature (3)..(216): Homolog of NCBI NO: 21554213 NR Description: C-8,7 sterol isomerase [Arabidopsis thaliana]
  misc_feature (3)..(216): Homolog of NCBI NO: 15223758 NR Description: C-8,7 sterol isomerase [Arabidopsis thaliana]
  misc_feature (3)..(216): Homolog of NCBI NO: 4098989 NR Description: phenylalkylamine binding protein homolog
  misc_feature (4)..(216): Homolog of NCBI NO: 34894044 NR Description: putative C-8,7 sterol isomerase
MGAHPYVPASLDLPGYVPLRLTQLEILGAYLGTSLFVLVAVWLLSGRCRRLSGTDRLLMCWWAFTGLTHILIEGPFVFTPDFFTKTNPNFFDEVWKEYSKGDSRYVARDTATVTVEGITAVLKGPASLLAVYAIASRKSYSHILQFAVCLGQLYGCIVYFTTAYLDGFNFWASPFYFWAYFIGANSSWVVIPLLIATRSWKRICAAIHQSEKIKTK

SEQ ID NO: 64988 - protein, 158 aa, Triticum aestivum
  peptide (1)..(158): Ceres Seq. ID no. 13597544
  misc_feature (1)..(157): Pfam Name: Emopamil binding protein Pfam Description: Emopamil binding protein
  misc_feature (1)..(145): Homolog of NCBI NO: 12848900 NR Description: unnamed protein product [Mus musculus]
  misc_feature (1)..(158): Homolog of NCBI NO: 6681255 NR Description: phenylalkylamine Ca2+ antagonist (emopamil)
  misc_feature (1)..(148): Homolog of NCBI NO: 18202586 NR Description: 3-beta-hydroxysteroid-delta(8),delta(7)-isomerase delta-isomerase) (Delta8-delta7 sterol isomerase) (D8-D7 sterol
  misc_feature (1)..(158): Homolog of NCBI NO: 16923992 NR Description: phenylalkylamine Ca2+ antagonist (emopamil)
  misc_feature (1)..(148): Homolog of NCBI NO: 5729810 NR Description: emopamil binding protein (sterol isomerase)
  misc_feature (1)..(158): Homolog of NCBI NO: 33417065 NR Description: Unknown (protein for MGC:68833) [Xenopus laevis]
  misc_feature (1)..(158): Homolog of NCBI NO: 21554213 NR Description: C-8,7 sterol isomerase [Arabidopsis thaliana]
  misc_feature (1)..(158): Homolog of NCBI NO: 15223758 NR Description: C-8,7 sterol isomerase [Arabidopsis thaliana]
  misc_feature (1)..(158): Homolog of NCBI NO: 4098989 NR Description: phenylalkylamine binding protein homolog
  misc_feature (1)..(158): Homolog of NCBI NO: 34894044 NR Description: putative C-8,7 sterol isomerase
MCWWAFTGLTHILIEGPFVFTPDFFTKTNPNFFDEVWKEYSKGDSRYVARDTATVTVEGITAVLKGPASLLAVYAIASRKSYSHILQFAVCLGQLYGCIVYFTTAYLDGFNFWASPFYFWAYFIGANSSWVVIPLLIATRSWKRICAAIHQSEKIKTK

SEQ ID NO: 64989 - protein, 130 aa, Triticum aestivum
  peptide (1)..(130): Ceres Seq. ID no. 13597545
PVRYTPRLTSADLLPLQLRLPDRDGGGGGDGRPPLRAGEPGPPGLRAAAPHPARDPRGLPRHLPLRPRRRLAPLREMPQVVRHRPPAHVLVGVHRPHPHTHRGPLRLHPRFLHQDQPQLLRRSLEGVQQG

SEQ ID NO: 64990 - DNA, 1944 bp, Triticum aestivum
  misc_feature (1)..(1944): Ceres Seq. ID no. 15224727
cttaaacaaatggacacttgagacctcactgtcccaatgacacttctatatatccagaatcctgaccaaaaacatcaccaatccagtcctacatcacctttcttctcacccaccgctagcttctctaaggagtgaggagcagagtaatggatcttgaactgttgtggagtggtccacctgcactctcggtactgccatggatctgcggcggcctcgtggcctcggtgctgctctggcaagccgcccggctgctcgaccagctgtggtggcggccgaggcggctggagcgggcgctccgctcccagggcctccgcggcacgcggtaccgcttcctcctcggcgacgtcaacgactacgcccggcagaccaaggaggcgtcgtcggggccgccgatgccgctgcgctgccacgacgtcggcccccgcgccatgccgttcctctacagcaccatcaaggagcacggcacgccgtgcatctcctggttcgggccggtccccaaggtgagcatcaccgaccctgccctggtccgggaggtgatgtccagcaagctcgcccgcgacgtcgagaagttcaagttcccggcgctcaccaggctgctcgccgacggggtggggaactacgagggcgacaggtgggccaagcaccggaggatcctcaaccccgccttccatgccgagaagctcaagctcatgttcccggcgtttaccgcgtgctgtgaggagctcgttggccgatgggaacagtcccttgggcctgacggctcctgggaggtggatgtctgcccggagctccagagcctcaccggagatgtcatctcgcagacggcgttcggcagcagttacctggaagggagaaggatttttcagctgcagactgagcaaattgcgcgattcatggcagcggtcagcaagatcatgattcctggttacatgtcctttcctaccaaaaataaccgaaggatgcatcaaattaacaacgagattgagtccatcttgcggggcataattgcaaaaaggatgcatgctattcacgaaggagaaagcacaaaagatgacttactcggcttattactggagtcaaacatgtcagacacggatgaaaatggccaatccaccctaggaatgtcagcagatgaagtcatggaggagtgcaagctgttttattttgctggaatggagacaacatcaatattgcttacatggacaatgattgtgcttagcatgcacccagagtggcaggaccgtgcaagggaggaggttcttggcctatttggaaaacacaaactcgagtatgagggtgttaatcgactcaaaattgtgacaatgattctatatgaagttctccggttgtacccgccggctactgtattcacccggaaaacatacaagaagattgagattggaggcatcatgtacccagctggtgtgatgtttgagatgccagtgttgtacatccaccacgacacggacatttggggagaagatgtgcacgaattcaacccggataggtttgccgaggggatctccaaggcatccaaggacccgggtgcatttttcccatttggttgggggccacggatctgtatcggccagaacttcgcgttgcttgaggccaagatggcattgtgcatgatccttcagcgctttgagtttgagctcgcaccatcatacacccatacaccgcatagcgtgatgatgttgcgtcccatgcatggtgctcagattaggcttcacactatctcttcgtagtatcatgttcaaattaggctttacactatctctttctagtatcatactcatggcattcgcctcctatgtgatatgtatgtagtcttatccgcgacaggttttagtcaccatccgttttcttttcctacagataaaagtccaacagttttggactcatgagaactcaatttacttacaactatatatgattacaggc

SEQ ID NO: 64991 - protein, 533 aa, Triticum aestivum
  peptide (1)..(533): Ceres Seq. ID no. 15224728
  misc_feature (3)..(528): Homolog of NCBI NO: 21842133 NR Description: cytochrome P450 monooxygenase CYP72A16 [Zea mays
  misc_feature (18)..(531): Homolog of NCBI NO: 34912882 NR Description: putative cytochrome P450 [Oryza sativa (japonica
  misc_feature (1)..(528): Homolog of NCBI NO: 34912914 NR Description: putative cytochrome P450 [Oryza sativa (japonica
  misc_feature (12)..(531): Homolog of NCBI NO: 21805634 NR Description: cytochrome P450 monooxygenase CYP72A26 [Zea mays
  misc_feature (5)..(531): Homolog of NCBI NO: 34912380 NR Description: putative cytochrome P450 [Oryza sativa (japonica
  misc_feature (5)..(531): Homolog of NCBI NO: 34912896 NR Description: putative cytochrome P450 [Oryza sativa (japonica
  misc_feature (7)..(531): Homolog of NCBI NO: 19909879 NR Description: cytochrome P450 [Oryza sativa]
  misc_feature (7)..(531): Homolog of NCBI NO: 34912894 NR Description: putative cytochrome P450 [Oryza sativa (japonica
  misc_feature (22)..(531): Homolog of NCBI NO: 34912888 NR Description: putative cytochrome P450 [Oryza sativa (japonica
  misc_feature (10)..(531): Homolog of NCBI NO: 34912898 NR Description: putative cytochrome P450 [Oryza sativa (japonica
MDLELLWSGPPALSVLPWICGGLVASVLLWQAARLLDQLWWRPRRLERALRSQGLRGTRYRFLLGDVNDYARQTKEASSGPPMPLRCHDVGPRAMPFLYSTIKEHGTPCISWFGPVPKVSITDPALVREVMSSKLARDVEKFKFPALTRLLADGVGNYEGDRWAKHRRILNPAFHAEKLKLMFPAFTACCEELVGRWEQSLGPDGSWEVDVCPELQSLTGDVISQTAFGSSYLEGRRIFQLQTEQIARFMAAVSKIMIPGYMSFPTKNNRRMHQINNEIESILRGIIAKRMHAIHEGESTKDDLLGLLLESNMSDTDENGQSTLGMSADEVMEECKLFYFAGMETTSILLTWTMIVLSMHPEWQDRAREEVLGLFGKHKLEYEGVNRLKIVTMILYEVLRLYPPATVFTRKTYKKIEIGGIMYPAGVMFEMPVLYIHHDTDIWGEDVHEFNPDRFAEGISKASKDPGAFFPFGWGPRICIGQNFALLEAKMALCMILQRFEFELAPSYTHTPHSVMMLRPMHGAQIRLHTISS

SEQ ID NO: 64992 - protein, 451 aa, Triticum aestivum
  peptide (1)..(451): Ceres Seq. ID no. 15224729
  misc_feature (1)..(446): Homolog of NCBI NO: 21842133 NR Description: cytochrome P450 monooxygenase CYP72A16 [Zea mays
  misc_feature (1)..(449): Homolog of NCBI NO: 34912882 NR Description: putative cytochrome P450 [Oryza sativa (japonica
  misc_feature (1)..(446): Homolog of NCBI NO: 34912914 NR Description: putative cytochrome P450 [Oryza sativa (japonica
  misc_feature (1)..(449): Homolog of NCBI NO: 21805634 NR Description: cytochrome P450 monooxygenase CYP72A26 [Zea mays
  misc_feature (1)..(449): Homolog of NCBI NO: 34912380 NR Description: putative cytochrome P450 [Oryza sativa (japonica
  misc_feature (1)..(449): Homolog of NCBI NO: 34912896 NR Description: putative cytochrome P450 [Oryza sativa (japonica
  misc_feature (1)..(449): Homolog of NCBI NO: 19909879 NR Description: cytochrome P450 [Oryza sativa]
  misc_feature (1)..(449): Homolog of NCBI NO: 34912894 NR Description: putative cytochrome P450 [Oryza sativa (japonica
  misc_feature (1)..(449): Homolog of NCBI NO: 34912888 NR Description: putative cytochrome P450 [Oryza sativa (japonica
  misc_feature (1)..(449): Homolog of NCBI NO: 34912898 NR Description: putative cytochrome P450 [Oryza sativa (japonica
MPLRCHDVGPRAMPFLYSTIKEHGTPCISWFGPVPKVSITDPALVREVMSSKLARDVEKFKFPALTRLLADGVGNYEGDRWAKHRRILNPAFHAEKLKLMFPAFTACCEELVGRWEQSLGPDGSWEVDVCPELQSLTGDVISQTAFGSSYLEGRRIFQLQTEQIARFMAAVSKIMIPGYMSFPTKNNRRMHQINNEIESILRGIIAKRMHAIHEGESTKDDLLGLLLESNMSDTDENGQSTLGMSADEVMEECKLFYFAGMETTSILLTWTMIVLSMHPEWQDRAREEVLGLFGKHKLEYEGVNRLKIVTMILYEVLRLYPPATVFTRKTYKKIEIGGIMYPAGVMFEMPVLYIHHDTDIWGEDVHEFNPDRFAEGISKASKDPGAFFPFGWGPRICIGQNFALLEAKMALCMILQRFEFELAPSYTHTPHSVMMLRPMHGAQIRLHTISS

SEQ ID NO: 64993 - protein, 439 aa, Triticum aestivum
  peptide (1)..(439): Ceres Seq. ID no. 15224730
  misc_feature (1)..(434): Homolog of NCBI NO: 21842133 NR Description: cytochrome P450 monooxygenase CYP72A16 [Zea mays
  misc_feature (1)..(437): Homolog of NCBI NO: 34912882 NR Description: putative cytochrome P450 [Oryza sativa (japonica
  misc_feature (1)..(434): Homolog of NCBI NO: 34912914 NR Description: putative cytochrome P450 [Oryza sativa (japonica
  misc_feature (1)..(437): Homolog of NCBI NO: 21805634 NR Description: cytochrome P450 monooxygenase CYP72A26 [Zea mays
  misc_feature (1)..(437): Homolog of NCBI NO: 34912380 NR Description: putative cytochrome P450 [Oryza sativa (japonica
  misc_feature (1)..(437): Homolog of NCBI NO: 34912896 NR Description: putative cytochrome P450 [Oryza sativa (japonica
  misc_feature (1)..(437): Homolog of NCBI NO: 19909879 NR Description: cytochrome P450 [Oryza sativa]
  misc_feature (1)..(437): Homolog of NCBI NO: 34912894 NR Description: putative cytochrome P450 [Oryza sativa (japonica
  misc_feature (1)..(437): Homolog of NCBI NO: 34912888 NR Description: putative cytochrome P450 [Oryza sativa (japonica
  misc_feature (1)..(437): Homolog of NCBI NO: 34912898 NR Description: putative cytochrome P450 [Oryza sativa (japonica
MPFLYSTIKEHGTPCISWFGPVPKVSITDPALVREVMSSKLARDVEKFKFPALTRLLADGVGNYEGDRWAKHRRILNPAFHAEKLKLMFPAFTACCEELVGRWEQSLGPDGSWEVDVCPELQSLTGDVISQTAFGSSYLEGRRIFQLQTEQIARFMAAVSKIMIPGYMSFPTKNNRRMHQINNEIESILRGIIAKRMHAIHEGESTKDDLLGLLLESNMSDTDENGQSTLGMSADEVMEECKLFYFAGMETTSILLTWTMIVLSMHPEWQDRAREEVLGLFGKHKLEYEGVNRLKIVTMILYEVLRLYPPATVFTRKTYKKIEIGGIMYPAGVMFEMPVLYIHHDTDIWGEDVHEFNPDRFAEGISKASKDPGAFFPFGWGPRICIGQNFALLEAKMALCMILQRFEFELAPSYTHTPHSVMMLRPMHGAQIRLHTISS

SEQ ID NO: 64994 - DNA, 596 bp, Triticum aestivum
  misc_feature (1)..(596): Ceres Seq. ID no. 12618407
atcagaaactaaaacatgagtaacatgacttccttaagctccttagtgctgctccttgcagctctaattctattccctcaagttcttgctgactatgagaagcccccggtgtacaagcctcccattgagaagccaccactttacaagcccccaattgagaaacctcctgtttataaacctccagttgagaaaccccccatttataagcccccagtagagaagccaccagtgtacaagcctcctgtagagaaacccccagtttacaagcccccagttgaaaaaccaccagtgtacaagccaccagttgagaaccctccaatttacaaacccccagttgaaaaaccaccagtatacaagcccccaattgagaaacctccagtttataagccaccagtagagaagccaccggttgcgaagcctccagtctacaagccaccatatggaaagccaccatacccaaagtaccctccaattgatgacacccatttctgaaggatgtcaaggggtgtattaagtatatgctaaataagaggtgctaagaatgtagtttatagtttgcaaattattgcaaggattgctcttagcttcttcatttc

SEQ ID NO: 64995 - protein, 158 aa, Triticum aestivum
  peptide (1)..(158): Ceres Seq. ID no. 12618408
  misc_feature (30)..(156): Pfam Name: Formin Homology 2 Domain Pfam Description: Formin Homology 2 Domain
MSNMTSLSSLVLLLAALILFPQVLADYEKPPVYKPPIEKPPLYKPPIEKPPVYKPPVEKPPIYKPPVEKPPVYKPPVEKPPVYKPPVEKPPVYKPPVENPPIYKPPVEKPPVYKPPIEKPPVYKPPVEKPPVAKPPVYKPPYGKPPYPKYPPIDDTHF

SEQ ID NO: 64996 - protein, 155 aa, Triticum aestivum
  peptide (1)..(155): Ceres Seq. ID no. 12618409
  misc_feature (27)..(153): Pfam Name: Formin Homology 2 Domain Pfam Description: Formin Homology 2 Domain
MTSLSSLVLLLAALILFPQVLADYEKPPVYKPPIEKPPLYKPPIEKPPVYKPPVEKPPIYKPPVEKPPVYKPPVEKPPVYKPPVEKPPVYKPPVENPPIYKPPVEKPPVYKPPIEKPPVYKPPVEKPPVAKPPVYKPPYGKPPYPKYPPIDDTHF

SEQ ID NO: 64997 - DNA, 2490 bp, Triticum aestivum
  misc_feature (1)..(2490): Ceres Seq. ID no. 13656177
aacwttacctwgwrywtcctaatcgaaagccggagctctcctcgctctgcacaaccatttttggttcgatcccggagaagctccggggctccttgaagcgatggatcagcgggcgaggcaccctcccggcatcggcaacggccgcggcgggaatcctaactaccacggccgtggcccgccgccgacgcagcagcatcaccagcagccgtcgccgccttcgccgcagcaggcgcaggggcacccgcagcagtacatgcagcggcagtcgcagcactcgcagcactcgcagcaccacagccagcagcttcagcatcagcagtggcttcggcggaatcagaccgctggcgaggccgcctcgggcgccgccagagccagcgagcaccacgcgccggctgccgccgatgacgccgatttgagttcgcaagactggaaggcccaattgaagcttccacctccagatacacgctaccagaccgaggatgtcactgcaactaagggaaacgaatttgaagactattttctgaagcgtgaacttcttatgggcatatatgagaaaggatttgaaagaccgtctcctatccaagaagaaagcattcctattgcattaaccggcagcgacattcttgcaagagcaaaaaatggaaccggcaagactgctgcattttgtatacctgcgctagagaagattgatcaagacaaaaatgctattcaagttgttatattggtccccacgagggaattggctttacaaacatcacaagtctgcaaggaacttgggaaacacttgaagattcaagtcatggtcactactggaggaacaagcctaaaggatgatattgtccgtctttatcaacctgtgcatttacttgtggggacgcctggtcgtgttttggaccttacgaagaaaggcatttgcattctgaatgactgttcaatgcttattatggatgaggcagacaagcttctttctcctgagttccaaccttccgtggagcagttaattcgataccttccatcgagtcgacagattctgatgttctctgcaacattccctgtgactgtcaaggctttcaaggacaaatatctgcctaaaccctatgttattaatcttatggacgaacttacactgaagggaattacccagttctacgcctttgttgaagaaaggcagaaagtccattgtctgaacactcttttttccaagctgcaaattaatcaatctataatattctgtaactccgtaaatcgtgttgaactactggcgaagaagatcacagagcttggttactcttgcttctacatccatgctaaaatgctgcaggatcatcgtaatagagtattccatgatttccgtaatggcgcatgcaggaaccttgtgtgtacagatctttttacaaggggaatagatatccaagctgttaatgttgttatcaattttgatttccccaagaccgctgaaacctatctccacagggttggtagatctgggagatttggccaccttggcctggctgtgaatctgatcacctacgaggatcgttttaacttgtatcggattgagcaggagcttggaactgagataaaacccatacctcctcagatagaccggacgatatactgccaatagttatctggaagattaatcttatatgccccaccctggaagttataagacaacttatgtaaatagcagctcatcaggtttcatttacgtgatctttatggtgtatcttaagttgttttggggtgctatgggacaggtgaaagtgtagctagctcgtctaatttccatcggaccacgtgggcggatgtatcatggctaagctaaaacttgccatcactgacaatagttaatgttgctaaccaggtgcctgttccgagactgttttccctaaaactgaaagatctctttttcttttgacaaatgtattggctggctagctttttgtacagggcatttttacactggtaaaaaaaaaaaaaaaaaaaaaaaaaaaaaaaaaaaaaaaaaaaaaaaaaaaaaaaaaaaaaaaaaaaaaaaaaattaaaaaaaaaaaaaaaaaggtttawtcrawmccgccaaccycraggggggccccgraaccaaattccccaaaaaggaagtcaaataacccgcgttaattggccgttttttaaaaacgtcggaatggaaaaaaccttgggttaaccaaattaaatccctttgaaaaaaatccccttttcccaatttgggaaaaaaaaaaaaaggcccaaacaaatcccctttccaaaaatttgcaaaccctaaatggaaaaggaaaattgaaagcttaaaaattttttaaaaattcccgtaaaatttttgtaaaaaaacttaattttttaaacaaaaaggcaaaaatcggaaaaatccttaaaaaataaaaaaaaaaaaccaaaatgggtttaagggtttttcaattttaaaaaaaaatcccataataaaaaaacgggaactcaaacgtaaaaggg

SEQ ID NO: 64998 - protein, 508 aa, Triticum aestivum
  peptide (1)..(508): Ceres Seq. ID no. 15219810
  misc_feature (147)..(349): Pfam Name: DEAD/DEAH box helicase Pfam Description: DEAD/DEAH box helicase
  misc_feature (101)..(506): Homolog of NCBI NO: 23488233 NR Description: ATP-dependent RNA Helicase [Plasmodium yoelii
  misc_feature (101)..(506): Homolog of NCBI NO: 19113116 NR Description: putative atp-dependent rna helicase ste13p
  misc_feature (4)..(508): Homolog of NCBI NO: 11267538 NR Description: RNA helicase RH12 [imported] - Arabidopsis
  misc_feature (2)..(508): Homolog of NCBI NO: 14532476 NR Description: At2g45810/F4I18.21 [Arabidopsis thaliana]
  misc_feature (4)..(508): Homolog of NCBI NO: 15233064 NR Description: DEAD/DEAH box helicase, putative [Arabidopsis
  misc_feature (2)..(508): Homolog of NCBI NO: 15225898 NR Description: DEAD/DEAH box helicase, putative [Arabidopsis
  misc_feature (1)..(508): Homolog of NCBI NO: 7436453 NR Description: probable RNA helicase (EC 3.6.1.-) F6N23.6 -
  misc_feature (10)..(508): Homolog of NCBI NO: 22758337 NR Description: putative RNA helicase [Oryza sativa (japonica
  misc_feature (1)..(508): Homolog of NCBI NO: 11267537 NR Description: RNA helicase RH8 [imported] - Arabidopsis
  misc_feature (1)..(508): Homolog of NCBI NO: 22328183 NR Description: DEAD/DEAH box helicase, putative [Arabidopsis
MDQRARHPPGIGNGRGGNPNYHGRGPPPTQQHHQQPSPPSPQQAQGHPQQYMQRQSQHSQHSQHHSQQLQHQQWLRRNQTAGEAASGAARASEHHAPAAADDADLSSQDWKAQLKLPPPDTRYQTEDVTATKGNEFEDYFLKRELLMGIYEKGFERPSPIQEESIPIALTGSDILARAKNGTGKTAAFCIPALEKIDQDKNAIQVVILVPTRELALQTSQVCKELGKHLKIQVMVTTGGTSLKDDIVRLYQPVHLLVGTPGRVLDLTKKGICILNDCSMLIMDEADKLLSPEFQPSVEQLIRYLPSSRQILMFSATFPVTVKAFKDKYLPKPYVINLMDELTLKGITQFYAFVEERQKVHCLNTLFSKLQINQSIIFCNSVNRVELLAKKITELGYSCFYIHAKMLQDHRNRVFHDFRNGACRNLVCTDLFTRGIDIQAVNVVINFDFPKTAETYLHRVGRSGRFGHLGLAVNLITYEDRFNLYRIEQELGTEIKPIPPQIDRTIYCQ

SEQ ID NO: 64999 - protein, 457 aa, Triticum aestivum
  peptide (1)..(457): Ceres Seq. ID no. 15219811
  misc_feature (96)..(298): Pfam Name: DEAD/DEAH box helicase Pfam Description: DEAD/DEAH box helicase
  misc_feature (50)..(455): Homolog of NCBI NO: 23488233 NR Description: ATP-dependent RNA Helicase [Plasmodium yoelii
  misc_feature (50)..(455): Homolog of NCBI NO: 19113116 NR Description: putative atp-dependent rna helicase ste13p
  misc_feature (1)..(457): Homolog of NCBI NO: 11267538 NR Description: RNA helicase RH12 [imported] - Arabidopsis
  misc_feature (1)..(457): Homolog of NCBI NO: 14532476 NR Description: At2g45810/F4I18.21 [Arabidopsis thaliana]
  misc_feature (1)..(457): Homolog of NCBI NO: 15233064 NR Description: DEAD/DEAH box helicase, putative [Arabidopsis
  misc_feature (1)..(457): Homolog of NCBI NO: 15225898 NR Description: DEAD/DEAH box helicase, putative [Arabidopsis
  misc_feature (1)..(457): Homolog of NCBI NO: 7436453 NR Description: probable RNA helicase (EC 3.6.1.-) F6N23.6 -
  misc_feature (1)..(457): Homolog of NCBI NO: 22758337 NR Description: putative RNA helicase [Oryza sativa (japonica
  misc_feature (1)..(457): Homolog of NCBI NO: 11267537 NR Description: RNA helicase RH8 [imported] - Arabidopsis
  misc_feature (1)..(457): Homolog of NCBI NO: 22328183 NR Description: DEAD/DEAH box helicase, putative [Arabidopsis
MQRQSQHSQHSQHHSQQLQHQQWLRRNQTAGEAASGAARASEHHAPAAADDADLSSQDWKAQLKLPPPDTRYQTEDVTATKGNEFEDYFLKRELLMGIYEKGFERPSPIQEESIPIALTGSDILARAKNGTGKTAAFCIPALEKIDQDKNAIQVVILVPTRELALQTSQVCKELGKHLKIQVMVTTGGTSLKDDIVRLYQPVHLLVGTPGRVLDLTKKGICILNDCSMLIMDEADKLLSPEFQPSVEQLIRYLPSSRQILMFSATFPVTVKAFKDKYLPKPYVINLMDELTLKGITQFYAFVEERQKVHCLNTLFSKLQINQSIIFCNSVNRVELLAKKITELGYSCFYIHAKMLQDHRNRVFHDFRNGACRNLVCTDLFTRGIDIQAVNVVINFDFPKTAETYLHRVGRSGRFGHLGLAVNLITYEDRFNLYRIEQELGTEIKPIPPQIDRTIYCQ

SEQ ID NO: 65000 - protein, 362 aa, Triticum aestivum
  peptide (1)..(362): Ceres Seq. ID no. 15219812
  misc_feature (1)..(203): Pfam Name: DEAD/DEAH box helicase Pfam Description: DEAD/DEAH box helicase
  misc_feature (1)..(360): Homolog of NCBI NO: 23488233 NR Description: ATP-dependent RNA Helicase [Plasmodium yoelii
  misc_feature (1)..(360): Homolog of NCBI NO: 19113116 NR Description: putative atp-dependent rna helicase ste13p
  misc_feature (1)..(362): Homolog of NCBI NO: 11267538 NR Description: RNA helicase RH12 [imported] - Arabidopsis
  misc_feature (1)..(362): Homolog of NCBI NO: 14532476 NR Description: At2g45810/F4I18.21 [Arabidopsis thaliana]
  misc_feature (1)..(362): Homolog of NCBI NO: 15233064 NR Description: DEAD/DEAH box helicase, putative [Arabidopsis
  misc_feature (1)..(362): Homolog of NCBI NO: 15225898 NR Description: DEAD/DEAH box helicase, putative [Arabidopsis
  misc_feature (1)..(362): Homolog of NCBI NO: 7436453 NR Description: probable RNA helicase (EC 3.6.1.-) F6N23.6 -
  misc_feature (1)..(362): Homolog of NCBI NO: 22758337 NR Description: putative RNA helicase [Oryza sativa (japonica
  misc_feature (1)..(362): Homolog of NCBI NO: 11267537 NR Description: RNA helicase RH8 [imported] - Arabidopsis
  misc_feature (1)..(362): Homolog of NCBI NO: 22328183 NR Description: DEAD/DEAH box helicase, putative [Arabidopsis
MGIYEKGFERPSPIQEESIPIALTGSDILARAKNGTGKTAAFCIPALEKIDQDKNAIQVVILVPTRELALQTSQVCKELGKHLKIQVMVTTGGTSLKDDIVRLYQPVHLLVGTPGRVLDLTKKGICILNDCSMLIMDEADKLLSPEFQPSVEQLIRYLPSSRQILMFSATFPVTVKAFKDKYLPKPYVINLMDELTLKGITQFYAFVEERQKVHCLNTLFSKLQINQSIIFCNSVNRVELLAKKITELGYSCFYIHAKMLQDHRNRVFHDFRNGACRNLVCTDLFTRGIDIQAVNVVINFDFPKTAETYLHRVGRSGRFGHLGLAVNLITYEDRFNLYRIEQELGTEIKPIPPQIDRTIYCQ

SEQ ID NO: 65001 - DNA, 1142 bp, Triticum aestivum
  misc_feature (1)..(1142): Ceres Seq. ID no. 15226202
gagacagtaggaggacaagagagcgagggcgaccaataaattcctaatttttcccacttttccaccccgggattccccgcctcttgttccaatcgattggtgggcgtcctcgttcttggcttcccgattgaatccgtgggaagccagagataattctctctccgctgcgaatttttttttggtggtttgagttcttgatttgtttgcgaggaagccatcatgagcgccggaagcgccagtttcctcgagatccagccctcggagctggcatttccctttgaattgatgaagcagagctcgtgctccatgcaactcgcaaataagaccgaccgttatgtagcattcaaggtcaaaactaccaacccaaagcagtactgtgtgcgccctaatatcggcgttgtacttcctgggtcgacttgtgatgttacagttacaatgcaagcgcagagggaagcacctgctgatctgcagtgtaaggacaagttcctagttcaaagtgttgcagctgagaatggcgcagcaactcaagatattagtgcagcaatgttcaacaaagagccagggaaggttgttgatgaatgcaagctgcgtgtaatttatgtgccaacatcttcacctagcccgttctctgaagattcagaacaagggagttctgctcgttcattggaaaacgggacccctaattctacattgccacaatctgtatttagatcatctggtgaagcatcaaaggataagtcctcggaggcgacgtccatgatttccaagctaactgaggagaaaatgtctgctgttcagcaaaaccagaagttgagacaagagctggatgtcctacgcaaagagagcagcaaaagcaacggcggtttctcaatcaccttcttgattgtggtgggtattctgggcatcatcgctggtttcatcctcaagaagacataggagaagagtagtccccaacaaagttacattcccaggaaaggacggataccagcaacatcccttgtgtttttactcctaaaaggagcgcctgttctattctaacttgtaacggcttagaagctttggtttgtgtacattacatggtggttttcatgattttaatcacatcgagtagacttgttttaattataaaaaaaaaaaaaaaa

SEQ ID NO: 65002 - protein, 238 aa, Triticum aestivum; identical to SEQ ID NO: 56102
  peptide (1)..(238): Ceres Seq. ID no. 15226203
  misc_feature (5)..(202): Homolog of NCBI NO: 7486542 NR Description: hypothetical protein F6N15.21 - Arabidopsis
  misc_feature (1)..(238): Homolog of NCBI NO: 11288305 NR Description: hypothetical protein T4C21.10 - Arabidopsis
  misc_feature (5)..(238): Homolog of NCBI NO: 21554053 NR Description: putative VAMP-associated protein [Arabidopsis
  misc_feature (1)..(238): Homolog of NCBI NO: 18411661 NR Description: VAMP (vesicle-associated membrane
  misc_feature (5)..(238): Homolog of NCBI NO: 15225415 NR Description: VAMP (vesicle-associated membrane
  misc_feature (3)..(236): Homolog of NCBI NO: 37805852 NR Description: putative vesicle-associated membrane
  misc_feature (5)..(237): Homolog of NCBI NO: 21592874 NR Description: putative proline-rich protein [Arabidopsis
  misc_feature (5)..(237): Homolog of NCBI NO: 18411240 NR Description: VAMP (vesicle-associated membrane
  misc_feature (1)..(238): Homolog of NCBI NO: 11288307 NR Description: 27k vesicle-associated membrane
  misc_feature (5)..(238): Homolog of NCBI NO: 37805977 NR Description: putative 27k vesicle-associated membrane

SEQ ID NO: 65003 - protein, 216 aa, Triticum aestivum; identical to SEQ ID NO: 56103
  peptide (1)..(216): Ceres Seq. ID no. 15226204
  misc_feature (1)..(180): Homolog of NCBI NO: 7486542 NR Description: hypothetical protein F6N15.21 - Arabidopsis
  misc_feature (1)..(216): Homolog of NCBI NO: 11288305 NR Description: hypothetical protein T4C21.10 - Arabidopsis
  misc_feature (1)..(216): Homolog of NCBI NO: 21554053 NR Description: putative VAMP-associated protein [Arabidopsis
  misc_feature (1)..(216): Homolog of NCBI NO: 18411661 NR Description: VAMP (vesicle-associated membrane
  misc_feature (1)..(216): Homolog of NCBI NO: 15225415 NR Description: VAMP (vesicle-associated membrane
  misc_feature (1)..(214): Homolog of NCBI NO: 37805852 NR Description: putative vesicle-associated membrane
  misc_feature (1)..(215): Homolog of NCBI NO: 21592874 NR Description: putative proline-rich protein [Arabidopsis
  misc_feature (1)..(215): Homolog of NCBI NO: 18411240 NR Description: VAMP (vesicle-associated membrane
  misc_feature (1)..(216): Homolog of NCBI NO: 11288307 NR Description: 27k vesicle-associated membrane
  misc_feature (1)..(216): Homolog of NCBI NO: 37805977 NR Description: putative 27k vesicle-associated membrane

SEQ ID NO: 65004 - protein, 209 aa, Triticum aestivum; identical to SEQ ID NO: 56104
  peptide (1)..(209): Ceres Seq. ID no. 15226205
  misc_feature (1)..(173): Homolog of NCBI NO: 7486542 NR Description: hypothetical protein F6N15.21 - Arabidopsis
  misc_feature (1)..(209): Homolog of NCBI NO: 11288305 NR Description: hypothetical protein T4C21.10 - Arabidopsis
  misc_feature (1)..(209): Homolog of NCBI NO: 21554053 NR Description: putative VAMP-associated protein [Arabidopsis
  misc_feature (1)..(209): Homolog of NCBI NO: 18411661 NR Description: VAMP (vesicle-associated membrane
  misc_feature (1)..(209): Homolog of NCBI NO: 15225415 NR Description: VAMP (vesicle-associated membrane
  misc_feature (1)..(207): Homolog of NCBI NO: 37805852 NR Description: putative vesicle-associated membrane
  misc_feature (1)..(208): Homolog of NCBI NO: 21592874 NR Description: putative proline-rich protein [Arabidopsis
  misc_feature (1)..(208): Homolog of NCBI NO: 18411240 NR Description: VAMP (vesicle-associated membrane
  misc_feature (1)..(209): Homolog of NCBI NO: 11288307 NR Description: 27k vesicle-associated membrane
  misc_feature (1)..(209): Homolog of NCBI NO: 37805977 NR Description: putative 27k vesicle-associated membrane

SEQ ID NO: 65005 - DNA, 1392 bp, Triticum aestivum
  misc_feature (1)..(1392): Ceres Seq. ID no. 13503606
cctaataacccccggtcgcctttccacggcgaaaggcatcccggcggcgatggcggcggctgcggcaaggtccggatcccggcgcttgttctccatatccgccctggtgccaccgaagccgccgacccctcccccgaaggcagaccccttcgccagcctcttcgcccccgggttaagcaagcgaacaacaactgatggacttagggaagcttttgcaaagtctggtgaagttgtgcatgcatcatctgtaaaaaattcaaggtggtatatgatcaatgcaaaccgttcaagtcctttgacagtgcgtaaagaataccgcaaagtgcttccttctttcataaggccatctgcatcttactccacagaagcctcagaaaaaagaccaaaacaggagagaacagacttgacgactgttgaagatccctttaatgcccctacctacaatatacctgagaagccagtgacatttgtcgagggcgcctcttacagtgttgtaatacttgctgggcttggagttgctgcattggctggatatgctgttttcaaagagcttatatttgaaccaaaagagtacaagatttttgggaaagctctagtaagagttcagagtgatagtcaggttacagccaaaattggttaccctataactggttatggtacggaatccagaaaccgcgcagctcggcagcgcatccaaaacagggtttggacagatgaggatggtgttgaacatgtggaggtaggctttcacatccgagggccgcatggagctggaaaggtctttgcggagatgttcaaagatagctccgacaggacatggaagttcacgtttcttctcgtcgagattacgtcaccgcgacctgcacaaatcatgttagaatcttacctaccagcatagggatgcaagagaccagatcagccagcagtggcacatccatgcgacacttcattttacatcccatctccaatggcctgcatctgatgttaaatacccgtcctcggattaaagaagttgtgaattttgaacttccccgaaagcataagtaggaggaagatgaaccatcagagctgctgaccagagtatcttagacatggtgtaccgtgcaaggaccttgatgttgttgctttgtttagctgaaaggcgtgcaggcacatgtgtacaacccttctttcccggtgctcctcaaacatgggagggagcaagtgatccttcatctatcgagttttggtcccatttcaggcagttttaatgatgcacatggatttcgtgcaagcctccaatgatgtccaaatagcaataatatctggttacattacgactttcaagcctgggtttccaggcatgtatgaagtgatcttcaatacaagggtgcatgtttctttagcattgcc

SEQ ID NO: 65006 - protein, 298 aa, Triticum aestivum
  peptide (1)..(298): Ceres Seq. ID no. 13503607
  misc_feature (161)..(286): Homolog of NCBI NO: 34932590 NR Description: similar to RIKEN cDNA 2700002I20 [Rattus
  misc_feature (151)..(294): Homolog of NCBI NO: 39580147 NR Description: Hypothetical protein CBG23912 [Caenorhabditis
  misc_feature (106)..(294): Homolog of NCBI NO: 17540726 NR Description: Putative protein of fungal and metazoan origin
  misc_feature (161)..(293): Homolog of NCBI NO: 12654149 NR Description: HSPC154 protein [Homo sapiens]
  misc_feature (161)..(293): Homolog of NCBI NO: 7661810 NR Description: HSPC154 protein [Homo sapiens]
  misc_feature (161)..(286): Homolog of NCBI NO: 21313128 NR Description: RIKEN cDNA 2700002I20 [Mus musculus]
  misc_feature (161)..(286): Homolog of NCBI NO: 12850553 NR Description: unnamed protein product [Mus musculus]
  misc_feature (152)..(286): Homolog of NCBI NO: 12839773 NR Description: unnamed protein product [Mus musculus]
  misc_feature (17)..(80): Homolog of NCBI NO: 34898598 NR Description: P0534A03.25 [Oryza sativa (japonica
  misc_feature (18)..(83): Homolog of NCBI NO: 38636774 NR Description: putative RNA recognition motif (RRM)-containing
LITPGRLSTAKGIPAAMAAAAARSGSRRLFSISALVPPKPPTPPPKADPFASLFAPGLSKRTTTDGLREAFAKSGEVVHASSVKNSRWYMINANRSSPLTVRKEYRKVLPSFIRPSASYSTEASEKRPKQERTDLTTVEDPFNAPTYNIPEKPVTFVEGASYSVVILAGLGVAALAGYAVFKELIFEPKEYKIFGKALVRVQSDSQVTAKIGYPITGYGTESRNRAARQRIQNRVWTDEDGVEHVEVGFHIRGPHGAGKVFAEMFKDSSDRTWKFTFLLVEITSPRPAQIMLESYLPA

SEQ ID NO: 65007 - protein, 282 aa, Triticum aestivum
  peptide (1)..(282): Ceres Seq. ID no. 13503608
  misc_feature (145)..(270): Homolog of NCBI NO: 34932590 NR Description: similar to RIKEN cDNA 2700002I20 [Rattus
  misc_feature (135)..(278): Homolog of NCBI NO: 39580147 NR Description: Hypothetical protein CBG23912 [Caenorhabditis
  misc_feature (90)..(278): Homolog of NCBI NO: 17540726 NR Description: Putative protein of fungal and metazoan origin
  misc_feature (145)..(277): Homolog of NCBI NO: 12654149 NR Description: HSPC154 protein [Homo sapiens]
  misc_feature (145)..(277): Homolog of NCBI NO: 7661810 NR Description: HSPC154 protein [Homo sapiens]
  misc_feature (145)..(270): Homolog of NCBI NO: 21313128 NR Description: RIKEN cDNA 2700002I20 [Mus musculus]
  misc_feature (145)..(270): Homolog of NCBI NO: 12850553 NR Description: unnamed protein product [Mus musculus]
  misc_feature (136)..(270): Homolog of NCBI NO: 12839773 NR Description: unnamed protein product [Mus musculus]
  misc_feature (1)..(64): Homolog of NCBI NO: 34898598 NR Description: P0534A03.25 [Oryza sativa (japonica
  misc_feature (2)..(67): Homolog of NCBI NO: 38636774 NR Description: putative RNA recognition motif (RRM)-containing
MAAAAARSGSRRLFSISALVPPKPPTPPPKADPFASLFAPGLSKRTTTDGLREAFAKSGEVVHASSVKNSRWYMINANRSSPLTVRKEYRKVLPSFIRPSASYSTEASEKRPKQERTDLTTVEDPFNAPTYNIPEKPVTFVEGASYSVVILAGLGVAALAGYAVFKELIFEPKEYKIFGKALVRVQSDSQVTAKIGYPITGYGTESRNRAARQRIQNRVWTDEDGVEHVEVGFHIRGPHGAGKVFAEMFKDSSDRTWKFTFLLVEITSPRPAQIMLESYLPA

SEQ ID NO: 65008 - protein, 209 aa, Triticum aestivum
  peptide (1)..(209): Ceres Seq. ID no. 13503609
  misc_feature (72)..(197): Homolog of NCBI NO: 34932590 NR Description: similar to RIKEN cDNA 2700002I20 [Rattus
  misc_feature (62)..(205): Homolog of NCBI NO: 39580147 NR Description: Hypothetical protein CBG23912 [Caenorhabditis
  misc_feature (17)..(205): Homolog of NCBI NO: 17540726 NR Description: Putative protein of fungal and metazoan origin
  misc_feature (72)..(204): Homolog of NCBI NO: 12654149 NR Description: HSPC154 protein [Homo sapiens]
  misc_feature (72)..(204): Homolog of NCBI NO: 7661810 NR Description: HSPC154 protein [Homo sapiens]
  misc_feature (72)..(197): Homolog of NCBI NO: 21313128 NR Description: RIKEN cDNA 2700002I20 [Mus musculus]
  misc_feature (72)..(197): Homolog of NCBI NO: 12850553 NR Description: unnamed protein product [Mus musculus]
  misc_feature (63)..(197): Homolog of NCBI NO: 12839773 NR Description: unnamed protein product [Mus musculus]
MINANRSSPLTVRKEYRKVLPSFIRPSASYSTEASEKRPKQERTDLTTVEDPFNAPTYNIPEKPVTFVEGASYSVVILAGLGVAALAGYAVFKELIFEPKEYKIFGKALVRVQSDSQVTAKIGYPITGYGTESRNRAARQRIQNRVWTDEDGVEHVEVGFHIRGPHGAGKVFAEMFKDSSDRTWKFTFLLVEITSPRPAQIMLESYLPA

SEQ ID NO: 65009 - DNA, 1395 bp, Triticum aestivum
  misc_feature (1)..(1395): Ceres Seq. ID no. 13584933
atctgaatgctagaaggaggtggttggacgatgaggcatcccaacacggtagaaggagttccgcctatcgaagttgagagggccaatttgaaaaaaagaaaaagttgagagggacagagagggaaacatctgggcattctcgttgcagaaagtagagcgctgtacaaacgggccttcacgaaccaagagacatccatcaaatttcatggcgtcctctccacaatcctcctcctctgcacccaaagccgacgacaaggcagcgtcccacaaagaaatctacgaccagctactagaggtcgtgtccacctacccgacggcgcctagcggcatcggccgcccgtacacccaccacccagacggctggtacgcgttcacgccggccgtcgtgaacgccatggtcatcaagcggcacctcaaggcgtgcgacaccgacgtcttcctctccacctttcccaagtccggcaccacctggctcaaggcgctcctgtttgcgaccctccgccgcaccgcggacgggccagcgatcgcggcgctcgcagcccacagcccccaccagctcatccctttcctcgaggtccaggttttcagcaacggccggatcccagacctgagctccctccctgcgccgcggctcctgatgacgcacatcccgtcccggtcgctgccggagtccgtggccgcctccggctgcaaggtggtgtacctgtgccgggaccccaaggactgcttcgtgtcgctctggcacttctggaaccggttcgcgccgtcgccgtgggacctcggtgaggcgctccagcagttctgcgacggcgtctccctgttcgggcctttctgggagcacgtgctgggctactggcgctggcatgtggagaggccggagcaggttctattcctgacctacgaggagctcgccgccgacaccctcggccagctgaagcggctcgctgcgtttctcgggcgcccgttcacgtcagaggagcgggaagccagggtagacagggagatcgtggaggcatgcgccatggagagcctggcgggactggaggtgaaccgctccgggaagacggacatgaccgagtcttcagtggcgaacaacatattcttccggcgcggcgtcgttggcgactggaagaaccacctgacgccggagatggctagaaggatcgatgagatcaccgatagcaagttcagaggatcggggttggcgttgacgccggcaaccgcagatcagaactagtgggttcatgatggcagatgctatataaataaggacgacttgcgcaacatttttataaaatattgtactattaatgtcaggcatgataacttgatcagcaaacatgcgaagggaaataacagaagtgttaccatacagtaatatacatgaatatcgtt

SEQ ID NO: 65010 - protein, 343 aa, Triticum aestivum
  peptide (1)..(343): Ceres Seq. ID no. 13584934
  misc_feature (74)..(332): Pfam Name: Sulfotransferase domain Pfam Description: Sulfotransferase domain
  misc_feature (53)..(333): Homolog of NCBI NO: 15239947 NR Description: sulfotransferase family [Arabidopsis thaliana]
  misc_feature (30)..(335): Homolog of NCBI NO: 34905060 NR Description: putative flavonol 4'-sulfotransferase
  misc_feature (31)..(333): Homolog of NCBI NO: 25288806 NR Description: probable steroid sulfotransferase
  misc_feature (31)..(333): Homolog of NCBI NO: 18395604 NR Description: sulfotransferase family [Arabidopsis thaliana]
  misc_feature (17)..(333): Homolog of NCBI NO: 15809903 NR Description: AT5g07010/MOJ9_18 [Arabidopsis thaliana]
  misc_feature (17)..(333): Homolog of NCBI NO: 18415376 NR Description: sulfotransferase family [Arabidopsis thaliana]
  misc_feature (17)..(333): Homolog of NCBI NO: 9759557 NR Description: steroid sulfotransferase-like protein
  misc_feature (22)..(333): Homolog of NCBI NO: 15230602 NR Description: sulfotransferase family [Arabidopsis thaliana]
  misc_feature (1)..(333): Homolog of NCBI NO: 38344441 NR Description: OSJNBa0038O10.13 [Oryza sativa (japonica
  misc_feature (1)..(335): Homolog of NCBI NO: 34894524 NR Description: putative steroid sulfotransferase
MASSPQSSSSAPKADDKAASHKEIYDQLLEVVSTYPTAPSGIGRPYTHHPDGWYAFTPAVVNAMVIKRHLKACDTDVFLSTFPKSGTTWLKALLFATLRRTADGPAIAALAAHSPHQLIPFLEVQVFSNGRIPDLSSLPAPRLLMTHIPSRSLPESVAASGCKVVYLCRDPKDCFVSLWHFWNRFAPSPWDLGEALQQFCDGVSLFGPFWEHVLGYWRWHVERPEQVLFLTYEELAADTLGQLKRLAAFLGRPFTSEEREARVDREIVEACAMESLAGLEVNRSGKTDMTESSVANNIFFRRGVVGDWKNHLTPEMARRIDEITDSKFRGSGLALTPATADQN

SEQ ID NO: 65011 - protein, 280 aa, Triticum aestivum
  peptide (1)..(280): Ceres Seq. ID no. 13584935
  misc_feature (11)..(269): Pfam Name: Sulfotransferase domain Pfam Description: Sulfotransferase domain
  misc_feature (1)..(270): Homolog of NCBI NO: 15239947 NR Description: sulfotransferase family [Arabidopsis thaliana]
  misc_feature (1)..(272): Homolog of NCBI NO: 34905060 NR Description: putative flavonol 4'-sulfotransferase
  misc_feature (1)..(270): Homolog of NCBI NO: 25288806 NR Description: probable steroid sulfotransferase
  misc_feature (1)..(270): Homolog of NCBI NO: 18395604 NR Description: sulfotransferase family [Arabidopsis thaliana]
  misc_feature (1)..(270): Homolog of NCBI NO: 15809903 NR Description: AT5g07010/MOJ9_18 [Arabidopsis thaliana]
  misc_feature (1)..(270): Homolog of NCBI NO: 18415376 NR Description: sulfotransferase family [Arabidopsis thaliana]
  misc_feature (1)..(270): Homolog of NCBI NO: 9759557 NR Description: steroid sulfotransferase-like protein
  misc_feature (1)..(270): Homolog of NCBI NO: 15230602 NR Description: sulfotransferase family [Arabidopsis thaliana]
  misc_feature (1)..(270): Homolog of NCBI NO: 38344441 NR Description: OSJNBa0038O10.13 [Oryza sativa (japonica
  misc_feature (1)..(272): Homolog of NCBI NO: 34894524 NR Description: putative steroid sulfotransferase
MVIKRHLKACDTDVFLSTFPKSGTTWLKALLFATLRRTADGPAIAALAAHSPHQLIPFLEVQVFSNGRIPDLSSLPAPRLLMTHIPSRSLPESVAASGCKVVYLCRDPKDCFVSLWHFWNRFAPSPWDLGEALQQFCDGVSLFGPFWEHVLGYWRWHVERPEQVLFLTYEELAADTLGQLKRLAAFLGRPFTSEEREARVDREIVEACAMESLAGLEVNRSGKTDMTESSVANNIFFRRGVVGDWKNHLTPEMARRIDEITDSKFRGSGLALTPATADQN

SEQ ID NO: 65012 - protein, 199 aa, Triticum aestivum
  peptide (1)..(199): Ceres Seq. ID no. 13584936
  misc_feature (1)..(188): Pfam Name: Sulfotransferase domain Pfam Description: Sulfotransferase domain
  misc_feature (1)..(189): Homolog of NCBI NO: 15239947 NR Description: sulfotransferase family [Arabidopsis thaliana]
  misc_feature (1)..(191): Homolog of NCBI NO: 34905060 NR Description: putative flavonol 4'-sulfotransferase
  misc_feature (1)..(189): Homolog of NCBI NO: 25288806 NR Description: probable steroid sulfotransferase
  misc_feature (1)..(189): Homolog of NCBI NO: 18395604 NR Description: sulfotransferase family [Arabidopsis thaliana]
  misc_feature (1)..(189): Homolog of NCBI NO: 15809903 NR Description: AT5g07010/MOJ9_18 [Arabidopsis thaliana]
  misc_feature (1)..(189): Homolog of NCBI NO: 18415376 NR Description: sulfotransferase family [Arabidopsis thaliana]
  misc_feature (1)..(189): Homolog of NCBI NO: 9759557 NR Description: steroid sulfotransferase-like protein
  misc_feature (1)..(189): Homolog of NCBI NO: 15230602 NR Description: sulfotransferase family [Arabidopsis thaliana]
  misc_feature (1)..(189): Homolog of NCBI NO: 38344441 NR Description: OSJNBa0038O10.13 [Oryza sativa (japonica
  misc_feature (1)..(191): Homolog of NCBI NO: 34894524 NR Description: putative steroid sulfotransferase
MTHIPSRSLPESVAASGCKVVYLCRDPKDCFVSLWHFWNRFAPSPWDLGEALQQFCDGVSLFGPFWEHVLGYWRWHVERPEQVLFLTYEELAADTLGQLKRLAAFLGRPFTSEEREARVDREIVEACAMESLAGLEVNRSGKTDMTESSVANNIFFRRGVVGDWKNHLTPEMARRIDEITDSKFRGSGLALTPATADQN

SEQ ID NO: 65013 - DNA, 1426 bp, Triticum aestivum
  misc_feature (1)..(1426): Ceres Seq. ID no. 14302836
ccattccattccatcccccttcatcttcttgtagccaccgagccagccagcgaccgagcggcggcgatttccatttcatctcagaattcagacggtgttcttgtctagagcaagaggggtttcttggcgttgatgtcgatggcgcaggtgtgctgtgactcggcctcgtcggcggtggtggtcggtgcggaggcggaggccagggccagggcgcgcgccgggaggcgccgcagagcgggcgacgcggcagccaggtggaaggtcaccgcggaggcgccgcagggcgccgaggaggccgcggccacgaggaagcgccgcgcggctgggggcgagggggtgcccgcgaaacgccacgggttcacgtcggttgccggacggaggagggagatggaggatgccgtctccatacgggaggccttcaccgtcccggccgaggaggggaagcccaggcgcgacttctacggcgttttcgacggacacggctgctcgcacgtggcggacgcgtgcagagaccggatgcacgagctcgttgccgaggagctcgccggcgcggcccagcccgagtcctggaccggcgcaatggagcgcagtttcgcgaggatggacgccgaggtgaccgccagcgggggcggcgacagcgccagctgccgctgcgaggccaacaagtgcgaccacgtggggtccacggccgtggtggccgtcgtgggggagcagcgcgtcctggtggccaactgcggcgactcccgcgccgtcctctgccgcgacggcgcgcccgtcgtcctctcctccgaccacaagcccgacaggccggacgagctggagaggatcgaggcggccggcggccgcgtcatattctgggagggcgcgagggtgctgggcgttctggccatgtcgcgcgccatcggcgacggctacctgaagccgttcgtgacggcggtcccggaggtgacggtgaccgacagggcggccggcgacgagtgcctgatccttgccagcgacggcctgtgggacgtggtcaacaacgagacagcgtgcgaggtggcgcgggcctgcctccggaggggcagagacaggtggtgcgccgaggcggcggccatgctcaccaagctggctctgaccaagaacagctcggacaacatctccgttgtcgtcgtcgatctccggccaaggaatcatttgtaggagggcgaccagctgccgtgatcttccattgcaacaatagcagtatagtagtagtaacagtaggatcaaatccaaaactagctctatagtgattctactgattatttctcttcttcaaaattcatttttttttttttttttttttttttttgcaatatttctccctggatcaagttcagtggagcacatagattatggtggggttgtggaaagaaataacaactggtgtaaccaagttcgatcc

SEQ ID NO: 65014 - protein, 349 aa, Triticum aestivum
  peptide (1)..(349): Ceres Seq. ID no. 14302837
  misc_feature (73)..(307): Pfam Name: Protein phosphatase 2C Pfam Description: Protein phosphatase 2C
  misc_feature (309)..(346): Homolog of NCBI NO: 21537020 NR Description: protein phosphatase 2C, putative [Arabidopsis
  misc_feature (73)..(314): Homolog of NCBI NO: 21537020 NR Description: protein phosphatase 2C, putative [Arabidopsis
  misc_feature (67)..(344): Homolog of NCBI NO: 33309516 NR Description: protein phosphatase 2C [Prunus avium]
  misc_feature (309)..(346): Homolog of NCBI NO: 15222398 NR Description: protein phosphatase 2C (PP2C), putative
  misc_feature (73)..(314): Homolog of NCBI NO: 15222398 NR Description: protein phosphatase 2C (PP2C), putative
  misc_feature (3)..(344): Homolog of NCBI NO: 15227078 NR Description: protein phosphatase 2C (PP2C), putative
  misc_feature (297)..(344): Homolog of NCBI NO: 34908256 NR Description: putative protein phosphatase 2C
  misc_feature (28)..(307): Homolog of NCBI NO: 34908256 NR Description: putative protein phosphatase 2C
  misc_feature (313)..(346): Homolog of NCBI NO: 34902050 NR Description: putative Serine/threonine phosphatases
  misc_feature (3)..(312): Homolog of NCBI NO: 34902050 NR Description: putative Serine/threonine phosphatases
MSMAQVCCDSASSAVVVGAEAEARARARAGRRRRAGDAAARWKVTAEAPQGAEEAAATRKRRAAGGEGVPAKRHGFTSVAGRRREMEDAVSIREAFTVPAEEGKPRRDFYGVFDGHGCSHVADACRDRMHELVAEELAGAAQPESWTGAMERSFARMDAEVTASGGGDSASCRCEANKCDHVGSTAVVAVVGEQRVLVANCGDSRAVLCRDGAPVVLSSDHKPDRPDELERIEAAGGRVIFWEGARVLGVLAMSRAIGDGYLKPFVTAVPEVTVTDRAAGDECLILASDGLWDVVNNETACEVARACLRRGRDRWCAEAAAMLTKLALTKNSSDNISVVVVDLRPRNHL

SEQ ID NO: 65015 - protein, 347 aa, Triticum aestivum
  peptide (1)..(347): Ceres Seq. ID no. 14302838
  misc_feature (71)..(305): Pfam Name: Protein phosphatase 2C Pfam Description: Protein phosphatase 2C
  misc_feature (307)..(344): Homolog of NCBI NO: 21537020 NR Description: protein phosphatase 2C, putative [Arabidopsis
  misc_feature (71)..(312): Homolog of NCBI NO: 21537020 NR Description: protein phosphatase 2C, putative [Arabidopsis
  misc_feature (65)..(342): Homolog of NCBI NO: 33309516 NR Description: protein phosphatase 2C [Prunus avium]
  misc_feature (307)..(344): Homolog of NCBI NO: 15222398 NR Description: protein phosphatase 2C (PP2C), putative
  misc_feature (71)..(312): Homolog of NCBI NO: 15222398 NR Description: protein phosphatase 2C (PP2C), putative
  misc_feature (1)..(342): Homolog of NCBI NO: 15227078 NR Description: protein phosphatase 2C (PP2C), putative
  misc_feature (295)..(342): Homolog of NCBI NO: 34908256 NR Description: putative protein phosphatase 2C
  misc_feature (26)..(305): Homolog of NCBI NO: 34908256 NR Description: putative protein phosphatase 2C
  misc_feature (311)..(344): Homolog of NCBI NO: 34902050 NR Description: putative Serine/threonine phosphatases
  misc_feature (1)..(310): Homolog of NCBI NO: 34902050 NR Description: putative Serine/threonine phosphatases
MAQVCCDSASSAVVVGAEAEARARARAGRRRRAGDAAARWKVTAEAPQGAEEAAATRKRRAAGGEGVPAKRHGFTSVAGRRREMEDAVSIREAFTVPAEEGKPRRDFYGVFDGHGCSHVADACRDRMHELVAEELAGAAQPESWTGAMERSFARMDAEVTASGGGDSASCRCEANKCDHVGSTAVVAVVGEQRVLVANCGDSRAVLCRDGAPVVLSSDHKPDRPDELERIEAAGGRVIFWEGARVLGVLAMSRAIGDGYLKPFVTAVPEVTVTDRAAGDECLILASDGLWDVVNNETACEVARACLRRGRDRWCAEAAAMLTKLALTKNSSDNISVVVVDLRPRNHL

SEQ ID NO: 65016 - protein, 264 aa, Triticum aestivum
  peptide (1)..(264): Ceres Seq. ID no. 14302839
  misc_feature (1)..(222): Pfam Name: Protein phosphatase 2C Pfam Description: Protein phosphatase 2C
  misc_feature (224)..(261): Homolog of NCBI NO: 21537020 NR Description: protein phosphatase 2C, putative [Arabidopsis
  misc_feature (1)..(229): Homolog of NCBI NO: 21537020 NR Description: protein phosphatase 2C, putative [Arabidopsis
  misc_feature (1)..(259): Homolog of NCBI NO: 33309516 NR Description: protein phosphatase 2C [Prunus avium]
  misc_feature (224)..(261): Homolog of NCBI NO: 15222398 NR Description: protein phosphatase 2C (PP2C), putative
  misc_feature (1)..(229): Homolog of NCBI NO: 15222398 NR Description: protein phosphatase 2C (PP2C), putative
  misc_feature (1)..(259): Homolog of NCBI NO: 15227078 NR Description: protein phosphatase 2C (PP2C), putative
  misc_feature (212)..(259): Homolog of NCBI NO: 34908256 NR Description: putative protein phosphatase 2C
  misc_feature (1)..(222): Homolog of NCBI NO: 34908256 NR Description: putative protein phosphatase 2C
  misc_feature (228)..(261): Homolog of NCBI NO: 34902050 NR Description: putative Serine/threonine phosphatases
  misc_feature (1)..(227): Homolog of NCBI NO: 34902050 NR Description: putative Serine/threonine phosphatases
MEDAVSIREAFTVPAEEGKPRRDFYGVFDGHGCSHVADACRDRMHELVAEELAGAAQPESWTGAMERSFARMDAEVTASGGGDSASCRCEANKCDHVGSTAVVAVVGEQRVLVANCGDSRAVLCRDGAPVVLSSDHKPDRPDELERIEAAGGRVIFWEGARVLGVLAMSRAIGDGYLKPFVTAVPEVTVTDRAAGDECLILASDGLWDVVNNETACEVARACLRRGRDRWCAEAAAMLTKLALTKNSSDNISVVVVDLRPRNHL

SEQ ID NO: 65017 - DNA, 1891 bp, Triticum aestivum
  misc_feature (1)..(1891): Ceres Seq. ID no. 13597546
aaaacaaacccacacacaacccctctgtctcctcctccttggctttgctagcttcctgctcccttcgcttcccacatgcagccatatcttgagctagcttctctccgcatcaccgccaccatcccgctgtccccaagaatatatagcaccatcttcctcgaggccatggctgccatggcctatatagccctccggggcgcggcattggccgccatcgtcgccctcatccattgggtgtacaggtggcgccaccccaaatgcgccggcacgctcccgccgggatccatgggcatccccatcatcggcgagacgctgcagttcttcgcccccaacccgacctgcggcctctcccccttcgtccgggacagggtgaagaggtacgggagcatgttcaagacgagcatcgtggggcggccggtggtggtgtcggcggacccggacgtgaaccactacgtgttccagaacgaggggaagctgttcgagagctggtacccggacaccttcaccgagatcttcggccgcgacaacgtcggctccctgcacggcttcatctacaagtacctcaagaccctcgtgctccgcctctacggccaggagaacctcaaggcggtgctcctcgccgagaccgacgccgcctgccgcggcagcctcgccgcgtgggcggcgcagccctgtgtcgacatcaaagacgggctctccactatgatatttgatcttactgccaagaagctgatcggctacgagccgaccaagtcctcggagagcctgcgggagaatttcacggcgttcattcgcggcctgatctcgttccccctcaacattcccggcacggcctatcacgaatgcatggaggggaggaagaaagcgatgaaggtgctcaagggcatgatgcaggagaggatggcggatccggagaggaagtgcgaggacttcttcgaccacgtgatccaggaactgaggagggagaagccgcttctgacggagaccatcgcgctggacctcatgttcgtgctcctcttcgccagcttcgagaccacggcgctcgccctcaccctcggcgtcaagctgctcaccgagaaccccagagtcgtcgacgcgctaacggaggaacacgaagcgatcgtgaggaacagggaggacccagatgccgcgatcacgtgggccgagtacaagtcgatgaccttcacagctcatgtcatcatggagatcgtcagactcgccaacatcgtgccggggattttccggaaggccttgcaagacgttgagatcaaaggctacacggttccagcgggatggggtatcatggtgtgtccgccggcggtgcacctaaaccctgacatatacgaagatccgctggcgttcaacccatggaggtggcaggacaaacctgaaatcaccggcggaacgaagcatttcatggcgttcggaggcgggcttcggttctgcgtcggaaccgatctcaccaaggtcttgatggcaacattcattcacaatcttgttacgaaatacagatggaagacagtaaaaggagggaacatagtccggacgccgggcctcggcttcccggatggctttgacatccagctcttccctaagaactgacccttttttgatgatatctcgacagtttagtggttgcagttaaacacaagattgttcctgcaaaagatcacattttaggatggaaaaccatatacttagtctagtggtaggatacacattcctagttataactacagtcatattgccgggtaccacctctcatggatccagaatgggttttttgtacttttggctgttcgttttccatgtggttagtcatctatccatgtgttgtgtgtaaatcaatcccatacatctcaaatgagaaagagagcatattaactgtgtg

SEQ ID NO: 65018 - protein, 508 aa, Triticum aestivum
  peptide (1)..(508): Ceres Seq. ID no. 13597547
  misc_feature (245)..(505): Pfam Name: Cytochrome P450 Pfam Description: Cytochrome P450
  misc_feature (59)..(131): Homolog of NCBI NO: 28564842 NR Description: putative cytochrome P450 [Oryza sativa (japonica
  misc_feature (174)..(480): Homolog of NCBI NO: 28564842 NR Description: putative cytochrome P450 [Oryza sativa (japonica
  misc_feature (31)..(445): Homolog of NCBI NO: 38567917 NR Description: OSJNBa0088I22.13 [Oryza sativa (japonica
  misc_feature (110)..(507): Homolog of NCBI NO: 27764671 NR Description: putative hydroxylase [Oryza sativa (japonica
  misc_feature (33)..(507): Homolog of NCBI NO: 18483228 NR Description: putative cytochrome P450-like protein [Sorghum
  misc_feature (35)..(508): Homolog of NCBI NO: 38567916 NR Description: OSJNBa0088I22.12 [Oryza sativa (japonica
  misc_feature (47)..(507): Homolog of NCBI NO: 9502380 NR Description: T12C24.27 [Arabidopsis thaliana]
  misc_feature (47)..(507): Homolog of NCBI NO: 30682922 NR Description: cytochrome P450, putative [Arabidopsis thaliana]
  misc_feature (32)..(508): Homolog of NCBI NO: 38567920 NR Description: OSJNBa0088I22.16 [Oryza sativa (japonica
  misc_feature (1)..(508): Homolog of NCBI NO: 20520627 NR Description: putative cytochrome P450 [Oryza sativa (japonica
MQPYLELASLRITATIPLSPRIYSTIFLEAMAAMAYIALRGAALAAIVALIHWVYRWRHPKCAGTLPPGSMGIPIIGETLQFFAPNPTCGLSPFVRDRVKRYGSMFKTSIVGRPVVVSADPDVNHYVFQNEGKLFESWYPDTFTEIFGRDNVGSLHGFIYKYLKTLVLRLYGQENLKAVLLAETDAACRGSLAAWAAQPCVDIKDGLSTMIFDLTAKKLIGYEPTKSSESLRENFTAFIRGLISFPLNIPGTAYHECMEGRKKAMKVLKGMMQERMADPERKCEDFFDHVIQELRREKPLLTETIALDLMFVLLFASFETTALALTLGVKLLTENPRVVDALTEEHEAIVRNREDPDAAITWAEYKSMTFTAHVIMEIVRLANIVPGIFRKALQDVEIKGYTVPAGWGIMVCPPAVHLNPDIYEDPLAFNPWRWQDKPEITGGTKHFMAFGGGLRFCVGTDLTKVLMATFIHNLVTKYRWKTVKGGNIVRTPGLGFPDGFDIQLFPKN

SEQ ID NO: 65019 - protein, 478 aa, Triticum aestivum
  peptide (1)..(478): Ceres Seq. ID no. 13597548
  misc_feature (215)..(475): Pfam Name: Cytochrome P450 Pfam Description: Cytochrome P450
  misc_feature (29)..(101): Homolog of NCBI NO: 28564842 NR Description: putative cytochrome P450 [Oryza sativa (japonica
  misc_feature (144)..(450): Homolog of NCBI NO: 28564842 NR Description: putative cytochrome P450 [Oryza sativa (japonica
  misc_feature (1)..(415): Homolog of NCBI NO: 38567917 NR Description: OSJNBa0088I22.13 [Oryza sativa (japonica
  misc_feature (80)..(477): Homolog of NCBI NO: 27764671 NR Description: putative hydroxylase [Oryza sativa (japonica
  misc_feature (3)..(477): Homolog of NCBI NO: 18483228 NR Description: putative cytochrome P450-like protein [Sorghum
  misc_feature (5)..(478): Homolog of NCBI NO: 38567916 NR Description: OSJNBa0088I22.12 [Oryza sativa (japonica
  misc_feature (17)..(477): Homolog of NCBI NO: 9502380 NR Description: T12C24.27 [Arabidopsis thaliana]
  misc_feature (17)..(477): Homolog of NCBI NO: 30682922 NR Description: cytochrome P450, putative [Arabidopsis thaliana]
  misc_feature (2)..(478): Homolog of NCBI NO: 38567920 NR Description: OSJNBa0088I22.16 [Oryza sativa (japonica
  misc_feature (1)..(478): Homolog of NCBI NO: 20520627 NR Description: putative cytochrome P450 [Oryza sativa (japonica
MAAMAYIALRGAALAAIVALIHWVYRWRHPKCAGTLPPGSMGIPIIGETLQFFAPNPTCGLSPFVRDRVKRYGSMFKTSIVGRPVVVSADPDVNHYVFQNEGKLFESWYPDTFTEIFGRDNVGSLHGFIYKYLKTLVLRLYGQENLKAVLLAETDAACRGSLAAWAAQPCVDIKDGLSTMIFDLTAKKLIGYEPTKSSESLRENFTAFIRGLISFPLNIPGTAYHECMEGRKKAMKVLKGMMQERMADPERKCEDFFDHVIQELRREKPLLTETIALDLMFVLLFASFETTALALTLGVKLLTENPRVVDALTEEHEAIVRNREDPDAAITWAEYKSMTFTAHVIMEIVRLANIVPGIFRKALQDVEIKGYTVPAGWGIMVCPPAVHLNPDIYEDPLAFNPWRWQDKPEITGGTKHFMAFGGGLRFCVGTDLTKVLMATFIHNLVTKYRWKTVKGGNIVRTPGLGFPDGFDIQLFPKN

SEQ ID NO: 65020 - protein, 475 aa, Triticum aestivum
  peptide (1)..(475): Ceres Seq. ID no. 13597549
  misc_feature (212)..(472): Pfam Name: Cytochrome P450 Pfam Description: Cytochrome P450
  misc_feature (26)..(98): Homolog of NCBI NO: 28564842 NR Description: putative cytochrome P450 [Oryza sativa (japonica
  misc_feature (141)..(447): Homolog of NCBI NO: 28564842 NR Description: putative cytochrome P450 [Oryza sativa (japonica
  misc_feature (1)..(412): Homolog of NCBI NO: 38567917 NR Description: OSJNBa0088I22.13 [Oryza sativa (japonica
  misc_feature (77)..(474): Homolog of NCBI NO: 27764671 NR Description: putative hydroxylase [Oryza sativa (japonica
  misc_feature (1)..(474): Homolog of NCBI NO: 18483228 NR Description: putative cytochrome P450-like protein [Sorghum
  misc_feature (2)..(475): Homolog of NCBI NO: 38567916 NR Description: OSJNBa0088I22.12 [Oryza sativa (japonica
  misc_feature (14)..(474): Homolog of NCBI NO: 9502380 NR Description: T12C24.27 [Arabidopsis thaliana]
  misc_feature (14)..(474): Homolog of NCBI NO: 30682922 NR Description: cytochrome P450, putative [Arabidopsis thaliana]
  misc_feature (1)..(475): Homolog of NCBI NO: 38567920 NR Description: OSJNBa0088I22.16 [Oryza sativa (japonica
  misc_feature (1)..(475): Homolog of NCBI NO: 20520627 NR Description: putative cytochrome P450 [Oryza sativa (japonica
MAYIALRGAALAAIVALIHWVYRWRHPKCAGTLPPGSMGIPIIGETLQFFAPNPTCGLSPFVRDRVKRYGSMFKTSIVGRPVVVSADPDVNHYVFQNEGKLFESWYPDTFTEIFGRDNVGSLHGFIYKYLKTLVLRLYGQENLKAVLLAETDAACRGSLAAWAAQPCVDIKDGLSTMIFDLTAKKLIGYEPTKSSESLRENFTAFIRGLISFPLNIPGTAYHECMEGRKKAMKVLKGMMQERMADPERKCEDFFDHVIQELRREKPLLTETIALDLMFVLLFASFETTALALTLGVKLLTENPRVVDALTEEHEAIVRNREDPDAAITWAEYKSMTFTAHVIMEIVRLANIVPGIFRKALQDVEIKGYTVPAGWGIMVCPPAVHLNPDIYEDPLAFNPWRWQDKPEITGGTKHFMAFGGGLRFCVGTDLTKVLMATFIHNLVTKYRWKTVKGGNIVRTPGLGFPDGFDIQLFPKN

SEQ ID NO: 65021 - DNA, 1645 bp, Triticum aestivum
  misc_feature (1)..(1645): Ceres Seq. ID no. 14302255
atagctctcattcatctcgtgagaaacacagtgtgatatggcgacgtcatggctcctcaggcatccttgtccactggctaggccatggaccagaacaaggaatgatataggtctccatgtgaccagcatcgcctactgctactggagatgcactaggaccagtggaggaggaagaatcatggcggatatgagtatgaacaccaccaactgcacggcagaacccgcccttctaccccaagctgatgctgccgaactagcagggggagccgaccatcctcctagacttagtaagagaagcgcgcgcactggccggggcgccgccgttgcggctaggcacgaggaggagggcactgacgacgaatggctcatgtacctggagccggcgaagctacaggtgttcgaccatctggagccttgggcggaggcgaatgtggtgccgctccttaagcccgccgaggtagcgtggcagccgacggacttgctgccggatctggcgtcgctgggcaccgacggcttccacgcggcgtgctccgacatcacagcgcgcgcggccggcctgcccgacgcgcacctcgtatgcctcgtggggaacatggtcacggaggaggcgctgccaacttaccagagcatacccaaccgcttcgaggccgtgcgcgacctcaccggctccagcggcactgcctgggcgcgctggatccgcggctggtctgccgaggagaaccggcacggcgacgtgcttaacaggtacctcttcctctccggccgcgtcgacatgcggcaggtcgagaggaccatccacaacctcatccagtccggcatggtcatgaacgctgcgcggagcccctaccacggcttcatctacgtcgccttccaggagcgtgccacctccatctctcacggcaacacagcccgtcgcgccaaggagtatggcgacgtggcgctcgcgcgcatatgcggtgccatcgcggctgacgagaagcggcacgagctggcctacacgcggatcgtggggaagctgttcgagatcgacccggacggcgccgtgcgcgcgctggcgtacatgatgcgccgccggatcgtcatgccggcgtccctcatgacagacggccgcgacggtgacctcttcgcgcactacgcggccgtggcgcagcaggccggcatttacaccgcctcggactaccgtagcattttggagcacctgataaagcagtggggggtgaaagagctggcagcggccgaactctccgacgacgggaggcgtgcgcgggactacgtgtgcgcgttgccccaaaagatccgcaggttggaggaaaaggctcacgagcgcagcggccagaaaacccagcctgcaacatcggccccgtttagctggatctttgataagcctgtcaacaacaccatggggtaatcaaattattgttgttatataccctaaatatcctttaaatcattatttctcgatcctatctttgagatgaagtattcttcatctctactttgctagtgtcggcgccagtaaaagtactttttttttctgatcgggttgaagctatgaggatggtattgtactactgtatttttgtaagttgttttatcacattctaaaaataaatacagggagagtgaaagttgtattcaaaaaaat

SEQ ID NO: 65022 - protein, 456 aa, Triticum aestivum
  peptide (1)..(456): Ceres Seq. ID no. 14302256
  misc_feature (113)..(451): Homolog of NCBI NO: 2194093 NR Description: Chain A, Stearoyl-Acyl Carrier Protein Desaturase
  misc_feature (113)..(451): Homolog of NCBI NO: 951427 NR Description: stearoyl-acyl-carrier protein desaturase
  misc_feature (113)..(451): Homolog of NCBI NO: 31615832 NR Description: Chain A, The Crystal Structure Of The Complex Stearoyl Acyl Carrier Protein Desaturase From Ricinus Communis
  misc_feature (113)..(451): Homolog of NCBI NO: 134945 NR Description: Acyl-
  misc_feature (113)..(451): Homolog of NCBI NO: 7433271 NR Description: acyl-
  misc_feature (117)..(451): Homolog of NCBI NO: 30089750 NR Description: putative stearoyl-acyl-carrier protein desaturase
  misc_feature (113)..(451): Homolog of NCBI NO: 3915031 NR Description: Acyl-
  misc_feature (113)..(451): Homolog of NCBI NO: 6983690 NR Description: AE9 stearoyl-ACP desaturase [Gossypium hirsutum]
  misc_feature (95)..(452): Homolog of NCBI NO: 38637315 NR Description: putative Acyl-
  misc_feature (80)..(452): Homolog of NCBI NO: 38636957 NR Description: putative AE9 stearoyl-ACP desaturase
MATSWLLRHPCPLARPWTRTRNDIGLHVTSIAYCYWRCTRTSGGGRIMADMSMNTTNCTAEPALLPQADAAELAGGADHPPRLSKRSARTGRGAAVAARHEEEGTDDEWLMYLEPAKLQVFDHLEPWAEANVVPLLKPAEVAWQPTDLLPDLASLGTDGFHAACSDITARAAGLPDAHLVCLVGNMVTEEALPTYQSIPNRFEAVRDLTGSSGTAWARWIRGWSAEENRHGDVLNRYLFLSGRVDMRQVERTIHNLIQSGMVMNAARSPYHGFIYVAFQERATSISHGNTARRAKEYGDVALARICGAIAADEKRHELAYTRIVGKLFEIDPDGAVRALAYMMRRRIVMPASLMTDGRDGDLFAHYAAVAQQAGIYTASDYRSILEHLIKQWGVKELAAAELSDDGRRARDYVCALPQKIRRLEEKAHERSGQKTQPATSAPFSWIFDKPVNNTMG

SEQ ID NO: 65023 - protein, 409 aa, Triticum aestivum
  peptide (1)..(409): Ceres Seq. ID no. 14302257
  misc_feature (66)..(404): Homolog of NCBI NO: 2194093 NR Description: Chain A, Stearoyl-Acyl Carrier Protein Desaturase
  misc_feature (66)..(404): Homolog of NCBI NO: 951427 NR Description: stearoyl-acyl-carrier protein desaturase
  misc_feature (66)..(404): Homolog of NCBI NO: 31615832 NR Description: Chain A, The Crystal Structure Of The Complex Stearoyl Acyl Carrier Protein Desaturase From Ricinus Communis
  misc_feature (66)..(404): Homolog of NCBI NO: 134945 NR Description: Acyl-
  misc_feature (66)..(404): Homolog of NCBI NO: 7433271 NR Description: acyl-
  misc_feature (70)..(404): Homolog of NCBI NO: 30089750 NR Description: putative stearoyl-acyl-carrier protein desaturase
  misc_feature (66)..(404): Homolog of NCBI NO: 3915031 NR Description: Acyl-
  misc_feature (66)..(404): Homolog of NCBI NO: 6983690 NR Description: AE9 stearoyl-ACP desaturase [Gossypium hirsutum]
  misc_feature (48)..(405): Homolog of NCBI NO: 38637315 NR Description: putative Acyl-
  misc_feature (33)..(405): Homolog of NCBI NO: 38636957 NR Description: putative AE9 stearoyl-ACP desaturase
MADMSMNTTNCTAEPALLPQADAAELAGGADHPPRLSKRSARTGRGAAVAARHEEEGTDDEWLMYLEPAKLQVFDHLEPWAEANVVPLLKPAEVAWQPTDLLPDLASLGTDGFHAACSDITARAAGLPDAHLVCLVGNMVTEEALPTYQSIPNRFEAVRDLTGSSGTAWARWIRGWSAEENRHGDVLNRYLFLSGRVDMRQVERTIHNLIQSGMVMNAARSPYHGFIYVAFQERATSISHGNTARRAKEYGDVALARICGAIAADEKRHELAYTRIVGKLFEIDPDGAVRALAYMMRRRIVMPASLMTDGRDGDLFAHYAAVAQQAGIYTASDYRSILEHLIKQWGVKELAAAELSDDGRRARDYVCALPQKIRRLEEKAHERSGQKTQPATSAPFSWIFDKPVNNTMG

SEQ ID NO: 65024 - protein, 406 aa, Triticum aestivum
  peptide (1)..(406): Ceres Seq. ID no. 14302258
  misc_feature (63)..(401): Homolog of NCBI NO: 2194093 NR Description: Chain A, Stearoyl-Acyl Carrier Protein Desaturase
  misc_feature (63)..(401): Homolog of NCBI NO: 31615832 NR Description: Chain A, The Crystal Structure Of The Complex Stearoyl Acyl Carrier Protein Desaturase From Ricinus Communis
  misc_feature (63)..(401): Homolog of NCBI NO: 951427 NR Description: stearoyl-acyl-carrier protein desaturase
  misc_feature (63)..(401): Homolog of NCBI NO: 134945 NR Description: Acyl-
  misc_feature (63)..(401): Homolog of NCBI NO: 7433271 NR Description: acyl-
  misc_feature (67)..(401): Homolog of NCBI NO: 30089750 NR Description: putative stearoyl-acyl-carrier protein desaturase
  misc_feature (63)..(401): Homolog of NCBI NO: 3915031 NR Description: Acyl-
  misc_feature (63)..(401): Homolog of NCBI NO: 6983690 NR Description: AE9 stearoyl-ACP desaturase [Gossypium hirsutum]
  misc_feature (45)..(402): Homolog of NCBI NO: 38637315 NR Description: putative Acyl-
  misc_feature (30)..(402): Homolog of NCBI NO: 38636957 NR Description: putative AE9 stearoyl-ACP desaturase
MSMNTTNCTAEPALLPQADAAELAGGADHPPRLSKRSARTGRGAAVAARHEEEGTDDEWLMYLEPAKLQVFDHLEPWAEANVVPLLKPAEVAWQPTDLLPDLASLGTDGFHAACSDITARAAGLPDAHLVCLVGNMVTEEALPTYQSIPNRFEAVRDLTGSSGTAWARWIRGWSAEENRHGDVLNRYLFLSGRVDMRQVERTIHNLIQSGMVMNAARSPYHGFIYVAFQERATSISHGNTARRAKEYGDVALARICGAIAADEKRHELAYTRIVGKLFEIDPDGAVRALAYMMRRRIVMPASLMTDGRDGDLFAHYAAVAQQAGIYTASDYRSILEHLIKQWGVKELAAAELSDDGRRARDYVCALPQKIRRLEEKAHERSGQKTQPATSAPFSWIFDKPVNNTMG

SEQ ID NO: 65025 - DNA, 1397 bp, Triticum aestivum
  misc_feature (1)..(1397): Ceres Seq. ID no. 12618563
ccaaacggccgaacccccaacggagcagctaaaaactctgctgccggcgctaggaacactccagcaactcctctctggacgagacgaatcgaagccgatccgagtttccaaatgccgcaggcgcaggctatgtcggtcctgccggtggtgctcctcggctgcggcggcgtcggccgccacctcctccgccacatcgtctcctgcaggcctctccacgccaaccagggcgtctccatccgggtggtgggcgttgccgacagctcctcgctgctcgtcgcagacgacgtccgcgccagcggcctcgatgacgcgctcctcaacgacctctgctccgccaagtccgccggctcgcctctgtcctcgctgctcgctcgcgggcactgtcaggtgttcaacaagccggaggcaatggggaaagtcatcgatgcagctaccatgcttggaagaacaaccggtctggtgatagttgattgttctgcaacttatgacactgttggtgtgctgaaggatgccgtgaatcatggatgctgcgttgttttggcaaacaaaaaacctcttacatgtgcttatgaggattttaaaaagttgacatcccacttccgtcagataagatttgaatctaccgttggagcaggtttgcctgtaatagcttctgtaacccgcattattgcatctggagatccagtttcccgaatcgttggcagtctgagtggtacacttggctatgtgatgagtgagctggaggatggaaaaaaaattagtgaagttgtgaaaactgccaaggctcttggttatacagaaccagatccacgtgatgatctaagtgggatggatgtggctagaaaggcgttgatcctagctaggcttctcgggcagcagatcagcatggagaatatcaatgttgagagtttatatccgagtgagttaggacctgaggttatgtccacaacggatttccttgagagtgggttggcaaaacttgatgagacgattgaagaaagggtcaaggcagcatctttgaggggaaatgttctgcgctatgtttgtgtcattggaagcacagggtgtcaagtgggccttcaagaggtcccaaaagattctgcactggggagattgaggggaagtgacaatgtggtggagatatacagcagatgctacgagagctccccgctggtgatccagggtgcaggagccgggaacgacaccactgccgcaggagttctcgctgatataatcgatctccaagatcttttccagacaagagcgtgattgtcttgtttagcaccaaggagtttgatgcgttgtatgatcgaccataatgtccattgaactgaaattggttctggcgtttgaggttgtatgaacattttcggttgtgtttggctgctgttgatttg

SEQ ID NO: 65026 - protein, 422 aa, Triticum aestivum
  peptide (1)..(422): Ceres Seq. ID no. 12618564
  misc_feature (214)..(412): Pfam Name: Homoserine dehydrogenase Pfam Description: Homoserine dehydrogenase
  misc_feature (154)..(412): Homolog of NCBI NO: 15799682 NR Description: aspartokinase I, homoserine dehydrogenase I
  misc_feature (46)..(103): Homolog of NCBI NO: 22127591 NR Description: aspartokinase I, homoserine dehydrogenase I
  misc_feature (154)..(412): Homolog of NCBI NO: 22127591 NR Description: aspartokinase I, homoserine dehydrogenase I
  misc_feature (46)..(103): Homolog of NCBI NO: 16120788 NR Description: bifunctional aspartokinase/homoserine
  misc_feature (18)..(95): Homolog of NCBI NO: 15601978 NR Description: ThrA [Pasteurella multocida]
  misc_feature (154)..(412): Homolog of NCBI NO: 16120788 NR Description: bifunctional aspartokinase/homoserine
  misc_feature (154)..(412): Homolog of NCBI NO: 15601978 NR Description: ThrA [Pasteurella multocida]
  misc_feature (151)..(412): Homolog of NCBI NO: 22971485 NR Description: hypothetical protein [Chloroflexus aurantiacus]
  misc_feature (44)..(418): Homolog of NCBI NO: 21537197 NR Description: homoserine dehydrogenase-like protein
  misc_feature (44)..(418): Homolog of NCBI NO: 15242147 NR Description: homoserine dehydrogenase-like protein
PNGRTPNGAAKNSAAGARNTPATPLWTRRIEADPSFQMPQAQAMSVLPVVLLGCGGVGRHLLRHIVSCRPLHANQGVSIRVVGVADSSSLLVADDVRASGLDDALLNDLCSAKSAGSPLSSLLARGHCQVFNKPEAMGKVIDAATMLGRTTGLVIVDCSATYDTVGVLKDAVNHGCCVVLANKKPLTCAYEDFKKLTSHFRQIRFESTVGAGLPVIASVTRIIASGDPVSRIVGSLSGTLGYVMSELEDGKKISEVVKTAKALGYTEPDPRDDLSGMDVARKALILARLLGQQISMENINVESLYPSELGPEVMSTTDFLESGLAKLDETIEERVKAASLRGNVLRYVCVIGSTGCQVGLQEVPKDSALGRLRGSDNVVEIYSRCYESSPLVIQGAGAGNDTTAAGVLADIIDLQDLFQTRA

SEQ ID NO: 65027 - protein, 385 aa, Triticum aestivum
  peptide (1)..(385): Ceres Seq. ID no. 12618565
  misc_feature (177)..(375): Pfam Name: Homoserine dehydrogenase Pfam Description: Homoserine dehydrogenase
  misc_feature (117)..(375): Homolog of NCBI NO: 15799682 NR Description: aspartokinase I, homoserine dehydrogenase I
  misc_feature (9)..(66): Homolog of NCBI NO: 22127591 NR Description: aspartokinase I, homoserine dehydrogenase I
  misc_feature (117)..(375): Homolog of NCBI NO: 22127591 NR Description: aspartokinase I, homoserine dehydrogenase I
  misc_feature (9)..(66): Homolog of NCBI NO: 16120788 NR Description: bifunctional aspartokinase/homoserine
  misc_feature (1)..(58): Homolog of NCBI NO: 15601978 NR Description: ThrA [Pasteurella multocida]
  misc_feature (117)..(375): Homolog of NCBI NO: 16120788 NR Description: bifunctional aspartokinase/homoserine
  misc_feature (117)..(375): Homolog of NCBI NO: 15601978 NR Description: ThrA [Pasteurella multocida]
  misc_feature (114)..(375): Homolog of NCBI NO: 22971485 NR Description: hypothetical protein [Chloroflexus aurantiacus]
  misc_feature (7)..(381): Homolog of NCBI NO: 21537197 NR Description: homoserine dehydrogenase-like protein
  misc_feature (7)..(381): Homolog of NCBI NO: 15242147 NR Description: homoserine dehydrogenase-like protein
MPQAQAMSVLPVVLLGCGGVGRHLLRHIVSCRPLHANQGVSIRVVGVADSSSLLVADDVRASGLDDALLNDLCSAKSAGSPLSSLLARGHCQVFNKPEAMGKVIDAATMLGRTTGLVIVDCSATYDTVGVLKDAVNHGCCVVLANKKPLTCAYEDFKKLTSHFRQIRFESTVGAGLPVIASVTRIIASGDPVSRIVGSLSGTLGYVMSELEDGKKISEVVKTAKALGYTEPDPRDDLSGMDVARKALILARLLGQQISMENINVESLYPSELGPEVMSTTDFLESGLAKLDETIEERVKAASLRGNVLRYVCVIGSTGCQVGLQEVPKDSALGRLRGSDNVVEIYSRCYESSPLVIQGAGAGNDTTAAGVLADIIDLQDLFQTRA

SEQ ID NO: 65028 - protein, 379 aa, Triticum aestivum
  peptide (1)..(379): Ceres Seq. ID no. 12618566
  misc_feature (171)..(369): Pfam Name: Homoserine dehydrogenase Pfam Description: Homoserine dehydrogenase
  misc_feature (111)..(369): Homolog of NCBI NO: 15799682 NR Description: aspartokinase I, homoserine dehydrogenase I
  misc_feature (3)..(60): Homolog of NCBI NO: 22127591 NR Description: aspartokinase I, homoserine dehydrogenase I
  misc_feature (111)..(369): Homolog of NCBI NO: 22127591 NR Description: aspartokinase I, homoserine dehydrogenase I
  misc_feature (3)..(60): Homolog of NCBI NO: 16120788 NR Description: bifunctional aspartokinase/homoserine
  misc_feature (1)..(52): Homolog of NCBI NO: 15601978 NR Description: ThrA [Pasteurella multocida]
  misc_feature (111)..(369): Homolog of NCBI NO: 16120788 NR Description: bifunctional aspartokinase/homoserine
  misc_feature (111)..(369): Homolog of NCBI NO: 15601978 NR Description: ThrA [Pasteurella multocida]
  misc_feature (108)..(369): Homolog of NCBI NO: 22971485 NR Description: hypothetical protein [Chloroflexus aurantiacus]
  misc_feature (1)..(375): Homolog of NCBI NO: 21537197 NR Description: homoserine dehydrogenase-like protein
  misc_feature (1)..(375): Homolog of NCBI NO: 15242147 NR Description: homoserine dehydrogenase-like protein
MSVLPVVLLGCGGVGRHLLRHIVSCRPLHANQGVSIRVVGVADSSSLLVADDVRASGLDDALLNDLCSAKSAGSPLSSLLARGHCQVFNKPEAMGKVIDAATMLGRTTGLVIVDCSATYDTVGVLKDAVNHGCCVVLANKKPLTCAYEDFKKLTSHFRQIRFESTVGAGLPVIASVTRIIASGDPVSRIVGSLSGTLGYVMSELEDGKKISEVVKTAKALGYTEPDPRDDLSGMDVARKALILARLLGQQISMENINVESLYPSELGPEVMSTTDFLESGLAKLDETIEERVKAASLRGNVLRYVCVIGSTGCQVGLQEVPKDSALGRLRGSDNVVEIYSRCYESSPLVIQGAGAGNDTTAAGVLADIIDLQDLFQTRA

SEQ ID NO: 65029 - DNA, 1856 bp, Triticum aestivum
  misc_feature (1)..(1856): Ceres Seq. ID no. 14313514
ctagaacatcctaatcgagaaaattaaaacgacatgaaccccctcaagaactcgcgctccgccctctcccgtctcctccgccacaaccccgccgccggccggccgcagcccccggcccctcccccgccggtgccgcgggaaacggccgctcggcactaccacgccgccccgcgccgcccagggttcattcagtccttcagccgagggcccctccgccacgagcccgccgccctcttccggcagccgccggcgcgggcgcaggcgccgcctccccggcactacttcacctcctcgcgccgcccggaggtcatccacttcgcgcgccgccgcggcggggcgcggtggtaccacgacaggcggaaggtcgccgcggtggtcctcctcgccggcggcgggacaatcgtcgtctacttcggcaacctcgagaccgtgccctacaccaaccgcacccacttcgtcctcgtctcgccccagctcgagcgccagctcggcgagtcccagttcgctgatctcaagaaggagctcgcccccaagatcctgcccccgctccaccccgacagtgtgggggtgcgcctcatcgcctccgagatcgtccgcgcgctccaccgcggcctcgccgaccgccgcagcgacgacttcgatgacgcctcctacggcgacatctccaccgacatcgccgtcaaggcccgggacatggatgccgacgacgtgatgcatcgggtctcgcctggcaagaccgcgggcacggccgctagggctcagcgagacgacgagcttctcgatgacaggtgggtcgccgagagccggagacgggggaaggcacgcggagcgcagccacagacgaagcacctcaatgagctcaattgggaggtcatcgtcgtcagagataagctcatcaatgcaatgtgcttgcctggtggtaaaattgtagtcttcactggattgctcgaccatttcaagacagatgctgagattgcgacagtgctttcgcatgagattgggcacgctatcgcgaggcacttgccagagatgatcaccaagggcatgtggtttactatcctgcagcttatcgtcctacagtttatttacatgccagacctaattaatgcaatgtcgacattactcctcagattgcccttctcacgaaggatggaggtagaggcggatcacatcgggctcatgcttcaagcttctgctggtttcgacccacgcacagctcccaaggtctacgagaagctaggacaaatcgcgggcaatcagtcagtgctgaaaagctacctctccacccatccttcgagtaagaagcgatcggagctcttgtctcgagccaaggtaatggaggaggcgatgcaactatacagggaagcttgcgccggccacgggaccgaaggcttcctgtaggttgcagctttgaactctcctgcctgtggctgcgtggtaagtcgctcggtggcggtgcctggcacggaaacatgtcctttgttacctgcacggtgacgtccagtaagaagagtgcattctgtgtctgaagatgttcgttctgtgcgttgttactgtctgttcttgtcaggctgaatcagccgcactttggtagcaggatgtgatcgagctgcatcatttgtgattaggagagaacagggaataggagaagagtttctgttaataattgtcttccaagagcagcttttatagtcccatcttccttgggtttaccggcgttgatgatcgtcacgttggttagtttttgtcatctacgccagctagtagtcagctggtgacggaatattcatataatatcgatgtttgaagtagtcagtcacaactcacaaggtatataatatactccatcggtttcc

SEQ ID NO: 65030 - protein, 455 aa, Triticum aestivum
  peptide (1)..(455): Ceres Seq. ID no. 14313515
  misc_feature (266)..(425): Pfam Name: Peptidase family M48 Pfam Description: Peptidase family M48
  misc_feature (278)..(445): Homolog of NCBI NO: 33592558 NR Description: putative lipoprotein [Bordetella pertussis]
  misc_feature (274)..(443): Homolog of NCBI NO: 34541762 NR Description: conserved hypothetical protein [Porphyromonas
  misc_feature (24)..(187): Homolog of NCBI NO: 40745859 NR Description: hypothetical protein AN1850.2 [Aspergillus
  misc_feature (277)..(451): Homolog of NCBI NO: 40745859 NR Description: hypothetical protein AN1850.2 [Aspergillus
  misc_feature (109)..(192): Homolog of NCBI NO: 6322940 NR Description: Hypothetical ORF; Ykr087cp [Saccharomyces
  misc_feature (273)..(450): Homolog of NCBI NO: 6322940 NR Description: Hypothetical ORF; Ykr087cp [Saccharomyces
  misc_feature (116)..(196): Homolog of NCBI NO: 19114452 NR Description: hypothetical peptidase 48 family protein
  misc_feature (273)..(444): Homolog of NCBI NO: 19114452 NR Description: hypothetical peptidase 48 family protein
  misc_feature (79)..(455): Homolog of NCBI NO: 30696099 NR Description: expressed protein [Arabidopsis thaliana]
  misc_feature (79)..(455): Homolog of NCBI NO: 10177873 NR Description: contains similarity to peptidase~gene_id:MIO24.13
MNPLKNSRSALSRLLRHNPAAGRPQPPAPPPPVPRETAARHYHAAPRRPGFIQSFSRGPLRHEPAALFRQPPARAQAPPPRHYFTSSRRPEVIHFARRRGGARWYHDRRKVAAVVLLAGGGTIVVYFGNLETVPYTNRTHFVLVSPQLERQLGESQFADLKKELAPKILPPLHPDSVGVRLIASEIVRALHRGLADRRSDDFDDASYGDISTDIAVKARDMDADDVMHRVSPGKTAGTAARAQRDDELLDDRWVAESRRRGKARGAQPQTKHLNELNWEVIVVRDKLINAMCLPGGKIVVFTGLLDHFKTDAEIATVLSHEIGHAIARHLPEMITKGMWFTILQLIVLQFIYMPDLINAMSTLLLRLPFSRRMEVEADHIGLMLQASAGFDPRTAPKVYEKLGQIAGNQSVLKSYLSTHPSSKKRSELLSRAKVMEEAMQLYREACAGHGTEGFL

SEQ ID NO: 65031 - protein, 235 aa, Triticum aestivum
  peptide (1)..(235): Ceres Seq. ID no. 14313516
  misc_feature (46)..(205): Pfam Name: Peptidase family M48 Pfam Description: Peptidase family M48
  misc_feature (58)..(225): Homolog of NCBI NO: 33596542 NR Description: putative lipoprotein [Bordetella parapertussis]
  misc_feature (57)..(225): Homolog of NCBI NO: 15603055 NR Description: unknown [Pasteurella multocida]
  misc_feature (53)..(234): Homolog of NCBI NO: 32412107 NR Description: hypothetical protein ( hypothetical protein
  misc_feature (58)..(225): Homolog of NCBI NO: 33592558 NR Description: putative lipoprotein [Bordetella pertussis]
  misc_feature (54)..(223): Homolog of NCBI NO: 34541762 NR Description: conserved hypothetical protein [Porphyromonas
  misc_feature (57)..(231): Homolog of NCBI NO: 40745859 NR Description: hypothetical protein AN1850.2 [Aspergillus
  misc_feature (53)..(230): Homolog of NCBI NO: 6322940 NR Description: Hypothetical ORF; Ykr087cp [Saccharomyces
  misc_feature (53)..(224): Homolog of NCBI NO: 19114452 NR Description: hypothetical peptidase 48 family protein
  misc_feature (1)..(235): Homolog of NCBI NO: 30696099 NR Description: expressed protein [Arabidopsis thaliana]
  misc_feature (1)..(235): Homolog of NCBI NO: 10177873 NR Description: contains similarity to peptidase~gene_id:MIO24.13
MDADDVMHRVSPGKTAGTAARAQRDDELLDDRWVAESRRRGKARGAQPQTKHLNELNWEVIVVRDKLINAMCLPGGKIVVFTGLLDHFKTDAEIATVLSHEIGHAIARHLPEMITKGMWFTILQLIVLQFIYMPDLINAMSTLLLRLPFSRRMEVEADHIGLMLQASAGFDPRTAPKVYEKLGQIAGNQSVLKSYLSTHPSSKKRSELLSRAKVMEEAMQLYREACAGHGTEGFL

SEQ ID NO: 65032 - protein, 229 aa, Triticum aestivum
  peptide (1)..(229): Ceres Seq. ID no. 14313517
  misc_feature (40)..(199): Pfam Name: Peptidase family M48 Pfam Description: Peptidase family M48
  misc_feature (52)..(219): Homolog of NCBI NO: 33596542 NR Description: putative lipoprotein [Bordetella parapertussis]
  misc_feature (51)..(219): Homolog of NCBI NO: 15603055 NR Description: unknown [Pasteurella multocida]
  misc_feature (47)..(228): Homolog of NCBI NO: 32412107 NR Description: hypothetical protein ( hypothetical protein
  misc_feature (52)..(219): Homolog of NCBI NO: 33592558 NR Description: putative lipoprotein [Bordetella pertussis]
  misc_feature (48)..(217): Homolog of NCBI NO: 34541762 NR Description: conserved hypothetical protein [Porphyromonas
  misc_feature (51)..(225): Homolog of NCBI NO: 40745859 NR Description: hypothetical protein AN1850.2 [Aspergillus
  misc_feature (47)..(224): Homolog of NCBI NO: 6322940 NR Description: Hypothetical ORF; Ykr087cp [Saccharomyces
  misc_feature (47)..(218): Homolog of NCBI NO: 19114452 NR Description: hypothetical peptidase 48 family protein
  misc_feature (1)..(229): Homolog of NCBI NO: 30696099 NR Description: expressed protein [Arabidopsis thaliana]
  misc_feature (1)..(229): Homolog of NCBI NO: 10177873 NR Description: contains similarity to peptidase~gene_id:MIO24.13
MHRVSPGKTAGTAARAQRDDELLDDRWVAESRRRGKARGAQPQTKHLNELNWEVIVVRDKLINAMCLPGGKIVVFTGLLDHFKTDAEIATVLSHEIGHAIARHLPEMITKGMWFTILQLIVLQFIYMPDLINAMSTLLLRLPFSRRMEVEADHIGLMLQASAGFDPRTAPKVYEKLGQIAGNQSVLKSYLSTHPSSKKRSELLSRAKVMEEAMQLYREACAGHGTEGFL

SEQ ID NO: 65033 - DNA, 1770 bp, Triticum aestivum
  misc_feature (1)..(1770): Ceres Seq. ID no. 13662762
attctaaaattgcctcgactaacaccagcgcagcagctagcttacctccatcgtgtgtgtccgtctgtccatggcgccgtcggagacgatgctggagtcggcggcgtacaggcggatgaaggcggagaacccgtccgagttcgtgccgcgcagcgtcttcttcgcgcgcgacggcggcagcggcatcgaccgccgcaacagcctctgggtcaaggcggcgctcgtctacgagtccgtcaccggcagccacgtcgacgacggcgtcaagcccctcgccaccagcctcttcctccaggtcgcccgcgaatgccgctcccgcatccccgacgacccaccgcagaccaaggccacggtggtgacggacgccctcaaaaaagtaccggctgccgtggctacgcctattgccggcgcgggcggcggcgaagatgactcagaggagaaaccgaacaagacggcggagctgcacgacgaagaaaaggagtcggacgacaagcaggtgatcgacgccgtcttcctcgtcgtcggcttcctcacgaggctggtcaagaccgccgcgggcgtcaggcgcgacgccgtcgacgaggggttcaagtccacgcacatgcaggacatcgtcacggacatgatcaagctggagaaccagctccccctcaagctcatcctcgacgtcgtcgagcacgtccaggacgcggcacgcgccgtcgccgccgaagccaggttcgaggggctccggaaatgcctcgaggggtacaagctcggcttcaaccccgccaccttcttcgacgacgtcgtcaggcccttctgctggtactactcgcccttcttcaacaagcagctgccggccgtggaccgcggcatgttcgacggcaaccacgagatcacgctcctggacttcctgcgcgccagcgtggtgccggcgccgccgggcgcggagaagggggcggccgccggcggcaggacgtcccgcatgccgacggccagggagctgagccgctctggcgtgcggatcgcgccgggggaggacggacgcgcgacggtggagttcgacgaggcgtccgccaggctgcagctgccggcgctggtgtacgacttcaagctggccacggtggcccggaacctgctggcgcgggagtacgaggagcagaacaagccggtgacgcgctacttccagatgatgaacgagctcgtcgacgaggcggccgacgccaagatcctccgccgcgccggcgccgtgcgcggtggcggggcgtccggcgccgaggtgcacgagctggtcaagcgcatcgacggctacgcgacgtacccgtcggtgtacatggccatggacgtgcagatcgcgaaggtgaggcggttccacgacatgaggatgcagaacttcctcgtccgctaccgccccggcgtcatctgggcgtcgtcggtggccgccgtctccttggtcgccattgtcgccgccaggagacgggggtgaggaagccaacggcggctaaccaaggcccgcgcatgaagattgtacaacttgaagtgtaatgttgtgtcttgtggttgtgtaccggtgtacaatgtgtaagtccaagcaaagatgattggatgcggggatttgtgggggctcgccatcctattgctaataatgattaattgcatgatagtccatgcaatttggtgcagattatgccaatccatgtaactgtaatcatagcttcactcatcaccaagatagggggtgagatttggagatgcaaaatggagtacaaatgaggacgtgagatactt

SEQ ID NO: 65034 - protein, 465 aa, Triticum aestivum
  peptide (1)..(465): Ceres Seq. ID no. 13662763
  misc_feature (68)..(460): Pfam Name: Plant protein of unknown function Pfam Description: Plant protein of unknown function
  misc_feature (7)..(464): Homolog of NCBI NO: 34898324 NR Description: EST C74734(E50712) corresponds to a region of the
MAPSETMLESAAYRRMKAENPSEFVPRSVFFARDGGSGIDRRNSLWVKAALVYESVTGSHVDDGVKPLATSLFLQVARECRSRIPDDPPQTKATVVTDALKKVPAAVATPIAGAGGGEDDSEEKPNKTAELHDEEKESDDKQVIDAVFLVVGFLTRLVKTAAGVRRDAVDEGFKSTHMQDIVTDMIKLENQLPLKLILDVVEHVQDAARAVAAEARFEGLRKCLEGYKLGFNPATFFDDVVRPFCWYYSPFFNKQLPAVDRGMFDGNHEITLLDFLRASVVPAPPGAEKGAAAGGRTSRMPTARELSRSGVRIAPGEDGRATVEFDEASARLQLPALVYDFKLATVARNLLAREYEEQNKPVTRYFQMMNELVDEAADAKILRRAGAVRGGGASGAEVHELVKRIDGYATYPSVYMAMDVQIAKVRRFHDMRMQNFLVRYRPGVIWASSVAAVSLVAIVAARRRG

SEQ ID NO: 65035 - protein, 459 aa, Triticum aestivum
  peptide (1)..(459): Ceres Seq. ID no. 13662764
  misc_feature (62)..(454): Pfam Name: Plant protein of unknown function Pfam Description: Plant protein of unknown function
  misc_feature (1)..(458): Homolog of NCBI NO: 34898324 NR Description: EST C74734(E50712) corresponds to a region of the
MLESAAYRRMKAENPSEFVPRSVFFARDGGSGIDRRNSLWVKAALVYESVTGSHVDDGVKPLATSLFLQVARECRSRIPDDPPQTKATVVTDALKKVPAAVATPIAGAGGGEDDSEEKPNKTAELHDEEKESDDKQVIDAVFLVVGFLTRLVKTAAGVRRDAVDEGFKSTHMQDIVTDMIKLENQLPLKLILDVVEHVQDAARAVAAEARFEGLRKCLEGYKLGFNPATFFDDVVRPFCWYYSPFFNKQLPAVDRGMFDGNHEITLLDFLRASVVPAPPGAEKGAAAGGRTSRMPTARELSRSGVRIAPGEDGRATVEFDEASARLQLPALVYDFKLATVARNLLAREYEEQNKPVTRYFQMMNELVDEAADAKILRRAGAVRGGGASGAEVHELVKRIDGYATYPSVYMAMDVQIAKVRRFHDMRMQNFLVRYRPGVIWASSVAAVSLVAIVAARRRG

SEQ ID NO: 65036 - protein, 450 aa, Triticum aestivum
  peptide (1)..(450): Ceres Seq. ID no. 13662765
  misc_feature (53)..(445): Pfam Name: Plant protein of unknown function Pfam Description: Plant protein of unknown function
  misc_feature (1)..(449): Homolog of NCBI NO: 34898324 NR Description: EST C74734(E50712) corresponds to a region of the
MKAENPSEFVPRSVFFARDGGSGIDRRNSLWVKAALVYESVTGSHVDDGVKPLATSLFLQVARECRSRIPDDPPQTKATVVTDALKKVPAAVATPIAGAGGGEDDSEEKPNKTAELHDEEKESDDKQVIDAVFLVVGFLTRLVKTAAGVRRDAVDEGFKSTHMQDIVTDMIKLENQLPLKLILDVVEHVQDAARAVAAEARFEGLRKCLEGYKLGFNPATFFDDVVRPFCWYYSPFFNKQLPAVDRGMFDGNHEITLLDFLRASVVPAPPGAEKGAAAGGRTSRMPTARELSRSGVRIAPGEDGRATVEFDEASARLQLPALVYDFKLATVARNLLAREYEEQNKPVTRYFQMMNELVDEAADAKILRRAGAVRGGGASGAEVHELVKRIDGYATYPSVYMAMDVQIAKVRRFHDMRMQNFLVRYRPGVIWASSVAAVSLVAIVAARRRG

SEQ ID NO: 65037 - DNA, 1228 bp, Triticum aestivum
  misc_feature (1)..(1228): Ceres Seq. ID no. 13597550
  misc_feature: Pfam Name: Sterol_desat Pfam Description: Sterol desaturase
acacagccacaagatcgacacaatatagtacgtcgtctgcagttacacgcacgaaaggaacgtacgtcgtagatcggtcgaagaggcttgttgagatggagatgccgagggtctctgaggaaactgtggccgccgtcgtgcccatcgccgtgtactgggcatacgccggcgtgcacacggcgctggggcagtcgcggctcatggacaagtacaggctcaacaccaaggacgaggaggaccgcaagaacatggtgtccaagcgcgccgtcatcctcaacgtcctcatgcagcacctcatgcagctcgccgccctcgccgtgctcgccatggttacaggaggaagaggggcgacggcgaaggccgctggcggctcaccggcggcggtgtacctgacggcggccgcccggatcgcggtggccgtgctggtgttcgacgcgtaccggtacgcgtggcaccgcctggcgcacatcaaccggttcatttaccggcacctccactcgtggcaccaccgcatcgtggtgccctacgcgttcggcgccatctacggccacccgatcgaggtcctcatcgccgacacggccggggcctcgctcgccgtcctcgtcaccggcctgtcgccgtcgtcgccgcgcgccacggccgtgttcctcaccctctgcaccgtgaaggccatcgacaaccactgcggcgtgtgcctgctgccgcgccgcctgcagtcggtctggaacggcgccgcgtaccacggcgtgcaccacatgccgcgcggcgtccggtacaacttctccgacctcttcttcgtgacgtgggaccatgtgttcgggacccacatgccctacgccgtcgaggagaggccgggcggcgatggcctcgtgctcaagcccctgccgcctcccaaggcaactaattagttaacggcatgctcgatcaggcatgcagttactacgtaccactcctagtgctaatgagtatagttatatgtagattagtcaataagcaagcaagttgcatgtgtatgtacgtgtggcttgcatgcacgcatgcagctacaaaactagaagcagccagtgagatgtgcgtgttgaagtcagcgggtagacgtgagccagtcaaactatttgctcgctgcgccgagtgccgaccatagcacgcatgtgctcagtttttttgttttgttttgagtcactctatgtattgtatattccattcaataaagtgtagaagtctgttc

SEQ ID NO: 65038 - protein, 301 aa, Triticum aestivum
  peptide (1)..(301): Ceres Seq. ID no. 15222128
  misc_feature: Pfam Name: Sterol_desat Pfam Description: Sterol desaturase
  misc_feature (37)..(108): Homolog of NCBI NO: 40746027 NR Description: hypothetical protein AN0640.2 [Aspergillus
  misc_feature (129)..(283): Homolog of NCBI NO: 40746027 NR Description: hypothetical protein AN0640.2 [Aspergillus
  misc_feature (41)..(112): Homolog of NCBI NO: 19113281 NR Description: hypothetical integral membrane protein, putative
  misc_feature (116)..(277): Homolog of NCBI NO: 19113281 NR Description: hypothetical integral membrane protein, putative
  misc_feature (47)..(294): Homolog of NCBI NO: 34913184 NR Description: similar to acid phosphatase
  misc_feature (37)..(298): Homolog of NCBI NO: 25511716 NR Description: F14L17.5 protein - Arabidopsis thaliana
  misc_feature (37)..(298): Homolog of NCBI NO: 18394095 NR Description: sterol desaturase domain-containing protein
  misc_feature (37)..(293): Homolog of NCBI NO: 25404823 NR Description: probable sterol desaturase T6C23.16
  misc_feature (37)..(293): Homolog of NCBI NO: 22330531 NR Description: acid phosphatase, putative [Arabidopsis thaliana]
  misc_feature (39)..(294): Homolog of NCBI NO: 34911990 NR Description: P0694A04.28 [Oryza sativa (japonica
TATRSTQYSTSSAVTRTKGTYVVDRSKRLVEMEMPRVSEETVAAVVPIAVYWAYAGVHTALGQSRLMDKYRLNTKDEEDRKNMVSKRAVILNVLMQHLMQLAALAVLAMVTGGRGATAKAAGGSPAAVYLTAAARIAVAVLVFDAYRYAWHRLAHINRFIYRHLHSWHHRIVVPYAFGAIYGHPIEVLIADTAGASLAVLVTGLSPSSPRATAVFLTLCTVKAIDNHCGVCLLPRRLQSVWNGAAYHGVHHMPRGVRYNFSDLFFVTWDHVFGTHMPYAVEERPGGDGLVLKPLPPPKATN

SEQ ID NO: 65039 - protein, 270 aa, Triticum aestivum
  peptide (1)..(270): Ceres Seq. ID no. 15222129
  misc_feature: Pfam Name: Sterol_desat Pfam Description: Sterol desaturase
  misc_feature (6)..(77): Homolog of NCBI NO: 40746027 NR Description: hypothetical protein AN0640.2 [Aspergillus
  misc_feature (98)..(252): Homolog of NCBI NO: 40746027 NR Description: hypothetical protein AN0640.2 [Aspergillus
  misc_feature (10)..(81): Homolog of NCBI NO: 19113281 NR Description: hypothetical integral membrane protein, putative
  misc_feature (85)..(246): Homolog of NCBI NO: 19113281 NR Description: hypothetical integral membrane protein, putative
  misc_feature (16)..(263): Homolog of NCBI NO: 34913184 NR Description: similar to acid phosphatase
  misc_feature (6)..(267): Homolog of NCBI NO: 25511716 NR Description: F14L17.5 protein - Arabidopsis thaliana
  misc_feature (6)..(267): Homolog of NCBI NO: 18394095 NR Description: sterol desaturase domain-containing protein
  misc_feature (6)..(262): Homolog of NCBI NO: 25404823 NR Description: probable sterol desaturase T6C23.16
  misc_feature (6)..(262): Homolog of NCBI NO: 22330531 NR Description: acid phosphatase, putative [Arabidopsis thaliana]
  misc_feature (8)..(263): Homolog of NCBI NO: 34911990 NR Description: P0694A04.28 [Oryza sativa (japonica
MEMPRVSEETVAAVVPIAVYWAYAGVHTALGQSRLMDKYRLNTKDEEDRKNMVSKRAVILNVLMQHLMQLAALAVLAMVTGGRGATAKAAGGSPAAVYLTAAARIAVAVLVFDAYRYAWHRLAHINRFIYRHLHSWHHRIVVPYAFGAIYGHPIEVLIADTAGASLAVLVTGLSPSSPRATAVFLTLCTVKAIDNHCGVCLLPRRLQSVWNGAAYHGVHHMPRGVRYNFSDLFFVTWDHVFGTHMPYAVEERPGGDGLVLKPLPPPKATN

SEQ ID NO: 65040 - protein, 268 aa, Triticum aestivum
  peptide (1)..(268): Ceres Seq. ID no. 15222130
  misc_feature: Pfam Name: Sterol_desat Pfam Description: Sterol desaturase
  misc_feature (4)..(75): Homolog of NCBI NO: 40746027 NR Description: hypothetical protein AN0640.2 [Aspergillus
  misc_feature (96)..(250): Homolog of NCBI NO: 40746027 NR Description: hypothetical protein AN0640.2 [Aspergillus
  misc_feature (8)..(79): Homolog of NCBI NO: 19113281 NR Description: hypothetical integral membrane protein, putative
  misc_feature (83)..(244): Homolog of NCBI NO: 19113281 NR Description: hypothetical integral membrane protein, putative
  misc_feature (14)..(261): Homolog of NCBI NO: 34913184 NR Description: similar to acid phosphatase
  misc_feature (4)..(265): Homolog of NCBI NO: 25511716 NR Description: F14L17.5 protein - Arabidopsis thaliana
  misc_feature (4)..(265): Homolog of NCBI NO: 18394095 NR Description: sterol desaturase domain-containing protein
  misc_feature (4)..(260): Homolog of NCBI NO: 25404823 NR Description: probable sterol desaturase T6C23.16
  misc_feature (4)..(260): Homolog of NCBI NO: 22330531 NR Description: acid phosphatase, putative [Arabidopsis thaliana]
  misc_feature (6)..(261): Homolog of NCBI NO: 34911990 NR Description: P0694A04.28 [Oryza sativa (japonica
MPRVSEETVAAVVPIAVYWAYAGVHTALGQSRLMDKYRLNTKDEEDRKNMVSKRAVILNVLMQHLMQLAALAVLAMVTGGRGATAKAAGGSPAAVYLTAAARIAVAVLVFDAYRYAWHRLAHINRFIYRHLHSWHHRIVVPYAFGAIYGHPIEVLIADTAGASLAVLVTGLSPSSPRATAVFLTLCTVKAIDNHCGVCLLPRRLQSVWNGAAYHGVHHMPRGVRYNFSDLFFVTWDHVFGTHMPYAVEERPGGDGLVLKPLPPPKATN

SEQ ID NO: 65041 - DNA, 1152 bp, Triticum aestivum
  misc_feature (1)..(1152): Ceres Seq. ID no. 13598539
aacgccaatatttttggtggggcgcctgcttgctgccatccaaacagcccccaaatccgcgcgcctctcacatcccagaccgctgctgagcctggccgacatggccaccgcctcgatcgccgtccgctcggccttcggtgtcgccctggccgccttgatcgcggcgcgtgccgtccggcggcgctcgctggatgcctggggcggagctgccgggttcgccgtgatggcgctccaccttgcctgcggctataggtacggtgcgctgctgctggctttcttcttcacctcgtccaaggtgaccaagatcggcgaggaccgcaagcggcgcgttgaggaggatttcaaggagggtggccagcgcaactggatccaagttcttgcgaatagtgcaatagcaactgtattggttatcctattggcgataatgactgggggtcaggatcaatgcttggactcaaatggttcaaaggttataactggtataataggtgctattattggccattattgctgctgcaatggagacacttggtcatctgaaatcggtgtgcttagtgatgaacaaccaaggcttgtcactaccctgaaggtggtcagtaaacggggacctactgtcaccaagatttctggaatgactatcctggataatgatgctgttaatgcagtgtctgtgctgctaacatcggtgattacagcttatgcctgcattgtcttcttctagaagcaagggtttggttggctttttcacctgtccctaatgcgcagtgatgtgtaatgtgaatattccaaggacagaatgactgatgtttacttcaagcaagatgaacaatgaagtgttggaaatctttggctatttgctgggcacaattgacgagcctgatgacgtttgctccaggcagctagtttggtaatagtgcaagttgggaaattctaaattgttttaagcaagaaaaggccgtggtataatgcggaattgacaattatggtttttcgaaacctatctgtgtcgaagaaagtatctagttcgctgttttagaccacaatccaacaattatccccttgccaaattatagttaagttttgtctgaagtcaaattttgtgaactctgaccaattttatattatagagaaaaatatgaacatttacaatat

SEQ ID NO: 65042 - protein, 239 aa, Triticum aestivum
  peptide (1)..(239): Ceres Seq. ID no. 13598540
  misc_feature (40)..(200): Pfam Name: Integral membrane protein DUF92 Pfam Description: Integral membrane protein DUF92
  misc_feature (42)..(230): Homolog of NCBI NO: 7023297 NR Description: unnamed protein product [Homo sapiens]
  misc_feature (42)..(230): Homolog of NCBI NO: 21361720 NR Description: hypothetical protein FLJ10936 [Homo sapiens]
  misc_feature (196)..(229): Homolog of NCBI NO: 24663763 NR Description: CG10171-PB [Drosophila melanogaster]
  misc_feature (196)..(229): Homolog of NCBI NO: 24663759 NR Description: CG10171-PA [Drosophila melanogaster]
  misc_feature (41)..(200): Homolog of NCBI NO: 24663763 NR Description: CG10171-PB [Drosophila melanogaster]
  misc_feature (41)..(200): Homolog of NCBI NO: 24663759 NR Description: CG10171-PA [Drosophila melanogaster]
  misc_feature (9)..(233): Homolog of NCBI NO: 34906132 NR Description: P0509B06.3 [Oryza sativa (japonica
  misc_feature (42)..(235): Homolog of NCBI NO: 21537262 NR Description: unknown [Arabidopsis thaliana]
  misc_feature (42)..(235): Homolog of NCBI NO: 18420075 NR Description: expressed protein [Arabidopsis thaliana]
  misc_feature (37)..(200): Homolog of NCBI NO: 34914530 NR Description: OSJNBa0094H06.11 [Oryza sativa (japonica
TPIFLVGRLLAAIQTAPKSARLSHPRPLLSLADMATASIAVRSAFGVALAALIAARAVRRRSLDAWGGAAGFAVMALHLACGYRYGALLLAFFFTSSKVTKIGEDRKRRVEEDFKEGGQRNWIQVLANSAIATVLVILLAIMTGGQDQCLDSNGSKVITGIIGAIIGHYCCCNGDTWSSEIGVLSDEQPRLVTTLKVVSKRGPTVTKISGMTILDNDAVNAVSVLLTSVITAYACIVFF

SEQ ID NO: 65043 - protein, 206 aa, Triticum aestivum
  peptide (1)..(206): Ceres Seq. ID no. 13598541
  misc_feature (7)..(167): Pfam Name: Integral membrane protein DUF92 Pfam Description: Integral membrane protein DUF92
  misc_feature (9)..(197): Homolog of NCBI NO: 7023297 NR Description: unnamed protein product [Homo sapiens]
  misc_feature (9)..(197): Homolog of NCBI NO: 21361720 NR Description: hypothetical protein FLJ10936 [Homo sapiens]
  misc_feature (163)..(196): Homolog of NCBI NO: 24663763 NR Description: CG10171-PB [Drosophila melanogaster]
  misc_feature (163)..(196): Homolog of NCBI NO: 24663759 NR Description: CG10171-PA [Drosophila melanogaster]
  misc_feature (8)..(167): Homolog of NCBI NO: 24663763 NR Description: CG10171-PB [Drosophila melanogaster]
  misc_feature (8)..(167): Homolog of NCBI NO: 24663759 NR Description: CG10171-PA [Drosophila melanogaster]
  misc_feature (1)..(200): Homolog of NCBI NO: 34906132 NR Description: P0509B06.3 [Oryza sativa (japonica
  misc_feature (9)..(202): Homolog of NCBI NO: 21537262 NR Description: unknown [Arabidopsis thaliana]
  misc_feature (9)..(202): Homolog of NCBI NO: 18420075 NR Description: expressed protein [Arabidopsis thaliana]
  misc_feature (4)..(167): Homolog of NCBI NO: 34914530 NR Description: OSJNBa0094H06.11 [Oryza sativa (japonica
MATASIAVRSAFGVALAALIAARAVRRRSLDAWGGAAGFAVMALHLACGYRYGALLLAFFFTSSKVTKIGEDRKRRVEEDFKEGGQRNWIQVLANSAIATVLVILLAIMTGGQDQCLDSNGSKVITGIIGAIIGHYCCCNGDTWSSEIGVLSDEQPRLVTTLKVVSKRGPTVTKISGMTILDNDAVNAVSVLLTSVITAYACIVFF

SEQ ID NO: 65044 - protein, 165 aa, Triticum aestivum
  peptide (1)..(165): Ceres Seq. ID no. 13598542
  misc_feature (1)..(126): Pfam Name: Integral membrane protein DUF92 Pfam Description: Integral membrane protein DUF92
  misc_feature (1)..(156): Homolog of NCBI NO: 7023297 NR Description: unnamed protein product [Homo sapiens]
  misc_feature (1)..(156): Homolog of NCBI NO: 21361720 NR Description: hypothetical protein FLJ10936 [Homo sapiens]
  misc_feature (122)..(155): Homolog of NCBI NO: 24663763 NR Description: CG10171-PB [Drosophila melanogaster]
  misc_feature (122)..(155): Homolog of NCBI NO: 24663759 NR Description: CG10171-PA [Drosophila melanogaster]
  misc_feature (1)..(126): Homolog of NCBI NO: 24663763 NR Description: CG10171-PB [Drosophila melanogaster]
  misc_feature (1)..(126): Homolog of NCBI NO: 24663759 NR Description: CG10171-PA [Drosophila melanogaster]
  misc_feature (1)..(159): Homolog of NCBI NO: 34906132 NR Description: P0509B06.3 [Oryza sativa (japonica
  misc_feature (1)..(161): Homolog of NCBI NO: 21537262 NR Description: unknown [Arabidopsis thaliana]
  misc_feature (1)..(161): Homolog of NCBI NO: 18420075 NR Description: expressed protein [Arabidopsis thaliana]
  misc_feature (1)..(126): Homolog of NCBI NO: 34914530 NR Description: OSJNBa0094H06.11 [Oryza sativa (japonica
MALHLACGYRYGALLLAFFFTSSKVTKIGEDRKRRVEEDFKEGGQRNWIQVLANSAIATVLVILLAIMTGGQDQCLDSNGSKVITGIIGAIIGHYCCCNGDTWSSEIGVLSDEQPRLVTTLKVVSKRGPTVTKISGMTILDNDAVNAVSVLLTSVITAYACIVFF

SEQ ID NO: 65045 - DNA, 1949 bp, Triticum aestivum
  misc_feature (1)..(1949): Ceres Seq. ID no. 13595871
acacatgcacatcagccattcacccccggcacaacaagaggccgcacaaaaccctcctctctgatcctccaaagcggcggcgcggtgggcatggatggtgccggtatggcgacactgccggaggccaacacgtcgcccgcgcccaacggcggcggctgcggcgggatcagggttgagaattgctacgtcttcaagagcaggctgcaggagtacgcgcagaaagccggcctcatgacgccagagtaccaaaccctcaaggaggggccttcccatgagccaatcttcaagtcctccgtcgtgataaacaacaccaagtatgattctttgcctgggttcttcagccggaaggctgcagagcagtcggctgccgaagtcgcgctcatggaaatcggcaagtctgtggtgttaccaaccaatgcaaccatccccgcagtccaagaaactggtctgtgcaagaatcttcttcaggagtatgctcagaagatgaattatgctattccatcttatatttgcaacaaacaaggtccatacatatgcaccgtagagattggtggaatacaatacattggtgctacagcacggacaaagaaagaggcagagataaaagctgcccgaactgctcttcttgcaatccaagttgcaggccaatcagagggttgtgcaaatggtaccacaaaatatattgttgtgcctggcaaaaggcaaggtaaggagatcgagaaaaagcctgttgaaactccaaaatcacttaagaccaagaaaggtggtttcaagaagcaacggaacaagaataaattcatcaagaagaatggccaagaagttaacgaggaaaaggatgagactggagtgcctggagatgctcatcattcagatgtccctatgaagccagctgtaacaacagaagatccagtgaccaacactgtaatgatccagcctgatgaagcttggccattcgaacatgaaccaaccggtgacactgcaatgctgcaacctattgaagacgcttggccatccaaacatgaaccgaccggtgagactgcaatgctgcaacctgatggcgaagctacaaaagtggaacaggagcaactcagtgacacagcaatgctgcaacctgatgatgaaggtggaagagtagaacatgagccactcagcaacgctccaatggtgctacgtaatgaggaagctagaaatgtaaagcaggaagcactcatcagcactgcaatgccacaacctcacatggaagatagaagagtgggagcagagccacctagagatgctgcaatggtgcaacctaatgatgaagctagatgcataaagcaggagctactaattgacgctgcaatgcctctccccaatgaggaggccggagcagctgcaaatcctgtgccattgagtgactccataacagcgcaacctaatgcagtgactacaaatataaatgaggagtcactgaggaatgcagcatcagtgcaacataatgaagaagctaggaccgtaaaccaggagccacccagcagtgcttcactacagcagccaaaggaacccagagtcgagaacggtgaatttgtttctgaaaacaaggaccaaactctgggagatgcatctcgtgaggcaaataggtccaacgaagatgtgccagaaaagtgctcagataattcatctgcttttacaagtgtggaatgatatgtgctgtttgaatcaaatgcaatggccttccagttttacatcttgattttgcaaactagtaaaacctgaatagctggtttctcattttagaaatataattgcataacagatggatgtacgtggaccgaccgaggtccggttggtggtccatgttggccattagttattaggaagcttgcatgcctgatggtatgatcttggatccatggatgatgtatctcaagttgcttatctgatcaatgaactattagtgaactattatt

SEQ ID NO: 65046 - protein, 560 aa, Triticum aestivum
  peptide (1)..(560): Ceres Seq. ID no. 15221678
  misc_feature (64)..(130): Pfam Name: Double-stranded RNA binding motif Pfam Description: Double-stranded RNA binding motif
  misc_feature (63)..(222): Homolog of NCBI NO: 37535422 NR Description: putative extensin [Oryza sativa (japonica
  misc_feature (58)..(289): Homolog of NCBI NO: 27262833 NR Description: dsRNA-binding protein [Brassica oleracea var.
  misc_feature (58)..(274): Homolog of NCBI NO: 18391056 NR Description: hyponastic leave 1 protein [Arabidopsis thaliana]
  misc_feature (58)..(265): Homolog of NCBI NO: 27262837 NR Description: dsRNA-binding protein [Brassica oleracea var.
  misc_feature (58)..(289): Homolog of NCBI NO: 9967526 NR Description: RBP2 protein [Brassica oleracea var. capitata]
  misc_feature (58)..(289): Homolog of NCBI NO: 27262835 NR Description: dsRNA-binding protein [Brassica oleracea var.
  misc_feature (58)..(289): Homolog of NCBI NO: 27262831 NR Description: dsRNA-binding protein [Brassica oleracea var.
  misc_feature (58)..(265): Homolog of NCBI NO: 8346542 NR Description: BcpLH protein [Brassica rapa]
  misc_feature (58)..(270): Homolog of NCBI NO: 27262829 NR Description: dsRNA-binding protein [Brassica rapa subsp. rapa]
  misc_feature (40)..(455): Homolog of NCBI NO: 9229939 NR Description: dsRNA-binding protein ODB1
THAHQPFTPGTTRGRTKPSSLILQSGGAVGMDGAGMATLPEANTSPAPNGGGCGGIRVENCYVFKSRLQEYAQKAGLMTPEYQTLKEGPSHEPIFKSSVVINNTKYDSLPGFFSRKAAEQSAAEVALMEIGKSVVLPTNATIPAVQETGLCKNLLQEYAQKMNYAIPSYICNKQGPYICTVEIGGIQYIGATARTKKEAEIKAARTALLAIQVAGQSEGCANGTTKYIVVPGKRQGKEIEKKPVETPKSLKTKKGGFKKQRNKNKFIKKNGQEVNEEKDETGVPGDAHHSDVPMKPAVTTEDPVTNTVMIQPDEAWPFEHEPTGDTAMLQPIEDAWPSKHEPTGETAMLQPDGEATKVEQEQLSDTAMLQPDDEGGRVEHEPLSNAPMVLRNEEARNVKQEALISTAMPQPHMEDRRVGAEPPRDAAMVQPNDEARCIKQELLIDAAMPLPNEEAGAAANPVPLSDSITAQPNAVTTNINEESLRNAASVQHNEEARTVNQEPPSSASLQQPKEPRVENGEFVSENKDQTLGDASREANRSNEDVPEKCSDNSSAFTSVE

SEQ ID NO: 65047 - protein, 530 aa, Triticum aestivum
  peptide (1)..(530): Ceres Seq. ID no. 15221679
  misc_feature (34)..(100): Pfam Name: Double-stranded RNA binding motif Pfam Description: Double-stranded RNA binding motif
  misc_feature (33)..(192): Homolog of NCBI NO: 37535422 NR Description: putative extensin [Oryza sativa (japonica
  misc_feature (28)..(259): Homolog of NCBI NO: 27262833 NR Description: dsRNA-binding protein [Brassica oleracea var.
  misc_feature (28)..(244): Homolog of NCBI NO: 18391056 NR Description: hyponastic leave 1 protein [Arabidopsis thaliana]
  misc_feature (28)..(235): Homolog of NCBI NO: 27262837 NR Description: dsRNA-binding protein [Brassica oleracea var.
  misc_feature (28)..(259): Homolog of NCBI NO: 9967526 NR Description: RBP2 protein [Brassica oleracea var. capitata]
  misc_feature (28)..(259): Homolog of NCBI NO: 27262835 NR Description: dsRNA-binding protein [Brassica oleracea var.
  misc_feature (28)..(259): Homolog of NCBI NO: 27262831 NR Description: dsRNA-binding protein [Brassica oleracea var.
  misc_feature (28)..(235): Homolog of NCBI NO: 8346542 NR Description: BcpLH protein [Brassica rapa]
  misc_feature (28)..(240): Homolog of NCBI NO: 27262829 NR Description: dsRNA-binding protein [Brassica rapa subsp. rapa]
  misc_feature (10)..(425): Homolog of NCBI NO: 9229939 NR Description: dsRNA-binding protein ODB1
MDGAGMATLPEANTSPAPNGGGCGGIRVENCYVFKSRLQEYAQKAGLMTPEYQTLKEGPSHEPIFKSSVVINNTKYDSLPGFFSRKAAEQSAAEVALMEIGKSVVLPTNATIPAVQETGLCKNLLQEYAQKMNYAIPSYICNKQGPYICTVEIGGIQYIGATARTKKEAEIKAARTALLAIQVAGQSEGCANGTTKYIVVPGKRQGKEIEKKPVETPKSLKTKKGGFKKQRNKNKFIKKNGQEVNEEKDETGVPGDAHHSDVPMKPAVTTEDPVTNTVMIQPDEAWPFEHEPTGDTAMLQPIEDAWPSKHEPTGETAMLQPDGEATKVEQEQLSDTAMLQPDDEGGRVEHEPLSNAPMVLRNEEARNVKQEALISTAMPQPHMEDRRVGAEPPRDAAMVQPNDEARCIKQELLIDAAMPLPNEEAGAAANPVPLSDSITAQPNAVTTNINEESLRNAASVQHNEEARTVNQEPPSSASLQQPKEPRVENGEFVSENKDQTLGDASREANRSNEDVPEKCSDNSSAFTSVE

SEQ ID NO: 65048 - protein, 525 aa, Triticum aestivum
  peptide (1)..(525): Ceres Seq. ID no. 15221680
  misc_feature (29)..(95): Pfam Name: Double-stranded RNA binding motif Pfam Description: Double-stranded RNA binding motif
  misc_feature (28)..(187): Homolog of NCBI NO: 37535422 NR Description: putative extensin [Oryza sativa (japonica
  misc_feature (23)..(254): Homolog of NCBI NO: 27262833 NR Description: dsRNA-binding protein [Brassica oleracea var.
  misc_feature (23)..(239): Homolog of NCBI NO: 18391056 NR Description: hyponastic leave 1 protein [Arabidopsis thaliana]
  misc_feature (23)..(230): Homolog of NCBI NO: 27262837 NR Description: dsRNA-binding protein [Brassica oleracea var.
  misc_feature (23)..(254): Homolog of NCBI NO: 9967526 NR Description: RBP2 protein [Brassica oleracea var. capitata]
  misc_feature (23)..(254): Homolog of NCBI NO: 27262835 NR Description: dsRNA-binding protein [Brassica oleracea var.
  misc_feature (23)..(254): Homolog of NCBI NO: 27262831 NR Description: dsRNA-binding protein [Brassica oleracea var.
  misc_feature (23)..(230): Homolog of NCBI NO: 8346542 NR Description: BcpLH protein [Brassica rapa]
  misc_feature (23)..(235): Homolog of NCBI NO: 27262829 NR Description: dsRNA-binding protein [Brassica rapa subsp. rapa]
  misc_feature (5)..(420): Homolog of NCBI NO: 9229939 NR Description: dsRNA-binding protein ODB1
MATLPEANTSPAPNGGGCGGIRVENCYVFKSRLQEYAQKAGLMTPEYQTLKEGPSHEPIFKSSVVINNTKYDSLPGFFSRKAAEQSAAEVALMEIGKSVVLPTNATIPAVQETGLCKNLLQEYAQKMNYAIPSYICNKQGPYICTVEIGGIQYIGATARTKKEAEIKAARTALLAIQVAGQSEGCANGTTKYIVVPGKRQGKEIEKKPVETPKSLKTKKGGFKKQRNKNKFIKKNGQEVNEEKDETGVPGDAHHSDVPMKPAVTTEDPVTNTVMIQPDEAWPFEHEPTGDTAMLQPIEDAWPSKHEPTGETAMLQPDGEATKVEQEQLSDTAMLQPDDEGGRVEHEPLSNAPMVLRNEEARNVKQEALISTAMPQPHMEDRRVGAEPPRDAAMVQPNDEARCIKQELLIDAAMPLPNEEAGAAANPVPLSDSITAQPNAVTTNINEESLRNAASVQHNEEARTVNQEPPSSASLQQPKEPRVENGEFVSENKDQTLGDASREANRSNEDVPEKCSDNSSAFTSVE

SEQ ID NO: 65049 - DNA, 1464 bp, Triticum aestivum
  misc_feature (1)..(1464): Ceres Seq. ID no. 13598653
atagtttccttcctcttctgacttatctcacatgctctgacctcagctccaatctgagaccctagtccctcgagccgtcgccgtgccgtagctgatagcatcaccgtccgacgccccccacccgctcccaaccctcccgcctctcacgcgcgccgcccccatcgccgtccccgccgtatccactccgtccgcagtcgacgggttttgaggtggacatgcattttgcaaatgtcaggctctaatcagatggcttcggatggtaaatttggaaaaggtcctcgggagctcactggggctgttgatttaattagccgctacaggctgctgaaccatcacagtttcttttgtaagaaaccattgccactggctatctcagatacacattatcttcagaatgttgtgggtgatactgaaatccgtaaaggagaagggatggagatagatcaactcattcagaatccagatctgagggagaagaagactgcttatattcagccttttgacatggaaacactaggacacgcatttcagttgcgagaaacagcgccagtagatctgccttcggctgaaaaaggcactccaactatatcgggaaaatcaaaggttaagtccagggacaaagtgaagaagcataaaaagcacaaggagaaagacaaggacaaggaacacaagaagcacaaacatcgccataaggatcggagtaaagataaagacaaagacaaagagaaagagaaagagaaagaaaaagagaaggagaaggagaaagacaaagacaaagacaaagaaaagaaaaaagagaagagcgtgcatcatgatttgggaggtgataattccaaaaaacatcatgagaagaagaggaaacatgatggaatggaaaatttggcggctgtacgtaaccacaaaaaaacacaaaagcgcaaaattcaatgaaatgggcagtggactttgtttggcgtaagatgtgacaaattcgtttccgtgttagttctcgtaatatgactccatgttttatgctgttaatgggcgactctgaaggttttcttgtcaataccacttccgatggagttactgatggaatttcctttatcaagatgatccggttacaagggacgcgcccaatcagatcatgatacaccgtaaatcaattctgggaaaacttgaacttgtcatttggagttatttgattttttttgtgtgtgtgtgtgttagttctgtgcccattagcaattcttgagtgttgccctcctatatgccctgtcctgtaactcagacagaagaaaagggtttactgtcaaagccgcatgatgtgaccgtgtacaacaggagacgtcacgtgtagaagagaaaaattagccgtacacattccatgatccagcaaattcaatggtggtgatgaaccttaaggaactcgagcagtatgttctgtgtaccaatcatgttttcttaatcaaacaatcccagttt

SEQ ID NO: 65050 - protein, 233 aa, Triticum aestivum
  peptide (1)..(233): Ceres Seq. ID no. 13598654
  misc_feature (112)..(201): Pfam Name: SART-1 family Pfam Description: SART-1 family
  misc_feature (137)..(230): Homolog of NCBI NO: 15239764 NR Description: hypothetical protein [Arabidopsis thaliana]
  misc_feature (104)..(232): Homolog of NCBI NO: 2642506 NR Description: O1 [Plasmodium falciparum]
  misc_feature (112)..(231): Homolog of NCBI NO: 23612468 NR Description: heat shock protein 86 family protein [Plasmodium
  misc_feature (72)..(208): Homolog of NCBI NO: 29246869 NR Description: GLP_191_32543_34384 [Giardia lamblia ATCC 50803]
  misc_feature (120)..(211): Homolog of NCBI NO: 21040255 NR Description: splicing factor, arginine/serine-rich 12
  misc_feature (127)..(230): Homolog of NCBI NO: 38454176 NR Description: At5g12230 [Arabidopsis thaliana]
  misc_feature (127)..(230): Homolog of NCBI NO: 15239910 NR Description: expressed protein [Arabidopsis thaliana]
  misc_feature (7)..(221): Homolog of NCBI NO: 15239764 NR Description: hypothetical protein [Arabidopsis thaliana]
  misc_feature (12)..(222): Homolog of NCBI NO: 38454176 NR Description: At5g12230 [Arabidopsis thaliana]
  misc_feature (12)..(222): Homolog of NCBI NO: 15239910 NR Description: expressed protein [Arabidopsis thaliana]
MSGSNQMASDGKFGKGPRELTGAVDLISRYRLLNHHSFFCKKPLPLAISDTHYLQNVVGDTEIRKGEGMEIDQLIQNPDLREKKTAYIQPFDMETLGHAFQLRETAPVDLPSAEKGTPTISGKSKVKSRDKVKKHKKHKEKDKDKEHKKHKHRHKDRSKDKDKDKEKEKEKEKEKEKEKDKDKDKEKKKEKSVHHDLGGDNSKKHHEKKRKHDGMENLAAVRNHKKTQKRKIQ

SEQ ID NO: 65051 - protein, 227 aa, Triticum aestivum
  peptide (1)..(227): Ceres Seq. ID no. 13598655
  misc_feature (106)..(195): Pfam Name: SART-1 family Pfam Description: SART-1 family
  misc_feature (131)..(224): Homolog of NCBI NO: 15239764 NR Description: hypothetical protein [Arabidopsis thaliana]
  misc_feature (98)..(226): Homolog of NCBI NO: 2642506 NR Description: O1 [Plasmodium falciparum]
  misc_feature (106)..(225): Homolog of NCBI NO: 23612468 NR Description: heat shock protein 86 family protein [Plasmodium
  misc_feature (66)..(202): Homolog of NCBI NO: 29246869 NR Description: GLP_191_32543_34384 [Giardia lamblia ATCC 50803]
  misc_feature (114)..(205): Homolog of NCBI NO: 21040255 NR Description: splicing factor, arginine/serine-rich 12
  misc_feature (121)..(224): Homolog of NCBI NO: 38454176 NR Description: At5g12230 [Arabidopsis thaliana]
  misc_feature (121)..(224): Homolog of NCBI NO: 15239910 NR Description: expressed protein [Arabidopsis thaliana]
  misc_feature (1)..(215): Homolog of NCBI NO: 15239764 NR Description: hypothetical protein [Arabidopsis thaliana]
  misc_feature (6)..(216): Homolog of NCBI NO: 38454176 NR Description: At5g12230 [Arabidopsis thaliana]
  misc_feature (6)..(216): Homolog of NCBI NO: 15239910 NR Description: expressed protein [Arabidopsis thaliana]
MASDGKFGKGPRELTGAVDLISRYRLLNHHSFFCKKPLPLAISDTHYLQNVVGDTEIRKGEGMEIDQLIQNPDLREKKTAYIQPFDMETLGHAFQLRETAPVDLPSAEKGTPTISGKSKVKSRDKVKKHKKHKEKDKDKEHKKHKHRHKDRSKDKDKDKEKEKEKEKEKEKEKDKDKDKEKKKEKSVHHDLGGDNSKKHHEKKRKHDGMENLAAVRNHKKTQKRKIQ

SEQ ID NO: 65052 - protein, 165 aa, Triticum aestivum
  peptide (1)..(165): Ceres Seq. ID no. 13598656
  misc_feature (44)..(133): Pfam Name: SART-1 family Pfam Description: SART-1 family
  misc_feature (69)..(162): Homolog of NCBI NO: 15239764 NR Description: hypothetical protein [Arabidopsis thaliana]
  misc_feature (36)..(164): Homolog of NCBI NO: 2642506 NR Description: O1 [Plasmodium falciparum]
  misc_feature (44)..(163): Homolog of NCBI NO: 23612468 NR Description: heat shock protein 86 family protein [Plasmodium
  misc_feature (4)..(140): Homolog of NCBI NO: 29246869 NR Description: GLP_191_32543_34384 [Giardia lamblia ATCC 50803]
  misc_feature (52)..(143): Homolog of NCBI NO: 21040255 NR Description: splicing factor, arginine/serine-rich 12
  misc_feature (59)..(162): Homolog of NCBI NO: 38454176 NR Description: At5g12230 [Arabidopsis thaliana]
  misc_feature (59)..(162): Homolog of NCBI NO: 15239910 NR Description: expressed protein [Arabidopsis thaliana]
  misc_feature (1)..(153): Homolog of NCBI NO: 15239764 NR Description: hypothetical protein [Arabidopsis thaliana]
  misc_feature (1)..(154): Homolog of NCBI NO: 38454176 NR Description: At5g12230 [Arabidopsis thaliana]
  misc_feature (1)..(154): Homolog of NCBI NO: 15239910 NR Description: expressed protein [Arabidopsis thaliana]
MEIDQLIQNPDLREKKTAYIQPFDMETLGHAFQLRETAPVDLPSAEKGTPTISGKSKVKSRDKVKKHKKHKEKDKDKEHKKHKHRHKDRSKDKDKDKEKEKEKEKEKEKEKDKDKDKEKKKEKSVHHDLGGDNSKKHHEKKRKHDGMENLAAVRNHKKTQKRKIQ

SEQ ID NO: 65053 - DNA, 1055 bp, Triticum aestivum
  misc_feature (1)..(1055): Ceres Seq. ID no. 15168860
aaaataccaatcgctcccacgaacaaaagccaccaatgggctccacaaagctcatcgcagcgactcttctccccgctttcctcgccctccatctacacgccccagcagcaatggccaccgcggcaggaagctccaactccaacctcttccgcgactacatcggcgccctctacaacggcgtcaggttcgccgacgtgccggtcgacccgcgcgcccgcttcgacttcatcctcgcgttcgtcatcgactacaccaccgcgacggagcccccgtccccgaccaacggccggttcaacgtcttctggcaggacacggtgctcacccctgacgcggtcgccgaggtcaagcggcggaaccccaaagtgcgcgtggccgtcagtctcggcggcgccacggtcaacggcaggcccgtgttcttcaacgtcacctccggcgtcgactcctgggtccgcaacgccgtcgactccctcaccggcatcatccggcggtacggcctggatggcatcgacatcgactacgagcagttccaggtggacccggccaccttcgccgagtgcgccggccgtctcgtggcggcgctcaagagcaacggcgtcatcagcttcgcgtccatcgcgccgtacggcaacgccgacgtgcaacgctactaccggacgctgtgggcggcgcacggggccgcaatagactacgtcaacttccagttctacgcctacggtgctagcaccaccgcggcgcagtacgtcagcctcttcgacgagcagatcgccaactaccctggagccaacatcctggccagcttcaccacggcggcgacgaacacctcggtgccggtcgacaccgcgcttagtgcttgccggactctgcaggggcagggtaagctctacggcatatttgtctgggctgcagaccattccaggaaccaaggattcaagtatgagacacagtcgcaggccctgttgactgatgccaccacgtactagttacccacagcttcttggtttgcgtatatctatcttttagtgaaatcatatggaataaaacgagcatccgatttt

SEQ ID NO: 65054 - protein, 325 aa, Triticum aestivum
  peptide (1)..(325): Ceres Seq. ID no. 15168861
  misc_feature (65)..(304): Pfam Name: Glycosyl hydrolases family 18 Pfam Description: Glycosyl hydrolases family 18
  misc_feature (45)..(321): Homolog of NCBI NO: 37534356 NR Description: putative class III chitinase
  misc_feature (47)..(319): Homolog of NCBI NO: 7434970 NR Description: chitinase (EC 3.2.1.14) a - Gladiolus gandavensis
  misc_feature (48)..(319): Homolog of NCBI NO: 7434971 NR Description: chitinase (EC 3.2.1.14) 1 - cone shell (Conus
  misc_feature (20)..(324): Homolog of NCBI NO: 11262118 NR Description: chitinase (EC 3.2.1.14) 1 - cone shell (Conus
  misc_feature (48)..(319): Homolog of NCBI NO: 7434972 NR Description: chitinase (EC 3.2.1.14) 2 - cone shell (Conus
  misc_feature (45)..(323): Homolog of NCBI NO: 27462188 NR Description: chitinase [Oryza sativa]
  misc_feature (12)..(323): Homolog of NCBI NO: 37534348 NR Description: putative class III chitinase RCB4
NTNRSHEQKPPMGSTKLIAATLLPAFLALHLHAPAAMATAAGSSNSNLFRDYIGALYNGVRFADVPVDPRARFDFILAFVIDYTTATEPPSPTNGRFNVFWQDTVLTPDAVAEVKRRNPKVRVAVSLGGATVNGRPVFFNVTSGVDSWVRNAVDSLTGIIRRYGLDGIDIDYEQFQVDPATFAECAGRLVAALKSNGVISFASIAPYGNADVQRYYRTLWAAHGAAIDYVNFQFYAYGASTTAAQYVSLFDEQIANYPGANILASFTTAATNTSVPVDTALSACRTLQGQGKLYGIFVWAADHSRNQGFKYETQSQALLTDATTY

SEQ ID NO: 65055 - protein, 314 aa, Triticum aestivum
  peptide (1)..(314): Ceres Seq. ID no. 15168862
  misc_feature (54)..(293): Pfam Name: Glycosyl hydrolases family 18 Pfam Description: Glycosyl hydrolases family 18
  misc_feature (34)..(310): Homolog of NCBI NO: 37534356 NR Description: putative class III chitinase
  misc_feature (36)..(308): Homolog of NCBI NO: 7434970 NR Description: chitinase (EC 3.2.1.14) a - Gladiolus gandavensis
  misc_feature (37)..(308): Homolog of NCBI NO: 7434971 NR Description: chitinase (EC 3.2.1.14) 1 - cone shell (Conus
  misc_feature (9)..(313): Homolog of NCBI NO: 11262118 NR Description: chitinase (EC 3.2.1.14) 1 - cone shell (Conus
  misc_feature (37)..(308): Homolog of NCBI NO: 7434972 NR Description: chitinase (EC 3.2.1.14) 2 - cone shell (Conus
  misc_feature (34)..(312): Homolog of NCBI NO: 27462188 NR Description: chitinase [Oryza sativa]
  misc_feature (1)..(312): Homolog of NCBI NO: 37534348 NR Description: putative class III chitinase RCB4
MGSTKLIAATLLPAFLALHLHAPAAMATAAGSSNSNLFRDYIGALYNGVRFADVPVDPRARFDFILAFVIDYTTATEPPSPTNGRFNVFWQDTVLTPDAVAEVKRRNPKVRVAVSLGGATVNGRPVFFNVTSGVDSWVRNAVDSLTGIIRRYGLDGIDIDYEQFQVDPATFAECAGRLVAALKSNGVISFASIAPYGNADVQRYYRTLWAAHGAAIDYVNFQFYAYGASTTAAQYVSLFDEQIANYPGANILASFTTAATNTSVPVDTALSACRTLQGQGKLYGIFVWAADHSRNQGFKYETQSQALLTDATTY

SEQ ID NO: 65056 - protein, 289 aa, Triticum aestivum
  peptide (1)..(289): Ceres Seq. ID no. 15168863
  misc_feature (29)..(268): Pfam Name: Glycosyl hydrolases family 18 Pfam Description: Glycosyl hydrolases family 18
  misc_feature (9)..(285): Homolog of NCBI NO: 37534356 NR Description: putative class III chitinase
  misc_feature (11)..(283): Homolog of NCBI NO: 7434970 NR Description: chitinase (EC 3.2.1.14) a - Gladiolus gandavensis
  misc_feature (12)..(283): Homolog of NCBI NO: 7434971 NR Description: chitinase (EC 3.2.1.14) 1 - cone shell (Conus
  misc_feature (1)..(288): Homolog of NCBI NO: 11262118 NR Description: chitinase (EC 3.2.1.14) 1 - cone shell (Conus
  misc_feature (12)..(283): Homolog of NCBI NO: 7434972 NR Description: chitinase (EC 3.2.1.14) 2 - cone shell (Conus
  misc_feature (9)..(287): Homolog of NCBI NO: 27462188 NR Description: chitinase [Oryza sativa]
  misc_feature (1)..(287): Homolog of NCBI NO: 37534348 NR Description: putative class III chitinase RCB4
MATAAGSSNSNLFRDYIGALYNGVRFADVPVDPRARFDFILAFVIDYTTATEPPSPTNGRFNVFWQDTVLTPDAVAEVKRRNPKVRVAVSLGGATVNGRPVFFNVTSGVDSWVRNAVDSLTGIIRRYGLDGIDIDYEQFQVDPATFAECAGRLVAALKSNGVISFASIAPYGNADVQRYYRTLWAAHGAAIDYVNFQFYAYGASTTAAQYVSLFDEQIANYPGANILASFTTAATNTSVPVDTALSACRTLQGQGKLYGIFVWAADHSRNQGFKYETQSQALLTDATTY

SEQ ID NO: 65057 - DNA, 1266 bp, Triticum aestivum
  misc_feature (1)..(1266): Ceres Seq. ID no. 13503463
aaattcgtctgtgccgaaacccctctccaatctgagatctcctcacgagcgcgacccggagccgaaaccctagagtagagcaggggcggcggccatggccatcatctcggacatccaggaggaggaggcgccgccgcagcagccgcaagcggccccggccccggcggcggtcgacgtggacctggaggtcctcgaggcggtgctcgagcgcaagggcggcgcgctcccgttcctccacgcggccatcgacgtcgcgcaccggcgctccgacctcttccgcgacccctccgcggtcggcaagatcaccgcgatggcctcggcgtgcagggcgcaggtggaggcggaggagaggaaggccagggatgccaagaggaaggcggcggagctggagaaggcagcggcggccgagaaggagagggtggtcaaggccgcggccgagaaggagaagcgggagagctcggtggtgacggaggagcggggtgcagggagctcggcggagaaggatggcagcacggaggtggagaagaaggagagcaaggcgaacaaaccaaatgctggcaatggtcttgatatggagaagtattcctggactcagcagttaccagaggttaatgtcaatgttcctgttcctgaaggaacaaagtcaaggtttgttgtctgtgagatcaagaaggatcatctgaaggttgggttgaagggccagcctcctatcattgatggtgagcttcacaagccagttaaagtggatgactgcttctggagcatagaggatgggaaagcactgtctatactgctgacaaagcacaatcaaatggagtggtggaaatctgtgatcaaaggtgaccctgaagtcgacacccagaaggcggaaccagagactagcaagctttctgatctggatcctgagactaggcaaactgtggagaagatgatgtttgaccagcgccagaagcagatgggcctgccaacaagtgatgaaatgcagaagcaagacatgctcaagaagttcatgtctcagcacccggagatggacttctcaagggcgaagatagcttgagattggttggatccaaggggatgagaagtttttgatggataaatcgcatctatcctagttcttttcagtttcgggtgccttgtggttaagtgtctgattaaggtcgcgaaggacatggttttcgtgatgctttggaaatataagtgaactatgttttctgttgttggaactgatcgattgcctaattttctgtagtttgtgtttcgtcc

SEQ ID NO: 65058 - protein, 320 aa, Triticum aestivum
  peptide (1)..(320): Ceres Seq. ID no. 15223227
  misc_feature (153)..(304): Pfam Name: Nuclear movement protein Pfam Description: Nuclear movement protein
  misc_feature (78)..(318): Homolog of NCBI NO: 5729953 NR Description: nuclear distribution gene C homolog (A. nidulans)
  misc_feature (79)..(320): Homolog of NCBI NO: 28279157 NR Description: Similar to nuclear distribution gene C homolog
  misc_feature (78)..(318): Homolog of NCBI NO: 8394272 NR Description: nuclear distribution gene C homolog [Rattus
  misc_feature (78)..(318): Homolog of NCBI NO: 6754910 NR Description: nuclear distribution gene C homolog [Mus
  misc_feature (29)..(319): Homolog of NCBI NO: 39579898 NR Description: Hypothetical protein CBG24281 [Caenorhabditis
  misc_feature (30)..(319): Homolog of NCBI NO: 17553534 NR Description: Aspergillus nidulans NUclear Distribution gene C evolutionarily conserved nuclear migration gene required for
  misc_feature (44)..(318): Homolog of NCBI NO: 15234308 NR Description: expressed protein [Arabidopsis thaliana]
  misc_feature (44)..(318): Homolog of NCBI NO: 30524691 NR Description: salt tolerance protein 5 [Beta vulgaris]
  misc_feature (1)..(318): Homolog of NCBI NO: 15238732 NR Description: expressed protein [Arabidopsis thaliana]
  misc_feature (1)..(318): Homolog of NCBI NO: 21593329 NR Description: unknown [Arabidopsis thaliana]
MAIISDIQEEEAPPQQPQAAPAPAAVDVDLEVLEAVLERKGGALPFLHAAIDVAHRRSDLFRDPSAVGKITAMASACRAQVEAEERKARDAKRKAAELEKAAAAEKERVVKAAAEKEKRESSVVTEERGAGSSAEKDGSTEVEKKESKANKPNAGNGLDMEKYSWTQQLPEVNVNVPVPEGTKSRFVVCEIKKDHLKVGLKGQPPIIDGELHKPVKVDDCFWSIEDGKALSILLTKHNQMEWWKSVIKGDPEVDTQKAEPETSKLSDLDPETRQTVEKMMFDQRQKQMGLPTSDEMQKQDMLKKFMSQHPEMDFSRAKIA

SEQ ID NO: 65059 - protein, 248 aa, Triticum aestivum
  peptide (1)..(248): Ceres Seq. ID no. 15223228
  misc_feature (81)..(232): Pfam Name: Nuclear movement protein Pfam Description: Nuclear movement protein
  misc_feature (6)..(246): Homolog of NCBI NO: 5729953 NR Description: nuclear distribution gene C homolog (A. nidulans)
  misc_feature (7)..(248): Homolog of NCBI NO: 28279157 NR Description: Similar to nuclear distribution gene C homolog
  misc_feature (6)..(246): Homolog of NCBI NO: 8394272 NR Description: nuclear distribution gene C homolog [Rattus
  misc_feature (6)..(246): Homolog of NCBI NO: 6754910 NR Description: nuclear distribution gene C homolog [Mus
  misc_feature (1)..(247): Homolog of NCBI NO: 39579898 NR Description: Hypothetical protein CBG24281 [Caenorhabditis
  misc_feature (1)..(247): Homolog of NCBI NO: 17553534 NR Description: Aspergillus nidulans NUclear Distribution gene C evolutionarily conserved nuclear migration gene required for
  misc_feature (1)..(246): Homolog of NCBI NO: 15234308 NR Description: expressed protein [Arabidopsis thaliana]
  misc_feature (1)..(246): Homolog of NCBI NO: 30524691 NR Description: salt tolerance protein 5 [Beta vulgaris]
  misc_feature (1)..(246): Homolog of NCBI NO: 15238732 NR Description: expressed protein [Arabidopsis thaliana]
  misc_feature (1)..(246): Homolog of NCBI NO: 21593329 NR Description: unknown [Arabidopsis thaliana]
MASACRAQVEAEERKARDAKRKAAELEKAAAAEKERVVKAAAEKEKRESSVVTEERGAGSSAEKDGSTEVEKKESKANKPNAGNGLDMEKYSWTQQLPEVNVNVPVPEGTKSRFVVCEIKKDHLKVGLKGQPPIIDGELHKPVKVDDCFWSIEDGKALSILLTKHNQMEWWKSVIKGDPEVDTQKAEPETSKLSDLDPETRQTVEKMMFDQRQKQMGLPTSDEMQKQDMLKKFMSQHPEMDFSRAKIA

SEQ ID NO: 65060 - protein, 161 aa, Triticum aestivum
  peptide (1)..(161): Ceres Seq. ID no. 15223229
  misc_feature (1)..(145): Pfam Name: Nuclear movement protein Pfam Description: Nuclear movement protein
  misc_feature (1)..(159): Homolog of NCBI NO: 5729953 NR Description: nuclear distribution gene C homolog (A. nidulans)
  misc_feature (1)..(161): Homolog of NCBI NO: 28279157 NR Description: Similar to nuclear distribution gene C homolog
  misc_feature (1)..(159): Homolog of NCBI NO: 8394272 NR Description: nuclear distribution gene C homolog [Rattus
  misc_feature (1)..(159): Homolog of NCBI NO: 6754910 NR Description: nuclear distribution gene C homolog [Mus
  misc_feature (1)..(160): Homolog of NCBI NO: 39579898 NR Description: Hypothetical protein CBG24281 [Caenorhabditis
  misc_feature (1)..(160): Homolog of NCBI NO: 17553534 NR Description: Aspergillus nidulans NUclear Distribution gene C evolutionarily conserved nuclear migration gene required for
  misc_feature (1)..(159): Homolog of NCBI NO: 15234308 NR Description: expressed protein [Arabidopsis thaliana]
  misc_feature (1)..(159): Homolog of NCBI NO: 30524691 NR Description: salt tolerance protein 5 [Beta vulgaris]
  misc_feature (1)..(159): Homolog of NCBI NO: 15238732 NR Description: expressed protein [Arabidopsis thaliana]
  misc_feature (1)..(159): Homolog of NCBI NO: 21593329 NR Description: unknown [Arabidopsis thaliana]
MEKYSWTQQLPEVNVNVPVPEGTKSRFVVCEIKKDHLKVGLKGQPPIIDGELHKPVKVDDCFWSIEDGKALSILLTKHNQMEWWKSVIKGDPEVDTQKAEPETSKLSDLDPETRQTVEKMMFDQRQKQMGLPTSDEMQKQDMLKKFMSQHPEMDFSRAKIA

SEQ ID NO: 65061 - DNA, 1675 bp, Triticum aestivum
  misc_feature (1)..(1675): Ceres Seq. ID no. 14302228
accacatattttcgtggacgccttgagtgcatggttaccagcgttaccagtacggcgccagaagcccataacgctcgtctttcttcgacgacatggccgtctcgcctcttgcactcgtgctcctcctcctcgccttcgccgtgtctctcttgtacatcctccgtaggcccgcccctctgcgcagcggcagcgatggaggacggaggcatcttccgccgtcaccgcgcggcctcccgctgctcggccacctacatctcctcggctcgttgccgcaccgggccctgcggtccctggccgccgcacacggcccggtcctgctgctccggctcggccgcgtgcccgccgtggtcgtgtcctcgccggccgccgcggaggaggtgatgagggcccgcgacctggccttcgcgagccggccccggagcgccatggccgaccggctcctctacgggcgcgacgtagcgttcgcgccctacggcgagtactggcgccaggcgcgccgcgtgtgcgtggtccacctcctcagcccgctccgcatcctctccttccgcggcgtccggggaggaggaggccgccgcgctggtcgagcgcgtccgcggagcggcggcgggcggcgccgctgtggacctgtgtgagctcctcgtcgctacgccaacacggtggtctcgcgcgccgcgttcggggacgacagcgcgcgcggcctgtatgaggaaggcaacaaggaacgcgagctgaggaaggtgttcaacgacttccaggagctgctcggcacggcgcctctgggggagctcctgccgtggctggggtggttggacgccgtgagggggatggaggggaagatcagacggacgttcaaggcgctcgacggtgtgctcgagaaggtgatcggcgaccaccgccgccggcgtcaagccggccagcagacgggagatgacggcggcgatcacagggatttcgtggacgtgttgttggacgtgagcgatactgatgacgaagctggcatgcgtctcagcacgaccgaaatcaaggccatcattttggacatgttcgcggcgggcacggacacgacgagcacggcaatggagtgggccatggcggaggtcatcacgcacccagacagcatgcgtaagctccaggacgagctcagggcggccgtcggtggctccgggcacgtcatcaccgaggaccacatcgacaagctgcactacctcaaggcggtggtcaaggagacgctacgcctgcacccaccgatcccgctcctcgtgccccgagagccacaagacgacgccgagatactcggccaccacgtcccggcgggcacgcgggtggtcatcaacgcgtgggccgtcggccgggacccggcggcgtgggagcgcgccgaggagttcgtaccggagaggtttctcgacggcgcggtggactacaaggggcaggacttccagctgataccgttcggtgctgggcggcgggggtgccccggggtcggattcgccgcggcgaccgttgagatggcgctggcgagtttgatgtaccatttcgactgggagccggccggggcgtcgctggacatgcgcgaggtgaacgggctcgccgtgcatctcaagtccggcctgccgcttgtcgctaaactgcggtttcgttagataaacttgttgctatgcaagaagaacaataatcc

SEQ ID NO: 65062 - protein, 271 aa, Triticum aestivum
  peptide (1)..(271): Ceres Seq. ID no. 14302229
  misc_feature (1)..(266): Homolog of NCBI NO: 584863 NR Description: Cytochrome P450 71A4 (CYPLXXIA4) (P-450EG2)
  misc_feature (1)..(267): Homolog of NCBI NO: 40645046 NR Description: cytochrome P450 [Asparagus officinalis]
  misc_feature (1)..(265): Homolog of NCBI NO: 5915814 NR Description: Cytochrome P450 71A6
  misc_feature (1)..(243): Homolog of NCBI NO: 117188 NR Description: CYTOCHROME P450 71A1 (CYPLXXIA1) (ARP-2)
  misc_feature (1)..(267): Homolog of NCBI NO: 25282608 NR Description: cytochrome P-450LXXIA1 [similarity] - avocado
  misc_feature (1)..(181): Homolog of NCBI NO: 34904238 NR Description: putative cytochrome P-450LXXIA1 (cyp71A1) family
  misc_feature (60)..(245): Homolog of NCBI NO: 34904240 NR Description: putative cytochrome P-450LXXIA1 (cyp71A1) family
  misc_feature (1)..(71): Homolog of NCBI NO: 34904240 NR Description: putative cytochrome P-450LXXIA1 (cyp71A1) family
  misc_feature (1)..(242): Homolog of NCBI NO: 34904246 NR Description: putative cytochrome P-450LXXIA1 (cyp71A1) family
  misc_feature (1)..(270): Homolog of NCBI NO: 34904242 NR Description: putative cytochrome P-450LXXIA1 (cyp71A1) family
MEGKIRRTFKALDGVLEKVIGDHRRRRQAGQQTGDDGGDHRDFVDVLLDVSDTDDEAGMRLSTTEIKAIILDMFAAGTDTTSTAMEWAMAEVITHPDSMRKLQDELRAAVGGSGHVITEDHIDKLHYLKAVVKETLRLHPPIPLLVPREPQDDAEILGHHVPAGTRVVINAWAVGRDPAAWERAEEFVPERFLDGAVDYKGQDFQLIPFGAGRRGCPGVGFAAATVEMALASLMYHFDWEPAGASLDMREVNGLAVHLKSGLPLVAKLRFR

SEQ ID NO: 65063 - protein, 213 aa, Triticum aestivum
  peptide (1)..(213): Ceres Seq. ID no. 14302230
  misc_feature (1)..(208): Homolog of NCBI NO: 584863 NR Description: Cytochrome P450 71A4 (CYPLXXIA4) (P-450EG2)
  misc_feature (1)..(209): Homolog of NCBI NO: 40645046 NR Description: cytochrome P450 [Asparagus officinalis]
  misc_feature (1)..(207): Homolog of NCBI NO: 5915814 NR Description: Cytochrome P450 71A6
  misc_feature (1)..(185): Homolog of NCBI NO: 117188 NR Description: CYTOCHROME P450 71A1 (CYPLXXIA1) (ARP-2)
  misc_feature (1)..(209): Homolog of NCBI NO: 25282608 NR Description: cytochrome P-450LXXIA1 [similarity] - avocado
  misc_feature (1)..(123): Homolog of NCBI NO: 34904238 NR Description: putative cytochrome P-450LXXIA1 (cyp71A1) family
  misc_feature (2)..(187): Homolog of NCBI NO: 34904240 NR Description: putative cytochrome P-450LXXIA1 (cyp71A1) family
  misc_feature (1)..(13): Homolog of NCBI NO: 34904240 NR Description: putative cytochrome P-450LXXIA1 (cyp71A1) family
  misc_feature (1)..(184): Homolog of NCBI NO: 34904246 NR Description: putative cytochrome P-450LXXIA1 (cyp71A1) family
  misc_feature (1)..(212): Homolog of NCBI NO: 34904242 NR Description: putative cytochrome P-450LXXIA1 (cyp71A1) family
MRLSTTEIKAIILDMFAAGTDTTSTAMEWAMAEVITHPDSMRKLQDELRAAVGGSGHVITEDHIDKLHYLKAVVKETLRLHPPIPLLVPREPQDDAEILGHHVPAGTRVVINAWAVGRDPAAWERAEEFVPERFLDGAVDYKGQDFQLIPFGAGRRGCPGVGFAAATVEMALASLMYHFDWEPAGASLDMREVNGLAVHLKSGLPLVAKLRFR

SEQ ID NO: 65064 - protein, 199 aa, Triticum aestivum
  peptide (1)..(199): Ceres Seq. ID no. 14302231
  misc_feature (1)..(194): Homolog of NCBI NO: 584861 NR Description: Cytochrome P450 71A2 (CYPLXXIA2) (P-450EG4)
  misc_feature (1)..(194): Homolog of NCBI NO: 584863 NR Description: Cytochrome P450 71A4 (CYPLXXIA4) (P-450EG2)
  misc_feature (1)..(195): Homolog of NCBI NO: 40645046 NR Description: cytochrome P450 [Asparagus officinalis]
  misc_feature (1)..(193): Homolog of NCBI NO: 5915814 NR Description: Cytochrome P450 71A6
  misc_feature (1)..(171): Homolog of NCBI NO: 117188 NR Description: CYTOCHROME P450 71A1 (CYPLXXIA1) (ARP-2)
  misc_feature (1)..(195): Homolog of NCBI NO: 25282608 NR Description: cytochrome P-450LXXIA1 [similarity] - avocado
  misc_feature (1)..(109): Homolog of NCBI NO: 34904238 NR Description: putative cytochrome P-450LXXIA1 (cyp71A1) family
  misc_feature (1)..(173): Homolog of NCBI NO: 34904240 NR Description: putative cytochrome P-450LXXIA1 (cyp71A1) family
  misc_feature (1)..(170): Homolog of NCBI NO: 34904246 NR Description: putative cytochrome P-450LXXIA1 (cyp71A1) family
  misc_feature (1)..(198): Homolog of NCBI NO: 34904242 NR Description: putative cytochrome P-450LXXIA1 (cyp71A1) family
MFAAGTDTTSTAMEWAMAEVITHPDSMRKLQDELRAAVGGSGHVITEDHIDKLHYLKAVVKETLRLHPPIPLLVPREPQDDAEILGHHVPAGTRVVINAWAVGRDPAAWERAEEFVPERFLDGAVDYKGQDFQLIPFGAGRRGCPGVGFAAATVEMALASLMYHFDWEPAGASLDMREVNGLAVHLKSGLPLVAKLRFR

SEQ ID NO: 65065 - DNA, 1469 bp, Triticum aestivum
  misc_feature (1)..(1469): Ceres Seq. ID no. 13598543
aaaacccccgaaacccccaaacgcacggcaggccatggagctgtcgatgagcggcggcgcgctgcggaccttctcccgcttcgtcacctgcctcgcccgcatcggctccgacctcgtcttccaggcctaccccgacaagctggagctgcacacgctcaacagctcgcggtcggcgttcgcgtccgtctccctcacgcgcgacttcttcgaccacttccacctccccgccgccgccgcgccgtcgtccacgccgctccagtgcagcgtcctcctcaagtccgtcctcgctgtgctccgcacgcccacctccgcggtcgaccgcctcaacgcttctctcccaaacccccaagcgtccaagctcgagttcgtcatccactgcatcagcgggcgtaagaagacgcaccggatctcgtgcagcgccgagtccgacgtgcagactctggcgctcgaccgcaacggcttccccagccgcctcgccatacggccacgggatctcacgcgcctgctttccaatttccagtcctcgctgcaggagctcacctttattgccacccagcctgctgcacggttgcctggcgtcgatgatgccactggggggaaggcagtcgagctcctaagctacatcgacccgaccaaagatgactacgacagtaggctgcacacacaactgtggatcgatccagcagaggagttcttggagtatgagcatgctggtgatcccgtagatgtcacatttggggtgaaagaattgaaggcatttttaacattttgtgaaggatgtgaggttgatattctcctattctatcagaaggctggcgaacctgtcctgttggctccaagatttggaatcgatgatggttcaagttctaatttcgatgtaactctagttctagccactatgcttgtatcacaactaaatgatggcagtgtgcctcagcagccacctacgtcagcacatcatgcagaagaaccaagggctgccgctgctgcaccatcaccagttcccgaaaatgtctcaaaccatacaagaatatggtcagagctttcaggtgttactcccaaaagctttgaagctaacgcagaaaatcgtgcccagatggagagaaatggaagagctaacgtgctgaatgacacatcagtgcttcccaataccaatgctccctgcaagctaccagtgacagataacgcaaactatatagagcagcctgtgcaaatggatcacttggaagagcctcctgaagttgtggttgataaccctcgttcgcagcatcacccaagcaactgggtaggtgccgacgaagacgatgatgatgaagaagatgaggagctttttgtccaaacaacacctcactacatggactaaggaccgatgctgattctgaatattgcaggtgtacagatcatgtgagtgtttctactgggcatcacggagttcctggcaggggtagggtggcgagaacaattattgt

SEQ ID NO: 65066 - protein, 453 aa, Triticum aestivum
  peptide (1)..(453): Ceres Seq. ID no. 13598544
  misc_feature (12)..(355): Pfam Name: Rad9 Pfam Description: Rad9
  misc_feature (12)..(180): Homolog of NCBI NO: 34861801 NR Description: similar to cell cycle checkpoint control protein
  misc_feature (12)..(180): Homolog of NCBI NO: 4759022 NR Description: RAD9 homolog; cell cycle checkpoint control
  misc_feature (12)..(180): Homolog of NCBI NO: 15928780 NR Description: RAD9 (S. pombe) homolog [Homo sapiens]
  misc_feature (12)..(278): Homolog of NCBI NO: 34148784 NR Description: RAD9B [Mus musculus]
  misc_feature (12)..(179): Homolog of NCBI NO: 28277913 NR Description: Similar to RAD9 homolog (S. pombe) [Danio rerio]
  misc_feature (16)..(285): Homolog of NCBI NO: 34148782 NR Description: RAD9B [Homo sapiens]
  misc_feature (274)..(453): Homolog of NCBI NO: 7596764 NR Description: hypothetical protein [Arabidopsis thaliana]
  misc_feature (12)..(244): Homolog of NCBI NO: 7596764 NR Description: hypothetical protein [Arabidopsis thaliana]
  misc_feature (12)..(453): Homolog of NCBI NO: 30679518 NR Description: expressed protein [Arabidopsis thaliana]
  misc_feature (12)..(453): Homolog of NCBI NO: 20152532 NR Description: putative auxin response factor 75 [Arabidopsis
KPPKPPNARQAMELSMSGGALRTFSRFVTCLARIGSDLVFQAYPDKLELHTLNSSRSAFASVSLTRDFFDHFHLPAAAAPSSTPLQCSVLLKSVLAVLRTPTSAVDRLNASLPNPQASKLEFVIHCISGRKKTHRISCSAESDVQTLALDRNGFPSRLAIRPRDLTRLLSNFQSSLQELTFIATQPAARLPGVDDATGGKAVELLSYIDPTKDDYDSRLHTQLWIDPAEEFLEYEHAGDPVDVTFGVKELKAFLTFCEGCEVDILLFYQKAGEPVLLAPRFGIDDGSSSNFDVTLVLATMLVSQLNDGSVPQQPPTSAHHAEEPRAAAAAPSPVPENVSNHTRIWSELSGVTPKSFEANAENRAQMERNGRANVLNDTSVLPNTNAPCKLPVTDNANYIEQPVQMDHLEEPPEVVVDNPRSQHHPSNWVGADEDDDDEEDEELFVQTTPHYMD

SEQ ID NO: 65067 - protein, 442 aa, Triticum aestivum
  peptide (1)..(442): Ceres Seq. ID no. 13598545
  misc_feature (1)..(344): Pfam Name: Rad9 Pfam Description: Rad9
  misc_feature (1)..(169): Homolog of NCBI NO: 34861801 NR Description: similar to cell cycle checkpoint control protein
  misc_feature (1)..(169): Homolog of NCBI NO: 4759022 NR Description: RAD9 homolog; cell cycle checkpoint control
  misc_feature (1)..(169): Homolog of NCBI NO: 15928780 NR Description: RAD9 (S. pombe) homolog [Homo sapiens]
  misc_feature (1)..(267): Homolog of NCBI NO: 34148784 NR Description: RAD9B [Mus musculus]
  misc_feature (1)..(168): Homolog of NCBI NO: 28277913 NR Description: Similar to RAD9 homolog (S. pombe) [Danio rerio]
  misc_feature (5)..(274): Homolog of NCBI NO: 34148782 NR Description: RAD9B [Homo sapiens]
  misc_feature (263)..(442): Homolog of NCBI NO: 7596764 NR Description: hypothetical protein [Arabidopsis thaliana]
  misc_feature (1)..(233): Homolog of NCBI NO: 7596764 NR Description: hypothetical protein [Arabidopsis thaliana]
  misc_feature (1)..(442): Homolog of NCBI NO: 30679518 NR Description: expressed protein [Arabidopsis thaliana]
  misc_feature (1)..(442): Homolog of NCBI NO: 20152532 NR Description: putative auxin response factor 75 [Arabidopsis
MELSMSGGALRTFSRFVTCLARIGSDLVFQAYPDKLELHTLNSSRSAFASVSLTRDFFDHFHLPAAAAPSSTPLQCSVLLKSVLAVLRTPTSAVDRLNASLPNPQASKLEFVIHCISGRKKTHRISCSAESDVQTLALDRNGFPSRLAIRPRDLTRLLSNFQSSLQELTFIATQPAARLPGVDDATGGKAVELLSYIDPTKDDYDSRLHTQLWIDPAEEFLEYEHAGDPVDVTFGVKELKAFLTFCEGCEVDILLFYQKAGEPVLLAPRFGIDDGSSSNFDVTLVLATMLVSQLNDGSVPQQPPTSAHHAEEPRAAAAAPSPVPENVSNHTRIWSELSGVTPKSFEANAENRAQMERNGRANVLNDTSVLPNTNAPCKLPVTDNANYIEQPVQMDHLEEPPEVVVDNPRSQHHPSNWVGADEDDDDEEDEELFVQTTPHYMD

SEQ ID NO: 65068 - protein, 438 aa, Triticum aestivum
  peptide (1)..(438): Ceres Seq. ID no. 13598546
  misc_feature (1)..(340): Pfam Name: Rad9 Pfam Description: Rad9
  misc_feature (1)..(165): Homolog of NCBI NO: 34861801 NR Description: similar to cell cycle checkpoint control protein
  misc_feature (1)..(165): Homolog of NCBI NO: 4759022 NR Description: RAD9 homolog; cell cycle checkpoint control
  misc_feature (1)..(165): Homolog of NCBI NO: 15928780 NR Description: RAD9 (S. pombe) homolog [Homo sapiens]
  misc_feature (1)..(263): Homolog of NCBI NO: 34148784 NR Description: RAD9B [Mus musculus]
  misc_feature (1)..(164): Homolog of NCBI NO: 28277913 NR Description: Similar to RAD9 homolog (S. pombe) [Danio rerio]
  misc_feature (1)..(270): Homolog of NCBI NO: 34148782 NR Description: RAD9B [Homo sapiens]
  misc_feature (259)..(438): Homolog of NCBI NO: 7596764 NR Description: hypothetical protein [Arabidopsis thaliana]
  misc_feature (1)..(229): Homolog of NCBI NO: 7596764 NR Description: hypothetical protein [Arabidopsis thaliana]
  misc_feature (1)..(438): Homolog of NCBI NO: 30679518 NR Description: expressed protein [Arabidopsis thaliana]
  misc_feature (1)..(438): Homolog of NCBI NO: 20152532 NR Description: putative auxin response factor 75 [Arabidopsis
MSGGALRTFSRFVTCLARIGSDLVFQAYPDKLELHTLNSSRSAFASVSLTRDFFDHFHLPAAAAPSSTPLQCSVLLKSVLAVLRTPTSAVDRLNASLPNPQASKLEFVIHCISGRKKTHRISCSAESDVQTLALDRNGFPSRLAIRPRDLTRLLSNFQSSLQELTFIATQPAARLPGVDDATGGKAVELLSYIDPTKDDYDSRLHTQLWIDPAEEFLEYEHAGDPVDVTFGVKELKAFLTFCEGCEVDILLFYQKAGEPVLLAPRFGIDDGSSSNFDVTLVLATMLVSQLNDGSVPQQPPTSAHHAEEPRAAAAAPSPVPENVSNHTRIWSELSGVTPKSFEANAENRAQMERNGRANVLNDTSVLPNTNAPCKLPVTDNANYIEQPVQMDHLEEPPEVVVDNPRSQHHPSNWVGADEDDDDEEDEELFVQTTPHYMD

SEQ ID NO: 65069 - DNA, 1321 bp, Triticum aestivum
  misc_feature (1)..(1321): Ceres Seq. ID no. 13597462
aattggttgggcaaactctgtttcgacacagcctcgccatttcgtcgaacacgtggtagtgcgtcgcaccggcccttccgcaatggcctccttcctcgtcgcccgccgcctcctctgccctgcctccgcccggcgcctcctcccatgcacttccccgccaccttctgcccccgctgctctctgctggctgtccaccgacgcctcgccctcaccgcctcttcccgtcccccctctggagcccacagtcgaccctcccaagaaggatggagcctccttctccgccggttccggcgctggaggggcctaccggactggacagggagctgcatcggggggtcgccgatctggtggcgcggggtacgaggaggagcagcagaaggtcctccgcgcgtcgcttctccacgtgccgaggatgggatggagcgagtcggccatgatcgcgggtgcgagggacgtggccatgtcgccggccatcgttggtgccttcccaaggaaggaggctgcgctagttgagtttttcatggatgactgccttcaacaactcatggatcgcattgatgctggtgagggagagcttttgaaaaacttgatgctcactgagagactatctaggcttgttcggatgaggcttgagatgcagacaccttacatatcaaagtggcctcaagcgctgagcattcagtcccaaccagcaaatgtctcaacaagcttaaagcagagagcagtccttgttgatgagatttggcatgctgctggagatgctggatcagatattgattggtatgtgaaacgtactgtgcttggtggcatctactcagcctcagaggtgtacatgttaacagataattctccagagtttcacgacacatggacatttgtgaatcgccgcatcaaagatgctcttgatttgcagaaatcttataaggaggtcgcttatctaaccgaaaccctgggagcagggatcggtggctccatacagggcgtcctgaacaaggttttccagaaatgaaaaaacttgcctttgcaggctgccttctcggcatttccgccaccactttcttatgtcacgttaagattctatgacattgtatatagtactctcttttacaaacaaacgctgttagggtagccaagaagctatttagtcggtggtcagaggtcagaggtcagttgagttgttgattagtcgtcattgcgcaattctgctacaggttggcgaaaaatgtgtgaactctacagactctagtccatgtgtcatgtgcgagttgctgcaaacagaacaagacactcgtggctttgcatggacacgacttggcattcg

SEQ ID NO: 65070 - protein, 335 aa, Triticum aestivum
  peptide (1)..(335): Ceres Seq. ID no. 13597463
  misc_feature (90)..(316): Homolog of NCBI NO: 18447632 NR Description: SD02734p [Drosophila melanogaster]
  misc_feature (120)..(324): Homolog of NCBI NO: 6841302 NR Description: HSPC326 [Homo sapiens]
  misc_feature (120)..(309): Homolog of NCBI NO: 34851240 NR Description: similar to Polymerase (RNA) II (DNA directed)
  misc_feature (90)..(316): Homolog of NCBI NO: 24586344 NR Description: CG30493-PB [Drosophila melanogaster]
  misc_feature (47)..(227): Homolog of NCBI NO: 14532534 NR Description: T29M8.1/T29M8.1 [Arabidopsis thaliana]
  misc_feature (120)..(324): Homolog of NCBI NO: 40789233 NR Description: hypothetical protein DKFZp434K046 [Homo sapiens]
  misc_feature (120)..(324): Homolog of NCBI NO: 33859690 NR Description: RIKEN cDNA 2310005O14 [Mus musculus]
  misc_feature (47)..(283): Homolog of NCBI NO: 8778288 NR Description: F14D16.30 [Arabidopsis thaliana]
  misc_feature (47)..(334): Homolog of NCBI NO: 21593282 NR Description: unknown [Arabidopsis thaliana]
  misc_feature (47)..(334): Homolog of NCBI NO: 18394701 NR Description: expressed protein [Arabidopsis thaliana]
IGWANSVSTQPRHFVEHVVVRRTGPSAMASFLVARRLLCPASARRLLPCTSPPPSAPAALCWLSTDASPSPPLPVPPLEPTVDPPKKDGASFSAGSGAGGAYRTGQGAASGGRRSGGAGYEEEQQKVLRASLLHVPRMGWSESAMIAGARDVAMSPAIVGAFPRKEAALVEFFMDDCLQQLMDRIDAGEGELLKNLMLTERLSRLVRMRLEMQTPYISKWPQALSIQSQPANVSTSLKQRAVLVDEIWHAAGDAGSDIDWYVKRTVLGGIYSASEVYMLTDNSPEFHDTWTFVNRRIKDALDLQKSYKEVAYLTETLGAGIGGSIQGVLNKVFQK

SEQ ID NO: 65071 - protein, 308 aa, Triticum aestivum
  peptide (1)..(308): Ceres Seq. ID no. 13597464
  misc_feature (63)..(289): Homolog of NCBI NO: 18447632 NR Description: SD02734p [Drosophila melanogaster]
  misc_feature (93)..(297): Homolog of NCBI NO: 6841302 NR Description: HSPC326 [Homo sapiens]
  misc_feature (93)..(282): Homolog of NCBI NO: 34851240 NR Description: similar to Polymerase (RNA) II (DNA directed)
  misc_feature (63)..(289): Homolog of NCBI NO: 24586344 NR Description: CG30493-PB [Drosophila melanogaster]
  misc_feature (20)..(200): Homolog of NCBI NO: 14532534 NR Description: T29M8.1/T29M8.1 [Arabidopsis thaliana]
  misc_feature (93)..(297): Homolog of NCBI NO: 40789233 NR Description: hypothetical protein DKFZp434K046 [Homo sapiens]
  misc_feature (93)..(297): Homolog of NCBI NO: 33859690 NR Description: RIKEN cDNA 2310005O14 [Mus musculus]
  misc_feature (20)..(256): Homolog of NCBI NO: 8778288 NR Description: F14D16.30 [Arabidopsis thaliana]
  misc_feature (20)..(307): Homolog of NCBI NO: 21593282 NR Description: unknown [Arabidopsis thaliana]
  misc_feature (20)..(307): Homolog of NCBI NO: 18394701 NR Description: expressed protein [Arabidopsis thaliana]
MASFLVARRLLCPASARRLLPCTSPPPSAPAALCWLSTDASPSPPLPVPPLEPTVDPPKKDGASFSAGSGAGGAYRTGQGAASGGRRSGGAGYEEEQQKVLRASLLHVPRMGWSESAMIAGARDVAMSPAIVGAFPRKEAALVEFFMDDCLQQLMDRIDAGEGELLKNLMLTERLSRLVRMRLEMQTPYISKWPQALSIQSQPANVSTSLKQRAVLVDEIWHAAGDAGSDIDWYVKRTVLGGIYSASEVYMLTDNSPEFHDTWTFVNRRIKDALDLQKSYKEVAYLTETLGAGIGGSIQGVLNKVFQK

SEQ ID NO: 65072 - protein, 198 aa, Triticum aestivum
  peptide (1)..(198): Ceres Seq. ID no. 13597465
  misc_feature (1)..(179): Homolog of NCBI NO: 18447632 NR Description: SD02734p [Drosophila melanogaster]
  misc_feature (1)..(187): Homolog of NCBI NO: 6841302 NR Description: HSPC326 [Homo sapiens]
  misc_feature (1)..(172): Homolog of NCBI NO: 34851240 NR Description: similar to Polymerase (RNA) II (DNA directed)
  misc_feature (1)..(179): Homolog of NCBI NO: 24586344 NR Description: CG30493-PB [Drosophila melanogaster]
  misc_feature (1)..(90): Homolog of NCBI NO: 14532534 NR Description: T29M8.1/T29M8.1 [Arabidopsis thaliana]
  misc_feature (1)..(187): Homolog of NCBI NO: 40789233 NR Description: hypothetical protein DKFZp434K046 [Homo sapiens]
  misc_feature (1)..(187): Homolog of NCBI NO: 33859690 NR Description: RIKEN cDNA 2310005O14 [Mus musculus]
  misc_feature (1)..(146): Homolog of NCBI NO: 8778288 NR Description: F14D16.30 [Arabidopsis thaliana]
  misc_feature (1)..(197): Homolog of NCBI NO: 21593282 NR Description: unknown [Arabidopsis thaliana]
  misc_feature (1)..(197): Homolog of NCBI NO: 18394701 NR Description: expressed protein [Arabidopsis thaliana]
MGWSESAMIAGARDVAMSPAIVGAFPRKEAALVEFFMDDCLQQLMDRIDAGEGELLKNLMLTERLSRLVRMRLEMQTPYISKWPQALSIQSQPANVSTSLKQRAVLVDEIWHAAGDAGSDIDWYVKRTVLGGIYSASEVYMLTDNSPEFHDTWTFVNRRIKDALDLQKSYKEVAYLTETLGAGIGGSIQGVLNKVFQK

SEQ ID NO: 65073 - DNA, 1039 bp, Triticum aestivum
  misc_feature (1)..(1039): Ceres Seq. ID no. 13597679
acacacacacacacagagagagagagagagagagagagagagagagagagagagagagagatggcagccgctggagttagcagggagcagaggtggagcctcgccggcgcaaccgcgctggtcaccggaggcagcagaggaattggacatgcaattgtggaggagcttgtcgggctcggggcgcgggtgcacacgtgctccgagaacgcggtggagctggaggggtgccgtcggcggtgggaggagatgaagcttccggtcaccgtctccgtctgcgacgtctccgtgcgagccgagagggagaagctcatggagtcggcgaagcaaaccttcgacggcaagctcgacatactagtaaacaacgtgggacggaatgtggccaaggcgaccgtggagtgcacggcggaggagtactcgcatctcatgtcgactaacttagagtcggcgttccacctaagccagctcgcacacccctttctccgagacgcctccatcgccggaggaggcagcgtcgttaacatctcctcagttgcaagctcacttggctactccaccctcgcactgtactgcatatctaaaggaggagttaaccagcttacaaggagccttgctgccgagtgggctcaagataagatccgtgtcaactccgtcgctccgggtgggatcaataccgagctgcaaaacagtgtggatccaaaggtcatagaaaatacgttgttgagaactccgatgcatcggctcggtgagccagtggaggtggcgtcgatggtgtcgttcctttgcatgccagcagcttcgttcgtcaccggccaggttatgtacgtcgatggaggccgaaccattagtggctaatcaattattccaacctactttagtaaccattaagctcctctcccggttgatcggtgcgaacaaaattaggtttttggttgtgatatgtattctaaaaaggtggttgtgagttgtgagcggtaagaaagttattataaactttcagctatggaaaatttgaaagttgtttggttgagggacaaccgtg

SEQ ID NO: 65074 - protein, 283 aa, Triticum aestivum
  peptide (1)..(283): Ceres Seq. ID no. 13597680
  misc_feature (28)..(283): Homolog of NCBI NO: 25406975 NR Description: protein F22G5.20 [imported] - Arabidopsis
  misc_feature (21)..(283): Homolog of NCBI NO: 15227076 NR Description: short-chain dehydrogenase/reductase family
  misc_feature (22)..(283): Homolog of NCBI NO: 28393476 NR Description: putative tropinone reductase [Arabidopsis
  misc_feature (24)..(283): Homolog of NCBI NO: 15222399 NR Description: short-chain dehydrogenase/reductase family
  misc_feature (22)..(283): Homolog of NCBI NO: 15227060 NR Description: short-chain dehydrogenase/reductase family
  misc_feature (21)..(283): Homolog of NCBI NO: 15227040 NR Description: short-chain dehydrogenase/reductase family
  misc_feature (21)..(281): Homolog of NCBI NO: 34907124 NR Description: putative short chain alcohol dehydrogenase
  misc_feature (29)..(283): Homolog of NCBI NO: 21536785 NR Description: short chain alcohol dehydrogenase-like
  misc_feature (29)..(283): Homolog of NCBI NO: 15239327 NR Description: short-chain dehydrogenase/reductase family
  misc_feature (21)..(282): Homolog of NCBI NO: 34907122 NR Description: putative short chain alcohol dehydrogenase
THTHTEREREREREREREREMAAAGVSREQRWSLAGATALVTGGSRGIGHAIVEELVGLGARVHTCSENAVELEGCRRRWEEMKLPVTVSVCDVSVRAEREKLMESAKQTFDGKLDILVNNVGRNVAKATVECTAEEYSHLMSTNLESAFHLSQLAHPFLRDASIAGGGSVVNISSVASSLGYSTLALYCISKGGVNQLTRSLAAEWAQDKIRVNSVAPGGINTELQNSVDPKVIENTLLRTPMHRLGEPVEVASMVSFLCMPAASFVTGQVMYVDGGRTISG

SEQ ID NO: 65075 - protein, 263 aa, Triticum aestivum
  peptide (1)..(263): Ceres Seq. ID no. 13597681
  misc_feature (8)..(263): Homolog of NCBI NO: 25406975 NR Description: protein F22G5.20 [imported] - Arabidopsis
  misc_feature (1)..(263): Homolog of NCBI NO: 15227076 NR Description: short-chain dehydrogenase/reductase family
  misc_feature (2)..(263): Homolog of NCBI NO: 28393476 NR Description: putative tropinone reductase [Arabidopsis
  misc_feature (4)..(263): Homolog of NCBI NO: 15222399 NR Description: short-chain dehydrogenase/reductase family
  misc_feature (2)..(263): Homolog of NCBI NO: 15227060 NR Description: short-chain dehydrogenase/reductase family
  misc_feature (1)..(263): Homolog of NCBI NO: 15227040 NR Description: short-chain dehydrogenase/reductase family
  misc_feature (1)..(261): Homolog of NCBI NO: 34907124 NR Description: putative short chain alcohol dehydrogenase
  misc_feature (9)..(263): Homolog of NCBI NO: 21536785 NR Description: short chain alcohol dehydrogenase-like
  misc_feature (9)..(263): Homolog of NCBI NO: 15239327 NR Description: short-chain dehydrogenase/reductase family
  misc_feature (1)..(262): Homolog of NCBI NO: 34907122 NR Description: putative short chain alcohol dehydrogenase
MAAAGVSREQRWSLAGATALVTGGSRGIGHAIVEELVGLGARVHTCSENAVELEGCRRRWEEMKLPVTVSVCDVSVRAEREKLMESAKQTFDGKLDILVNNVGRNVAKATVECTAEEYSHLMSTNLESAFHLSQLAHPFLRDASIAGGGSVVNISSVASSLGYSTLALYCISKGGVNQLTRSLAAEWAQDKIRVNSVAPGGINTELQNSVDPKVIENTLLRTPMHRLGEPVEVASMVSFLCMPAASFVTGQVMYVDGGRTISG

SEQ ID NO: 65076 - protein, 201 aa, Triticum aestivum
  peptide (1)..(201): Ceres Seq. ID no. 13597682
  misc_feature (1)..(201): Homolog of NCBI NO: 25406975 NR Description: protein F22G5.20 [imported] - Arabidopsis
  misc_feature (1)..(201): Homolog of NCBI NO: 15227076 NR Description: short-chain dehydrogenase/reductase family
  misc_feature (1)..(201): Homolog of NCBI NO: 28393476 NR Description: putative tropinone reductase [Arabidopsis
  misc_feature (1)..(201): Homolog of NCBI NO: 15222399 NR Description: short-chain dehydrogenase/reductase family
  misc_feature (1)..(201): Homolog of NCBI NO: 15227060 NR Description: short-chain dehydrogenase/reductase family
  misc_feature (1)..(201): Homolog of NCBI NO: 15227040 NR Description: short-chain dehydrogenase/reductase family
  misc_feature (1)..(199): Homolog of NCBI NO: 34907124 NR Description: putative short chain alcohol dehydrogenase
  misc_feature (1)..(201): Homolog of NCBI NO: 21536785 NR Description: short chain alcohol dehydrogenase-like
  misc_feature (1)..(201): Homolog of NCBI NO: 15239327 NR Description: short-chain dehydrogenase/reductase family
  misc_feature (1)..(200): Homolog of NCBI NO: 34907122 NR Description: putative short chain alcohol dehydrogenase
MKLPVTVSVCDVSVRAEREKLMESAKQTFDGKLDILVNNVGRNVAKATVECTAEEYSHLMSTNLESAFHLSQLAHPFLRDASIAGGGSVVNISSVASSLGYSTLALYCISKGGVNQLTRSLAAEWAQDKIRVNSVAPGGINTELQNSVDPKVIENTLLRTPMHRLGEPVEVASMVSFLCMPAASFVTGQVMYVDGGRTISG

SEQ ID NO: 65077 - DNA, 1066 bp, Triticum aestivum
  misc_feature (1)..(1066): Ceres Seq. ID no. 13597466
agtctttttacagcttactcctaccttgtaaagaaaaggttgtcttcttcttcgccgcttccatccatccatcctcaggagtcaggggcctgagctaacctcttggagcttttactccccgagctgccctcccccgttccaagagcaaatcagacgccgaggggagcggccgcagagcgagtcaaccgggcatggcgatggcgagctcgacgaggaggcttgcgtttgtgctactcgtgctggccttttcggccgcgctcgcagagagcagagatgcatatatgaggagcgcaaatcgatatgcctgcatactgacccaggaaagcttccctcttgcaagcagaggggcaggattaacttcggcaaacggaaagctgtgtgtactatgtgagcagtactcaaccgaagctctggtctacctgcgacaaaacgaaacccagaccgagattctcagtgccctccaccacacgtgtgcaagtcttggtcctctaagacagcagtgcatcacgctggttgactactacattcccgctttcttcttggaggtttctgtggttaaacctgaagagctctgtgagtcagcgcacctctgcccaaagggggcggcgactcggtcgtccacgcgaggggaggcctgtggtctatgccatcatgttcttgttgaagttcttaccatgcttaaggatcccaacaccaagctggagatagtcgggcttcttttcaaaacatgcagcaaggcaaagaactatgaaccgcagtgcaagaggcttgtccttgactacatcccactgattctggtgaagacccagaacttccttgagacgacggatgtctgctttgcgacacatgcctgtaaaacaggcatgcaagcaaccattcctctatccgccgctttgtgaagaacaaatgtgtaggaatcatacgcggcaaagaagcctgtaaatgttcttcctatgtttagctcaagcactaccaagctatgaaacttcgggtcgtgtgatgctttgtctgtacaatttgagctctgccctctgaagtttatgcagcaagcctgcagctgtactac

SEQ ID NO: 65078 - protein, 235 aa, Triticum aestivum
  peptide (1)..(235): Ceres Seq. ID no. 15222102
  misc_feature (60)..(98): Pfam Name: Saposin-like type B, region 1 Pfam Description: Saposin-like type B, region 1
  misc_feature (63)..(230): Homolog of NCBI NO: 1513234 NR Description: SapA
  misc_feature (63)..(221): Homolog of NCBI NO: 27819951 NR Description: LD25144p [Drosophila melanogaster]
  misc_feature (60)..(221): Homolog of NCBI NO: 21757548 NR Description: unnamed protein product [Homo sapiens]
  misc_feature (60)..(221): Homolog of NCBI NO: 26324414 NR Description: unnamed protein product [Mus musculus]
  misc_feature (60)..(221): Homolog of NCBI NO: 34878577 NR Description: similar to prosaposin (variant Gaucher disease
  misc_feature (60)..(221): Homolog of NCBI NO: 26364659 NR Description: unnamed protein product [Mus musculus]
  misc_feature (65)..(234): Homolog of NCBI NO: 6942199 NR Description: putative protein [Vitis riparia]
  misc_feature (59)..(221): Homolog of NCBI NO: 15241065 NR Description: expressed protein [Arabidopsis thaliana]
  misc_feature (62)..(221): Homolog of NCBI NO: 15231028 NR Description: expressed protein [Arabidopsis thaliana]
  misc_feature (18)..(234): Homolog of NCBI NO: 34896130 NR Description: P0701D05.19 [Oryza sativa (japonica
MAMASSTRRLAFVLLVLAFSAALAESRDAYMRSANRYACILTQESFPLASRGAGLTSANGKLCVLCEQYSTEALVYLRQNETQTEILSALHHTCASLGPLRQQCITLVDYYIPAFFLEVSVVKPEELCESAHLCPKGAATRSSTRGEACGLCHHVLVEVLTMLKDPNTKLEIVGLLFKTCSKAKNYEPQCKRLVLDYIPLILVKTQNFLETTDVCFATHACKTGMQATIPLSAAL

SEQ ID NO: 65079 - protein, 233 aa, Triticum aestivum
  peptide (1)..(233): Ceres Seq. ID no. 15222103
  misc_feature (58)..(96): Pfam Name: Saposin-like type B, region 1 Pfam Description: Saposin-like type B, region 1
  misc_feature (61)..(228): Homolog of NCBI NO: 1513234 NR Description: SapA
  misc_feature (61)..(219): Homolog of NCBI NO: 27819951 NR Description: LD25144p [Drosophila melanogaster]
  misc_feature (58)..(219): Homolog of NCBI NO: 21757548 NR Description: unnamed protein product [Homo sapiens]
  misc_feature (58)..(219): Homolog of NCBI NO: 26324414 NR Description: unnamed protein product [Mus musculus]
  misc_feature (58)..(219): Homolog of NCBI NO: 34878577 NR Description: similar to prosaposin (variant Gaucher disease
  misc_feature (58)..(219): Homolog of NCBI NO: 26364659 NR Description: unnamed protein product [Mus musculus]
  misc_feature (63)..(232): Homolog of NCBI NO: 6942199 NR Description: putative protein [Vitis riparia]
  misc_feature (57)..(219): Homolog of NCBI NO: 15241065 NR Description: expressed protein [Arabidopsis thaliana]
  misc_feature (60)..(219): Homolog of NCBI NO: 15231028 NR Description: expressed protein [Arabidopsis thaliana]
  misc_feature (16)..(232): Homolog of NCBI NO: 34896130 NR Description: P0701D05.19 [Oryza sativa (japonica
MASSTRRLAFVLLVLAFSAALAESRDAYMRSANRYACILTQESFPLASRGAGLTSANGKLCVLCEQYSTEALVYLRQNETQTEILSALHHTCASLGPLRQQCITLVDYYIPAFFLEVSVVKPEELCESAHLCPKGAATRSSTRGEACGLCHHVLVEVLTMLKDPNTKLEIVGLLFKTCSKAKNYEPQCKRLVLDYIPLILVKTQNFLETTDVCFATHACKTGMQATIPLSAAL

SEQ ID NO: 65080 - protein, 205 aa, Triticum aestivum
  peptide (1)..(205): Ceres Seq. ID no. 15222104
  misc_feature (30)..(68): Pfam Name: Saposin-like type B, region 1 Pfam Description: Saposin-like type B, region 1
  misc_feature (33)..(200): Homolog of NCBI NO: 1513234 NR Description: SapA
  misc_feature (33)..(191): Homolog of NCBI NO: 27819951 NR Description: LD25144p [Drosophila melanogaster]
  misc_feature (30)..(191): Homolog of NCBI NO: 21757548 NR Description: unnamed protein product [Homo sapiens]
  misc_feature (30)..(191): Homolog of NCBI NO: 26324414 NR Description: unnamed protein product [Mus musculus]
  misc_feature (30)..(191): Homolog of NCBI NO: 34878577 NR Description: similar to prosaposin (variant Gaucher disease
  misc_feature (30)..(191): Homolog of NCBI NO: 26364659 NR Description: unnamed protein product [Mus musculus]
  misc_feature (35)..(204): Homolog of NCBI NO: 6942199 NR Description: putative protein [Vitis riparia]
  misc_feature (29)..(191): Homolog of NCBI NO: 15241065 NR Description: expressed protein [Arabidopsis thaliana]
  misc_feature (32)..(191): Homolog of NCBI NO: 15231028 NR Description: expressed protein [Arabidopsis thaliana]
  misc_feature (1)..(204): Homolog of NCBI NO: 34896130 NR Description: P0701D05.19 [Oryza sativa (japonica
MRSANRYACILTQESFPLASRGAGLTSANGKLCVLCEQYSTEALVYLRQNETQTEILSALHHTCASLGPLRQQCITLVDYYIPAFFLEVSVVKPEELCESAHLCPKGAATRSSTRGEACGLCHHVLVEVLTMLKDPNTKLEIVGLLFKTCSKAKNYEPQCKRLVLDYIPLILVKTQNFLETTDVCFATHACKTGMQATIPLSAAL

SEQ ID NO: 65081 - DNA, 1307 bp, Triticum aestivum
  misc_feature (1)..(1307): Ceres Seq. ID no. 13597467
acctagaacatcctaatcaaaaaaaaatttcaaacgcagccgtcgccagcgccccttgccccaaacctaccacgcccaacagcgccgcagccaatccccgaaacccgccgccgccgccgccatgggaaggctgggcgacaagtccgactatgagagcatccgcgaggcccgcatctcggagaacatggcccggatggagatgctcggcctgcgccgctgcgccggggagctgagcgccatctcctccgccccctccccccgcgccgggagcgtcaccccgaggaagaccccgaagccgccgcgggtcctcaccccgctccgccgctcgggccgcctgattgccgccgcgacgccgcccggctccggctctcgccgctccgcgcggctcaacggggactccgtgcagcacaaggcgctgccctacagaggagcggacgccgaggaagaggagcaggaggagaagtgtcccatgtacatcgacaaggagaggctgcgggtgctgcaggagacgcggtgcgacagcaaggcgagggggtccgtgtacgaccccgttctcgggatctgctgccatttctgcaggcagaagaaactctgcggcgaggagggctgcaagcgctgtggggaaggagactttgagcagcaatgcatagggaagacggagtgctcctcttgccattcctcctatgggatcctctgccgtgcttgccttaaagttaggtacggtgaagagatggaagaggtcaggaagaacaagaagtggatgtgccctcactgtgttgaggagaagggtaccaagaaattctggatatgcaacagctccatctgcttgaagaagaggaagatagcaccaaccgggatcgccatattccaagcgcgtgagcaaggatatgcgtcggtcgcacaccttctcatggaccagctgaagagccgcggatcattctgacaacgacgtacgcctgcctggagttccccgcttgctcacttcttcagtgattttagggatgattgatggttgctctggatcttttgtttcgttgacggtttagatggtagacagcttagagtctgttgctgaagaatgtggagctaccaaaaccttctcccagatgttcccagagtgaccttcgctgaagatcgaagcaaggattctgcgtctctcacatgtagcggatggatgagctttgagcttatccttgtatgttctctgttgtttgtaaaacgtcagttgtgtgcacttgtgctgtagaatctatgcttttggaatcattggtgcttcttcagtcaagaaaataaaagtgaatgtcgtc

SEQ ID NO: 65082 - protein, 273 aa, Triticum aestivum
  peptide (1)..(273): Ceres Seq. ID no. 13597468
  misc_feature (163)..(263): Homolog of NCBI NO: 22327451 NR Description: expressed protein [Arabidopsis thaliana]
  misc_feature (163)..(263): Homolog of NCBI NO: 10176837 NR Description: gb|AAF26952.1~gene_id:MBB18.24~strong similarity
  misc_feature (163)..(273): Homolog of NCBI NO: 15220539 NR Description: F12A21.9 [Arabidopsis thaliana]
  misc_feature (128)..(263): Homolog of NCBI NO: 15220396 NR Description: hypothetical protein [Arabidopsis thaliana]
  misc_feature (128)..(263): Homolog of NCBI NO: 9828631 NR Description: F1N21.9 [Arabidopsis thaliana]
  misc_feature (136)..(263): Homolog of NCBI NO: 11360288 NR Description: hypothetical protein DKFZp762L0311.1 - human
  misc_feature (1)..(264): Homolog of NCBI NO: 30690864 NR Description: expressed protein [Arabidopsis thaliana]
  misc_feature (110)..(264): Homolog of NCBI NO: 25407788 NR Description: hypothetical protein AT4g37110 [imported] -
  misc_feature (1)..(114): Homolog of NCBI NO: 13324785 NR Description: hypothetical protein [Oryza sativa]
  misc_feature (26)..(270): Homolog of NCBI NO: 13324785 NR Description: hypothetical protein [Oryza sativa]
MGRLGDKSDYESIREARISENMARMEMLGLRRCAGELSAISSAPSPRAGSVTPRKTPKPPRVLTPLRRSGRLIAAATPPGSGSRRSARLNGDSVQHKALPYRGADAEEEEQEEKCPMYIDKERLRVLQETRCDSKARGSVYDPVLGICCHFCRQKKLCGEEGCKRCGEGDFEQQCIGKTECSSCHSSYGILCRACLKVRYGEEMEEVRKNKKWMCPHCVEEKGTKKFWICNSSICLKKRKIAPTGIAIFQAREQGYASVAHLLMDQLKSRGSF

SEQ ID NO: 65083 - protein, 252 aa, Triticum aestivum
  peptide (1)..(252): Ceres Seq. ID no. 13597469
  misc_feature (142)..(242): Homolog of NCBI NO: 22327451 NR Description: expressed protein [Arabidopsis thaliana]
  misc_feature (142)..(242): Homolog of NCBI NO: 10176837 NR Description: gb|AAF26952.1~gene_id:MBB18.24~strong similarity
  misc_feature (142)..(252): Homolog of NCBI NO: 15220539 NR Description: F12A21.9 [Arabidopsis thaliana]
  misc_feature (107)..(242): Homolog of NCBI NO: 15220396 NR Description: hypothetical protein [Arabidopsis thaliana]
  misc_feature (107)..(242): Homolog of NCBI NO: 9828631 NR Description: F1N21.9 [Arabidopsis thaliana]
  misc_feature (115)..(242): Homolog of NCBI NO: 11360288 NR Description: hypothetical protein DKFZp762L0311.1 - human
  misc_feature (1)..(243): Homolog of NCBI NO: 30690864 NR Description: expressed protein [Arabidopsis thaliana]
  misc_feature (89)..(243): Homolog of NCBI NO: 25407788 NR Description: hypothetical protein AT4g37110 [imported] -
  misc_feature (1)..(93): Homolog of NCBI NO: 13324785 NR Description: hypothetical protein [Oryza sativa]
  misc_feature (5)..(249): Homolog of NCBI NO: 13324785 NR Description: hypothetical protein [Oryza sativa]
MARMEMLGLRRCAGELSAISSAPSPRAGSVTPRKTPKPPRVLTPLRRSGRLIAAATPPGSGSRRSARLNGDSVQHKALPYRGADAEEEEQEEKCPMYIDKERLRVLQETRCDSKARGSVYDPVLGICCHFCRQKKLCGEEGCKRCGEGDFEQQCIGKTECSSCHSSYGILCRACLKVRYGEEMEEVRKNKKWMCPHCVEEKGTKKFWICNSSICLKKRKIAPTGIAIFQAREQGYASVAHLLMDQLKSRGSF

SEQ ID NO: 65084 - protein, 249 aa, Triticum aestivum
  peptide (1)..(249): Ceres Seq. ID no. 13597470
  misc_feature (139)..(239): Homolog of NCBI NO: 22327451 NR Description: expressed protein [Arabidopsis thaliana]
  misc_feature (139)..(239): Homolog of NCBI NO: 10176837 NR Description: gb|AAF26952.1~gene_id:MBB18.24~strong similarity
  misc_feature (139)..(249): Homolog of NCBI NO: 15220539 NR Description: F12A21.9 [Arabidopsis thaliana]
  misc_feature (104)..(239): Homolog of NCBI NO: 15220396 NR Description: hypothetical protein [Arabidopsis thaliana]
  misc_feature (104)..(239): Homolog of NCBI NO: 9828631 NR Description: F1N21.9 [Arabidopsis thaliana]
  misc_feature (112)..(239): Homolog of NCBI NO: 11360288 NR Description: hypothetical protein DKFZp762L0311.1 - human
  misc_feature (1)..(240): Homolog of NCBI NO: 30690864 NR Description: expressed protein [Arabidopsis thaliana]
  misc_feature (86)..(240): Homolog of NCBI NO: 25407788 NR Description: hypothetical protein AT4g37110 [imported] -
  misc_feature (1)..(90): Homolog of NCBI NO: 13324785 NR Description: hypothetical protein [Oryza sativa]
  misc_feature (2)..(246): Homolog of NCBI NO: 13324785 NR Description: hypothetical protein [Oryza sativa]
MEMLGLRRCAGELSAISSAPSPRAGSVTPRKTPKPPRVLTPLRRSGRLIAAATPPGSGSRRSARLNGDSVQHKALPYRGADAEEEEQEEKCPMYIDKERLRVLQETRCDSKARGSVYDPVLGICCHFCRQKKLCGEEGCKRCGEGDFEQQCIGKTECSSCHSSYGILCRACLKVRYGEEMEEVRKNKKWMCPHCVEEKGTKKFWICNSSICLKKRKIAPTGIAIFQAREQGYASVAHLLMDQLKSRGSF

SEQ ID NO: 65085 - DNA, 1241 bp, Triticum aestivum
  misc_feature (1)..(1241): Ceres Seq. ID no. 13590699
gaccgcaaaacgaaagcaagccgccggccctagttcgtttcagtgcctccgcagtctccaccacacggacttgccaccatgacggcggctcctcttttatcgttgacggatgcggcgacggcgacggcgacggcggcgctggcccccggccgagcgcccgccagagcccgcattcaggccgccccccgccaccccgccaccgtctcgctgagatgccaccgcgctcggcccctaaccgcggccgccgccacgggcgactcgccgtcgtccgccgcgttccacggcgagtgcttcgtcgtcggggacaacatcgacaccgaccagatcatcccggccgagcacctgaccctggtgccgtccaagcccgacgagtaccgcaagctcggctccttcgccttcgtgggcctccccgccgcggcctacccgattccgttcgtggcccctggcgaggagtcgtcccgctacgccgtcatcatcggcggcgccaacttcgggtgcggctcctcccgcgagcacgcgcccgtcgcgctcggagccgccggcgcgcgcgccgttgtggccgagggctacgcccgcatcttcttccgcaattccgtggccaccggggaggtgtaccccctggagctcgcggacagtggtgccagcaaggagtgcaagacaggggatgtggtcacagtggacctcgataactcggtcttgattaaccacacatccggaaagcagtacaagctgaagcctattggtgatgcaggcccggttattgaggccggggggatcttcgcttatgctcggaagactgggatgatcgcgtccaaatctgcttgaacaaaaagtaagctttatctgctgtcagattggttgaggccttgcgggtggcaagtaagactggtttatgaataagagtcgctgcacctctcccttcggtggtgaggtgtgattgtccagcagttttgctactactttggcattggcttgcaccagtaattgtgcgcaaaaactcggtttgagagtgctgaactttgttgtattgaaatgttacacccatgtaatacagtagttttgtttgcacctgtcatctttgatgtcaagtgtactcatgcactagcttatgtttattgattgcagtggtggattgtatcagttacttctgatgttcctattcagtgacaaaaatcaaattcacctgcttttgtatttacgaaagcgattggcgaaacaataagttaatttcgtcttccctg

SEQ ID NO: 65086 - protein, 248 aa, Triticum aestivum
  peptide (1)..(248): Ceres Seq. ID no. 13590700
  misc_feature (67)..(246): Homolog of NCBI NO: 7994624 NR Description: 3-ISOPROPYLMALATE DEHYDRATASE SMALL SUBUNIT
  misc_feature (69)..(239): Homolog of NCBI NO: 23051508 NR Description: hypothetical protein [Methanosarcina barkeri]
  misc_feature (69)..(239): Homolog of NCBI NO: 15669463 NR Description: 3-isopropylmalate dehydratase (leuD)
  misc_feature (69)..(239): Homolog of NCBI NO: 15643321 NR Description: 3-isopropylmalate dehydratase, small subunit
  misc_feature (69)..(248): Homolog of NCBI NO: 21673448 NR Description: 3-isopropylmalate dehydratase, small subunit,
  misc_feature (69)..(246): Homolog of NCBI NO: 23041579 NR Description: hypothetical protein [Trichodesmium erythraeum
  misc_feature (8)..(245): Homolog of NCBI NO: 15224222 NR Description: aconitase family [Arabidopsis thaliana]
  misc_feature (39)..(245): Homolog of NCBI NO: 15231608 NR Description: aconitase family [Arabidopsis thaliana]
  misc_feature (2)..(248): Homolog of NCBI NO: 15224221 NR Description: aconitase family [Arabidopsis thaliana]
  misc_feature (1)..(248): Homolog of NCBI NO: 14140144 NR Description: putative protein [Oryza sativa]
MTAAPLLSLTDAATATATAALAPGRAPARARIQAAPRHPATVSLRCHRARPLTAAAATGDSPSSAAFHGECFVVGDNIDTDQIIPAEHLTLVPSKPDEYRKLGSFAFVGLPAAAYPIPFVAPGEESSRYAVIIGGANFGCGSSREHAPVALGAAGARAVVAEGYARIFFRNSVATGEVYPLELADSGASKECKTGDVVTVDLDNSVLINHTSGKQYKLKPIGDAGPVIEAGGIFAYARKTGMIASKSA

SEQ ID NO: 65087 - protein, 228 aa, Triticum aestivum
  peptide (1)..(228): Ceres Seq. ID no. 13590701
PQNESKPPALVRFSASAVSTTRTCHHDGGSSFIVDGCGDGDGDGGAGPRPSARQSPHSGRPPPPRHRLAEMPPRSAPNRGRRHGRLAVVRRVPRRVLRRRGQHRHRPDHPGRAPDPGAVQARRVPQARLLRLRGPPRRGLPDSVRGPWRGVVPLRRHHRRRQLRVRLLPRARARRARSRRRARRCGRGLRPHLLPQFRGHRGGVPPGARGQWCQQGVQDRGCGHSGPR

SEQ ID NO: 65088 - protein, 158 aa, Triticum aestivum
  peptide (1)..(158): Ceres Seq. ID no. 13590702
MPPRSAPNRGRRHGRLAVVRRVPRRVLRRRGQHRHRPDHPGRAPDPGAVQARRVPQARLLRLRGPPRRGLPDSVRGPWRGVVPLRRHHRRRQLRVRLLPRARARRARSRRRARRCGRGLRPHLLPQFRGHRGGVPPGARGQWCQQGVQDRGCGHSGPR

SEQ ID NO: 65089 - DNA, 1580 bp, Triticum aestivum
  misc_feature (1)..(1580): Ceres Seq. ID no. 12617417
acatcagacatcaaacagcacgaagaagaatttcagccagctgtactgaaccagtagatcctcctaggccccactcactcaccgacccacccaccgatcgccatggcgcaggcggagagcgagcgcatgcgcgtggtcatgttcccgtggctggcgcacggccacatcaacccgtacctcgagctggccaagcgcctcgtcgccgccagccccgacgaccaccacctcgacgtcgtcgtgcacctcgtctccaccccggccaacctggcgcccctcgcgcaccaccagacggacagggtcaggctcgtcgagctccatctcccggcgctccccggcctcccgcccgcgctgcacaccaccaagggccttcccgcgcacctcatgccggccctcaagcgcgcctgcgacctcgccgcgccgcgcttcggagcgctcctcgacgagctcagcccggacattgtcgtctacgacttcctccagccgtgggcgccgctcgaggccgcggcgcgcggcgtgcctgccgtccacttcagcaccttcagcgccgtcgccaaggcattcgtcgtccactgcctcaagaatgaacggacccccagcgccttcccgttcgagaccatcagcctcggcgccgccgaggaggacgccaaatacgcggcgcagctcgtctcccgcgatgacggcacagccgagatccccgagcgcgaccgcctgccgctcagcctggagcgctcctccgggttcgtggccatcaagacgtgcgccgacatcgagcgcaagtacgtcgactacctgtcccagctcgtgggcaaggaggtcgtgcccaccggcccgttgctcgtggactccggtggctccgaggggaagcgcgacggcggccgcatcatgaggtggctcgacggcaaggagccgtgttccgtggtgctcgtctccttcggcagcgagtactacatgtcagaccggcagatggcgcagatggcgcgcgggctggagctcagcagggtgccctacctgtgggtggtgcggttcccgaacgcggaggacgacgcccgcggcgccgcgaggtccatgccgcgggggttcaagccggcgcgcgggctggtgctggaagggtgggcgccgcagtggcgcatcctgtcgcaccagtcctgcggcgcgttcctgacccactgcgggtggagctcggtgctggagtccatggcagcgggggtgccgatggtggcgctgccgctgcacatcgaccagccgctcaacgccaacctcgcggtggagctgggcgcggcggccacgcgcgtgaagcaggagcgcttcggggagttcaaggcggaggatgtggcgcgggcggtgcgctcggctgtcaacgggagagaacggatggcggcgaggcgccgtgcgagggagctgcgggagctggtggcgcggaacaacggcgacgaccggcagatcgcgacgctgctacagaggatggcgcggctatgcggcaagggccaggccgtgccaaattagtgggatttttttatgaacgtattttcaactgttgttttagtcgaataaataagacagtcgggcccagtggctgtcac

SEQ ID NO: 65090 - protein, 466 aa, Triticum aestivum
  peptide (1)..(466): Ceres Seq. ID no. 12617418
  misc_feature (10)..(461): Pfam Name: UDP-glucoronosyl and UDP-glucosyl transferase Pfam Description: UDP-glucoronosyl and UDP-glucosyl transferase
  misc_feature (1)..(461): Homolog of NCBI NO: 22831137 NR Description: putative UDP rhamnose
MAQAESERMRVVMFPWLAHGHINPYLELAKRLVAASPDDHHLDVVVHLVSTPANLAPLAHHQTDRVRLVELHLPALPGLPPALHTTKGLPAHLMPALKRACDLAAPRFGALLDELSPDIVVYDFLQPWAPLEAAARGVPAVHFSTFSAVAKAFVVHCLKNERTPSAFPFETISLGAAEEDAKYAAQLVSRDDGTAEIPERDRLPLSLERSSGFVAIKTCADIERKYVDYLSQLVGKEVVPTGPLLVDSGGSEGKRDGGRIMRWLDGKEPCSVVLVSFGSEYYMSDRQMAQMARGLELSRVPYLWVVRFPNAEDDARGAARSMPRGFKPARGLVLEGWAPQWRILSHQSCGAFLTHCGWSSVLESMAAGVPMVALPLHIDQPLNANLAVELGAAATRVKQERFGEFKAEDVARAVRSAVNGRERMAARRRARELRELVARNNGDDRQIATLLQRMARLCGKGQAVPN

SEQ ID NO: 65091 - protein, 458 aa, Triticum aestivum
  peptide (1)..(458): Ceres Seq. ID no. 12617419
  misc_feature (2)..(453): Pfam Name: UDP-glucoronosyl and UDP-glucosyl transferase Pfam Description: UDP-glucoronosyl and UDP-glucosyl transferase
  misc_feature (1)..(453): Homolog of NCBI NO: 22831137 NR Description: putative UDP rhamnose
MRVVMFPWLAHGHINPYLELAKRLVAASPDDHHLDVVVHLVSTPANLAPLAHHQTDRVRLVELHLPALPGLPPALHTTKGLPAHLMPALKRACDLAAPRFGALLDELSPDIVVYDFLQPWAPLEAAARGVPAVHFSTFSAVAKAFVVHCLKNERTPSAFPFETISLGAAEEDAKYAAQLVSRDDGTAEIPERDRLPLSLERSSGFVAIKTCADIERKYVDYLSQLVGKEVVPTGPLLVDSGGSEGKRDGGRIMRWLDGKEPCSVVLVSFGSEYYMSDRQMAQMARGLELSRVPYLWVVRFPNAEDDARGAARSMPRGFKPARGLVLEGWAPQWRILSHQSCGAFLTHCGWSSVLESMAAGVPMVALPLHIDQPLNANLAVELGAAATRVKQERFGEFKAEDVARAVRSAVNGRERMAARRRARELRELVARNNGDDRQIATLLQRMARLCGKGQAVPN

SEQ ID NO: 65092 - protein, 454 aa, Triticum aestivum
  peptide (1)..(454): Ceres Seq. ID no. 12617420
  misc_feature (1)..(449): Pfam Name: UDP-glucoronosyl and UDP-glucosyl transferase Pfam Description: UDP-glucoronosyl and UDP-glucosyl transferase
  misc_feature (1)..(449): Homolog of NCBI NO: 22831137 NR Description: putative UDP rhamnose
MFPWLAHGHINPYLELAKRLVAASPDDHHLDVVVHLVSTPANLAPLAHHQTDRVRLVELHLPALPGLPPALHTTKGLPAHLMPALKRACDLAAPRFGALLDELSPDIVVYDFLQPWAPLEAAARGVPAVHFSTFSAVAKAFVVHCLKNERTPSAFPFETISLGAAEEDAKYAAQLVSRDDGTAEIPERDRLPLSLERSSGFVAIKTCADIERKYVDYLSQLVGKEVVPTGPLLVDSGGSEGKRDGGRIMRWLDGKEPCSVVLVSFGSEYYMSDRQMAQMARGLELSRVPYLWVVRFPNAEDDARGAARSMPRGFKPARGLVLEGWAPQWRILSHQSCGAFLTHCGWSSVLESMAAGVPMVALPLHIDQPLNANLAVELGAAATRVKQERFGEFKAEDVARAVRSAVNGRERMAARRRARELRELVARNNGDDRQIATLLQRMARLCGKGQAVPN

SEQ ID NO: 65093 - DNA, 1166 bp, Triticum aestivum
  misc_feature (1)..(1166): Ceres Seq. ID no. 13598553
aagttttcaaccaagtgagcggtaggtgggcggcggctgcacgcggccgctctgttgttccttccttcctcatcctcttttccccgccttgtcgcccgtccacgccgtggagagaccgcagaccagagccgttcgcaccgccattgcagcttgcccaggcaggtgctcgtgcgctcctgctcgcccgcggcccctgcccctccccctccccagcgatggcgacggcgttctcaaccaagcagcccctgcgggtcgctacgcctgcaagcaaatggcgtccaaggttgccactggttaaagtgcaatattcgtccaacaaacaagctagtgcttccatttcattgacgtccagtgcggaggatgcggagagaaacgagcccatagtcaaaatgtgcggcatcacatctgccagagatgcagaattcgccgcaaaggctggagctaaacttatcgggatgattctttggcctaagtccaaacgatctgtccaactgtcagaagcgaaggaaatatccagagtagcaaagtcatatggggctgaagctgttggtgtgtttgtcgatgatgatgaagagaccatcttaagagtgtctgattcatgcgaccttgaacttatccagcttcatggagatagttctcgagcactagttcctgctcttgccaagaacaaccggattgtatatgttcttaatgctgacgcggatggaaaacttatcaattctcctcctagtgaagaatatgacgttgactggtttttggtggacagtgcagagggtggaagtggcaaaggattcaactgggagaatttccgaatgccatcggtgaaaagcaagaacggctggctgttagcaggaggacttcatgcagacaatgtttgtcaagccgctaccgctctaaaaccaaatggtgtggatgttagcagcggaatatgctctcctgacggtataagcaaggacccgaagagaatatcatccttcatgagaagcgtacagtccttaagttcccgatgaggtctctatttagactccccaggcttattatagcttcttgcttcagtttgtgaagacatttgcaaataagctgtcctgaatgatagcagtaaataaacaactttgaagctgagttccaactatgcttgtctaatggtagcattagaccagtttctg

SEQ ID NO: 65094 - protein, 335 aa, Triticum aestivum
  peptide (1)..(335): Ceres Seq. ID no. 13598554
  misc_feature (128)..(326): Pfam Name: N-(5'phosphoribosyl)anthranilate (PRA) isomerase Pfam Description: N-(5'phosphoribosyl)anthranilate (PRA) isomerase
  misc_feature (99)..(332): Homolog of NCBI NO: 5031258 NR Description: phosphoribosylanthranilate isomerase [Arabidopsis
  misc_feature (99)..(332): Homolog of NCBI NO: 5031256 NR Description: phosphoribosylanthranilate isomerase [Arabidopsis
  misc_feature (99)..(332): Homolog of NCBI NO: 5031254 NR Description: phosphoribosylanthranilate isomerase [Arabidopsis
  misc_feature (99)..(331): Homolog of NCBI NO: 5031261 NR Description: phosphoribosylanthranilate isomerase [Arabidopsis
  misc_feature (99)..(332): Homolog of NCBI NO: 30681012 NR Description: phosphoribosylanthranilate isomerase (PAI2)
  misc_feature (99)..(332): Homolog of NCBI NO: 10178136 NR Description: phosphoribosylanthranilate isomerase [Arabidopsis
  misc_feature (99)..(332): Homolog of NCBI NO: 1403670 NR Description: phosphoribosylanthranilate isomerase [Arabidopsis
  misc_feature (100)..(332): Homolog of NCBI NO: 619749 NR Description: phosphoribosylanthranilate isomerase
  misc_feature (99)..(332): Homolog of NCBI NO: 25407008 NR Description: hypothetical protein [imported] - Arabidopsis
  misc_feature (99)..(332): Homolog of NCBI NO: 15223003 NR Description: phosphoribosylanthranilate isomerase (PAI1)
VFNQVSGRWAAAARGRSVVPSFLILFSPPCRPSTPWRDRRPEPFAPPLQLAQAGARALLLARGPCPSPSPAMATAFSTKQPLRVATPASKWRPRLPLVKVQYSSNKQASASISLTSSAEDAERNEPIVKMCGITSARDAEFAAKAGAKLIGMILWPKSKRSVQLSEAKEISRVAKSYGAEAVGVFVDDDEETILRVSDSCDLELIQLHGDSSRALVPALAKNNRIVYVLNADADGKLINSPPSEEYDVDWFLVDSAEGGSGKGFNWENFRMPSVKSKNGWLLAGGLHADNVCQAATALKPNGVDVSSGICSPDGISKDPKRISSFMRSVQSLSSR

SEQ ID NO: 65095 - protein, 264 aa, Triticum aestivum
  peptide (1)..(264): Ceres Seq. ID no. 13598555
  misc_feature (57)..(255): Pfam Name: N-(5'phosphoribosyl)anthranilate (PRA) isomerase Pfam Description: N-(5'phosphoribosyl)anthranilate (PRA) isomerase
  misc_feature (28)..(261): Homolog of NCBI NO: 5031258 NR Description: phosphoribosylanthranilate isomerase [Arabidopsis
  misc_feature (28)..(261): Homolog of NCBI NO: 5031256 NR Description: phosphoribosylanthranilate isomerase [Arabidopsis
  misc_feature (28)..(261): Homolog of NCBI NO: 5031254 NR Description: phosphoribosylanthranilate isomerase [Arabidopsis
  misc_feature (28)..(260): Homolog of NCBI NO: 5031261 NR Description: phosphoribosylanthranilate isomerase [Arabidopsis
  misc_feature (28)..(261): Homolog of NCBI NO: 30681012 NR Description: phosphoribosylanthranilate isomerase (PAI2)
  misc_feature (28)..(261): Homolog of NCBI NO: 10178136 NR Description: phosphoribosylanthranilate isomerase [Arabidopsis
  misc_feature (28)..(261): Homolog of NCBI NO: 1403670 NR Description: phosphoribosylanthranilate isomerase [Arabidopsis
  misc_feature (29)..(261): Homolog of NCBI NO: 619749 NR Description: phosphoribosylanthranilate isomerase
  misc_feature (28)..(261): Homolog of NCBI NO: 25407008 NR Description: hypothetical protein [imported] - Arabidopsis
  misc_feature (28)..(261): Homolog of NCBI NO: 15223003 NR Description: phosphoribosylanthranilate isomerase (PAI1)
MATAFSTKQPLRVATPASKWRPRLPLVKVQYSSNKQASASISLTSSAEDAERNEPIVKMCGITSARDAEFAAKAGAKLIGMILWPKSKRSVQLSEAKEISRVAKSYGAEAVGVFVDDDEETILRVSDSCDLELIQLHGDSSRALVPALAKNNRIVYVLNADADGKLINSPPSEEYDVDWFLVDSAEGGSGKGFNWENFRMPSVKSKNGWLLAGGLHADNVCQAATALKPNGVDVSSGICSPDGISKDPKRISSFMRSVQSLSSR

SEQ ID NO: 65096 - protein, 206 aa, Triticum aestivum
  peptide (1)..(206): Ceres Seq. ID no. 13598556
  misc_feature (1)..(197): Pfam Name: N-(5'phosphoribosyl)anthranilate (PRA) isomerase Pfam Description: N-(5'phosphoribosyl)anthranilate (PRA) isomerase
  misc_feature (1)..(203): Homolog of NCBI NO: 5031258 NR Description: phosphoribosylanthranilate isomerase [Arabidopsis
  misc_feature (1)..(203): Homolog of NCBI NO: 5031256 NR Description: phosphoribosylanthranilate isomerase [Arabidopsis
  misc_feature (1)..(203): Homolog of NCBI NO: 5031254 NR Description: phosphoribosylanthranilate isomerase [Arabidopsis
  misc_feature (1)..(202): Homolog of NCBI NO: 5031261 NR Description: phosphoribosylanthranilate isomerase [Arabidopsis
  misc_feature (1)..(203): Homolog of NCBI NO: 30681012 NR Description: phosphoribosylanthranilate isomerase (PAI2)
  misc_feature (1)..(203): Homolog of NCBI NO: 10178136 NR Description: phosphoribosylanthranilate isomerase [Arabidopsis
  misc_feature (1)..(203): Homolog of NCBI NO: 1403670 NR Description: phosphoribosylanthranilate isomerase [Arabidopsis
  misc_feature (1)..(203): Homolog of NCBI NO: 619749 NR Description: phosphoribosylanthranilate isomerase
  misc_feature (1)..(203): Homolog of NCBI NO: 25407008 NR Description: hypothetical protein [imported] - Arabidopsis
  misc_feature (1)..(203): Homolog of NCBI NO: 15223003 NR Description: phosphoribosylanthranilate isomerase (PAI1)
MCGITSARDAEFAAKAGAKLIGMILWPKSKRSVQLSEAKEISRVAKSYGAEAVGVFVDDDEETILRVSDSCDLELIQLHGDSSRALVPALAKNNRIVYVLNADADGKLINSPPSEEYDVDWFLVDSAEGGSGKGFNWENFRMPSVKSKNGWLLAGGLHADNVCQAATALKPNGVDVSSGICSPDGISKDPKRISSFMRSVQSLSSR

SEQ ID NO: 65097 - DNA, 1610 bp, Triticum aestivum
  misc_feature (1)..(1610): Ceres Seq. ID no. 13502943
atttcgcttctcgacttccccaatcggccaccccccacctccgccttccttcctggccagcgcggcggcttatggcctccatgaccacacctcggctccccttcctccccgcccgaacccgctccgccgtcgccgccacctcctcttcgtccccctcctccccgctaccacgccgctccatcaaatgcagcagctccaccaacgctaactcggcccccctcccttccacatcgcggcagccccgggcgcccgtggcggacggcgtagggtccgccgacctcaacggcctccgggccccgcctatacctgtcgcggactcccctctacccgcgtaccgcgatccgcacgggctgcctcggcctctcactagtgcggatctgatggagtcgagcggggaggggctcaaggttgcctaccagggcttccctggagcgtacagcgaggctgcagcaaagaaggcctatccaaattgccagacagtgccctgtgagcactttgatactgcatttcaggctgttcaaaactggatagttgatagggcggtactgccacttgagaatactctgggtggtagtatacatcggaactatgaccttttacttcggcatgagctgcacatagttggagaggttcgccttgcagttcggcattgcttggtagccaatcgtggagtgaagatcggaaacctaagaaatgtcatcagtcatccccaggctcttgcgcaatgtgagcatacgctgacagagttaggaattgaacatagacaggctgttgatgacactgctggtgcagcaaagttagtcgcagaacaaatgctccaagatactggtgctgttgccagttcattagctgctgaactttatggactcgatattcttgctgaaaatattcaggacgaaaaagtcaatgtcacccgttttatgatgcttgcttgggaacctattatacctcgggttgataaaccattcaagactagtattgtgttttcacttgaagaaggacctggacagctcttcaaggcacttgcagtttttgcactgagggaaatcaacctcaccaagatagaaagccgtccacacaagaaaaggccttttcgtgtagctgatgatgctttctccacgcgagtcaagtacttcgactacctgttttatgtcgaccttgaggcgtctatggctgatccaaaaactcagaatgctctcagaaatttggaggagtttgcaacttttttaagagtcctggggagctatcctacagacgtgagcgaagcttgaatagcaagtgcttgctgcagatcacatgttagtgattaatcaattgtgtgcctttctcttaatcggataaacatccgcctttgatagctgctgtttggtgtaatgaaataaacatagttctccattatagagtcagaaacatgtagctctcagagcatatttcctagtacttggattgggacttgagcagtcttattactcataaaatgtacgtgggtagtccncagcagaatagtggatatactcccggggattgttcaggttgagtacaatgtagaatcagaatactgaactatgcgttgtgggggtcaacaaagtggatataaagtgattgggggg

SEQ ID NO: 65098 - protein, 422 aa, Triticum aestivum
  peptide (1)..(422): Ceres Seq. ID no. 13502944
  misc_feature (136)..(314): Pfam Name: Prephenate dehydratase Pfam Description: Prephenate dehydratase
  misc_feature (119)..(420): Homolog of NCBI NO: 15230489 NR Description: prephenate dehydratase family [Arabidopsis
  misc_feature (37)..(420): Homolog of NCBI NO: 38347597 NR Description: OSJNBa0042I15.10 [Oryza sativa (japonica
  misc_feature (21)..(420): Homolog of NCBI NO: 21593283 NR Description: putative chorismate mutase/prephenate dehydratase
  misc_feature (108)..(419): Homolog of NCBI NO: 15221096 NR Description: prephenate dehydratase family [Arabidopsis
  misc_feature (21)..(420): Homolog of NCBI NO: 15226259 NR Description: prephenate dehydratase family [Arabidopsis
  misc_feature (108)..(419): Homolog of NCBI NO: 14596233 NR Description: Unknown protein [Arabidopsis thaliana]
  misc_feature (36)..(420): Homolog of NCBI NO: 18390869 NR Description: prephenate dehydratase family [Arabidopsis
  misc_feature (26)..(420): Homolog of NCBI NO: 15231489 NR Description: prephenate dehydratase family [Arabidopsis
  misc_feature (26)..(420): Homolog of NCBI NO: 21537054 NR Description: putative P-protein: chorismate mutase, prephenate
  misc_feature (72)..(422): Homolog of NCBI NO: 34394031 NR Description: putative prephenate dehydratase
FASRLPQSATPHLRLPSWPARRLMASMTTPRLPFLPARTRSAVAATSSSSPSSPLPRRSIKCSSSTNANSAPLPSTSRQPRAPVADGVGSADLNGLRAPPIPVADSPLPAYRDPHGLPRPLTSADLMESSGEGLKVAYQGFPGAYSEAAAKKAYPNCQTVPCEHFDTAFQAVQNWIVDRAVLPLENTLGGSIHRNYDLLLRHELHIVGEVRLAVRHCLVANRGVKIGNLRNVISHPQALAQCEHTLTELGIEHRQAVDDTAGAAKLVAEQMLQDTGAVASSLAAELYGLDILAENIQDEKVNVTRFMMLAWEPIIPRVDKPFKTSIVFSLEEGPGQLFKALAVFALREINLTKIESRPHKKRPFRVADDAFSTRVKYFDYLFYVDLEASMADPKTQNALRNLEEFATFLRVLGSYPTDVSEA

SEQ ID NO: 65099 - protein, 399 aa, Triticum aestivum
  peptide (1)..(399): Ceres Seq. ID no. 13502945
  misc_feature (113)..(291): Pfam Name: Prephenate dehydratase Pfam Description: Prephenate dehydratase
  misc_feature (96)..(397): Homolog of NCBI NO: 15230489 NR Description: prephenate dehydratase family [Arabidopsis
  misc_feature (14)..(397): Homolog of NCBI NO: 38347597 NR Description: OSJNBa0042I15.10 [Oryza sativa (japonica
  misc_feature (1)..(397): Homolog of NCBI NO: 21593283 NR Description: putative chorismate mutase/prephenate dehydratase
  misc_feature (85)..(396): Homolog of NCBI NO: 15221096 NR Description: prephenate dehydratase family [Arabidopsis
  misc_feature (1)..(397): Homolog of NCBI NO: 15226259 NR Description: prephenate dehydratase family [Arabidopsis
  misc_feature (85)..(396): Homolog of NCBI NO: 14596233 NR Description: Unknown protein [Arabidopsis thaliana]
  misc_feature (13)..(397): Homolog of NCBI NO: 18390869 NR Description: prephenate dehydratase family [Arabidopsis
  misc_feature (3)..(397): Homolog of NCBI NO: 15231489 NR Description: prephenate dehydratase family [Arabidopsis
  misc_feature (3)..(397): Homolog of NCBI NO: 21537054 NR Description: putative P-protein: chorismate mutase, prephenate
  misc_feature (49)..(399): Homolog of NCBI NO: 34394031 NR Description: putative prephenate dehydratase
MASMTTPRLPFLPARTRSAVAATSSSSPSSPLPRRSIKCSSSTNANSAPLPSTSRQPRAPVADGVGSADLNGLRAPPIPVADSPLPAYRDPHGLPRPLTSADLMESSGEGLKVAYQGFPGAYSEAAAKKAYPNCQTVPCEHFDTAFQAVQNWIVDRAVLPLENTLGGSIHRNYDLLLRHELHIVGEVRLAVRHCLVANRGVKIGNLRNVISHPQALAQCEHTLTELGIEHRQAVDDTAGAAKLVAEQMLQDTGAVASSLAAELYGLDILAENIQDEKVNVTRFMMLAWEPIIPRVDKPFKTSIVFSLEEGPGQLFKALAVFALREINLTKIESRPHKKRPFRVADDAFSTRVKYFDYLFYVDLEASMADPKTQNALRNLEEFATFLRVLGSYPTDVSEA

SEQ ID NO: 65100 - protein, 396 aa, Triticum aestivum
  peptide (1)..(396): Ceres Seq. ID no. 13502946
  misc_feature (110)..(288): Pfam Name: Prephenate dehydratase Pfam Description: Prephenate dehydratase
  misc_feature (93)..(394): Homolog of NCBI NO: 15230489 NR Description: prephenate dehydratase family [Arabidopsis
  misc_feature (11)..(394): Homolog of NCBI NO: 38347597 NR Description: OSJNBa0042I15.10 [Oryza sativa (japonica
  misc_feature (1)..(394): Homolog of NCBI NO: 21593283 NR Description: putative chorismate mutase/prephenate dehydratase
  misc_feature (82)..(393): Homolog of NCBI NO: 15221096 NR Description: prephenate dehydratase family [Arabidopsis
  misc_feature (1)..(394): Homolog of NCBI NO: 15226259 NR Description: prephenate dehydratase family [Arabidopsis
  misc_feature (82)..(393): Homolog of NCBI NO: 14596233 NR Description: Unknown protein [Arabidopsis thaliana]
  misc_feature (10)..(394): Homolog of NCBI NO: 18390869 NR Description: prephenate dehydratase family [Arabidopsis
  misc_feature (1)..(394): Homolog of NCBI NO: 15231489 NR Description: prephenate dehydratase family [Arabidopsis
  misc_feature (1)..(394): Homolog of NCBI NO: 21537054 NR Description: putative P-protein: chorismate mutase, prephenate
  misc_feature (46)..(396): Homolog of NCBI NO: 34394031 NR Description: putative prephenate dehydratase
MTTPRLPFLPARTRSAVAATSSSSPSSPLPRRSIKCSSSTNANSAPLPSTSRQPRAPVADGVGSADLNGLRAPPIPVADSPLPAYRDPHGLPRPLTSADLMESSGEGLKVAYQGFPGAYSEAAAKKAYPNCQTVPCEHFDTAFQAVQNWIVDRAVLPLENTLGGSIHRNYDLLLRHELHIVGEVRLAVRHCLVANRGVKIGNLRNVISHPQALAQCEHTLTELGIEHRQAVDDTAGAAKLVAEQMLQDTGAVASSLAAELYGLDILAENIQDEKVNVTRFMMLAWEPIIPRVDKPFKTSIVFSLEEGPGQLFKALAVFALREINLTKIESRPHKKRPFRVADDAFSTRVKYFDYLFYVDLEASMADPKTQNALRNLEEFATFLRVLGSYPTDVSEA

SEQ ID NO: 65101 - DNA, 1293 bp, Triticum aestivum
  misc_feature (1)..(1293): Ceres Seq. ID no. 13597471
aaaaccggagacagcacaggcagctccccccataattgcctgtgccactggtggttggactggaagccgcctccctctcccccctgtcctccccttgcccgtcctcgacctcgccgccggccagcgatggagcggcgatccaccacccgcttctcgccttccgagattgcaaggatggagaagttggtttcatcagacagaaaagagcaagtcttggttgatagtttctgccagaagcttgtagaagaatttaatcgttctccagctcgagtcggaagcagagctctacaggctacacaggttcgaggatggttccttgataagctccctgcatcaactcctaaacctgcttccttgcctactacttctgaagaaaagcctttagcctcagaaccagatgcgttaatttctgagataaagacttcagcttctgatgaagaaaaagttttagctcttgatacaagtatttcaaacaatgaggatgcactttctgcggatttacccaaagagactacagataaggttcctgaatttgaagacttgcagtttgaggctaagtcatcaaaggattctgcatggtacgacgtcgccctcttcttggcacacaggaagacaagtttgggagaagttgaagtccgggtgaggtttatcggatatggggctgaagaagatgagtgggtgaatgtcaggaaggctgtccgccagcaatccattccgctggagtcctcagaatgccgaagcattgtcaaaggagatcttgtcctgtgtttcaaggagagcaatgatgaagcactgcatttcgatgcgcacgttgtggatgtccagcggaaacagcatgatataaggggatgcagatgcctcttccatgttgaatatgatcatgatcaaagccaggagatggtgaacctcaagagaatctccaggcggccaagatacctttgatggcttctgctaacatggatctgcttcctgctgctatccgagcttgtgtcgtactaacgggagccctcgaatcttggttgagaccgctgcactctgattgtttgttcttattgatgtactgtgtctagtagtaaaacacccgggagagtagttaagccccctctttggcacatagctgctgtaacggctatgagtaggctccgtgatagccaatttttgcacacacacgagaaagttggtgccaaagcgggcggagagccggattttaactggtgtgttggcagcagattaccatgtcactatgtcagtgtttgccgttctgaacctcttggggcgatttgcctctgcttc

SEQ ID NO: 65102 - protein, 313 aa, Triticum aestivum
  peptide (1)..(313): Ceres Seq. ID no. 13597472
  misc_feature (69)..(300): Homolog of NCBI NO: 30684237 NR Description: expressed protein [Arabidopsis thaliana]
  misc_feature (69)..(310): Homolog of NCBI NO: 30684244 NR Description: expressed protein [Arabidopsis thaliana]
  misc_feature (69)..(310): Homolog of NCBI NO: 25402795 NR Description: protein F9L1.16 [imported] - Arabidopsis thaliana
  misc_feature (78)..(310): Homolog of NCBI NO: 11994101 NR Description: gb|AAD39678.1~gene_id:MYF24.10~similar to unknown
  misc_feature (40)..(310): Homolog of NCBI NO: 22331151 NR Description: expressed protein [Arabidopsis thaliana]
KTGDSTGSSPHNCLCHWWLDWKPPPSPPCPPLARPRPRRRPAMERRSTTRFSPSEIARMEKLVSSDRKEQVLVDSFCQKLVEEFNRSPARVGSRALQATQVRGWFLDKLPASTPKPASLPTTSEEKPLASEPDALISEIKTSASDEEKVLALDTSISNNEDALSADLPKETTDKVPEFEDLQFEAKSSKDSAWYDVALFLAHRKTSLGEVEVRVRFIGYGAEEDEWVNVRKAVRQQSIPLESSECRSIVKGDLVLCFKESNDEALHFDAHVVDVQRKQHDIRGCRCLFHVEYDHDQSQEMVNLKRISRRPRYL

SEQ ID NO: 65103 - protein, 271 aa, Triticum aestivum
  peptide (1)..(271): Ceres Seq. ID no. 13597473
  misc_feature (27)..(258): Homolog of NCBI NO: 30684237 NR Description: expressed protein [Arabidopsis thaliana]
  misc_feature (27)..(268): Homolog of NCBI NO: 30684244 NR Description: expressed protein [Arabidopsis thaliana]
  misc_feature (27)..(268): Homolog of NCBI NO: 25402795 NR Description: protein F9L1.16 [imported] - Arabidopsis thaliana
  misc_feature (36)..(268): Homolog of NCBI NO: 11994101 NR Description: gb|AAD39678.1~gene_id:MYF24.10~similar to unknown
  misc_feature (1)..(268): Homolog of NCBI NO: 22331151 NR Description: expressed protein [Arabidopsis thaliana]
MERRSTTRFSPSEIARMEKLVSSDRKEQVLVDSFCQKLVEEFNRSPARVGSRALQATQVRGWFLDKLPASTPKPASLPTTSEEKPLASEPDALISEIKTSASDEEKVLALDTSISNNEDALSADLPKETTDKVPEFEDLQFEAKSSKDSAWYDVALFLAHRKTSLGEVEVRVRFIGYGAEEDEWVNVRKAVRQQSIPLESSECRSIVKGDLVLCFKESNDEALHFDAHVVDVQRKQHDIRGCRCLFHVEYDHDQSQEMVNLKRISRRPRYL

SEQ ID NO: 65104 - protein, 255 aa, Triticum aestivum
  peptide (1)..(255): Ceres Seq. ID no. 13597474
  misc_feature (11)..(242): Homolog of NCBI NO: 30684237 NR Description: expressed protein [Arabidopsis thaliana]
  misc_feature (11)..(252): Homolog of NCBI NO: 30684244 NR Description: expressed protein [Arabidopsis thaliana]
  misc_feature (11)..(252): Homolog of NCBI NO: 25402795 NR Description: protein F9L1.16 [imported] - Arabidopsis thaliana
  misc_feature (20)..(252): Homolog of NCBI NO: 11994101 NR Description: gb|AAD39678.1~gene_id:MYF24.10~similar to unknown
  misc_feature (1)..(252): Homolog of NCBI NO: 22331151 NR Description: expressed protein [Arabidopsis thaliana]
MEKLVSSDRKEQVLVDSFCQKLVEEFNRSPARVGSRALQATQVRGWFLDKLPASTPKPASLPTTSEEKPLASEPDALISEIKTSASDEEKVLALDTSISNNEDALSADLPKETTDKVPEFEDLQFEAKSSKDSAWYDVALFLAHRKTSLGEVEVRVRFIGYGAEEDEWVNVRKAVRQQSIPLESSECRSIVKGDLVLCFKESNDEALHFDAHVVDVQRKQHDIRGCRCLFHVEYDHDQSQEMVNLKRISRRPRYL

SEQ ID NO: 65105 - DNA, 1228 bp, Triticum aestivum
  misc_feature (1)..(1228): Ceres Seq. ID no. 13597475
actcgtcattgctgattacggagggagtagttgactacctccccacgattatcagcagccggcgccgccgttgctgttatcctgccgccgccgccgccgccgccgcctggttcggagaaatgggcaaaagagccatccgatacgccgtggtggatgccttcgcggctgagcccttcaagggcaaccccgccgcagtatgcctcctcgaagaggagggcgcctccgcggccatggacgaccggtggatgcagtccgtcgccgccgagttcaacctctcggagaccgccttcctcgcccgggactcctccgggggagccggcgcagccccgcggttccacctccgatggttcactcccgtcacggaggttgacctctgcgggcacgcgacgttggcctctgcgcacttcctcttcacgactgttcttccggagcatggcaagctggagttcatgaccaggtccgggatcctaactgccaagaaagtccctgcaccagggagcactggcgtcccaggtgaggagcaggggaagctgtttattgagctggatttccccatgattggttttctggactgcaaccaaatgccgtcgattccagagaccctaaacggtgcgcccattgtcagcgttcacaaatcggctaccgacggcgacctcattgtggaactttcttcaggaaaagaagttgttaatatccttcctagcatcgatgaaattaaaaacttggcctgcaggggtcttattgttacaggaccggcgccggctggatctggttatgacttctttacacgtttcttctgcccaaaatttgggatagatgaggaccctgttacgggcagtatacattgtgttttggcaccctattggggcagaaagctggggaagcaaaaattgacggcatttcaagcgtctccaaggggtggaacactatacctgcaactggatgacgcaaatcagagagtgcaaatccagggagaagctcttactgtgatggatgggacgctcctagcctagccagccattggcaatttggcatccatctactcgtatatgctttgaagggactaccattcatccatctactcgtatatttacggagttataatatgactttggatgtttgtgattatatttgctgttatatgcttgttgaacagttaactgtttatggatataaaaaatgccccctccattccctaaaaaaaaaaaaaaaaaagcttatcgatacc

SEQ ID NO: 65106 - protein, 336 aa, Triticum aestivum
  peptide (1)..(336): Ceres Seq. ID no. 15222105
  misc_feature (78)..(335): Homolog of NCBI NO: 29833535 NR Description: putative oxidoreductase [Streptomyces avermitilis
  misc_feature (45)..(160): Homolog of NCBI NO: 23063080 NR Description: hypothetical protein [Pseudomonas fluorescens
  misc_feature (181)..(335): Homolog of NCBI NO: 23063080 NR Description: hypothetical protein [Pseudomonas fluorescens
  misc_feature (45)..(335): Homolog of NCBI NO: 15236201 NR Description: hypothetical protein [Arabidopsis thaliana]
  misc_feature (46)..(157): Homolog of NCBI NO: 23017885 NR Description: hypothetical protein [Thermobifida fusca]
  misc_feature (145)..(334): Homolog of NCBI NO: 23017885 NR Description: hypothetical protein [Thermobifida fusca]
  misc_feature (40)..(335): Homolog of NCBI NO: 20466358 NR Description: putative protein [Arabidopsis thaliana]
  misc_feature (42)..(335): Homolog of NCBI NO: 15218739 NR Description: expressed protein [Arabidopsis thaliana]
  misc_feature (40)..(335): Homolog of NCBI NO: 15236203 NR Description: expressed protein [Arabidopsis thaliana]
  misc_feature (40)..(336): Homolog of NCBI NO: 34903112 NR Description: unnamed protein product [Oryza sativa (japonica
SSLLITEGVVDYLPTIISSRRRRCCYPAAAAAAAAWFGEMGKRAIRYAVVDAFAAEPFKGNPAAVCLLEEEGASAAMDDRWMQSVAAEFNLSETAFLARDSSGGAGAAPRFHLRWFTPVTEVDLCGHATLASAHFLFTTVLPEHGKLEFMTRSGILTAKKVPAPGSTGVPGEEQGKLFIELDFPMIGFLDCNQMPSIPETLNGAPIVSVHKSATDGDLIVELSSGKEVVNILPSIDEIKNLACRGLIVTGPAPAGSGYDFFTRFFCPKFGIDEDPVTGSIHCVLAPYWGRKLGKQKLTAFQASPRGGTLYLQLDDANQRVQIQGEALTVMDGTLLA

SEQ ID NO: 65107 - protein, 297 aa, Triticum aestivum
  peptide (1)..(297): Ceres Seq. ID no. 15222106
  misc_feature (39)..(296): Homolog of NCBI NO: 29833535 NR Description: putative oxidoreductase [Streptomyces avermitilis
  misc_feature (6)..(121): Homolog of NCBI NO: 23063080 NR Description: hypothetical protein [Pseudomonas fluorescens
  misc_feature (142)..(296): Homolog of NCBI NO: 23063080 NR Description: hypothetical protein [Pseudomonas fluorescens
  misc_feature (6)..(296): Homolog of NCBI NO: 15236201 NR Description: hypothetical protein [Arabidopsis thaliana]
  misc_feature (7)..(118): Homolog of NCBI NO: 23017885 NR Description: hypothetical protein [Thermobifida fusca]
  misc_feature (106)..(295): Homolog of NCBI NO: 23017885 NR Description: hypothetical protein [Thermobifida fusca]
  misc_feature (1)..(296): Homolog of NCBI NO: 20466358 NR Description: putative protein [Arabidopsis thaliana]
  misc_feature (3)..(296): Homolog of NCBI NO: 15218739 NR Description: expressed protein [Arabidopsis thaliana]
  misc_feature (1)..(296): Homolog of NCBI NO: 15236203 NR Description: expressed protein [Arabidopsis thaliana]
  misc_feature (1)..(297): Homolog of NCBI NO: 34903112 NR Description: unnamed protein product [Oryza sativa (japonica
MGKRAIRYAVVDAFAAEPFKGNPAAVCLLEEEGASAAMDDRWMQSVAAEFNLSETAFLARDSSGGAGAAPRFHLRWFTPVTEVDLCGHATLASAHFLFTTVLPEHGKLEFMTRSGILTAKKVPAPGSTGVPGEEQGKLFIELDFPMIGFLDCNQMPSIPETLNGAPIVSVHKSATDGDLIVELSSGKEVVNILPSIDEIKNLACRGLIVTGPAPAGSGYDFFTRFFCPKFGIDEDPVTGSIHCVLAPYWGRKLGKQKLTAFQASPRGGTLYLQLDDANQRVQIQGEALTVMDGTLLA

SEQ ID NO: 65108 - protein, 260 aa, Triticum aestivum
  peptide (1)..(260): Ceres Seq. ID no. 15222107
  misc_feature (2)..(259): Homolog of NCBI NO: 29833535 NR Description: putative oxidoreductase [Streptomyces avermitilis
  misc_feature (1)..(84): Homolog of NCBI NO: 23063080 NR Description: hypothetical protein [Pseudomonas fluorescens
  misc_feature (105)..(259): Homolog of NCBI NO: 23063080 NR Description: hypothetical protein [Pseudomonas fluorescens
  misc_feature (1)..(259): Homolog of NCBI NO: 15236201 NR Description: hypothetical protein [Arabidopsis thaliana]
  misc_feature (1)..(81): Homolog of NCBI NO: 23017885 NR Description: hypothetical protein [Thermobifida fusca]
  misc_feature (69)..(258): Homolog of NCBI NO: 23017885 NR Description: hypothetical protein [Thermobifida fusca]
  misc_feature (1)..(259): Homolog of NCBI NO: 20466358 NR Description: putative protein [Arabidopsis thaliana]
  misc_feature (1)..(259): Homolog of NCBI NO: 15218739 NR Description: expressed protein [Arabidopsis thaliana]
  misc_feature (1)..(259): Homolog of NCBI NO: 15236203 NR Description: expressed protein [Arabidopsis thaliana]
  misc_feature (1)..(260): Homolog of NCBI NO: 34903112 NR Description: unnamed protein product [Oryza sativa (japonica
MDDRWMQSVAAEFNLSETAFLARDSSGGAGAAPRFHLRWFTPVTEVDLCGHATLASAHFLFTTVLPEHGKLEFMTRSGILTAKKVPAPGSTGVPGEEQGKLFIELDFPMIGFLDCNQMPSIPETLNGAPIVSVHKSATDGDLIVELSSGKEVVNILPSIDEIKNLACRGLIVTGPAPAGSGYDFFTRFFCPKFGIDEDPVTGSIHCVLAPYWGRKLGKQKLTAFQASPRGGTLYLQLDDANQRVQIQGEALTVMDGTLLA

SEQ ID NO: 65109 - DNA, 1440 bp, Triticum aestivum
  misc_feature (1)..(1440): Ceres Seq. ID no. 13502858
ccgaaacagatccacctcctcagcgtcgcgtggtgggaagacgagaacctcccaaaggccaaagcccataacccctaacctagggtttcgccgccatgggatccgccgcctccgccgcctccgacgcagcgccgccaccgccttctccagcgcaaccacacggggccgcgccgccgtatggggttgggctcgccggcatcctccctcagaagccggatggggatgataagaaggaggagaaggtggactacctcaacctcccttgccccgtgccgtacgaggagatccagcgcgaggccctcatgtctctgaagcctgaactttttgaaggtttgaggtttgacttcacaaagatgttaacccagaagttcgctcttagccatagtgtccttatgggctccctggaagttccgtctcagtcagctgatgttataaaagtcccaacatcacagtatgaatttggtgccaattttttagatccaaagttaatgcttatcggaaggttgatgactgatggaaggctgaatgctcgtgtgaaatgtgatctgacagagaatctcgcgctgaaaataaatgcacagcttactagtgagcctcattactctcaagggatgttcaactttgactacaagggcacagactatcgagcacagtttcaaattggaaacaatgcgttctatggggcaaattatatccagagtgttacgccaaatttgtcgatgggaacagagatattctggcttggtcagcaaaggaagtcaggaattggatttaattctcgctacaatacagataagatggtgggtactctacaggttgctagcactggtattgttgcgttaagttatgtccagaaagtttctgaaaaggtatctcttgctactgactttatgtataaccacatgtccagagatgtgacttccagcgttggttacgattatatccttaggcagtgccgtctaaggggcaaagttgactcaaatggtgtcgttgctgcatacttggaggagagattgaacatgggtgtcaactttcttctgtctgcagagattgaccatccaaagaagaactacaagtttggttttggaatgactgtaggagagtagatatgctcacagcaattactgtgagaggactacagatgtctcctcagttcgttataagtgcaggtttaccatatggtctcggttcaagtgttcgggacctacagattcgctcctcaagcgttgcaggctttttcggtgtacttgcggttgtctcatttcagctgctttagatagcatgggcatttgggcgtccatgattctttgtttatctaaaacaagctgaaacgttgttgtaataatgttcacttggttgttggagatttttgacccttaggttcccagcaataggcttctgtgaaatgaccgtactccacaagctacagattatacattg

SEQ ID NO: 65110 - protein, 336 aa, Triticum aestivum
  peptide (1)..(336): Ceres Seq. ID no. 13502859
  misc_feature (58)..(329): Pfam Name: Eukaryotic porin Pfam Description: Eukaryotic porin
  misc_feature (41)..(172): Homolog of NCBI NO: 13162531 NR Description: Hypothetical protein [Arabidopsis thaliana]
  misc_feature (209)..(336): Homolog of NCBI NO: 34903264 NR Description: unnamed protein product [Oryza sativa (japonica
  misc_feature (1)..(279): Homolog of NCBI NO: 34903264 NR Description: unnamed protein product [Oryza sativa (japonica
  misc_feature (244)..(336): Homolog of NCBI NO: 2982293 NR Description: ISP42-like protein [Picea mariana]
  misc_feature (159)..(332): Homolog of NCBI NO: 25405370 NR Description: hypothetical protein F14I3.2 [imported] -
  misc_feature (159)..(332): Homolog of NCBI NO: 13162531 NR Description: Hypothetical protein [Arabidopsis thaliana]
  misc_feature (32)..(131): Homolog of NCBI NO: 11994775 NR Description: membrane import protein-like [Arabidopsis
  misc_feature (162)..(335): Homolog of NCBI NO: 11994775 NR Description: membrane import protein-like [Arabidopsis
  misc_feature (41)..(332): Homolog of NCBI NO: 15222963 NR Description: hypothetical protein [Arabidopsis thaliana]
  misc_feature (32)..(335): Homolog of NCBI NO: 15231008 NR Description: membrane import protein -related [Arabidopsis
MGSAASAASDAAPPPPSPAQPHGAAPPYGVGLAGILPQKPDGDDKKEEKVDYLNLPCPVPYEEIQREALMSLKPELFEGLRFDFTKMLTQKFALSHSVLMGSLEVPSQSADVIKVPTSQYEFGANFLDPKLMLIGRLMTDGRLNARVKCDLTENLALKINAQLTSEPHYSQGMFNFDYKGTDYRAQFQIGNNAFYGANYIQSVTPNLSMGTEIFWLGQQRKSGIGFNSRYNTDKMVGTLQVASTGIVALSYVQKVSEKVSLATDFMYNHMSRDVTSSVGYDYILRQCRLRGKVDSNGVVAAYLEERLNMGVNFLLSAEIDHPKKNYKFGFGMTVGE

SEQ ID NO: 65111 - protein, 267 aa, Triticum aestivum
  peptide (1)..(267): Ceres Seq. ID no. 13502860
  misc_feature (1)..(260): Pfam Name: Eukaryotic porin Pfam Description: Eukaryotic porin
  misc_feature (1)..(103): Homolog of NCBI NO: 13162531 NR Description: Hypothetical protein [Arabidopsis thaliana]
  misc_feature (140)..(267): Homolog of NCBI NO: 34903264 NR Description: unnamed protein product [Oryza sativa (japonica
  misc_feature (1)..(210): Homolog of NCBI NO: 34903264 NR Description: unnamed protein product [Oryza sativa (japonica
  misc_feature (175)..(267): Homolog of NCBI NO: 2982293 NR Description: ISP42-like protein [Picea mariana]
  misc_feature (90)..(263): Homolog of NCBI NO: 25405370 NR Description: hypothetical protein F14I3.2 [imported] -
  misc_feature (90)..(263): Homolog of NCBI NO: 13162531 NR Description: Hypothetical protein [Arabidopsis thaliana]
  misc_feature (1)..(62): Homolog of NCBI NO: 11994775 NR Description: membrane import protein-like [Arabidopsis
  misc_feature (93)..(266): Homolog of NCBI NO: 11994775 NR Description: membrane import protein-like [Arabidopsis
  misc_feature (1)..(263): Homolog of NCBI NO: 15222963 NR Description: hypothetical protein [Arabidopsis thaliana]
  misc_feature (1)..(266): Homolog of NCBI NO: 15231008 NR Description: membrane import protein -related [Arabidopsis
MSLKPELFEGLRFDFTKMLTQKFALSHSVLMGSLEVPSQSADVIKVPTSQYEFGANFLDPKLMLIGRLMTDGRLNARVKCDLTENLALKINAQLTSEPHYSQGMFNFDYKGTDYRAQFQIGNNAFYGANYIQSVTPNLSMGTEIFWLGQQRKSGIGFNSRYNTDKMVGTLQVASTGIVALSYVQKVSEKVSLATDFMYNHMSRDVTSSVGYDYILRQCRLRGKVDSNGVVAAYLEERLNMGVNFLLSAEIDHPKKNYKFGFGMTVGE

SEQ ID NO: 65112 - protein, 250 aa, Triticum aestivum
  peptide (1)..(250): Ceres Seq. ID no. 13502861
  misc_feature (1)..(243): Pfam Name: Eukaryotic porin Pfam Description: Eukaryotic porin
  misc_feature (1)..(86): Homolog of NCBI NO: 13162531 NR Description: Hypothetical protein [Arabidopsis thaliana]
  misc_feature (123)..(250): Homolog of NCBI NO: 34903264 NR Description: unnamed protein product [Oryza sativa (japonica
  misc_feature (1)..(193): Homolog of NCBI NO: 34903264 NR Description: unnamed protein product [Oryza sativa (japonica
  misc_feature (158)..(250): Homolog of NCBI NO: 2982293 NR Description: ISP42-like protein [Picea mariana]
  misc_feature (73)..(246): Homolog of NCBI NO: 25405370 NR Description: hypothetical protein F14I3.2 [imported] -
  misc_feature (73)..(246): Homolog of NCBI NO: 13162531 NR Description: Hypothetical protein [Arabidopsis thaliana]
  misc_feature (1)..(45): Homolog of NCBI NO: 11994775 NR Description: membrane import protein-like [Arabidopsis
  misc_feature (76)..(249): Homolog of NCBI NO: 11994775 NR Description: membrane import protein-like [Arabidopsis
  misc_feature (1)..(246): Homolog of NCBI NO: 15222963 NR Description: hypothetical protein [Arabidopsis thaliana]
  misc_feature (1)..(249): Homolog of NCBI NO: 15231008 NR Description: membrane import protein -related [Arabidopsis
MLTQKFALSHSVLMGSLEVPSQSADVIKVPTSQYEFGANFLDPKLMLIGRLMTDGRLNARVKCDLTENLALKINAQLTSEPHYSQGMFNFDYKGTDYRAQFQIGNNAFYGANYIQSVTPNLSMGTEIFWLGQQRKSGIGFNSRYNTDKMVGTLQVASTGIVALSYVQKVSEKVSLATDFMYNHMSRDVTSSVGYDYILRQCRLRGKVDSNGVVAAYLEERLNMGVNFLLSAEIDHPKKNYKFGFGMTVGE

SEQ ID NO: 65113 - DNA, 1490 bp, Triticum aestivum
  misc_feature (1)..(1490): Ceres Seq. ID no. 13584608
attaagctcgctcctcgttgtgcttctccactcgcacggcgaagaacagggcacctctgaccgaacatagcagcatagcatctccccacgctctcacgcatcaccacagctacagcatcaagatcactagtagtagatcaactagccaggtatagctatggcgtccgagcagagtcgccgcgaggagcgcgcgcaggccgcggcgcagaaggcgaccgacgagctcgccgcggccaggcgggacatgcgcgagcccagcagcccaggacggcggaccggcatcttcggcaccgtgcaggagagcgcgcgctccctgatgggcgccgtccgcgacaccttctccggcggcgtccgggacacaaccacggcacacgacagccactccacaggcgccatggggaccgcgggggggaaactcaatgagtacgggagctacgcatcccagaaggccgatgaagggaaggagagcgcgagtgagatggcggaagccgccgcggggaagaccaaggagaccaaggatgcggccgcggagaagacgagggagatggcggacgccgccgcggggaagaccaaggagaccaaggacgcggcggtggagaagacgagggagatggcggacaccgccgcgacgaaggccgtggagaccaaggacgcggccgcagagaaggcgcgcggcgcgggggagatggtgacggagaaggcgaggagtgccaaggacacggcggctgacaaggcgagtggagcggcggagaaggcgaagggcgccaaggacgcagccttcgatacagcggagggtgccaaggagtacatggtggacaagaaggaggacgcccggcgagcgctcgccggctcggccaaggatagcaagggcgagacgaacgagtcggcgtggcaacagggccaggacgtgcggcggcgggcggcggagaaggccgaggaggttcgtcagcgcacgcaccaaccgccggaggaggggaggtcgaagtcggcaacggagaacatcttcgggtcggcgcaggggttgacggaggcgttcaaggagaagatgacgatgccgacggacgtgatcgagcggaagctcgctgagaggaaggggacgccgacggacgcgagcaggggcgaggcactgaacacggacgacgtgatgatgcgcgtgaaggaggcggaccagatgaccgggacagggtttaacgacgtcggcaagatgggcgaggagggcacgggcatgaaggcggcactgagggtcgacgatgaggaggacgtgatgctgcgggtgaaggcggcggaccagatgacagggcaggcgttcaacgacgtcggcccgatgggcgaggagggcacgggatggggtccggcgttgagggcgcggaaggacgcctgagagcgttgacacgtgcatgcactcctgttgcgtgtgagcgttttgtgtgacactttgtagtacaagctactcctgtagcaaatcaataaattatgcccggcaacttttt

SEQ ID NO: 65114 - protein, 407 aa, Triticum aestivum
  peptide (1)..(407): Ceres Seq. ID no. 13584609
  misc_feature (224)..(302): Pfam Name: Late embryogenesis abundant protein Pfam Description: Late embryogenesis abundant protein
  misc_feature (48)..(396): Homolog of NCBI NO: 15231736 NR Description: late embryogenesis abundant (LEA) protein,
  misc_feature (4)..(376): Homolog of NCBI NO: 481805 NR Description: embryonic protein BP8 - European white birch
  misc_feature (85)..(393): Homolog of NCBI NO: 119127 NR Description: Embryonic protein DC-8
  misc_feature (3)..(353): Homolog of NCBI NO: 15231736 NR Description: late embryogenesis abundant (LEA) protein,
  misc_feature (146)..(396): Homolog of NCBI NO: 34903266 NR Description: unnamed protein product [Oryza sativa (japonica
  misc_feature (2)..(361): Homolog of NCBI NO: 7487938 NR Description: late embryogenesis abundant protein - Arabidopsis
  misc_feature (2)..(361): Homolog of NCBI NO: 15228014 NR Description: late embryogenesis abundant (LEA) protein (ECP63)
  misc_feature (46)..(394): Homolog of NCBI NO: 282899 NR Description: embryonic abundant protein, 59K - soybean
  misc_feature (2)..(354): Homolog of NCBI NO: 481805 NR Description: embryonic protein BP8 - European white birch
  misc_feature (93)..(407): Homolog of NCBI NO: 485510 NR Description: embryonic abundant protein, group 3 - wheat
MASEQSRREERAQAAAQKATDELAAARRDMREPSSPGRRTGIFGTVQESARSLMGAVRDTFSGGVRDTTTAHDSHSTGAMGTAGGKLNEYGSYASQKADEGKESASEMAEAAAGKTKETKDAAAEKTREMADAAAGKTKETKDAAVEKTREMADTAATKAVETKDAAAEKARGAGEMVTEKARSAKDTAADKASGAAEKAKGAKDAAFDTAEGAKEYMVDKKEDARRALAGSAKDSKGETNESAWQQGQDVRRRAAEKAEEVRQRTHQPPEEGRSKSATENIFGSAQGLTEAFKEKMTMPTDVIERKLAERKGTPTDASRGEALNTDDVMMRVKEADQMTGTGFNDVGKMGEEGTGMKAALRVDDEEDVMLRVKAADQMTGQAFNDVGPMGEEGTGWGPALRARKDA

SEQ ID NO: 65115 - protein, 378 aa, Triticum aestivum
  peptide (1)..(378): Ceres Seq. ID no. 13584610
  misc_feature (195)..(273): Pfam Name: Late embryogenesis abundant protein Pfam Description: Late embryogenesis abundant protein
  misc_feature (19)..(367): Homolog of NCBI NO: 15231736 NR Description: late embryogenesis abundant (LEA) protein,
  misc_feature (1)..(347): Homolog of NCBI NO: 481805 NR Description: embryonic protein BP8 - European white birch
  misc_feature (56)..(364): Homolog of NCBI NO: 119127 NR Description: Embryonic protein DC-8
  misc_feature (1)..(324): Homolog of NCBI NO: 15231736 NR Description: late embryogenesis abundant (LEA) protein,
  misc_feature (117)..(367): Homolog of NCBI NO: 34903266 NR Description: unnamed protein product [Oryza sativa (japonica
  misc_feature (1)..(332): Homolog of NCBI NO: 7487938 NR Description: late embryogenesis abundant protein - Arabidopsis
  misc_feature (1)..(332): Homolog of NCBI NO: 15228014 NR Description: late embryogenesis abundant (LEA) protein (ECP63)
  misc_feature (17)..(365): Homolog of NCBI NO: 282899 NR Description: embryonic abundant protein, 59K - soybean
  misc_feature (1)..(325): Homolog of NCBI NO: 481805 NR Description: embryonic protein BP8 - European white birch
  misc_feature (64)..(378): Homolog of NCBI NO: 485510 NR Description: embryonic abundant protein, group 3 - wheat
MREPSSPGRRTGIFGTVQESARSLMGAVRDTFSGGVRDTTTAHDSHSTGAMGTAGGKLNEYGSYASQKADEGKESASEMAEAAAGKTKETKDAAAEKTREMADAAAGKTKETKDAAVEKTREMADTAATKAVETKDAAAEKARGAGEMVTEKARSAKDTAADKASGAAEKAKGAKDAAFDTAEGAKEYMVDKKEDARRALAGSAKDSKGETNESAWQQGQDVRRRAAEKAEEVRQRTHQPPEEGRSKSATENIFGSAQGLTEAFKEKMTMPTDVIERKLAERKGTPTDASRGEALNTDDVMMRVKEADQMTGTGFNDVGKMGEEGTGMKAALRVDDEEDVMLRVKAADQMTGQAFNDVGPMGEEGTGWGPALRARKDA

SEQ ID NO: 65116 - protein, 354 aa, Triticum aestivum
  peptide (1)..(354): Ceres Seq. ID no. 13584611
  misc_feature (171)..(249): Pfam Name: Late embryogenesis abundant protein Pfam Description: Late embryogenesis abundant protein
  misc_feature (1)..(343): Homolog of NCBI NO: 15231736 NR Description: late embryogenesis abundant (LEA) protein,
  misc_feature (1)..(323): Homolog of NCBI NO: 481805 NR Description: embryonic protein BP8 - European white birch
  misc_feature (32)..(340): Homolog of NCBI NO: 119127 NR Description: Embryonic protein DC-8
  misc_feature (1)..(300): Homolog of NCBI NO: 15231736 NR Description: late embryogenesis abundant (LEA) protein,
  misc_feature (93)..(343): Homolog of NCBI NO: 34903266 NR Description: unnamed protein product [Oryza sativa (japonica
  misc_feature (1)..(308): Homolog of NCBI NO: 7487938 NR Description: late embryogenesis abundant protein - Arabidopsis
  misc_feature (1)..(308): Homolog of NCBI NO: 15228014 NR Description: late embryogenesis abundant (LEA) protein (ECP63)
  misc_feature (1)..(341): Homolog of NCBI NO: 282899 NR Description: embryonic abundant protein, 59K - soybean
  misc_feature (1)..(301): Homolog of NCBI NO: 481805 NR Description: embryonic protein BP8 - European white birch
  misc_feature (40)..(354): Homolog of NCBI NO: 485510 NR Description: embryonic abundant protein, group 3 - wheat
MGAVRDTFSGGVRDTTTAHDSHSTGAMGTAGGKLNEYGSYASQKADEGKESASEMAEAAAGKTKETKDAAAEKTREMADAAAGKTKETKDAAVEKTREMADTAATKAVETKDAAAEKARGAGEMVTEKARSAKDTAADKASGAAEKAKGAKDAAFDTAEGAKEYMVDKKEDARRALAGSAKDSKGETNESAWQQGQDVRRRAAEKAEEVRQRTHQPPEEGRSKSATENIFGSAQGLTEAFKEKMTMPTDVIERKLAERKGTPTDASRGEALNTDDVMMRVKEADQMTGTGFNDVGKMGEEGTGMKAALRVDDEEDVMLRVKAADQMTGQAFNDVGPMGEEGTGWGPALRARKDA

SEQ ID NO: 65117 - DNA, 2306 bp, Triticum aestivum
  misc_feature (1)..(2306): Ceres Seq. ID no. 13655755
atccctctcccaactccaaaccatctccgccgccgccgccgaacaccacctccaccgcccacgaaatcttctccccgaagacgcgcgaaccccgccggagacgagaggcatggacgccaagtcggtgacgccgggcgccgtggctctcatcctcgccaaccccacgccggagtcgcccgacgacgtgccggagatcgtcgtgcaggtcctcgacctcaagcccatcggctcccgcttcactttcatggccagcgacggggaggcgaaggtcaaggcgatcctctccacccacttcgcgtcggaggtccactccggcaagctccagaacctcggcctcgtccgcatcctcaactacacgtgcaacgacatcccacaaaagacggacaagatggtgatcatcaccaagtgcgaggtcgtgtcccaggcgctcgacgccgagatcaagagcgaggtcaggatagaagagccagcggctctcatgaagcccaaggaggaggctgcggtcctctccaagcccattggcggggccccggctgcgattatgctgaagccgaggcatgacgtgaagtccgcgtcccagattgttagcgagcagcgcggaaatgctgctcccgctgctcgcttggccatgacgagacgggtgcatcctctgatctccctgaacccctaccaggggaactgggtcatcaaagtgcgggtcacaagcaagggcaacctcaggtcatacaggaatgcccgtggagaaggccatgtcttcaacgtagagctcactgatgaggatggcacccagatccaggccaccatgttcaacgagcctgcaaagaagttctatcccgtgtttgagcttgggaaggtctactacatctccaaggggtcgctcagaattgcgaacaagcagttcaagacagtccagaatgactatgagatgaccctgaatgagaatgctgttgttgaagaagctgagggtgaatctttcattccaccagtgcaatacaactttgtcaagattgatatgctggggccatatgttggtggcagggagttagtagatatcattggtgttgttcagagtgtatcacctactttgagtatcagaagaaagatcgacaatgagtcaatcccaaagcgtgacattgttgttgcagatgactcgaacaaaactgtcaccatttctctttggaatgatcttgccaccactgtcggtgaggaactcttggacatggttgactctgcacctatcattgcagtcaagagcctgaaggtgtctgactttcaaggtgtgtctgtttctacagtaggcaaaagcacacttgtgattaacccagagttgcctgagactgagaagcttagagcttggtatgaatctgaaggcaagggtactgccttggcatcagttggtgctggaatgggtgcatccaacgctggtggcttgagatcaatgtactctgacagagtttttctgtctcacatcacaagtgaccctaacttgggccaggataagcctgttttcttcagcctgtatgccaacataagcaacatcaagcctgaccagaccatgtggtaccgcgcttgcaccacctgtaacaagaaggtgactgaggcacttggatcaggattctggtgtgaagggtgccagaagaactatgagcagtgctcattgaggtacatcatggtgatcaaggtctctgatcccactggtgaggcctggctgtctcttttcaatgaccaagcagagagaatcgtcggctgcagcgcagatgagcttgatcggatcaggaaagaggagggcgatgacatgttccagctcaagctgaaggaagccacctggattcctcacctgttccgtgtcagcgtcgtgcagaacgagtacatgggcgagaagaggcagcgaatcaccgtgaggagcgagtcaccggtcgactacgccgctgaagccaggtaccagctcgaggagatcgccaagctcacctccagctagaagaagatgcaagaggagtatgcctgctcccctcgaggagattcccaagctcaccgctgcctgctgggagaagatgctccccttgaggagatagatatccaggctcatcgcactagacggagccatgttttggccccaagtttcctgaagtgtagtgctgcttcagccgtgtctttctgccgtgtcgctcctcaaatgtagtggtaacttaaaacgtgttatatatgtagatgtttgattcggaggacatcggggtattcttctgttctactatctgtttgatctgcaaccttctgcatatgacaaggatgtatgcagatccactgcc

SEQ ID NO: 65118 - protein, 658 aa, Triticum aestivum
  peptide (1)..(658): Ceres Seq. ID no. 13655756
  misc_feature (227)..(311): Pfam Name: OB-fold nucleic acid binding domain Pfam Description: OB-fold nucleic acid binding domain
  misc_feature (42)..(654): Homolog of NCBI NO: 34872759 NR Description: similar to replication protein A1 [Rattus
  misc_feature (39)..(139): Homolog of NCBI NO: 15242405 NR Description: replication protein, putative [Arabidopsis
  misc_feature (201)..(655): Homolog of NCBI NO: 15242405 NR Description: replication protein, putative [Arabidopsis
  misc_feature (41)..(141): Homolog of NCBI NO: 15225129 NR Description: replication protein, putative [Arabidopsis
  misc_feature (185)..(654): Homolog of NCBI NO: 15225129 NR Description: replication protein, putative [Arabidopsis
  misc_feature (41)..(653): Homolog of NCBI NO: 15239494 NR Description: replication protein, putative [Arabidopsis
  misc_feature (41)..(185): Homolog of NCBI NO: 15241489 NR Description: replication protein, putative [Arabidopsis
  misc_feature (176)..(658): Homolog of NCBI NO: 15241489 NR Description: replication protein, putative [Arabidopsis
  misc_feature (39)..(656): Homolog of NCBI NO: 31580977 NR Description: replication protein A 70b [Oryza sativa (japonica
  misc_feature (39)..(656): Homolog of NCBI NO: 7440032 NR Description: probable replication protein A1 - rice
SLSQLQTISAAAAEHHLHRPRNLLPEDARTPPETRGMDAKSVTPGAVALILANPTPESPDDVPEIVVQVLDLKPIGSRFTFMASDGEAKVKAILSTHFASEVHSGKLQNLGLVRILNYTCNDIPQKTDKMVIITKCEVVSQALDAEIKSEVRIEEPAALMKPKEEAAVLSKPIGGAPAAIMLKPRHDVKSASQIVSEQRGNAAPAARLAMTRRVHPLISLNPYQGNWVIKVRVTSKGNLRSYRNARGEGHVFNVELTDEDGTQIQATMFNEPAKKFYPVFELGKVYYISKGSLRIANKQFKTVQNDYEMTLNENAVVEEAEGESFIPPVQYNFVKIDMLGPYVGGRELVDIIGVVQSVSPTLSIRRKIDNESIPKRDIVVADDSNKTVTISLWNDLATTVGEELLDMVDSAPIIAVKSLKVSDFQGVSVSTVGKSTLVINPELPETEKLRAWYESEGKGTALASVGAGMGASNAGGLRSMYSDRVFLSHITSDPNLGQDKPVFFSLYANISNIKPDQTMWYRACTTCNKKVTEALGSGFWCEGCQKNYEQCSLRYIMVIKVSDPTGEAWLSLFNDQAERIVGCSADELDRIRKEEGDDMFQLKLKEATWIPHLFRVSVVQNEYMGEKRQRITVRSESPVDYAAEARYQLEEIAKLTSS

SEQ ID NO: 65119 - protein, 622 aa, Triticum aestivum
  peptide (1)..(622): Ceres Seq. ID no. 13655757
  misc_feature (191)..(275): Pfam Name: OB-fold nucleic acid binding domain Pfam Description: OB-fold nucleic acid binding domain
  misc_feature (6)..(618): Homolog of NCBI NO: 34872759 NR Description: similar to replication protein A1 [Rattus
  misc_feature (3)..(103): Homolog of NCBI NO: 15242405 NR Description: replication protein, putative [Arabidopsis
  misc_feature (165)..(619): Homolog of NCBI NO: 15242405 NR Description: replication protein, putative [Arabidopsis
  misc_feature (5)..(105): Homolog of NCBI NO: 15225129 NR Description: replication protein, putative [Arabidopsis
  misc_feature (149)..(618): Homolog of NCBI NO: 15225129 NR Description: replication protein, putative [Arabidopsis
  misc_feature (5)..(617): Homolog of NCBI NO: 15239494 NR Description: replication protein, putative [Arabidopsis
  misc_feature (5)..(149): Homolog of NCBI NO: 15241489 NR Description: replication protein, putative [Arabidopsis
  misc_feature (140)..(622): Homolog of NCBI NO: 15241489 NR Description: replication protein, putative [Arabidopsis
  misc_feature (3)..(620): Homolog of NCBI NO: 31580977 NR Description: replication protein A 70b [Oryza sativa (japonica
  misc_feature (3)..(620): Homolog of NCBI NO: 7440032 NR Description: probable replication protein A1 - rice
MDAKSVTPGAVALILANPTPESPDDVPEIVVQVLDLKPIGSRFTFMASDGEAKVKAILSTHFASEVHSGKLQNLGLVRILNYTCNDIPQKTDKMVIITKCEVVSQALDAEIKSEVRIEEPAALMKPKEEAAVLSKPIGGAPAAIMLKPRHDVKSASQIVSEQRGNAAPAARLAMTRRVHPLISLNPYQGNWVIKVRVTSKGNLRSYRNARGEGHVFNVELTDEDGTQIQATMFNEPAKKFYPVFELGKVYYISKGSLRIANKQFKTVQNDYEMTLNENAVVEEAEGESFIPPVQYNFVKIDMLGPYVGGRELVDIIGVVQSVSPTLSIRRKIDNESIPKRDIVVADDSNKTVTISLWNDLATTVGEELLDMVDSAPIIAVKSLKVSDFQGVSVSTVGKSTLVINPELPETEKLRAWYESEGKGTALASVGAGMGASNAGGLRSMYSDRVFLSHITSDPNLGQDKPVFFSLYANISNIKPDQTMWYRACTTCNKKVTEALGSGFWCEGCQKNYEQCSLRYIMVIKVSDPTGEAWLSLFNDQAERIVGCSADELDRIRKEEGDDMFQLKLKEATWIPHLFRVSVVQNEYMGEKRQRITVRSESPVDYAAEARYQLEEIAKLTSS

SEQ ID NO: 65120 - protein, 577 aa, Triticum aestivum
  peptide (1)..(577): Ceres Seq. ID no. 13655758
  misc_feature (146)..(230): Pfam Name: OB-fold nucleic acid binding domain Pfam Description: OB-fold nucleic acid binding domain
  misc_feature (1)..(573): Homolog of NCBI NO: 34872759 NR Description: similar to replication protein A1 [Rattus
  misc_feature (1)..(58): Homolog of NCBI NO: 15242405 NR Description: replication protein, putative [Arabidopsis
  misc_feature (120)..(574): Homolog of NCBI NO: 15242405 NR Description: replication protein, putative [Arabidopsis
  misc_feature (1)..(60): Homolog of NCBI NO: 15225129 NR Description: replication protein, putative [Arabidopsis
  misc_feature (104)..(573): Homolog of NCBI NO: 15225129 NR Description: replication protein, putative [Arabidopsis
  misc_feature (1)..(572): Homolog of NCBI NO: 15239494 NR Description: replication protein, putative [Arabidopsis
  misc_feature (1)..(104): Homolog of NCBI NO: 15241489 NR Description: replication protein, putative [Arabidopsis
  misc_feature (95)..(577): Homolog of NCBI NO: 15241489 NR Description: replication protein, putative [Arabidopsis
  misc_feature (1)..(575): Homolog of NCBI NO: 31580977 NR Description: replication protein A 70b [Oryza sativa (japonica
  misc_feature (1)..(575): Homolog of NCBI NO: 7440032 NR Description: probable replication protein A1 - rice
MASDGEAKVKAILSTHFASEVHSGKLQNLGLVRILNYTCNDIPQKTDKMVIITKCEVVSQALDAEIKSEVRIEEPAALMKPKEEAAVLSKPIGGAPAAIMLKPRHDVKSASQIVSEQRGNAAPAARLAMTRRVHPLISLNPYQGNWVIKVRVTSKGNLRSYRNARGEGHVFNVELTDEDGTQIQATMFNEPAKKFYPVFELGKVYYISKGSLRIANKQFKTVQNDYEMTLNENAVVEEAEGESFIPPVQYNFVKIDMLGPYVGGRELVDIIGVVQSVSPTLSIRRKIDNESIPKRDIVVADDSNKTVTISLWNDLATTVGEELLDMVDSAPIIAVKSLKVSDFQGVSVSTVGKSTLVINPELPETEKLRAWYESEGKGTALASVGAGMGASNAGGLRSMYSDRVFLSHITSDPNLGQDKPVFFSLYANISNIKPDQTMWYRACTTCNKKVTEALGSGFWCEGCQKNYEQCSLRYIMVIKVSDPTGEAWLSLFNDQAERIVGCSADELDRIRKEEGDDMFQLKLKEATWIPHLFRVSVVQNEYMGEKRQRITVRSESPVDYAAEARYQLEEIAKLTSS

SEQ ID NO: 65121 - DNA, 1399 bp, Triticum aestivum
  misc_feature (1)..(1399): Ceres Seq. ID no. 13503512
acttcgcttccttcatcttcccgggcggtgcggtgcgtacggcgcaaccagatctcacggcgaggccgagctaaccgcctccggatccgcacaaacccccaacagccgtacgcaccgcagcagcggcggcggaggagcatggagagctcgtcgccttcggtgccgttcccgctgctgcaggcgccagtggagagcacgtaccgtgcctgcaccataccctaccgcttcccctccgacaacccccacaaggccacccccgtcgagatccagtggatcgacctcttcctgaaatccgtgccatccttcaggcagcgggcggagaatgaccccacggtgccggatgcccccgccaaggccgagaagtttgctcagaggtacactgatatgcttgaggagttgaagaagaacccagagagccatggaggacctcctgattgcatacttctttgtaggcttcgtgagctaatccttagagaattggggtttcatgacatcttcaagaaggtcaaggatgaggagaacgctaaggctatgtcactgtttgagggagttgttcagcggaatgatgaaatagaagatggtgagaaacgagcagagaacttgatccgtggaatcttagcaggaaacatatttgacttagggtctgcacagcttgcagaagtttttgctaaagatggcatgtccttcttggcgagttgccagaatcttttatctcgaccttgggttattgatgacctagatgcatttaaaagcaaatggaccaagaaatcttgggaaaaggcagttatttttgttgataattctggtgctgatatcatattgggcatattaccatttgcgagggagttgctccgacgtggcactaaggtgatacttgccgccaatgacatgccttccatcaacgatatcacttacctagagttagttgagattgtaaacaagctcaaggacgaaaatggaaagcttgctggtgtggatgtatctgacctcattgttgccaactccgggaacgatctgccagtaatagatttgtctagcgtcgcaccggaactagcctatatggcaagtgatgctgacttggtcatcctagaaggcatgggaagaggaatcgaaaccaacctatacgcacaaatgagatgtgactcgatcaagattggaatggtcaagcatcctgaagtggcgcagtttttgggtggaaggctttatgattgtgtcttcaagttcaacgaggcctgaaaaacactgaagcccctgcatggcaccagccatattgcattcattttaatcattgattactgatgcaatcgtacactgaatgtatgcgtccacgatgatagcaagtggaagaaattacaattcgcttgttgtactgtgaggaaggacaatttttattgcaaat

SEQ ID NO: 65122 - protein, 411 aa, Triticum aestivum
  peptide (1)..(411): Ceres Seq. ID no. 13503513
  misc_feature (83)..(408): Pfam Name: Protein of unknown function DUF89 Pfam Description: Protein of unknown function DUF89
  misc_feature (54)..(217): Homolog of NCBI NO: 7486028 NR Description: hypothetical protein F23E12.80 - Arabidopsis
  misc_feature (210)..(315): Homolog of NCBI NO: 15227811 NR Description: expressed protein [Arabidopsis thaliana]
  misc_feature (310)..(410): Homolog of NCBI NO: 15227811 NR Description: expressed protein [Arabidopsis thaliana]
  misc_feature (54)..(226): Homolog of NCBI NO: 15227811 NR Description: expressed protein [Arabidopsis thaliana]
  misc_feature (289)..(410): Homolog of NCBI NO: 25370535 NR Description: hypothetical protein At2g17340 [imported] -
  misc_feature (47)..(213): Homolog of NCBI NO: 25370535 NR Description: hypothetical protein At2g17340 [imported] -
  misc_feature (47)..(410): Homolog of NCBI NO: 18398388 NR Description: expressed protein [Arabidopsis thaliana]
  misc_feature (47)..(410): Homolog of NCBI NO: 21554574 NR Description: unknown [Arabidopsis thaliana]
  misc_feature (47)..(410): Homolog of NCBI NO: 18418688 NR Description: expressed protein [Arabidopsis thaliana]
  misc_feature (47)..(410): Homolog of NCBI NO: 21554145 NR Description: unknown [Arabidopsis thaliana]
TSLPSSSRAVRCVRRNQISRRGRANRLRIRTNPQQPYAPQQRRRRSMESSSPSVPFPLLQAPVESTYRACTIPYRFPSDNPHKATPVEIQWIDLFLKSVPSFRQRAENDPTVPDAPAKAEKFAQRYTDMLEELKKNPESHGGPPDCILLCRLRELILRELGFHDIFKKVKDEENAKAMSLFEGVVQRNDEIEDGEKRAENLIRGILAGNIFDLGSAQLAEVFAKDGMSFLASCQNLLSRPWVIDDLDAFKSKWTKKSWEKAVIFVDNSGADIILGILPFARELLRRGTKVILAANDMPSINDITYLELVEIVNKLKDENGKLAGVDVSDLIVANSGNDLPVIDLSSVAPELAYMASDADLVILEGMGRGIETNLYAQMRCDSIKIGMVKHPEVAQFLGGRLYDCVFKFNEA

SEQ ID NO: 65123 - protein, 365 aa, Triticum aestivum
  peptide (1)..(365): Ceres Seq. ID no. 13503514
  misc_feature (37)..(362): Pfam Name: Protein of unknown function DUF89 Pfam Description: Protein of unknown function DUF89
  misc_feature (8)..(171): Homolog of NCBI NO: 7486028 NR Description: hypothetical protein F23E12.80 - Arabidopsis
  misc_feature (164)..(269): Homolog of NCBI NO: 15227811 NR Description: expressed protein [Arabidopsis thaliana]
  misc_feature (264)..(364): Homolog of NCBI NO: 15227811 NR Description: expressed protein [Arabidopsis thaliana]
  misc_feature (8)..(180): Homolog of NCBI NO: 15227811 NR Description: expressed protein [Arabidopsis thaliana]
  misc_feature (243)..(364): Homolog of NCBI NO: 25370535 NR Description: hypothetical protein At2g17340 [imported] -
  misc_feature (1)..(167): Homolog of NCBI NO: 25370535 NR Description: hypothetical protein At2g17340 [imported] -
  misc_feature (1)..(364): Homolog of NCBI NO: 18398388 NR Description: expressed protein [Arabidopsis thaliana]
  misc_feature (1)..(364): Homolog of NCBI NO: 21554574 NR Description: unknown [Arabidopsis thaliana]
  misc_feature (1)..(364): Homolog of NCBI NO: 18418688 NR Description: expressed protein [Arabidopsis thaliana]
  misc_feature (1)..(364): Homolog of NCBI NO: 21554145 NR Description: unknown [Arabidopsis thaliana]
MESSSPSVPFPLLQAPVESTYRACTIPYRFPSDNPHKATPVEIQWIDLFLKSVPSFRQRAENDPTVPDAPAKAEKFAQRYTDMLEELKKNPESHGGPPDCILLCRLRELILRELGFHDIFKKVKDEENAKAMSLFEGVVQRNDEIEDGEKRAENLIRGILAGNIFDLGSAQLAEVFAKDGMSFLASCQNLLSRPWVIDDLDAFKSKWTKKSWEKAVIFVDNSGADIILGILPFARELLRRGTKVILAANDMPSINDITYLELVEIVNKLKDENGKLAGVDVSDLIVANSGNDLPVIDLSSVAPELAYMASDADLVILEGMGRGIETNLYAQMRCDSIKIGMVKHPEVAQFLGGRLYDCVFKFNEA

SEQ ID NO: 65124 - protein, 283 aa, Triticum aestivum
  peptide (1)..(283): Ceres Seq. ID no. 13503515
  misc_feature (1)..(280): Pfam Name: Protein of unknown function DUF89 Pfam Description: Protein of unknown function DUF89
  misc_feature (1)..(89): Homolog of NCBI NO: 7486028 NR Description: hypothetical protein F23E12.80 - Arabidopsis
  misc_feature (82)..(187): Homolog of NCBI NO: 15227811 NR Description: expressed protein [Arabidopsis thaliana]
  misc_feature (182)..(282): Homolog of NCBI NO: 15227811 NR Description: expressed protein [Arabidopsis thaliana]
  misc_feature (1)..(98): Homolog of NCBI NO: 15227811 NR Description: expressed protein [Arabidopsis thaliana]
  misc_feature (161)..(282): Homolog of NCBI NO: 25370535 NR Description: hypothetical protein At2g17340 [imported] -
  misc_feature (1)..(85): Homolog of NCBI NO: 25370535 NR Description: hypothetical protein At2g17340 [imported] -
  misc_feature (1)..(282): Homolog of NCBI NO: 18398388 NR Description: expressed protein [Arabidopsis thaliana]
  misc_feature (1)..(282): Homolog of NCBI NO: 21554574 NR Description: unknown [Arabidopsis thaliana]
  misc_feature (1)..(282): Homolog of NCBI NO: 18418688 NR Description: expressed protein [Arabidopsis thaliana]
  misc_feature (1)..(282): Homolog of NCBI NO: 21554145 NR Description: unknown [Arabidopsis thaliana]
MLEELKKNPESHGGPPDCILLCRLRELILRELGFHDIFKKVKDEENAKAMSLFEGVVQRNDEIEDGEKRAENLIRGILAGNIFDLGSAQLAEVFAKDGMSFLASCQNLLSRPWVIDDLDAFKSKWTKKSWEKAVIFVDNSGADIILGILPFARELLRRGTKVILAANDMPSINDITYLELVEIVNKLKDENGKLAGVDVSDLIVANSGNDLPVIDLSSVAPELAYMASDADLVILEGMGRGIETNLYAQMRCDSIKIGMVKHPEVAQFLGGRLYDCVFKFNEA

SEQ ID NO: 65125 - DNA, 1914 bp, Triticum aestivum
  misc_feature (1)..(1914): Ceres Seq. ID no. 15225845
tcccctcttcctccctccctcctcgccaccgctccgctccactccacacccctgttcccagacgcaaccaccgccgccgacgaccgacgatgcttcgcgccgtcctcctccgctcagcctccggcctccgccggtcgccgatggccgccccgctatccaccgccgccgcctcgtggctcgccgaggggacctcgtcgccgcccagggtgcgcctactcatcggcggcgacttcgtcgagtcgaaggccaccgagcacgtcgacgtcaccaaccccgcgacgcaggaggtggtgtcccggatcccgctcaccaccgccgacgagttcagggccgcggtggacgctgccaggaccgccttccctggctggcggaacactccggtcacggcgcggcagcgcatcatgttcaaataccaggagctcatccgggccaacatggataagctggcagagaacattacaaccgagcagggaaagacactgaaagatgcttggggtgatgtattccgtggtctagaggtggtggagcatgcttgtggaatggggtcacttcaaatgggcgaatacgtatctaatgtttctcatgggattgacacctttagtattagggagccactcggcgtatgtgctgggatttgcccattcaatttccctgccatgattcccctatggatgttccccatagctgttacttgtgggaatacttttgttctaaagccatcagaaaaggatccaggggctgctatgatgcttgcggagctagcgatggaggctggtttaccaaagggtgtgttgaacattgttcatggtacccatgatgttgtcaacaatatttgtgatgacgaggctattaaggcagtatcatttgttggttccaatacagcaggtatgcatatatattctagagcatctgcgagtgggaagcgtgttcagtgtaacatgggtgcaaagaatcatgccattatccttcctgatgctgatcgagatgccacattgaatgcccttattgctgccggttttggtgcagctgggcaaaggtgcatggcattgagcactgctgtttttgttggaggttcagaaccatgggaggatgaactagtcaaacgtgcaagcaaccttgtagttaattccggaacagctaatgatgctgaccttggtccagtgatcagtacacaggccaaggaccgcatctgcaagttagtccaaagtggcgctgacagtggtgctcgacttgtgctggatggaagggagattgtggttcctcaatttgaggatggcaactttattggtccaactgtgttggctgatgttaaaagtgatatggagtgttaccaggaggaaatttttggtccagttcttctcttgatgaaggcagagagcctagatgatgccatacaaattgtaaacagaaacaagtatggcaatggggcttccatctttaccacatctggtgtctcagcaaggaaatttcagacggacattgaagctggccaggtgggtatcaacgtgccgatcccggtacccctgccgttcttctccttcacgggtagcaaagcttccttcgccggagacttgaatttctacggcaaggcgggcgtgcagttcttcacccagatcaagaccatcacgcagcagtggaaggagtcgtctccccagcgcgtttctctctccatgcccacctcgcagaagtgaagtcacccgagctgactcatgtatgtcgaaataaacccaggcattgatgtggaatttaagcttcacaggagttgcctttcattaagggtaactcttgtgatgtctttcattgtgctgccggtaataagaaaatcccagattagacgaccgaatcacacgcacagcagagcatgtatttgtacagggaccaaattaatgtgtacatgcaatggctcgatatcac

SEQ ID NO: 65126 - protein, 562 aa, Triticum aestivum
  peptide (1)..(562): Ceres Seq. ID no. 15225846
  misc_feature (60)..(558): Homolog of NCBI NO: 17533151 NR Description: ALDH6A3, ALdehyde deHydrogenase (56.5 kD) (alh-8)
  misc_feature (38)..(559): Homolog of NCBI NO: 34867320 NR Description: hypothetical protein XP_346778 [Rattus norvegicus]
  misc_feature (38)..(559): Homolog of NCBI NO: 13591997 NR Description: methylmalonate semialdehyde dehydrogenase gene
  misc_feature (38)..(559): Homolog of NCBI NO: 19527258 NR Description: aldehyde dehydrogenase family 6, subfamily A1
  misc_feature (42)..(558): Homolog of NCBI NO: 39597473 NR Description: Hypothetical protein CBG03134 [Caenorhabditis
  misc_feature (33)..(559): Homolog of NCBI NO: 11095441 NR Description: aldehyde dehydrogenase 6A1 precursor
  misc_feature (182)..(562): Homolog of NCBI NO: 30144414 NR Description: methylmalonate semialdehyde dehydrogenase
  misc_feature (29)..(562): Homolog of NCBI NO: 15225601 NR Description: methylmalonate-semialdehyde dehydrogenase,
  misc_feature (30)..(562): Homolog of NCBI NO: 7431455 NR Description: probable methylmalonate-semialdehyde
  misc_feature (30)..(562): Homolog of NCBI NO: 34394614 NR Description: methylmalonate semi-aldehyde dehydrogenase
PSSSLPPRHRSAPLHTPVPRRNHRRRRPTMLRAVLLRSASGLRRSPMAAPLSTAAASWLAEGTSSPPRVRLLIGGDFVESKATEHVDVTNPATQEVVSRIPLTTADEFRAAVDAARTAFPGWRNTPVTARQRIMFKYQELIRANMDKLAENITTEQGKTLKDAWGDVFRGLEVVEHACGMGSLQMGEYVSNVSHGIDTFSIREPLGVCAGICPFNFPAMIPLWMFPIAVTCGNTFVLKPSEKDPGAAMMLAELAMEAGLPKGVLNIVHGTHDVVNNICDDEAIKAVSFVGSNTAGMHIYSRASASGKRVQCNMGAKNHAIILPDADRDATLNALIAAGFGAAGQRCMALSTAVFVGGSEPWEDELVKRASNLVVNSGTANDADLGPVISTQAKDRICKLVQSGADSGARLVLDGREIVVPQFEDGNFIGPTVLADVKSDMECYQEEIFGPVLLLMKAESLDDAIQIVNRNKYGNGASIFTTSGVSARKFQTDIEAGQVGINVPIPVPLPFFSFTGSKASFAGDLNFYGKAGVQFFTQIKTITQQWKESSPQRVSLSMPTSQK

SEQ ID NO: 65127 - protein, 533 aa, Triticum aestivum
  peptide (1)..(533): Ceres Seq. ID no. 15225847
  misc_feature (31)..(529): Homolog of NCBI NO: 17533151 NR Description: ALDH6A3, ALdehyde deHydrogenase (56.5 kD) (alh-8)
  misc_feature (9)..(530): Homolog of NCBI NO: 34867320 NR Description: hypothetical protein XP_346778 [Rattus norvegicus]
  misc_feature (9)..(530): Homolog of NCBI NO: 13591997 NR Description: methylmalonate semialdehyde dehydrogenase gene
  misc_feature (9)..(530): Homolog of NCBI NO: 19527258 NR Description: aldehyde dehydrogenase family 6, subfamily A1
  misc_feature (13)..(529): Homolog of NCBI NO: 39597473 NR Description: Hypothetical protein CBG03134 [Caenorhabditis
  misc_feature (4)..(530): Homolog of NCBI NO: 11095441 NR Description: aldehyde dehydrogenase 6A1 precursor
  misc_feature (153)..(533): Homolog of NCBI NO: 30144414 NR Description: methylmalonate semialdehyde dehydrogenase
  misc_feature (1)..(533): Homolog of NCBI NO: 15225601 NR Description: methylmalonate-semialdehyde dehydrogenase,
  misc_feature (1)..(533): Homolog of NCBI NO: 7431455 NR Description: probable methylmalonate-semialdehyde
  misc_feature (1)..(533): Homolog of NCBI NO: 34394614 NR Description: methylmalonate semi-aldehyde dehydrogenase
MLRAVLLRSASGLRRSPMAAPLSTAAASWLAEGTSSPPRVRLLIGGDFVESKATEHVDVTNPATQEVVSRIPLTTADEFRAAVDAARTAFPGWRNTPVTARQRIMFKYQELIRANMDKLAENITTEQGKTLKDAWGDVFRGLEVVEHACGMGSLQMGEYVSNVSHGIDTFSIREPLGVCAGICPFNFPAMIPLWMFPIAVTCGNTFVLKPSEKDPGAAMMLAELAMEAGLPKGVLNIVHGTHDVVNNICDDEAIKAVSFVGSNTAGMHIYSRASASGKRVQCNMGAKNHAIILPDADRDATLNALIAAGFGAAGQRCMALSTAVFVGGSEPWEDELVKRASNLVVNSGTANDADLGPVISTQAKDRICKLVQSGADSGARLVLDGREIVVPQFEDGNFIGPTVLADVKSDMECYQEEIFGPVLLLMKAESLDDAIQIVNRNKYGNGASIFTTSGVSARKFQTDIEAGQVGINVPIPVPLPFFSFTGSKASFAGDLNFYGKAGVQFFTQIKTITQQWKESSPQRVSLSMPTSQK

SEQ ID NO: 65128 - protein, 516 aa, Triticum aestivum
  peptide (1)..(516): Ceres Seq. ID no. 15225848
  misc_feature (14)..(512): Homolog of NCBI NO: 17533151 NR Description: ALDH6A3, ALdehyde deHydrogenase (56.5 kD) (alh-8)
  misc_feature (1)..(513): Homolog of NCBI NO: 34867320 NR Description: hypothetical protein XP_346778 [Rattus norvegicus]
  misc_feature (1)..(513): Homolog of NCBI NO: 13591997 NR Description: methylmalonate semialdehyde dehydrogenase gene
  misc_feature (1)..(513): Homolog of NCBI NO: 19527258 NR Description: aldehyde dehydrogenase family 6, subfamily A1
  misc_feature (1)..(512): Homolog of NCBI NO: 39597473 NR Description: Hypothetical protein CBG03134 [Caenorhabditis
  misc_feature (1)..(513): Homolog of NCBI NO: 11095441 NR Description: aldehyde dehydrogenase 6A1 precursor
  misc_feature (136)..(516): Homolog of NCBI NO: 30144414 NR Description: methylmalonate semialdehyde dehydrogenase
  misc_feature (1)..(516): Homolog of NCBI NO: 15225601 NR Description: methylmalonate-semialdehyde dehydrogenase,
  misc_feature (1)..(516): Homolog of NCBI NO: 7431455 NR Description: probable methylmalonate-semialdehyde
  misc_feature (1)..(516): Homolog of NCBI NO: 34394614 NR Description: methylmalonate semi-aldehyde dehydrogenase
MAAPLSTAAASWLAEGTSSPPRVRLLIGGDFVESKATEHVDVTNPATQEVVSRIPLTTADEFRAAVDAARTAFPGWRNTPVTARQRIMFKYQELIRANMDKLAENITTEQGKTLKDAWGDVFRGLEVVEHACGMGSLQMGEYVSNVSHGIDTFSIREPLGVCAGICPFNFPAMIPLWMFPIAVTCGNTFVLKPSEKDPGAAMMLAELAMEAGLPKGVLNIVHGTHDVVNNICDDEAIKAVSFVGSNTAGMHIYSRASASGKRVQCNMGAKNHAIILPDADRDATLNALIAAGFGAAGQRCMALSTAVFVGGSEPWEDELVKRASNLVVNSGTANDADLGPVISTQAKDRICKLVQSGADSGARLVLDGREIVVPQFEDGNFIGPTVLADVKSDMECYQEEIFGPVLLLMKAESLDDAIQIVNRNKYGNGASIFTTSGVSARKFQTDIEAGQVGINVPIPVPLPFFSFTGSKASFAGDLNFYGKAGVQFFTQIKTITQQWKESSPQRVSLSMPTSQK

SEQ ID NO: 65129 - DNA, 1319 bp, Triticum aestivum
  misc_feature (1)..(1319): Ceres Seq. ID no. 13597701
ccaccactcctggcatagatctccacctcccggtgagtgaccatggcggaggccgcaggagcgactcctctcctcgctggcctcccggacgagatcaccgtctcggagatcctcgctcgcctgccccccaaacccctcctccgctgccgcgccgtcagccccgcgtggcgccgcgccacctccacccgcgatttcctcctgtcccaccacgcccgccagcccgccctgcccctcctctgcagccacagcgacgtagccgacggcggccagtccctggacgtcacgctcttcgaccaccgtgcaggagtcgccgccgccgaccagttccagcgcgtcgcgcgactgaaaacaccccccttggaaggggggattgacgggagtgaaagtttcactcccctcttctatccggtggcctcctgcgacggcctcctcctcctctccatcgagtgtgacctctgcatctgcaacccggcgactcggcagtatgctcccctcgagcagctcgatggcttcatgaccgtggggttgtaccctcaccctcttaccggcgagtaccggctgttgctgtaccatgaaacagatcaacgtgccatctatgttttctcaattggctccaaccagccgccgaggcgcatcgggcgccctgatccgttggctggtgacgggcttctgttccgtggtagcctgcattggcacactggcaaccggataatggtattcgacaccgccactgagtcgttccggcagatccgtgccccggttgcccatgaggactatggacgactgtttgagatggatgacatgcttggcatcttctttcttaatgatgaaaagacgaccgttgatatttgggtgatgcaggactaccaaggcgaggtctgggctttcaagtgtcgggttgaattgccggttgccgagatcagggaccggtgtcaaaattctagccatattgaggaagtgatggttgttaatggtgatggtgagttgctcgtgttggtcggttttgaggactggctgtttcaggttgatattgatggcaagttgattgccagtttccatgccagaggcctcccttcctataatattgtgcacaagcaaactcttgttcaacataccttctttccgacactcgagggttatgttatgaatgattcgcctttcatttgaccagatgattatgttgtcaacgcttaggaatattgagtgttgtggtgtttcttattggcctagctctgcatgtccacatgagctgttgtatgtatcaactagatccattattaagcttctttgttcttggttgatgaatataaaaaagtatg

SEQ ID NO: 65130 - protein, 374 aa, Triticum aestivum
  peptide (1)..(374): Ceres Seq. ID no. 13597702
  misc_feature (13)..(56): Pfam Name: F-box domain Pfam Description: F-box domain
  misc_feature (121)..(198): Homolog of NCBI NO: 37530720 NR Description: unknown protein [Oryza sativa (japonica
  misc_feature (198)..(360): Homolog of NCBI NO: 37530720 NR Description: unknown protein [Oryza sativa (japonica
  misc_feature (1)..(360): Homolog of NCBI NO: 38344215 NR Description: OSJNBb0026E15.3 [Oryza sativa (japonica
  misc_feature (1)..(80): Homolog of NCBI NO: 37533944 NR Description: hypothetical protein [Oryza sativa (japonica
  misc_feature (115)..(194): Homolog of NCBI NO: 37533944 NR Description: hypothetical protein [Oryza sativa (japonica
  misc_feature (171)..(360): Homolog of NCBI NO: 37533944 NR Description: hypothetical protein [Oryza sativa (japonica
  misc_feature (1)..(374): Homolog of NCBI NO: 38346527 NR Description: OSJNBa0040D17.2 [Oryza sativa (japonica
  misc_feature (213)..(374): Homolog of NCBI NO: 38346045 NR Description: OSJNBa0059D20.17 [Oryza sativa (japonica
  misc_feature (1)..(240): Homolog of NCBI NO: 38346045 NR Description: OSJNBa0059D20.17 [Oryza sativa (japonica
  misc_feature (1)..(374): Homolog of NCBI NO: 38346536 NR Description: OSJNBa0040D17.11 [Oryza sativa (japonica
MAEAAGATPLLAGLPDEITVSEILARLPPKPLLRCRAVSPAWRRATSTRDFLLSHHARQPALPLLCSHSDVADGGQSLDVTLFDHRAGVAAADQFQRVARLKTPPLEGGIDGSESFTPLFYPVASCDGLLLLSIECDLCICNPATRQYAPLEQLDGFMTVGLYPHPLTGEYRLLLYHETDQRAIYVFSIGSNQPPRRIGRPDPLAGDGLLFRGSLHWHTGNRIMVFDTATESFRQIRAPVAHEDYGRLFEMDDMLGIFFLNDEKTTVDIWVMQDYQGEVWAFKCRVELPVAEIRDRCQNSSHIEEVMVVNGDGELLVLVGFEDWLFQVDIDGKLIASFHARGLPSYNIVHKQTLVQHTFFPTLEGYVMNDSPFI

SEQ ID NO: 65131 - protein, 217 aa, Triticum aestivum
  peptide (1)..(217): Ceres Seq. ID no. 13597703
  misc_feature (5)..(217): Homolog of NCBI NO: 38346044 NR Description: OSJNBa0059D20.16 [Oryza sativa (japonica
  misc_feature (1)..(41): Homolog of NCBI NO: 37530720 NR Description: unknown protein [Oryza sativa (japonica
  misc_feature (41)..(203): Homolog of NCBI NO: 37530720 NR Description: unknown protein [Oryza sativa (japonica
  misc_feature (1)..(203): Homolog of NCBI NO: 38344215 NR Description: OSJNBb0026E15.3 [Oryza sativa (japonica
  misc_feature (1)..(37): Homolog of NCBI NO: 37533944 NR Description: hypothetical protein [Oryza sativa (japonica
  misc_feature (14)..(203): Homolog of NCBI NO: 37533944 NR Description: hypothetical protein [Oryza sativa (japonica
  misc_feature (1)..(217): Homolog of NCBI NO: 38346527 NR Description: OSJNBa0040D17.2 [Oryza sativa (japonica
  misc_feature (56)..(217): Homolog of NCBI NO: 38346045 NR Description: OSJNBa0059D20.17 [Oryza sativa (japonica
  misc_feature (1)..(83): Homolog of NCBI NO: 38346045 NR Description: OSJNBa0059D20.17 [Oryza sativa (japonica
  misc_feature (1)..(217): Homolog of NCBI NO: 38346536 NR Description: OSJNBa0040D17.11 [Oryza sativa (japonica
MTVGLYPHPLTGEYRLLLYHETDQRAIYVFSIGSNQPPRRIGRPDPLAGDGLLFRGSLHWHTGNRIMVFDTATESFRQIRAPVAHEDYGRLFEMDDMLGIFFLNDEKTTVDIWVMQDYQGEVWAFKCRVELPVAEIRDRCQNSSHIEEVMVVNGDGELLVLVGFEDWLFQVDIDGKLIASFHARGLPSYNIVHKQTLVQHTFFPTLEGYVMNDSPFI

SEQ ID NO: 65132 - DNA, 1415 bp, Triticum aestivum
  misc_feature (1)..(1415): Ceres Seq. ID no. 13597476
agaacatcctaatcgaaaaatatggcggcgccagagtacaagcacgagacagaaaccccagcaccctccggcgagcagccgccagagccagtagccgccgccgccgccgccgccggccgggagctgcagccatgggagcagcacgctgcggtgatcaatctcccgcgctacgactaccgcgcgtcgggctccctgctcctgcgctcgcactccggcttcctcatcacctgccccatcaaacgagagaaaagtgcaacgaaggaagccatttcaattcttggagagtatattagcgacgcaagcagccacagttctgaaaacttggaaccatgtgttacggaagtggcatcaaagaaaaggaaaatattttctgaggcatccgaaattgaacattcagaagatacaaatgggaagggtgatgcaccagaatctactggcagcattgaagtagaaacaaattcacttcactccgatacaagtggaaattctgacaggacttcaaatctctcattgattaagctatcaatgagtggtttgcttttcttctctttccctactggaggcgttcatgttgttcagatgcttaccgaagtctttcgttcactgaaatctgggaagcttaaatctccacagtggtgtcatcgcatattccctattcaggaaacttgtgttctatcagaaacagaactgcatgccactgtgtcaaagttgttcctggacttcatcaggaataaggaagatcaagatgagcctatcaagttcgcagttgggtacagtaggagaggcattgatgaaacggtgaagacgcagaagaatgacaataacagctcaattcaacaaggtttaatggacaggcaacaatgtttcaaggttgttgctgctgctgtcaagtcagttgctaaggacgcaattgtggatctcaagtctcctgaggtggcagtactagtggaggtgctccccatttctggggtgccagttggatcttcggtggccggggtgtctgttctcccagctgaactcgtctcggctaagcctcgtctttgtgtcaaggctttggtgtctgatacaaaaacaaaaaagaagtgatgcgccagttcggctgcaaccagtcagagcacctgtaacggcaacatatggaggaaacgatcttgttgggcatgctcgtcagccatgccgcagcttgagcattccacaaacaaagaaacggtatcgcagctgtcttgcctggctctgagtatgccaatttgtaagctgcagtgctcgtcccgttctttgaggttagcttcttatcgtttttctagcgtgctccagcgtcaaagcttaactgacctgttgctggatgtgattgtgttatactgtttctctagactttatgtagtattattattatgggcaattcagtgaactactaaagt

SEQ ID NO: 65133 - protein, 354 aa, Triticum aestivum
  peptide (1)..(354): Ceres Seq. ID no. 15222108
  misc_feature (35)..(256): Homolog of NCBI NO: 25372975 NR Description: hypothetical protein [imported] - Arabidopsis
  misc_feature (35)..(256): Homolog of NCBI NO: 15220918 NR Description: hypothetical protein [Arabidopsis thaliana]
  misc_feature (35)..(353): Homolog of NCBI NO: 24030215 NR Description: unknown protein [Arabidopsis thaliana]
  misc_feature (35)..(353): Homolog of NCBI NO: 14334964 NR Description: unknown protein [Arabidopsis thaliana]
MAAPEYKHETETPAPSGEQPPEPVAAAAAAAGRELQPWEQHAAVINLPRYDYRASGSLLLRSHSGFLITCPIKREKSATKEAISILGEYISDASSHSSENLEPCVTEVASKKRKIFSEASEIEHSEDTNGKGDAPESTGSIEVETNSLHSDTSGNSDRTSNLSLIKLSMSGLLFFSFPTGGVHVVQMLTEVFRSLKSGKLKSPQWCHRIFPIQETCVLSETELHATVSKLFLDFIRNKEDQDEPIKFAVGYSRRGIDETVKTQKNDNNSSIQQGLMDRQQCFKVVAAAVKSVAKDAIVDLKSPEVAVLVEVLPISGVPVGSSVAGVSVLPAELVSAKPRLCVKALVSDTKTKKK

SEQ ID NO: 65134 - protein, 186 aa, Triticum aestivum
  peptide (1)..(186): Ceres Seq. ID no. 15222109
  misc_feature (1)..(88): Homolog of NCBI NO: 25372975 NR Description: hypothetical protein [imported] - Arabidopsis
  misc_feature (1)..(88): Homolog of NCBI NO: 15220918 NR Description: hypothetical protein [Arabidopsis thaliana]
  misc_feature (1)..(185): Homolog of NCBI NO: 24030215 NR Description: unknown protein [Arabidopsis thaliana]
  misc_feature (1)..(185): Homolog of NCBI NO: 14334964 NR Description: unknown protein [Arabidopsis thaliana]
MSGLLFFSFPTGGVHVVQMLTEVFRSLKSGKLKSPQWCHRIFPIQETCVLSETELHATVSKLFLDFIRNKEDQDEPIKFAVGYSRRGIDETVKTQKNDNNSSIQQGLMDRQQCFKVVAAAVKSVAKDAIVDLKSPEVAVLVEVLPISGVPVGSSVAGVSVLPAELVSAKPRLCVKALVSDTKTKKK

SEQ ID NO: 65135 - DNA, 1342 bp, Triticum aestivum
  misc_feature (1)..(1342): Ceres Seq. ID no. 12599421
acacacaccttcttctcccccaaaaacgcacactgcaccaccgcacacagatctaaccgaaacccacccccaccggcggcgagccgccgacgagccagccatccaagatgcagtacaacaacctgggacggtcgggcctccgcgtcagccagctctcctacggcgcgtgggtgaccttcggcaaccagctcgacgtcaaggaggcgaaatccctcctccaggcctgccgggacgcgggggtcaacttcttcgacaacgcggaggtgtacgccaacgggcgcgccgaggagatcatggggcaggcgatccgggacctggggtggcgccgcgccgacgtggtcatctccaccaagctcttctggggcggccaggggcccaacgacaagggcctctcccgcaagcacgtcgtcgagggcctgaaagcctcgctcaagcggctcgacatggagtacgtcgacgtggtctactgccaccggcccgacgccaccacgcccatcgaggagacggtgcgggccatgaactgggtgatcgaccaggggtgggccttctactggggcacgtcggagtggaccgcgcagcagatcaccgaggcctggggcgtggcgaaccggcttgacctcgtcgggcccatcgtcgagcagcccgagtacaacctcttctcccgccacaaggttgagtctgagtttgtacctctttacaacacttatggcattgggttgactacatggagtcctctcgcttcaggggttctcactgggaagtatagcaaagggaatatacccgctgaaagccggtttgccctagataactacaagaacctggcaaacaggtctctggttgacgacacgcttagaaaagtgaacgggctcaagccaatcgctttggagcttggcgtctcgatggcgcagctgggtatcgcctggtgcgcgtcgaaccccaacgtgtcgtctgtgatcactggagccaccaaagagagccagatcgtcgagaacatgaaggccctggaggtcgtcccgctgctgaccccagaggtcctggagaagatcgaggcggtcgtccagagcaagccgaagcgcctcgagtcgtacagatgaagcggtcggtcggtcggcttcgtcagctgtgcagcgtgtgcccgcccgccccggtgggattttttcagtacccggttctccgaaaaaccatataccgaacgtcctgtgtggtcggcgtgcccagcgtgcgaaacattttgtcgagtggacctgatgatgacggtggtcgtcacagacaatgcttttatgccgcttgtatgtttgctgctgtcgctgtatgtatgggtctgttgcaaaatctgagcggg

SEQ ID NO: 65136 - protein, 328 aa, Triticum aestivum
  peptide (1)..(328): Ceres Seq. ID no. 12599422
  misc_feature (1)..(328): Homolog of NCBI NO: 1695763 NR Description: voltage gated potassium channels, beta subunit
  misc_feature (1)..(328): Homolog of NCBI NO: 8393643 NR Description: potassium voltage gated channel, shaker related
  misc_feature (1)..(328): Homolog of NCBI NO: 5019764 NR Description: potassium channel subunit Kv beta 1.1
  misc_feature (1)..(317): Homolog of NCBI NO: 22987410 NR Description: hypothetical protein [Burkholderia fungorum]
  misc_feature (1)..(322): Homolog of NCBI NO: 23394348 NR Description: K+ channel protein [Phytophthora infestans]
  misc_feature (1)..(328): Homolog of NCBI NO: 7447935 NR Description: probable potassium channel beta chain - rice
  misc_feature (1)..(328): Homolog of NCBI NO: 1063415 NR Description: K+ channel protein
  misc_feature (1)..(328): Homolog of NCBI NO: 7447934 NR Description: probable potassium channel beta chain KB1 -
  misc_feature (1)..(328): Homolog of NCBI NO: 15219795 NR Description: putative K+ channel, beta subunit
  misc_feature (1)..(328): Homolog of NCBI NO: 2832783 NR Description: potassium channel beta subunit [Egeria densa]
MQYNNLGRSGLRVSQLSYGAWVTFGNQLDVKEAKSLLQACRDAGVNFFDNAEVYANGRAEEIMGQAIRDLGWRRADVVISTKLFWGGQGPNDKGLSRKHVVEGLKASLKRLDMEYVDVVYCHRPDATTPIEETVRAMNWVIDQGWAFYWGTSEWTAQQITEAWGVANRLDLVGPIVEQPEYNLFSRHKVESEFVPLYNTYGIGLTTWSPLASGVLTGKYSKGNIPAESRFALDNYKNLANRSLVDDTLRKVNGLKPIALELGVSMAQLGIAWCASNPNVSSVITGATKESQIVENMKALEVVPLLTPEVLEKIEAVVQSKPKRLESYR

SEQ ID NO: 65137 - protein, 266 aa, Triticum aestivum
  peptide (1)..(266): Ceres Seq. ID no. 12599423
  misc_feature (1)..(266): Homolog of NCBI NO: 1695763 NR Description: voltage gated potassium channels, beta subunit
  misc_feature (1)..(266): Homolog of NCBI NO: 8393643 NR Description: potassium voltage gated channel, shaker related
  misc_feature (1)..(266): Homolog of NCBI NO: 5019764 NR Description: potassium channel subunit Kv beta 1.1
  misc_feature (1)..(255): Homolog of NCBI NO: 22987410 NR Description: hypothetical protein [Burkholderia fungorum]
  misc_feature (1)..(260): Homolog of NCBI NO: 23394348 NR Description: K+ channel protein [Phytophthora infestans]
  misc_feature (1)..(266): Homolog of NCBI NO: 7447935 NR Description: probable potassium channel beta chain - rice
  misc_feature (1)..(266): Homolog of NCBI NO: 1063415 NR Description: K+ channel protein
  misc_feature (1)..(266): Homolog of NCBI NO: 7447934 NR Description: probable potassium channel beta chain KB1 -
  misc_feature (1)..(266): Homolog of NCBI NO: 15219795 NR Description: putative K+ channel, beta subunit
  misc_feature (1)..(266): Homolog of NCBI NO: 2832783 NR Description: potassium channel beta subunit [Egeria densa]
MGQAIRDLGWRRADVVISTKLFWGGQGPNDKGLSRKHVVEGLKASLKRLDMEYVDVVYCHRPDATTPIEETVRAMNWVIDQGWAFYWGTSEWTAQQITEAWGVANRLDLVGPIVEQPEYNLFSRHKVESEFVPLYNTYGIGLTTWSPLASGVLTGKYSKGNIPAESRFALDNYKNLANRSLVDDTLRKVNGLKPIALELGVSMAQLGIAWCASNPNVSSVITGATKESQIVENMKALEVVPLLTPEVLEKIEAVVQSKPKRLESYR

SEQ ID NO: 65138 - protein, 216 aa, Triticum aestivum
  peptide (1)..(216): Ceres Seq. ID no. 12599424
  misc_feature (1)..(216): Homolog of NCBI NO: 1695763 NR Description: voltage gated potassium channels, beta subunit
  misc_feature (1)..(216): Homolog of NCBI NO: 8393643 NR Description: potassium voltage gated channel, shaker related
  misc_feature (1)..(216): Homolog of NCBI NO: 5019764 NR Description: potassium channel subunit Kv beta 1.1
  misc_feature (1)..(205): Homolog of NCBI NO: 22987410 NR Description: hypothetical protein [Burkholderia fungorum]
  misc_feature (1)..(210): Homolog of NCBI NO: 23394348 NR Description: K+ channel protein [Phytophthora infestans]
  misc_feature (1)..(216): Homolog of NCBI NO: 7447935 NR Description: probable potassium channel beta chain - rice
  misc_feature (1)..(216): Homolog of NCBI NO: 1063415 NR Description: K+ channel protein
  misc_feature (1)..(216): Homolog of NCBI NO: 7447934 NR Description: probable potassium channel beta chain KB1 -
  misc_feature (1)..(216): Homolog of NCBI NO: 15219795 NR Description: putative K+ channel, beta subunit
  misc_feature (1)..(216): Homolog of NCBI NO: 2832783 NR Description: potassium channel beta subunit [Egeria densa]
MEYVDVVYCHRPDATTPIEETVRAMNWVIDQGWAFYWGTSEWTAQQITEAWGVANRLDLVGPIVEQPEYNLFSRHKVESEFVPLYNTYGIGLTTWSPLASGVLTGKYSKGNIPAESRFALDNYKNLANRSLVDDTLRKVNGLKPIALELGVSMAQLGIAWCASNPNVSSVITGATKESQIVENMKALEVVPLLTPEVLEKIEAVVQSKPKRLESYR

SEQ ID NO: 65139 - DNA, 1698 bp, Triticum aestivum
  misc_feature (1)..(1698): Ceres Seq. ID no. 12625831
acgactgggtcgagctcggtcaagtctcgtctctccctcctgttcctactggactagatcagccgatggcgacggcgcgggccgagagcgggccggcgagatagcgcacgcttccgcactctcctcccctccccgcccctcgccgcagtccatggacgctctcgcccccacccccacccgccgccgccgcctcctcgccggcgcggccgccgccaccgcctgctacggcctctaccgcctctacctccaccaccgccgccgcatcgccgcggcgctctccctcgccgacgcgctctcgcaggccggctccgacctcgccgacttcctccgctccgactccgaccaggtgccccgcagcctgcgccagctctccaagctcgccgcctccgaccacgtctcctccgccgcctccgccctctccgagtcgctcgcctcgggggccctccgcgccttctcctcccaccgggccgcccggggcccggatccttcctccccgccgctgcaagaccggatcttggaccgcctcctctcccccgccggcgccgggttcgcctccgccgtcctcgggagcttcgccaggaacctcgtgctctcctgccgtgatcccgcggcccggccccgcgcccctggccagccggactggctcgccgcgctgtgcagcgacaggggcaaggaggccgccgcggagctcgtccgggtgttcgtcagcaccgccgtcgccgcctacctcgacaggaccgcggccgtgcgcacctccgaccaggtgctcgccggcgtcagtaaccccaagcacgacgccaagctcaaggacctgctcgtgtccgtctgcaacggggccgtcgagacctttgtcaggacctcgcggcaggtcacaaaggaggcctccatttctcgagctgaagcagcagtggcggtgcgagacgtctgcaattcaggtcctagctgtgtaatggagagagtatcgaccacgttggccatgccaagcaaccggaggtttgtgctggatgtcacgggcagggtcaccgccgagatggtccggtcattcctcgagttctccactcagcgggtgtccgctggtgcacgaaagagcattgtcgttgcccgggatgagatcgccgaaaggggtctcgtcgcggtcaagtacctgagcgccaagtctatggccatcttcaccttatgcctcacaatgtgcatgcacatttcggttggaattaggttcccgttgccggcctaggcatagcctggtgtgggcttcaaggtgacattgttccagttatcctgattgtagttggaaagtaaagtatgtagattgcaaattgattgtttgctactgctagcctttttctgtgttgttgactagcatttggaagcagaaatctgttggatttgtagttgttggtttgttgtttgtgatagtctgatagggagtatataggtcacgaatggataattttgcaattttagtgtaaggtttcatatgtattatggtgttgtatcctagtgtcttctccatcttttctgaaggaagtaggggtcagtatcttattgatgctgactagtgatgttcctcagcactctgtgtgtggataagctatttcgggcaacaatagcatgaaacttgtccacttatgttttccattccctttttgccatgatttgtggaaaagcaaatatgaattgatcagagatttgtgcctg

SEQ ID NO: 65140 - protein, 410 aa, Triticum aestivum
  peptide (1)..(410): Ceres Seq. ID no. 12625832
  misc_feature (212)..(403): Homolog of NCBI NO: 21554418 NR Description: unknown [Arabidopsis thaliana]
  misc_feature (60)..(365): Homolog of NCBI NO: 21554418 NR Description: unknown [Arabidopsis thaliana]
  misc_feature (60)..(365): Homolog of NCBI NO: 18391117 NR Description: expressed protein
  misc_feature (88)..(400): Homolog of NCBI NO: 15229610 NR Description: putative protein; protein id: At3g49790.1
  misc_feature (57)..(400): Homolog of NCBI NO: 21553547 NR Description: unknown [Arabidopsis thaliana]
  misc_feature (57)..(400): Homolog of NCBI NO: 18406365 NR Description: expressed protein
  misc_feature (57)..(400): Homolog of NCBI NO: 14475940 NR Description: unknown protein [Arabidopsis thaliana]
  misc_feature (51)..(403): Homolog of NCBI NO: 22093613 NR Description: hypothetical protein~similar to Arabidopsis
  misc_feature (60)..(410): Homolog of NCBI NO: 40539064 NR Description: expressed protein [Oryza sativa (japonica
  misc_feature (51)..(409): Homolog of NCBI NO: 37530342 NR Description: hypothetical protein [Oryza sativa (japonica
RLGRARSSLVSPSCSYWTRSADGDGAGRERAGEIAHASALSSPPRPSPQSMDALAPTPTRRRRLLAGAAAATACYGLYRLYLHHRRRIAAALSLADALSQAGSDLADFLRSDSDQVPRSLRQLSKLAASDHVSSAASALSESLASGALRAFSSHRAARGPDPSSPPLQDRILDRLLSPAGAGFASAVLGSFARNLVLSCRDPAARPRAPGQPDWLAALCSDRGKEAAAELVRVFVSTAVAAYLDRTAAVRTSDQVLAGVSNPKHDAKLKDLLVSVCNGAVETFVRTSRQVTKEASISRAEAAVAVRDVCNSGPSCVMERVSTTLAMPSNRRFVLDVTGRVTAEMVRSFLEFSTQRVSAGARKSIVVARDEIAERGLVAVKYLSAKSMAIFTLCLTMCMHISVGIRFPLPA

SEQ ID NO: 65141 - protein, 360 aa, Triticum aestivum
  peptide (1)..(360): Ceres Seq. ID no. 12625833
  misc_feature (162)..(353): Homolog of NCBI NO: 21554418 NR Description: unknown [Arabidopsis thaliana]
  misc_feature (10)..(315): Homolog of NCBI NO: 21554418 NR Description: unknown [Arabidopsis thaliana]
  misc_feature (10)..(315): Homolog of NCBI NO: 18391117 NR Description: expressed protein
  misc_feature (38)..(350): Homolog of NCBI NO: 15229610 NR Description: putative protein; protein id: At3g49790.1
  misc_feature (7)..(350): Homolog of NCBI NO: 21553547 NR Description: unknown [Arabidopsis thaliana]
  misc_feature (7)..(350): Homolog of NCBI NO: 18406365 NR Description: expressed protein
  misc_feature (7)..(350): Homolog of NCBI NO: 14475940 NR Description: unknown protein [Arabidopsis thaliana]
  misc_feature (1)..(353): Homolog of NCBI NO: 22093613 NR Description: hypothetical protein~similar to Arabidopsis
  misc_feature (10)..(360): Homolog of NCBI NO: 40539064 NR Description: expressed protein [Oryza sativa (japonica
  misc_feature (1)..(359): Homolog of NCBI NO: 37530342 NR Description: hypothetical protein [Oryza sativa (japonica
MDALAPTPTRRRRLLAGAAAATACYGLYRLYLHHRRRIAAALSLADALSQAGSDLADFLRSDSDQVPRSLRQLSKLAASDHVSSAASALSESLASGALRAFSSHRAARGPDPSSPPLQDRILDRLLSPAGAGFASAVLGSFARNLVLSCRDPAARPRAPGQPDWLAALCSDRGKEAAAELVRVFVSTAVAAYLDRTAAVRTSDQVLAGVSNPKHDAKLKDLLVSVCNGAVETFVRTSRQVTKEASISRAEAAVAVRDVCNSGPSCVMERVSTTLAMPSNRRFVLDVTGRVTAEMVRSFLEFSTQRVSAGARKSIVVARDEIAERGLVAVKYLSAKSMAIFTLCLTMCMHISVGIRFPLPA

SEQ ID NO: 65142 - DNA, 716 bp, Triticum aestivum
  misc_feature (1)..(716): Ceres Seq. ID no. 13597600
agccacaacgggacagatcccccgcataaattcctccacccgtcgcgccgcccccattcgcccacgcccacgcgcgcgcacgcggcctccccctcctcctcccccattcgctccctccctccgccggccggggattcgggtttggggggagatggggtacgtcgggagccacggcgtggcgacgctgcgcaagtacaagtacagcggcgtcgaccactccattgtcgccaagtacatcctccagcccttctggtcgcgattcgtcaacgtcttcccgctctggttcccaccaaacatgatcacgctgacaggtttcatgtttctgctgacatcggcattccttggctttttgtattcacctcatcttgatacagcgccccctagatgggttcatctcgcgcatggaatccttctcttcctttaccagacttttgatgctgtggatggtaaacaagcaagacgtaccaactcatcaagtcctttaggcgaactttttgatcacggatgcgacgcgcttgcatgtacttttgagtccctggcttttgggagcacagctatgtgtggaaatgctaccttttggttttgggtcatttcggctgtccccttctactttgcaacctgggaacactattttacaaacacacttgttcttcctatagtcaatgggccaactgaaggccttatgctgatttatgtgtgccatatcttcacctttt

SEQ ID NO: 65143 - protein, 238 aa, Triticum aestivum
  peptide (1)..(238): Ceres Seq. ID no. 13597601
  misc_feature (136)..(237): Pfam Name: CDP-alcohol phosphatidyltransferase Pfam Description: CDP-alcohol phosphatidyltransferase
  misc_feature (64)..(237): Homolog of NCBI NO: 2425056 NR Description: LipB [Dictyostelium discoideum]
  misc_feature (51)..(225): Homolog of NCBI NO: 27762264 NR Description: aminoalcoholphosphotransferase [Brassica napus]
  misc_feature (51)..(237): Homolog of NCBI NO: 5917787 NR Description: aminoalcoholphosphotransferase [Brassica rapa]
  misc_feature (51)..(237): Homolog of NCBI NO: 18390098 NR Description: aminoalcoholphosphotransferase [Sorghum bicolor]
  misc_feature (51)..(237): Homolog of NCBI NO: 15229490 NR Description: aminoalcoholphosphotransferase, putative
  misc_feature (51)..(237): Homolog of NCBI NO: 30313359 NR Description: aminoalcoholphosphotransferase [Brassica rapa
  misc_feature (51)..(237): Homolog of NCBI NO: 15222885 NR Description: aminoalcoholphosphotransferase [Arabidopsis
  misc_feature (51)..(237): Homolog of NCBI NO: 7488522 NR Description: ethanolaminephosphotransferase homolog - turnip
  misc_feature (51)..(237): Homolog of NCBI NO: 3927806 NR Description: aminoalcoholphosphotransferase [Pimpinella
  misc_feature (51)..(237): Homolog of NCBI NO: 7488701 NR Description: probable ethanolaminephosphotransferase (EC
ATTGQIPRINSSTRRAAPIRPRPRARTRPPPPPPPFAPSLRRPGIRVWGEMGYVGSHGVATLRKYKYSGVDHSIVAKYILQPFWSRFVNVFPLWFPPNMITLTGFMFLLTSAFLGFLYSPHLDTAPPRWVHLAHGILLFLYQTFDAVDGKQARRTNSSSPLGELFDHGCDALACTFESLAFGSTAMCGNATFWFWVISAVPFYFATWEHYFTNTLVLPIVNGPTEGLMLIYVCHIFTF

SEQ ID NO: 65144 - protein, 188 aa, Triticum aestivum
  peptide (1)..(188): Ceres Seq. ID no. 13597602
  misc_feature (86)..(187): Pfam Name: CDP-alcohol phosphatidyltransferase Pfam Description: CDP-alcohol phosphatidyltransferase
  misc_feature (14)..(187): Homolog of NCBI NO: 2425056 NR Description: LipB [Dictyostelium discoideum]
  misc_feature (1)..(175): Homolog of NCBI NO: 27762264 NR Description: aminoalcoholphosphotransferase [Brassica napus]
  misc_feature (1)..(187): Homolog of NCBI NO: 5917787 NR Description: aminoalcoholphosphotransferase [Brassica rapa]
  misc_feature (1)..(187): Homolog of NCBI NO: 18390098 NR Description: aminoalcoholphosphotransferase [Sorghum bicolor]
  misc_feature (1)..(187): Homolog of NCBI NO: 15229490 NR Description: aminoalcoholphosphotransferase, putative
  misc_feature (1)..(187): Homolog of NCBI NO: 30313359 NR Description: aminoalcoholphosphotransferase [Brassica rapa
  misc_feature (1)..(187): Homolog of NCBI NO: 15222885 NR Description: aminoalcoholphosphotransferase [Arabidopsis
  misc_feature (1)..(187): Homolog of NCBI NO: 7488522 NR Description: ethanolaminephosphotransferase homolog - turnip
  misc_feature (1)..(187): Homolog of NCBI NO: 3927806 NR Description: aminoalcoholphosphotransferase [Pimpinella
  misc_feature (1)..(187): Homolog of NCBI NO: 7488701 NR Description: probable ethanolaminephosphotransferase (EC
MGYVGSHGVATLRKYKYSGVDHSIVAKYILQPFWSRFVNVFPLWFPPNMITLTGFMFLLTSAFLGFLYSPHLDTAPPRWVHLAHGILLFLYQTFDAVDGKQARRTNSSSPLGELFDHGCDALACTFESLAFGSTAMCGNATFWFWVISAVPFYFATWEHYFTNTLVLPIVNGPTEGLMLIYVCHIFTF

SEQ ID NO: 65145 - protein, 140 aa, Triticum aestivum
  peptide (1)..(140): Ceres Seq. ID no. 13597603
  misc_feature (38)..(139): Pfam Name: CDP-alcohol phosphatidyltransferase Pfam Description: CDP-alcohol phosphatidyltransferase
  misc_feature (1)..(139): Homolog of NCBI NO: 2425056 NR Description: LipB [Dictyostelium discoideum]
  misc_feature (1)..(127): Homolog of NCBI NO: 27762264 NR Description: aminoalcoholphosphotransferase [Brassica napus]
  misc_feature (1)..(139): Homolog of NCBI NO: 5917787 NR Description: aminoalcoholphosphotransferase [Brassica rapa]
  misc_feature (1)..(139): Homolog of NCBI NO: 18390098 NR Description: aminoalcoholphosphotransferase [Sorghum bicolor]
  misc_feature (1)..(139): Homolog of NCBI NO: 15229490 NR Description: aminoalcoholphosphotransferase, putative
  misc_feature (1)..(139): Homolog of NCBI NO: 30313359 NR Description: aminoalcoholphosphotransferase [Brassica rapa
  misc_feature (1)..(139): Homolog of NCBI NO: 15222885 NR Description: aminoalcoholphosphotransferase [Arabidopsis
  misc_feature (1)..(139): Homolog of NCBI NO: 7488522 NR Description: ethanolaminephosphotransferase homolog - turnip
  misc_feature (1)..(139): Homolog of NCBI NO: 3927806 NR Description: aminoalcoholphosphotransferase [Pimpinella
  misc_feature (1)..(139): Homolog of NCBI NO: 7488701 NR Description: probable ethanolaminephosphotransferase (EC
MITLTGFMFLLTSAFLGFLYSPHLDTAPPRWVHLAHGILLFLYQTFDAVDGKQARRTNSSSPLGELFDHGCDALACTFESLAFGSTAMCGNATFWFWVISAVPFYFATWEHYFTNTLVLPIVNGPTEGLMLIYVCHIFTF

SEQ ID NO: 65146 - DNA, 1548 bp, Triticum aestivum
  misc_feature (1)..(1548): Ceres Seq. ID no. 12460981
aacatcctaatcgaaaagtcgtcgcgttccatttcaaaaacgccacctttcgccccctgcatttccaccaaggcctacatgtctccgaccaccgccgcgtcccccgcgccggcgccggcaaccgacgcgcccccgaagccttcgccaggcgcgaagcgcagcctgatgggatccctcatcgacgccaccgcgctgctccgggcggcctccttcaaggaggactcgtacgtggccgcggcgctcccggcctcggacctccgcgcgctcgccgacctcagggcgctcctcgccacccacccggaccaaatctccatctggggcgtgccgctcaacccgcccagcgacgcccccgccgacgagcgcacggacgtggtgctcctcaagttcctccgcgccagggacttccgcgtccgcgacgcgcacgccatgctgctccgctgcgccgcctggcgggccgagttccgcgccgacgccgtgctggacgaggacctcgggttcaaggacctggagggcatcgtcgcctacatgcacggctgggaccgcgatggccacccggtctgctacaacgcctacggcgtgttcaaggaccgggacatgtacgaccgggtgttcggcgacggtgaccgcctcagccggttcctccggtggcgcgtccagatcatggagcgcggcgtgcgcgcgctccagctccgccccggcggcgtcaacgccatcatacaggtgaccgacctcaaggacatgccgaagcgagagctccgcgccgcgtccaaccagatactctccctcttccaggacaactaccccgagatggtcgcccgcaaggtgttcgtgaacgtaccgtggtacttctccgtgctgttctcgatgatctcgcccttcctcacggagcgcaccaagagcaagttcgtcatcgcgcgcgagggcaacgtcgcggagacgctcttcaagttcatccggccggagctggtgccggtgcagtacggcgggctgagccgcgccagcgagctggagaacgggccgcccaagccggcgtccgagttcaccatcaagggcggcgagaaggtcttcctagagatcgacggcatcgaggccggtgcaacaataacgtgggacctggtcgtcggcggctgggagctcgagtacggcgcggagtacgtgccggcgtcggagggcggctacacgctgtgcgtggagaggaccaagaaggtcccggccgccgccgacgagcccgtgcacaacgccttcacggccaaggagcccggcaagatggtgctctccatcgacaactccggctcacggaagcggaaggtcgccgcctaccgctacttcgtgcgcaagccgtcggcgtaggctgctcggctgctgtggccggcggcttgccggccggcttgtgctttgctttgctcgtctcggagaggaggttaatttaggtctatttaattagtgctataatgtgatatgcatgtattatgccatatgtagaatatattgtatgagccgtgagatcctacttgtcatcatcgttatataacgagttaagttttttcg

SEQ ID NO: 65147 - protein, 449 aa, Triticum aestivum
  peptide (1)..(449): Ceres Seq. ID no. 12460982
  misc_feature (175)..(335): Pfam Name: CRAL/TRIO domain Pfam Description: CRAL/TRIO domain
  misc_feature (103)..(449): Homolog of NCBI NO: 14334978 NR Description: unknown protein [Arabidopsis thaliana]
  misc_feature (103)..(449): Homolog of NCBI NO: 18397616 NR Description: expressed protein
  misc_feature (367)..(449): Homolog of NCBI NO: 25407487 NR Description: hypothetical protein AT4g09160 [imported] -
  misc_feature (70)..(359): Homolog of NCBI NO: 25407487 NR Description: hypothetical protein AT4g09160 [imported] -
  misc_feature (70)..(447): Homolog of NCBI NO: 15218383 NR Description: cytosolic factor, putative
  misc_feature (70)..(447): Homolog of NCBI NO: 15081614 NR Description: At1g72160/T9N14_8 [Arabidopsis thaliana]
  misc_feature (70)..(449): Homolog of NCBI NO: 30680992 NR Description: expressed protein [Arabidopsis thaliana]
  misc_feature (73)..(441): Homolog of NCBI NO: 8894548 NR Description: hypothetical protein [Cicer arietinum]
  misc_feature (29)..(448): Homolog of NCBI NO: 34907288 NR Description: contains ESTs
  misc_feature (52)..(446): Homolog of NCBI NO: 15230555 NR Description: putative protein
NILIEKSSRSISKTPPFAPCISTKAYMSPTTAASPAPAPATDAPPKPSPGAKRSLMGSLIDATALLRAASFKEDSYVAAALPASDLRALADLRALLATHPDQISIWGVPLNPPSDAPADERTDVVLLKFLRARDFRVRDAHAMLLRCAAWRAEFRADAVLDEDLGFKDLEGIVAYMHGWDRDGHPVCYNAYGVFKDRDMYDRVFGDGDRLSRFLRWRVQIMERGVRALQLRPGGVNAIIQVTDLKDMPKRELRAASNQILSLFQDNYPEMVARKVFVNVPWYFSVLFSMISPFLTERTKSKFVIAREGNVAETLFKFIRPELVPVQYGGLSRASELENGPPKPASEFTIKGGEKVFLEIDGIEAGATITWDLVVGGWELEYGAEYVPASEGGYTLCVERTKKVPAAADEPVHNAFTAKEPGKMVLSIDNSGSRKRKVAAYRYFVRKPSA

SEQ ID NO: 65148 - protein, 423 aa, Triticum aestivum
  peptide (1)..(423): Ceres Seq. ID no. 12460983
  misc_feature (149)..(309): Pfam Name: CRAL/TRIO domain Pfam Description: CRAL/TRIO domain
  misc_feature (77)..(423): Homolog of NCBI NO: 14334978 NR Description: unknown protein [Arabidopsis thaliana]
  misc_feature (77)..(423): Homolog of NCBI NO: 18397616 NR Description: expressed protein
  misc_feature (341)..(423): Homolog of NCBI NO: 25407487 NR Description: hypothetical protein AT4g09160 [imported] -
  misc_feature (44)..(333): Homolog of NCBI NO: 25407487 NR Description: hypothetical protein AT4g09160 [imported] -
  misc_feature (44)..(421): Homolog of NCBI NO: 15218383 NR Description: cytosolic factor, putative
  misc_feature (44)..(421): Homolog of NCBI NO: 15081614 NR Description: At1g72160/T9N14_8 [Arabidopsis thaliana]
  misc_feature (44)..(423): Homolog of NCBI NO: 30680992 NR Description: expressed protein [Arabidopsis thaliana]
  misc_feature (47)..(415): Homolog of NCBI NO: 8894548 NR Description: hypothetical protein [Cicer arietinum]
  misc_feature (3)..(422): Homolog of NCBI NO: 34907288 NR Description: contains ESTs
  misc_feature (26)..(420): Homolog of NCBI NO: 15230555 NR Description: putative protein
MSPTTAASPAPAPATDAPPKPSPGAKRSLMGSLIDATALLRAASFKEDSYVAAALPASDLRALADLRALLATHPDQISIWGVPLNPPSDAPADERTDVVLLKFLRARDFRVRDAHAMLLRCAAWRAEFRADAVLDEDLGFKDLEGIVAYMHGWDRDGHPVCYNAYGVFKDRDMYDRVFGDGDRLSRFLRWRVQIMERGVRALQLRPGGVNAIIQVTDLKDMPKRELRAASNQILSLFQDNYPEMVARKVFVNVPWYFSVLFSMISPFLTERTKSKFVIAREGNVAETLFKFIRPELVPVQYGGLSRASELENGPPKPASEFTIKGGEKVFLEIDGIEAGATITWDLVVGGWELEYGAEYVPASEGGYTLCVERTKKVPAAADEPVHNAFTAKEPGKMVLSIDNSGSRKRKVAAYRYFVRKPSA

SEQ ID NO: 65149 - protein, 394 aa, Triticum aestivum
  peptide (1)..(394): Ceres Seq. ID no. 12460984
  misc_feature (120)..(280): Pfam Name: CRAL/TRIO domain Pfam Description: CRAL/TRIO domain
  misc_feature (48)..(394): Homolog of NCBI NO: 14334978 NR Description: unknown protein [Arabidopsis thaliana]
  misc_feature (48)..(394): Homolog of NCBI NO: 18397616 NR Description: expressed protein
  misc_feature (312)..(394): Homolog of NCBI NO: 25407487 NR Description: hypothetical protein AT4g09160 [imported] -
  misc_feature (15)..(304): Homolog of NCBI NO: 25407487 NR Description: hypothetical protein AT4g09160 [imported] -
  misc_feature (15)..(392): Homolog of NCBI NO: 15218383 NR Description: cytosolic factor, putative
  misc_feature (15)..(392): Homolog of NCBI NO: 15081614 NR Description: At1g72160/T9N14_8 [Arabidopsis thaliana]
  misc_feature (15)..(394): Homolog of NCBI NO: 30680992 NR Description: expressed protein [Arabidopsis thaliana]
  misc_feature (18)..(386): Homolog of NCBI NO: 8894548 NR Description: hypothetical protein [Cicer arietinum]
  misc_feature (1)..(393): Homolog of NCBI NO: 34907288 NR Description: contains ESTs
  misc_feature (1)..(391): Homolog of NCBI NO: 15230555 NR Description: putative protein
MGSLIDATALLRAASFKEDSYVAAALPASDLRALADLRALLATHPDQISIWGVPLNPPSDAPADERTDVVLLKFLRARDFRVRDAHAMLLRCAAWRAEFRADAVLDEDLGFKDLEGIVAYMHGWDRDGHPVCYNAYGVFKDRDMYDRVFGDGDRLSRFLRWRVQIMERGVRALQLRPGGVNAIIQVTDLKDMPKRELRAASNQILSLFQDNYPEMVARKVFVNVPWYFSVLFSMISPFLTERTKSKFVIAREGNVAETLFKFIRPELVPVQYGGLSRASELENGPPKPASEFTIKGGEKVFLEIDGIEAGATITWDLVVGGWELEYGAEYVPASEGGYTLCVERTKKVPAAADEPVHNAFTAKEPGKMVLSIDNSGSRKRKVAAYRYFVRKPSA

SEQ ID NO: 65150 - DNA, 1601 bp, Triticum aestivum
  misc_feature (1)..(1601): Ceres Seq. ID no. 15226213
acctcctctcggacgcctctccaccgcccgaaaaagtgagagacgaccaccgccgctcgccgacgaccagtaggcggcgccgatccggagccgccggttgaggggacgccaccgtacgtgcgcgcatgacagggaaccggcgccaccgccggcgccggagagcgcgaccgcagcaggccgccgaaccctcgccgccgccggcaccagccagcctcagctccagggaagttgctgttgcagcaaggccctctaagaaaatctgtgatgcctctggatctatttcctcatcctcatcgggatctcatgcctgggaaagccttctagacagcctgctccaccaaatcatttcgctcattagctcatttcatgacttccttgctttccgtggcatctgtcactcatggcacgccgcagcctcttccttcccatctgtatataccttcagcttcccacctctccacctcaaaccagatgtaagccaggagagttacaactcagatcggaaatcgcagcttgttgatcctgctaagaaaagtttatcccatcgttgttcagcacctggaattactccacatcccatgcgctatctgggctgctcatatggttatcttatcttctctgataggagacactgccatctcgtcgatgtgtacactggcacaaaggtgaagccaccaaaattccaatctgagagcaacactttgatctaccttggcatccttacggctccactagattcgcccaattcacgtctcatccttttctcgagaatctccatgctccagtggcaggttggaacaaattcttggacagagcaccctcaggttggtgaactcatccatcagattgtgctcttcaaaggccagatgtttgccatggactttgttcaaaggctacataccatacacatatcacctgagctcagcatgcaggaagtagcagttatgtgggaacagagcatgctcgtaggccttcattctaagccatggttggtggtctgtggtgacatgcttctcttggtagatctctcggtaagcatggaccaactgtttggctttcctggcacctttcaagtcttccgcctcgacttctcagttgaaccagctaagtgggtgaagatggataagttggacaattgggctctcttcctcaccaatgataggagaaaccctacattttcttgcatgaaccccgaaagatggggaggaaagagtaactatatttatgttccaacaaaatcagaagattttgatgagccatggactgcaatagaggttggacagccggtgcccagcttgactcaccgtatgtcattcagttccgcagccactgcccattgcagtccactaaatagcctctgggtgcttcccagtttggtttacggggttgaccagtgattggtcatccttgcttgttgcagttgcaaggcttttcttagtctttcacaatgccagtcctgtcgattcctgcttttgtattattcagttagccactaggttctgtaactcccatggtttcttgacttggcaaatgtattgtgtacaagaatgttgatctatattgtctccaggaagtgattgtcctgcactgggtctatgggg

SEQ ID NO: 65151 - protein, 423 aa, Triticum aestivum
  peptide (1)..(423): Ceres Seq. ID no. 15226214
  misc_feature (62)..(108): Pfam Name: F-box domain Pfam Description: F-box domain
  misc_feature (152)..(361): Homolog of NCBI NO: 34897928 NR Description: Similar to Arabidopsis thaliana DNA chromosome 4,
  misc_feature (46)..(361): Homolog of NCBI NO: 24413941 NR Description: putative selenium-binding protein
  misc_feature (30)..(385): Homolog of NCBI NO: 34897914 NR Description: hypothetical protein [Oryza sativa (japonica
  misc_feature (41)..(419): Homolog of NCBI NO: 34897864 NR Description: hypothetical protein [Oryza sativa (japonica
  misc_feature (34)..(423): Homolog of NCBI NO: 34897916 NR Description: hypothetical protein [Oryza sativa (japonica
  misc_feature (63)..(423): Homolog of NCBI NO: 34897862 NR Description: hypothetical protein [Oryza sativa (japonica
MTGNRRHRRRRRARPQQAAEPSPPPAPASLSSREVAVAARPSKKICDASGSISSSSSGSHAWESLLDSLLHQIISLISSFHDFLAFRGICHSWHAAASSFPSVYTFSFPPLHLKPDVSQESYNSDRKSQLVDPAKKSLSHRCSAPGITPHPMRYLGCSYGYLIFSDRRHCHLVDVYTGTKVKPPKFQSESNTLIYLGILTAPLDSPNSRLILFSRISMLQWQVGTNSWTEHPQVGELIHQIVLFKGQMFAMDFVQRLHTIHISPELSMQEVAVMWEQSMLVGLHSKPWLVVCGDMLLLVDLSVSMDQLFGFPGTFQVFRLDFSVEPAKWVKMDKLDNWALFLTNDRRNPTFSCMNPERWGGKSNYIYVPTKSEDFDEPWTAIEVGQPVPSLTHRMSFSSAATAHCSPLNSLWVLPSLVYGVDQ

SEQ ID NO: 65152 - protein, 272 aa, Triticum aestivum
  peptide (1)..(272): Ceres Seq. ID no. 15226215
  misc_feature (1)..(210): Homolog of NCBI NO: 34897928 NR Description: Similar to Arabidopsis thaliana DNA chromosome 4,
  misc_feature (1)..(210): Homolog of NCBI NO: 24413941 NR Description: putative selenium-binding protein
  misc_feature (1)..(234): Homolog of NCBI NO: 34897914 NR Description: hypothetical protein [Oryza sativa (japonica
  misc_feature (1)..(268): Homolog of NCBI NO: 34897864 NR Description: hypothetical protein [Oryza sativa (japonica
  misc_feature (1)..(272): Homolog of NCBI NO: 34897916 NR Description: hypothetical protein [Oryza sativa (japonica
  misc_feature (1)..(272): Homolog of NCBI NO: 34897862 NR Description: hypothetical protein [Oryza sativa (japonica
MRYLGCSYGYLIFSDRRHCHLVDVYTGTKVKPPKFQSESNTLIYLGILTAPLDSPNSRLILFSRISMLQWQVGTNSWTEHPQVGELIHQIVLFKGQMFAMDFVQRLHTIHISPELSMQEVAVMWEQSMLVGLHSKPWLVVCGDMLLLVDLSVSMDQLFGFPGTFQVFRLDFSVEPAKWVKMDKLDNWALFLTNDRRNPTFSCMNPERWGGKSNYIYVPTKSEDFDEPWTAIEVGQPVPSLTHRMSFSSAATAHCSPLNSLWVLPSLVYGVDQ

SEQ ID NO: 65153 - DNA, 1222 bp, Triticum aestivum
  misc_feature (1)..(1222): Ceres Seq. ID no. 12618205
aaaaaaactaaggcaacgcaacaagacggaatagacccgcaaccgctgcgccctcttccggtcgattcacgttcactgcgagggggaggaggaggaggacggccagcccctgcgcgagacgagcctctacaagggcttctgcggtggctaatttcgggaggtagaagagggaggaggagccatgaacggtggtagcaagcaaacactgatatacagcttcgtggccaagggctccgtggtgctggccgagcacacggccttctctggcaacttcagcaccatcgccgtgcagtgcctccagaagctgccctccaacagcacaaggtccacctactcctgcgatggccacaccttcaacttcctcgtcgaccgtgattttgtgtttcttgtggtggccgaagaggcgctgggaaggagcgtgccgtttgtgttcctagagagggttagggaagacttcatgcagcggtatgggtccagtatcgatgaggagggacaacacccgcttgctgatgacgcggatgaggacgatttcctgtttgaggaccggtttagcatcgcctacaatcttgaccgggaattcgggccaaggttgaaggatcacatgcagtattgtattaatcatccagaggaaattagcaagctctctaaggtgaaatcacatctttcagaggttaaagggatcatgatggacaacatcgagaagatattagatcgtggcgagaagattgaacttttggtgggaaagaccgaaaccttacagtcgcaggccgacagcttccataggcatggcagagagctcaggcgcaagatgtggcttcagaacctgaggtttaagctgatggtcggtggtggcatcgcgtttttgatcctcatcctctggctaatggtttgctggggcttcaagtgctagagagttcagagtcttcattcgccctttttttccttgtcatttgatgttctgtttacggtgtcatgtgcatataatgaccaccaaattatgcttcgctatgttccgaacaaaagttatgtggtgtgagacccttaattcctcatagaccatccttatgttccataagaccatagggatctggagtactcgtgtaagctttatgagagagggggacgtcagtcgattatctgtacattctgaactgcaagcttattgcctggaccttgttttgctcagatcctcttgacgatgatccatgttgcacctagcgcc

SEQ ID NO: 65154 - protein, 242 aa, Triticum aestivum
  peptide (1)..(242): Ceres Seq. ID no. 12618206
  misc_feature (150)..(237): Pfam Name: Synaptobrevin Pfam Description: Synaptobrevin
  misc_feature (126)..(242): Homolog of NCBI NO: 15220943 NR Description: synaptobrevin 7B, putative; protein id:
  misc_feature (6)..(97): Homolog of NCBI NO: 15220315 NR Description: synaptobrevin 7B, putative; protein id:
  misc_feature (126)..(242): Homolog of NCBI NO: 15220315 NR Description: synaptobrevin 7B, putative; protein id:
  misc_feature (6)..(96): Homolog of NCBI NO: 29150380 NR Description: synaptobrevin-like protein
  misc_feature (126)..(242): Homolog of NCBI NO: 29150380 NR Description: synaptobrevin-like protein
  misc_feature (6)..(97): Homolog of NCBI NO: 30685375 NR Description: synaptobrevin -related [Arabidopsis thaliana]
  misc_feature (6)..(97): Homolog of NCBI NO: 27805753 NR Description: Vesicle-associated membrane protein 725
  misc_feature (126)..(242): Homolog of NCBI NO: 30685375 NR Description: synaptobrevin -related [Arabidopsis thaliana]
  misc_feature (126)..(242): Homolog of NCBI NO: 27805753 NR Description: Vesicle-associated membrane protein 725
  misc_feature (5)..(242): Homolog of NCBI NO: 15232475 NR Description: synaptobrevin -like protein; protein id:
MNGGSKQTLIYSFVAKGSVVLAEHTAFSGNFSTIAVQCLQKLPSNSTRSTYSCDGHTFNFLVDRDFVFLVVAEEALGRSVPFVFLERVREDFMQRYGSSIDEEGQHPLADDADEDDFLFEDRFSIAYNLDREFGPRLKDHMQYCINHPEEISKLSKVKSHLSEVKGIMMDNIEKILDRGEKIELLVGKTETLQSQADSFHRHGRELRRKMWLQNLRFKLMVGGGIAFLILILWLMVCWGFKC

SEQ ID NO: 65155 - protein, 150 aa, Triticum aestivum
  peptide (1)..(150): Ceres Seq. ID no. 12618207
  misc_feature (58)..(145): Pfam Name: Synaptobrevin Pfam Description: Synaptobrevin
  misc_feature (32)..(150): Homolog of NCBI NO: 27805752 NR Description: Vesicle-associated membrane protein 724
  misc_feature (32)..(124): Homolog of NCBI NO: 33347409 NR Description: synptobrevin-related protein [Pyrus pyrifolia]
  misc_feature (34)..(150): Homolog of NCBI NO: 600710 NR Description: formerly called HAT24; synaptobrevin-related
  misc_feature (34)..(150): Homolog of NCBI NO: 15225796 NR Description: putative synaptobrevin
  misc_feature (34)..(150): Homolog of NCBI NO: 15220943 NR Description: synaptobrevin 7B, putative; protein id:
  misc_feature (34)..(150): Homolog of NCBI NO: 15220315 NR Description: synaptobrevin 7B, putative; protein id:
  misc_feature (34)..(150): Homolog of NCBI NO: 29150380 NR Description: synaptobrevin-like protein
  misc_feature (34)..(150): Homolog of NCBI NO: 30685375 NR Description: synaptobrevin -related [Arabidopsis thaliana]
  misc_feature (34)..(150): Homolog of NCBI NO: 27805753 NR Description: Vesicle-associated membrane protein 725
  misc_feature (1)..(150): Homolog of NCBI NO: 15232475 NR Description: synaptobrevin -like protein; protein id:
MQRYGSSIDEEGQHPLADDADEDDFLFEDRFSIAYNLDREFGPRLKDHMQYCINHPEEISKLSKVKSHLSEVKGIMMDNIEKILDRGEKIELLVGKTETLQSQADSFHRHGRELRRKMWLQNLRFKLMVGGGIAFLILILWLMVCWGFKC

SEQ ID NO: 65156 - DNA, 1475 bp, Triticum aestivum
  misc_feature (1)..(1475): Ceres Seq. ID no. 14301622
attcttttgttgctgccaccgcaccgctggtcatcgatcacgacttgcgtggcgaccaaagcagcagccaccaacatctgtgcataaatgcacacacgtccgtacttgagttgcctctcagcagccagagaaatagagccctgtgctagagctattgccaggagaagagagctcagctcggtagtgatcatcggcgatatggcgacgaggaggaagacggcgtgcgtcaccggcggcagcgggtacatcgcgtcggcgctggtgaagatgctgctggagaagggatacgccgtcaagaccaccgtcagaaaccccgatgacgcggagaagaacgcgcatctcaaggccttggcagcgctcggctccttggaggtcttccgcgccgatctgaacgaggagggcagcttcgaccacgccgtcgccggctgcgactacgccttcctcgtcgccgctccggtgagcctcatgccagagaaccctgagaaagacgtgatcgagccggccgtccacgggaccctgaacgtgatgaagtcgtgcgtgagagcggggacggtgaagcgagtggtcctcacatcgtcggtggcgggggtgtccagccggccgctggaaggcgacggccatgtccttgacgaggaatcctggtccgacgtggagttcctcagatcaacaaagaccggtccctgggcgtactccgtctcgaaggtgcttgtggagaaggcggcgatggcgttcgcggaggacaagggcatcagcctggtcaccgtgtgcccggccgtcacggtgggcgaggcgccggcggcgaacgacctcaccagcgtcagcatcatcctctccctgctgtccggggatgatgcgtatgccggcgccctggagcacatcgagagggcgacgggctcgatcccgattctgcacatcgaggacctctgccgagcggagatgttcgtggccgaggaggaggccgcgtcggggcggtacatcgtctgcggcctcaaccccaccgccgtcgagattgcccgcttcttggctgccaactacccgcagtacaaggtcaatacagataggttcagagatctccctgagaagccgagagtctgcatttcgtcggcgaagctcgtcaaggaagggtttgagtacaagtacaagaacctggacggaatatatggcagcgtcgtcgagtatggaagggccttgggaatccttccctactaagaagtatgatcgatcttagaatcagacgatgcgcttggaagcaaaataagccttttagtctcctgaagtacacaaatgatgaaatgtgggtgttcagttcatatgaaaaatgtattataaaatgtactgtagtacttgtatggaaagtgatagttgtgtctgatgagagcatgctcagtcatggtgaaaaaagccatagtcgtgcacgtagataaaccgccattaaaatctcccccaacgcagaagaagccttcttgttttcctcc

SEQ ID NO: 65157 - protein, 373 aa, Triticum aestivum
  peptide (1)..(373): Ceres Seq. ID no. 14301623
  misc_feature (47)..(226): Pfam Name: NAD dependent epimerase/dehydratase family Pfam Description: NAD dependent epimerase/dehydratase family
  misc_feature (47)..(373): Homolog of NCBI NO: 28932723 NR Description: dihydroflavonol 4-reductase [Lophopyrum ponticum]
  misc_feature (44)..(373): Homolog of NCBI NO: 1944199 NR Description: dihydroflavonol 4-reductase [Perilla frutescens]
  misc_feature (38)..(373): Homolog of NCBI NO: 29423733 NR Description: dihydroflavonol 4-reductase [Brassica oleracea]
  misc_feature (43)..(371): Homolog of NCBI NO: 32454758 NR Description: TPA: putative anthocyanidin reductase [Gossypium
  misc_feature (35)..(370): Homolog of NCBI NO: 27966032 NR Description: anthocyanidin reductase [Medicago truncatula]
  misc_feature (42)..(371): Homolog of NCBI NO: 32454782 NR Description: TPA: putative anthocyanidin reductase [Vitis
  misc_feature (39)..(61): Homolog of NCBI NO: 39546254 NR Description: OSJNBa0089N06.24 [Oryza sativa (japonica
  misc_feature (77)..(348): Homolog of NCBI NO: 39546254 NR Description: OSJNBa0089N06.24 [Oryza sativa (japonica
  misc_feature (42)..(372): Homolog of NCBI NO: 39546252 NR Description: OSJNBa0089N06.22 [Oryza sativa (japonica
  misc_feature (39)..(373): Homolog of NCBI NO: 39546249 NR Description: OSJNBa0089N06.19 [Oryza sativa (japonica
MHTRPYLSCLSAAREIEPCARAIARRRELSSVVIIGDMATRRKTACVTGGSGYIASALVKMLLEKGYAVKTTVRNPDDAEKNAHLKALAALGSLEVFRADLNEEGSFDHAVAGCDYAFLVAAPVSLMPENPEKDVIEPAVHGTLNVMKSCVRAGTVKRVVLTSSVAGVSSRPLEGDGHVLDEESWSDVEFLRSTKTGPWAYSVSKVLVEKAAMAFAEDKGISLVTVCPAVTVGEAPAANDLTSVSIILSLLSGDDAYAGALEHIERATGSIPILHIEDLCRAEMFVAEEEAASGRYIVCGLNPTAVEIARFLAANYPQYKVNTDRFRDLPEKPRVCISSAKLVKEGFEYKYKNLDGIYGSVVEYGRALGILPY

SEQ ID NO: 65158 - protein, 336 aa, Triticum aestivum
  peptide (1)..(336): Ceres Seq. ID no. 14301624
  misc_feature (10)..(189): Pfam Name: NAD dependent epimerase/dehydratase family Pfam Description: NAD dependent epimerase/dehydratase family
  misc_feature (10)..(336): Homolog of NCBI NO: 28932723 NR Description: dihydroflavonol 4-reductase [Lophopyrum ponticum]
  misc_feature (7)..(336): Homolog of NCBI NO: 1944199 NR Description: dihydroflavonol 4-reductase [Perilla frutescens]
  misc_feature (1)..(336): Homolog of NCBI NO: 29423733 NR Description: dihydroflavonol 4-reductase [Brassica oleracea]
  misc_feature (6)..(334): Homolog of NCBI NO: 32454758 NR Description: TPA: putative anthocyanidin reductase [Gossypium
  misc_feature (1)..(333): Homolog of NCBI NO: 27966032 NR Description: anthocyanidin reductase [Medicago truncatula]
  misc_feature (5)..(334): Homolog of NCBI NO: 32454782 NR Description: TPA: putative anthocyanidin reductase [Vitis
  misc_feature (2)..(24): Homolog of NCBI NO: 39546254 NR Description: OSJNBa0089N06.24 [Oryza sativa (japonica
  misc_feature (40)..(311): Homolog of NCBI NO: 39546254 NR Description: OSJNBa0089N06.24 [Oryza sativa (japonica
  misc_feature (5)..(335): Homolog of NCBI NO: 39546252 NR Description: OSJNBa0089N06.22 [Oryza sativa (japonica
  misc_feature (2)..(336): Homolog of NCBI NO: 39546249 NR Description: OSJNBa0089N06.19 [Oryza sativa (japonica
MATRRKTACVTGGSGYIASALVKMLLEKGYAVKTTVRNPDDAEKNAHLKALAALGSLEVFRADLNEEGSFDHAVAGCDYAFLVAAPVSLMPENPEKDVIEPAVHGTLNVMKSCVRAGTVKRVVLTSSVAGVSSRPLEGDGHVLDEESWSDVEFLRSTKTGPWAYSVSKVLVEKAAMAFAEDKGISLVTVCPAVTVGEAPAANDLTSVSIILSLLSGDDAYAGALEHIERATGSIPILHIEDLCRAEMFVAEEEAASGRYIVCGLNPTAVEIARFLAANYPQYKVNTDRFRDLPEKPRVCISSAKLVKEGFEYKYKNLDGIYGSVVEYGRALGILPY

SEQ ID NO: 65159 - protein, 313 aa, Triticum aestivum
  peptide (1)..(313): Ceres Seq. ID no. 14301625
  misc_feature (1)..(166): Pfam Name: NAD dependent epimerase/dehydratase family Pfam Description: NAD dependent epimerase/dehydratase family
  misc_feature (1)..(291): Homolog of NCBI NO: 13537528 NR Description: dihydroflavonol 4-reductase [Lilium hybrid
  misc_feature (1)..(313): Homolog of NCBI NO: 28932723 NR Description: dihydroflavonol 4-reductase [Lophopyrum ponticum]
  misc_feature (1)..(313): Homolog of NCBI NO: 1944199 NR Description: dihydroflavonol 4-reductase [Perilla frutescens]
  misc_feature (1)..(313): Homolog of NCBI NO: 29423733 NR Description: dihydroflavonol 4-reductase [Brassica oleracea]
  misc_feature (1)..(311): Homolog of NCBI NO: 32454758 NR Description: TPA: putative anthocyanidin reductase [Gossypium
  misc_feature (1)..(310): Homolog of NCBI NO: 27966032 NR Description: anthocyanidin reductase [Medicago truncatula]
  misc_feature (1)..(311): Homolog of NCBI NO: 32454782 NR Description: TPA: putative anthocyanidin reductase [Vitis
  misc_feature (17)..(288): Homolog of NCBI NO: 39546254 NR Description: OSJNBa0089N06.24 [Oryza sativa (japonica
  misc_feature (1)..(312): Homolog of NCBI NO: 39546252 NR Description: OSJNBa0089N06.22 [Oryza sativa (japonica
  misc_feature (1)..(313): Homolog of NCBI NO: 39546249 NR Description: OSJNBa0089N06.19 [Oryza sativa (japonica
MLLEKGYAVKTTVRNPDDAEKNAHLKALAALGSLEVFRADLNEEGSFDHAVAGCDYAFLVAAPVSLMPENPEKDVIEPAVHGTLNVMKSCVRAGTVKRVVLTSSVAGVSSRPLEGDGHVLDEESWSDVEFLRSTKTGPWAYSVSKVLVEKAAMAFAEDKGISLVTVCPAVTVGEAPAANDLTSVSIILSLLSGDDAYAGALEHIERATGSIPILHIEDLCRAEMFVAEEEAASGRYIVCGLNPTAVEIARFLAANYPQYKVNTDRFRDLPEKPRVCISSAKLVKEGFEYKYKNLDGIYGSVVEYGRALGILPY

SEQ ID NO: 65160 - DNA, 1187 bp, Triticum aestivum
  misc_feature (1)..(1187): Ceres Seq. ID no. 13597477
atagaggaaaactttcgaggactatgacgatggggcgcaacttggcggcggtgctcgtcgtgcttgcctgcctcgtttccctcgcgtcggcgcagcaggtcaagacgacggacacgcggtggagctaccgtctgccgctgcccgacggcgtcagcggcgccgagagcctcgcgttcgccggcaaggacggggtctacaccggcgtctccgacgggcgcgttctcaggtggggcgggagcgccgccggctggaccaccttcgcttacaatgccaactacaggaaaattcctctgtgctcggattctggggtgccgtcggaacaaaaggagagcatatgcgggcggccgctgggtgtccggttcaacaggaagaccggcgagctctacatcgccgacgcctacttggggctcatgaaggtcggcccggaaggcggcgaagcccaggtgctagcgacggaggcgaacggcatccccttccacttcctcaacggnctcgacgttgatcaggcgaccggcgatgtctacttcaccgacagcagcgccaactacccccggaggttcaacacggagatcatcatgaacgccgacgcgaccggccgcctgctcaagtacgacgcacgcacgaagctcgtcacggtgctcaaggcggagctgccgtacccgaacggcgtcgcgctcagccgcgacaggacgcacctggtggtggcgcacacggtgccgtgccaggcgttccggtactggctcaaggggcccaaggccgggcagtacgagctcttcgccgacctgccggggtacccggacaacgtgaggcgcgacgggcagggcggtttctgggtggcgctcaaccaggagaaggcgcggctcaacgcgacggcggctccggtgaagcacttggtcggcgtccgtctcggcgccgacggcgtggaggtcgaggagctgacggccgccaggggcgtgacgctcagcgaggtggcggagcagaacggcaacaagctgtggctgggctccgtcgagcttgattatataggcctcttcgtttgatcgattatgtgccagcgcctttatggatttgtacgggttcgttagtggttgtctcattgagttagtagacagagttaaaggtcatggcttcgtacggtttcaggactacatgcaacgtttttctacagatgtaattatgcgagtatt

SEQ ID NO: 65161 - protein, 345 aa, Triticum aestivum
  peptide (1)..(345): Ceres Seq. ID no. 13597478
  misc_feature (51)..(302): Pfam Name: Strictosidine synthase Pfam Description: Strictosidine synthase
  misc_feature (43)..(281): Homolog of NCBI NO: 34902140 NR Description: putative male fertility protein
  misc_feature (43)..(281): Homolog of NCBI NO: 14028757 NR Description: male fertility protein [Zea mays]
  misc_feature (24)..(281): Homolog of NCBI NO: 40538997 NR Description: putative  strictosidine synthase
  misc_feature (49)..(302): Homolog of NCBI NO: 30694556 NR Description: strictosidine synthase-related [Arabidopsis
  misc_feature (49)..(302): Homolog of NCBI NO: 11280567 NR Description: hypothetical protein F24I3.110 - Arabidopsis
  misc_feature (104)..(343): Homolog of NCBI NO: 34395252 NR Description: putative strictosidine synthase-related
  misc_feature (104)..(343): Homolog of NCBI NO: 34395249 NR Description: putative strictosidine synthase
  misc_feature (6)..(336): Homolog of NCBI NO: 34393255 NR Description: putative male fertility protein
  misc_feature (6)..(343): Homolog of NCBI NO: 34395247 NR Description: putative strictosidine synthase
  misc_feature (1)..(343): Homolog of NCBI NO: 40253286 NR Description: putative male fertility protein
  misc_feature (163)..(163): Xaa is any aa, unknown or other
RGKLSRTMTMGRNLAAVLVVLACLVSLASAQQVKTTDTRWSYRLPLPDGVSGAESLAFAGKDGVYTGVSDGRVLRWGGSAAGWTTFAYNANYRKIPLCSDSGVPSEQKESICGRPLGVRFNRKTGELYIADAYLGLMKVGPEGGEAQVLATEANGIPFHFLNXLDVDQATGDVYFTDSSANYPRRFNTEIIMNADATGRLLKYDARTKLVTVLKAELPYPNGVALSRDRTHLVVAHTVPCQAFRYWLKGPKAGQYELFADLPGYPDNVRRDGQGGFWVALNQEKARLNATAAPVKHLVGVRLGADGVEVEELTAARGVTLSEVAEQNGNKLWLGSVELDYIGLFV

SEQ ID NO: 65162 - protein, 338 aa, Triticum aestivum
  peptide (1)..(338): Ceres Seq. ID no. 13597479
  misc_feature (44)..(295): Pfam Name: Strictosidine synthase Pfam Description: Strictosidine synthase
  misc_feature (36)..(274): Homolog of NCBI NO: 34902140 NR Description: putative male fertility protein
  misc_feature (36)..(274): Homolog of NCBI NO: 14028757 NR Description: male fertility protein [Zea mays]
  misc_feature (17)..(274): Homolog of NCBI NO: 40538997 NR Description: putative  strictosidine synthase
  misc_feature (42)..(295): Homolog of NCBI NO: 30694556 NR Description: strictosidine synthase-related [Arabidopsis
  misc_feature (42)..(295): Homolog of NCBI NO: 11280567 NR Description: hypothetical protein F24I3.110 - Arabidopsis
  misc_feature (97)..(336): Homolog of NCBI NO: 34395252 NR Description: putative strictosidine synthase-related
  misc_feature (97)..(336): Homolog of NCBI NO: 34395249 NR Description: putative strictosidine synthase
  misc_feature (1)..(329): Homolog of NCBI NO: 34393255 NR Description: putative male fertility protein
  misc_feature (1)..(336): Homolog of NCBI NO: 34395247 NR Description: putative strictosidine synthase
  misc_feature (1)..(336): Homolog of NCBI NO: 40253286 NR Description: putative male fertility protein
  misc_feature (156)..(156): Xaa is any aa, unknown or other
MTMGRNLAAVLVVLACLVSLASAQQVKTTDTRWSYRLPLPDGVSGAESLAFAGKDGVYTGVSDGRVLRWGGSAAGWTTFAYNANYRKIPLCSDSGVPSEQKESICGRPLGVRFNRKTGELYIADAYLGLMKVGPEGGEAQVLATEANGIPFHFLNXLDVDQATGDVYFTDSSANYPRRFNTEIIMNADATGRLLKYDARTKLVTVLKAELPYPNGVALSRDRTHLVVAHTVPCQAFRYWLKGPKAGQYELFADLPGYPDNVRRDGQGGFWVALNQEKARLNATAAPVKHLVGVRLGADGVEVEELTAARGVTLSEVAEQNGNKLWLGSVELDYIGLFV

SEQ ID NO: 65163 - protein, 336 aa, Triticum aestivum
  peptide (1)..(336): Ceres Seq. ID no. 13597480
  misc_feature (42)..(293): Pfam Name: Strictosidine synthase Pfam Description: Strictosidine synthase
  misc_feature (34)..(272): Homolog of NCBI NO: 34902140 NR Description: putative male fertility protein
  misc_feature (34)..(272): Homolog of NCBI NO: 14028757 NR Description: male fertility protein [Zea mays]
  misc_feature (15)..(272): Homolog of NCBI NO: 40538997 NR Description: putative  strictosidine synthase
  misc_feature (40)..(293): Homolog of NCBI NO: 30694556 NR Description: strictosidine synthase-related [Arabidopsis
  misc_feature (40)..(293): Homolog of NCBI NO: 11280567 NR Description: hypothetical protein F24I3.110 - Arabidopsis
  misc_feature (95)..(334): Homolog of NCBI NO: 34395252 NR Description: putative strictosidine synthase-related
  misc_feature (95)..(334): Homolog of NCBI NO: 34395249 NR Description: putative strictosidine synthase
  misc_feature (1)..(327): Homolog of NCBI NO: 34393255 NR Description: putative male fertility protein
  misc_feature (1)..(334): Homolog of NCBI NO: 34395247 NR Description: putative strictosidine synthase
  misc_feature (1)..(334): Homolog of NCBI NO: 40253286 NR Description: putative male fertility protein
  misc_feature (154)..(154): Xaa is any aa, unknown or other
MGRNLAAVLVVLACLVSLASAQQVKTTDTRWSYRLPLPDGVSGAESLAFAGKDGVYTGVSDGRVLRWGGSAAGWTTFAYNANYRKIPLCSDSGVPSEQKESICGRPLGVRFNRKTGELYIADAYLGLMKVGPEGGEAQVLATEANGIPFHFLNXLDVDQATGDVYFTDSSANYPRRFNTEIIMNADATGRLLKYDARTKLVTVLKAELPYPNGVALSRDRTHLVVAHTVPCQAFRYWLKGPKAGQYELFADLPGYPDNVRRDGQGGFWVALNQEKARLNATAAPVKHLVGVRLGADGVEVEELTAARGVTLSEVAEQNGNKLWLGSVELDYIGLFV

SEQ ID NO: 65164 - DNA, 582 bp, Triticum aestivum
  misc_feature (1)..(582): Ceres Seq. ID no. 13662788
cctaatcgaaaaccgtctcgtctcccccaaccaggcgaaaaccagcatcgcgaacggcaccagaccaaacccccgaatccgagccaaggagcaagggcaaaaccccatctgcggcggcggcggcggcggcggcggcggcgatggagtcggtggaggcgctcgtggcgcacatccagggtctctccgggagcccggacgagctggcgcagctccacggcctcctcaagcaggccgacggcgacgccctgcgcgtccactccgccggcctcctgcccttcctctcccacctccaccccggcgcccactccctcggctacctctacctcctggattctttcgtgtcgtcgtctgctaatctgagggcgcacgccggcggggaccttcttgtgaccgtggccgatttcctcacctcttgctcggccgaccagatacgcatggcgcccgacaaatttttgaatgtctgtagggtgctcaagaacgaggtcatgcagctcaatgcgccgatccgagggattgctccgcttcgggctgctgtccgcaagatccagacatcgtcagagcagcttaccccactccacgctg

SEQ ID NO: 65165 - protein, 147 aa, Triticum aestivum
  peptide (1)..(147): Ceres Seq. ID no. 13662789
  misc_feature (3)..(146): Homolog of NCBI NO: 6753488 NR Description: COP9 (constitutive photomorphogenic), subunit 3
  misc_feature (3)..(146): Homolog of NCBI NO: 23238222 NR Description: COP9 constitutive photomorphogenic homolog
  misc_feature (3)..(146): Homolog of NCBI NO: 27696965 NR Description: Similar to COP9 (constitutive photomorphogenic)
  misc_feature (3)..(146): Homolog of NCBI NO: 26339632 NR Description: unnamed protein product [Mus musculus]
  misc_feature (3)..(146): Homolog of NCBI NO: 39795809 NR Description: Unknown (protein for MGC:77615) [Danio rerio]
  misc_feature (3)..(146): Homolog of NCBI NO: 28279587 NR Description: Similar to COP9 constitutive photomorphogenic
  misc_feature (20)..(146): Homolog of NCBI NO: 29468345 NR Description: CSN3 [Nicotiana benthamiana]
  misc_feature (1)..(146): Homolog of NCBI NO: 11290078 NR Description: hypothetical protein F18O22.40 - Arabidopsis
  misc_feature (1)..(146): Homolog of NCBI NO: 18417330 NR Description: COP9 complex subunit 3, FUS11 [Arabidopsis
  misc_feature (1)..(146): Homolog of NCBI NO: 16930463 NR Description: AT5g14250/F18O22_40 [Arabidopsis thaliana]
MESVEALVAHIQGLSGSPDELAQLHGLLKQADGDALRVHSAGLLPFLSHLHPGAHSLGYLYLLDSFVSSSANLRAHAGGDLLVTVADFLTSCSADQIRMAPDKFLNVCRVLKNEVMQLNAPIRGIAPLRAAVRKIQTSSEQLTPLHA

SEQ ID NO: 65166 - protein, 119 aa, Triticum aestivum
  peptide (1)..(119): Ceres Seq. ID no. 13662790
PNRKPSRLPQPGENQHRERHQTKPPNPSQGARAKPHLRRRRRRRRRRWSRWRRSWRTSRVSPGARTSWRSSTASSSRPTATPCASTPPASCPSSPTSTPAPTPSATSTSWILSCRRLLI

SEQ ID NO: 65167 - protein, 117 aa, Triticum aestivum
  peptide (1)..(117): Ceres Seq. ID no. 13662791
  misc_feature (33)..(109): Pfam Name: Jun-like transcription factor Pfam Description: Jun-like transcription factor
  misc_feature (37)..(109): Homolog of NCBI NO: 14715185 NR Description: autotransporter subtilisin-like protease
  misc_feature (3)..(103): Homolog of NCBI NO: 26337967 NR Description: unnamed protein product [Mus musculus]
  misc_feature (24)..(117): Homolog of NCBI NO: 2624970 NR Description: proline-rich protein 9-1 [Mus musculus]
LIENRLVSPNQAKTSIANGTRPNPRIRAKEQGQNPICGGGGGGGGGDGVGGGARGAHPGSLREPGRAGAAPRPPQAGRRRRPARPLRRPPALPLPPPPRRPLPRLPLPPGFFRVVVC

SEQ ID NO: 65168 - DNA, 958 bp, Triticum aestivum
  misc_feature (1)..(958): Ceres Seq. ID no. 13598557
aaccatttcacctcacaacacttctcatcttggagctcagcagcacagcatccaagcttcttcttcggcaagatgaacaggaagccaggcgactgggactgcaggtcgtgccagcacctcaacttcagtcgccgggacctatgccagcgctgcggcgagccacgcagtgccgctgaccgtggcagcgtcggtggcgctcttggtggtgactacgccaactttggcggccgtggcgggggtggttcctcctttggtaccggctttggtgccggctctgacgtccgcccgggcgactggtactgcacctgcggggcgcacaacttcgccagccgctccagctgcttcaagtgtgctgccttcaaggaggaagctgccgtcaatggtggcgctggtggctttgatggtgacatgtcacgctcaaggggcttcggcttcggcgctgtcggtggcatgggtggcggcatgggagccggcgcggccggtggtcgtgccagccgccctggctggaagtctggcgactggatttgcaccaggtctggatgcaacgagcacaacttcgccagcaggcaggagtgcttcaggtgcaacgcaccgagggactccggtagcgccacgccatacgaaaatttcttgcactgaggtgtaggaaggccgcggcgatgagcagaagcagcaaagggtgtccgtgtcccgcagtcgacatcatcatcataagaagaagaagaagaaagtagaatgcaaagaaatcctcctcgagtgcatgcttactagttttgtctcttcccgttttagatttggttgtcatttcccatttgggaccgtccgtctgtccgtctgatcgatgatgactagctatgtttaccgttttattatttccgttcctttcatcaagtttgcagttcgagttatgtaacccaaagacgtatgctttgcttcagaagtattattgactagtagt

SEQ ID NO: 65169 - protein, 212 aa, Triticum aestivum
  peptide (1)..(212): Ceres Seq. ID no. 13598558
  misc_feature (170)..(200): Pfam Name: Zn-finger in Ran binding protein and others Pfam Description: Zn-finger in Ran binding protein and others
  misc_feature (25)..(79): Homolog of NCBI NO: 5803246 NR Description: ESTs AU077984(C62969),D41648(S4289), correspond to a region of the predicted gene.~Similar to putative
  misc_feature (132)..(203): Homolog of NCBI NO: 5803246 NR Description: ESTs AU077984(C62969),D41648(S4289), correspond to a region of the predicted gene.~Similar to putative
  misc_feature (25)..(79): Homolog of NCBI NO: 5679336 NR Description: putative zinc finger protein [Oryza sativa]
  misc_feature (132)..(203): Homolog of NCBI NO: 5679336 NR Description: putative zinc finger protein [Oryza sativa]
  misc_feature (28)..(146): Homolog of NCBI NO: 21595771 NR Description: putative zinc finger protein [Arabidopsis
  misc_feature (28)..(146): Homolog of NCBI NO: 15232662 NR Description: zinc finger protein -related [Arabidopsis
  misc_feature (55)..(207): Homolog of NCBI NO: 21595771 NR Description: putative zinc finger protein [Arabidopsis
  misc_feature (55)..(207): Homolog of NCBI NO: 15232662 NR Description: zinc finger protein -related [Arabidopsis
  misc_feature (25)..(207): Homolog of NCBI NO: 15239445 NR Description: expressed protein [Arabidopsis thaliana]
  misc_feature (25)..(203): Homolog of NCBI NO: 28849863 NR Description: zinc finger transcription factor ZFP30
NHFTSQHFSSWSSAAQHPSFFFGKMNRKPGDWDCRSCQHLNFSRRDLCQRCGEPRSAADRGSVGGALGGDYANFGGRGGGGSSFGTGFGAGSDVRPGDWYCTCGAHNFASRSSCFKCAAFKEEAAVNGGAGGFDGDMSRSRGFGFGAVGGMGGGMGAGAAGGRASRPGWKSGDWICTRSGCNEHNFASRQECFRCNAPRDSGSATPYENFLH

SEQ ID NO: 65170 - protein, 188 aa, Triticum aestivum
  peptide (1)..(188): Ceres Seq. ID no. 13598559
  misc_feature (146)..(176): Pfam Name: Zn-finger in Ran binding protein and others Pfam Description: Zn-finger in Ran binding protein and others
  misc_feature (1)..(55): Homolog of NCBI NO: 5803246 NR Description: ESTs AU077984(C62969),D41648(S4289), correspond to a region of the predicted gene.~Similar to putative
  misc_feature (108)..(179): Homolog of NCBI NO: 5803246 NR Description: ESTs AU077984(C62969),D41648(S4289), correspond to a region of the predicted gene.~Similar to putative
  misc_feature (1)..(55): Homolog of NCBI NO: 5679336 NR Description: putative zinc finger protein [Oryza sativa]
  misc_feature (108)..(179): Homolog of NCBI NO: 5679336 NR Description: putative zinc finger protein [Oryza sativa]
  misc_feature (4)..(122): Homolog of NCBI NO: 21595771 NR Description: putative zinc finger protein [Arabidopsis
  misc_feature (4)..(122): Homolog of NCBI NO: 15232662 NR Description: zinc finger protein -related [Arabidopsis
  misc_feature (31)..(183): Homolog of NCBI NO: 21595771 NR Description: putative zinc finger protein [Arabidopsis
  misc_feature (31)..(183): Homolog of NCBI NO: 15232662 NR Description: zinc finger protein -related [Arabidopsis
  misc_feature (1)..(183): Homolog of NCBI NO: 15239445 NR Description: expressed protein [Arabidopsis thaliana]
  misc_feature (1)..(179): Homolog of NCBI NO: 28849863 NR Description: zinc finger transcription factor ZFP30
MNRKPGDWDCRSCQHLNFSRRDLCQRCGEPRSAADRGSVGGALGGDYANFGGRGGGGSSFGTGFGAGSDVRPGDWYCTCGAHNFASRSSCFKCAAFKEEAAVNGGAGGFDGDMSRSRGFGFGAVGGMGGGMGAGAAGGRASRPGWKSGDWICTRSGCNEHNFASRQECFRCNAPRDSGSATPYENFLH

SEQ ID NO: 65171 - DNA, 1180 bp, Triticum aestivum
  misc_feature (1)..(1180): Ceres Seq. ID no. 13597481
aaattgtacacagccgctggtgacacacaactggtaacgtgcggcagccaggggaactatgacggggcagccgccgaggctcgtgttccggttcacccaggcggaggtcgccaagatggaggaggtcctccgtgagctcgacgccatgcccaagcgtcctgtcatccagggcctaatcgatcacttcaacgcctccccggaccgctcaggcgacggcaaggtccccgtccagtacaatcaggtgaggaattggttccataaccggaggtccgcgcaatcccagcggtccaggaagatgatgctaccccctgttaacgaggaacaccacccagtggccggatcctactcagggaatatttcttcggatggtggtcatgtccagtttgaagcaaagtcggctagaaatggagcatggtacaatgttgctgcctttctgtcccacaggttcattgacacgagggacccggaagtactagttcgattttgttggcttggacctgaggaggatgaatggattgatgtttgtaaaggtgtgagactgcgttctcttcaatgtgttgctgtgcttcctggggatctcattctttgttttaaggaaggcaaagagcaggcctgctattttgatgcacatgttcttcaagttcaaagacgcaggcatgacataagggggtgccgctgcaggtttcttgtttgttatgatcatgatcactctgaggagtttgttccactgagcaaggtatgtcgtcgaccaatgcaccagacaaccgaaaagccacacaaaatgatgagtgtcaacactgacaaggtgaccgggggagcggttcccattccaccagatcaaggagggccatctgacaaggcggttgctcccttactagacacacctactagcacctgcagctattcagtggcagatgttgagatgggggatgcggaggctgccccaaacagtgaagctgcaaatgaagcacatgtcgacaagatgaatctgggagtgtagttctttcgcttcccagtgcatttcgttgtgaactttctagcgaataatgtttgcctcagaacttccaaaagaggaaggatggttacccagtaactgtaatgtgcccatgttgactggattgcttgtgtggtgcaaaaattgttggattggttatctatatctatatagctatgtcgtcgg

SEQ ID NO: 65172 - protein, 313 aa, Triticum aestivum
  peptide (1)..(313): Ceres Seq. ID no. 15222110
  misc_feature (101)..(219): Homolog of NCBI NO: 30684237 NR Description: expressed protein [Arabidopsis thaliana]
  misc_feature (101)..(231): Homolog of NCBI NO: 30684244 NR Description: expressed protein [Arabidopsis thaliana]
  misc_feature (101)..(231): Homolog of NCBI NO: 25402795 NR Description: protein F9L1.16 [imported] - Arabidopsis thaliana
  misc_feature (102)..(300): Homolog of NCBI NO: 11994101 NR Description: gb|AAD39678.1~gene_id:MYF24.10~similar to unknown
  misc_feature (3)..(79): Homolog of NCBI NO: 22331151 NR Description: expressed protein [Arabidopsis thaliana]
  misc_feature (102)..(300): Homolog of NCBI NO: 22331151 NR Description: expressed protein [Arabidopsis thaliana]
MTGQPPRLVFRFTQAEVAKMEEVLRELDAMPKRPVIQGLIDHFNASPDRSGDGKVPVQYNQVRNWFHNRRSAQSQRSRKMMLPPVNEEHHPVAGSYSGNISSDGGHVQFEAKSARNGAWYNVAAFLSHRFIDTRDPEVLVRFCWLGPEEDEWIDVCKGVRLRSLQCVAVLPGDLILCFKEGKEQACYFDAHVLQVQRRRHDIRGCRCRFLVCYDHDHSEEFVPLSKVCRRPMHQTTEKPHKMMSVNTDKVTGGAVPIPPDQGGPSDKAVAPLLDTPTSTCSYSVADVEMGDAEAAPNSEAANEAHVDKMNLGV

SEQ ID NO: 65173 - protein, 294 aa, Triticum aestivum
  peptide (1)..(294): Ceres Seq. ID no. 15222111
  misc_feature (82)..(200): Homolog of NCBI NO: 30684237 NR Description: expressed protein [Arabidopsis thaliana]
  misc_feature (82)..(212): Homolog of NCBI NO: 30684244 NR Description: expressed protein [Arabidopsis thaliana]
  misc_feature (82)..(212): Homolog of NCBI NO: 25402795 NR Description: protein F9L1.16 [imported] - Arabidopsis thaliana
  misc_feature (83)..(281): Homolog of NCBI NO: 11994101 NR Description: gb|AAD39678.1~gene_id:MYF24.10~similar to unknown
  misc_feature (1)..(60): Homolog of NCBI NO: 22331151 NR Description: expressed protein [Arabidopsis thaliana]
  misc_feature (83)..(281): Homolog of NCBI NO: 22331151 NR Description: expressed protein [Arabidopsis thaliana]
MEEVLRELDAMPKRPVIQGLIDHFNASPDRSGDGKVPVQYNQVRNWFHNRRSAQSQRSRKMMLPPVNEEHHPVAGSYSGNISSDGGHVQFEAKSARNGAWYNVAAFLSHRFIDTRDPEVLVRFCWLGPEEDEWIDVCKGVRLRSLQCVAVLPGDLILCFKEGKEQACYFDAHVLQVQRRRHDIRGCRCRFLVCYDHDHSEEFVPLSKVCRRPMHQTTEKPHKMMSVNTDKVTGGAVPIPPDQGGPSDKAVAPLLDTPTSTCSYSVADVEMGDAEAAPNSEAANEAHVDKMNLGV

SEQ ID NO: 65174 - protein, 284 aa, Triticum aestivum
  peptide (1)..(284): Ceres Seq. ID no. 15222112
  misc_feature (72)..(190): Homolog of NCBI NO: 30684237 NR Description: expressed protein [Arabidopsis thaliana]
  misc_feature (72)..(202): Homolog of NCBI NO: 30684244 NR Description: expressed protein [Arabidopsis thaliana]
  misc_feature (72)..(202): Homolog of NCBI NO: 25402795 NR Description: protein F9L1.16 [imported] - Arabidopsis thaliana
  misc_feature (73)..(271): Homolog of NCBI NO: 11994101 NR Description: gb|AAD39678.1~gene_id:MYF24.10~similar to unknown
  misc_feature (1)..(50): Homolog of NCBI NO: 22331151 NR Description: expressed protein [Arabidopsis thaliana]
  misc_feature (73)..(271): Homolog of NCBI NO: 22331151 NR Description: expressed protein [Arabidopsis thaliana]
MPKRPVIQGLIDHFNASPDRSGDGKVPVQYNQVRNWFHNRRSAQSQRSRKMMLPPVNEEHHPVAGSYSGNISSDGGHVQFEAKSARNGAWYNVAAFLSHRFIDTRDPEVLVRFCWLGPEEDEWIDVCKGVRLRSLQCVAVLPGDLILCFKEGKEQACYFDAHVLQVQRRRHDIRGCRCRFLVCYDHDHSEEFVPLSKVCRRPMHQTTEKPHKMMSVNTDKVTGGAVPIPPDQGGPSDKAVAPLLDTPTSTCSYSVADVEMGDAEAAPNSEAANEAHVDKMNLGV

SEQ ID NO: 65175 - DNA, 1075 bp, Triticum aestivum
  misc_feature (1)..(1075): Ceres Seq. ID no. 13597604
gaaaagctttaaaagggacgggcaggcgactcaccccaccctctccctccccagcccaaaaaatttcctcgcccctccccgaagaatcccaccaccacaaccactgccacgaagaaccaatccgccccctcgcctcccccagggccgccggttcccccccgagaagggtaaatgggatcagaagggccttcaatcgtgactgtacatgttactggatttaagaagttccatggtgttgctgagaacccgacagagaaacttgtgaccaacattaaatcgttcattgaaaagagagggttgccgaaaaatcttgtacttggaagctgcgaaattctcgaaacagccgggcagggggcgcttggaacattatataaagttctagaatctgccattgcagatagagagaacgggtcatcagctcaggggcaaataatttgggtccactttggggtaaatagtggtgcatcacggtttgctcttgagaatcaagctgtgaatgaagccaccttccgctgcccagatgagcttgggtggaaacctcagagagtgcctattgtgccatctgatggaagcatctcacggacaagagagactacactgccagtgaaggagttaaccaagtcactccgaaagacaggctacgatgtgatgccttcggatgacgcggggagattcgtgtgcaactatgtgtactaccactccctccggtttgcagagcagcacggcatcaagtctctgtttgtgcatgtgcccctcttctcgacagtcgacgaggaggtccagatccatttcgtcgcttccctcgtcgaagctcttgctagcttgaactaggaacggcaacttaaaaggtcagcggtttgacctggacgatgtaaagttggacgcagactgaataagattgtgtggtgattggcgcctattggtcagatcttgctccaaaaagggtgtatttaaggggagagaaaaagaaaaacgatgcttagagtgtgtgtgaaatgccggcttgcatgccatcagttacatgtccttaacttgcatgaaaacctggttccaataaaattgacagatcattggg

SEQ ID NO: 65176 - protein, 219 aa, Triticum aestivum
  peptide (1)..(219): Ceres Seq. ID no. 15222146
  misc_feature (11)..(214): Pfam Name: Pyroglutamyl peptidase Pfam Description: Pyroglutamyl peptidase
  misc_feature (88)..(194): Homolog of NCBI NO: 18977671 NR Description: pyroglutamyl-peptidase i [Pyrococcus furiosus DSM
  misc_feature (1)..(89): Homolog of NCBI NO: 15220751 NR Description: expressed protein [Arabidopsis thaliana]
  misc_feature (1)..(89): Homolog of NCBI NO: 9295697 NR Description: F26F24.31 [Arabidopsis thaliana]
  misc_feature (88)..(217): Homolog of NCBI NO: 15220753 NR Description: expressed protein [Arabidopsis thaliana]
  misc_feature (1)..(89): Homolog of NCBI NO: 8778575 NR Description: F28C11.8 [Arabidopsis thaliana]
  misc_feature (85)..(217): Homolog of NCBI NO: 8778575 NR Description: F28C11.8 [Arabidopsis thaliana]
  misc_feature (1)..(217): Homolog of NCBI NO: 13430708 NR Description: unknown protein [Arabidopsis thaliana]
  misc_feature (1)..(218): Homolog of NCBI NO: 18405940 NR Description: expressed protein [Arabidopsis thaliana]
  misc_feature (1)..(219): Homolog of NCBI NO: 12039349 NR Description: putative pyrrolidone carboxyl peptidase [Oryza
  misc_feature (1)..(219): Homolog of NCBI NO: 38175741 NR Description: pyrrolidone carboxyl peptidase-like protein
MGSEGPSIVTVHVTGFKKFHGVAENPTEKLVTNIKSFIEKRGLPKNLVLGSCEILETAGQGALGTLYKVLESAIADRENGSSAQGQIIWVHFGVNSGASRFALENQAVNEATFRCPDELGWKPQRVPIVPSDGSISRTRETTLPVKELTKSLRKTGYDVMPSDDAGRFVCNYVYYHSLRFAEQHGIKSLFVHVPLFSTVDEEVQIHFVASLVEALASLN

SEQ ID NO: 65177 - DNA, 1372 bp, Triticum aestivum
  misc_feature (1)..(1372): Ceres Seq. ID no. 15225093
ctccgtccccccgcgtccccattgccttctccgttcccccaccccgtacctcgtcggcgggcggcgacgcgacgcgacgcgacgagagcggcggcggcgccggcgggggcaggaatgcggatgttctccaaggcctgctcgctcgtcgtctcctccctcccgcgctgctcctcctccgcccccgcgattagggggcagccgtcgttgataccgagggtgagcaggaaatggctcgggaagccgctcatgtacgggatcggcacgctgctggttatgcccctgaggacgatccacggtgtgggccggatgttcggcgccgcgcggtacctctgcaacatgaccagcgtctcctcgtcgcttcaaatcgagctcgtaccctgtcttcaagataactatgcgtacatcttgcatgatgtggatactggaacagttggagttgtagacccttctgaggcggtgcctatcataaacgcattggaaaagagaaaccagaacttgacctacatattaaacacccatcatcactatgatcatactggtggcaacttggaactgaaggcgaaatatggtgcaaaggtaattggttctgagaaggataaagatcgaattcctggcattgacataactctaagcgagggtgacacatggatgtttgcgggtcatcaagttcttgtgatggaaactcctggtcatacatcaggtcatgtgagcttttatttccctggatctggagcaatattcacaggtgataccttgtttagtctatcatgtggaaagctttttgaggggactccagaacagatgtactcttcactccaaaaaattgtagctcttccagatgtgacgaaggtgtactgtggacatgaatatactctgagcaattcaaggtttgccttgagcatagaaccaggaaatgaagaacttcaggaatacgctgcaagtacagctgatctgcgcaataagaatacaccaacggtgccaacaacaattgcgagagagaagcagtgcaatcctttcttgaggacctcaagtccagagataaagaaaaggctgtccattccagatcatttcgatgatgcacgtgttcttgaagttatccgacgggcgaaggataatttttgactaaccacaaaggaaattatcataaaacggtgacccaaccatctcttcgaaaaggagaagtggacaaagaacccggcaagaccacaacagaaggaatgcagggaaggaaatgtgtatagctcgatgttccaaaaatgctttggtgaaaatttgtctagcattgtatgtagcttgcacagagtgcttgttaatctgatagcagctggtgattcttttgtcgactacaaataaaatgtgtcctgtaatcctc

SEQ ID NO: 65178 - protein, 373 aa, Triticum aestivum
  peptide (1)..(373): Ceres Seq. ID no. 15225094
  misc_feature (130)..(288): Pfam Name: Metallo-beta-lactamase superfamily Pfam Description: Metallo-beta-lactamase superfamily
  misc_feature (39)..(373): Homolog of NCBI NO: 2570340 NR Description: glyoxalase II mitochondrial isozyme [Arabidopsis
  misc_feature (39)..(373): Homolog of NCBI NO: 18406237 NR Description: glyoxalase II (hydroxyacylglutathione
  misc_feature (39)..(373): Homolog of NCBI NO: 30684920 NR Description: glyoxalase II, putative (hydroxyacylglutathione
  misc_feature (39)..(373): Homolog of NCBI NO: 15224661 NR Description: glyoxalase II, putative (hydroxyacylglutathione
  misc_feature (66)..(373): Homolog of NCBI NO: 25406895 NR Description: hypothetical protein [imported] - Arabidopsis
  misc_feature (39)..(373): Homolog of NCBI NO: 30679573 NR Description: glyoxalase II, putative (hydroxyacylglutathione
  misc_feature (39)..(373): Homolog of NCBI NO: 18390616 NR Description: glyoxalase II, putative (hydroxyacylglutathione
  misc_feature (41)..(373): Homolog of NCBI NO: 28143946 NR Description: glyoxalase II [Brassica juncea]
  misc_feature (39)..(373): Homolog of NCBI NO: 21070362 NR Description: glyoxalase II [Pennisetum glaucum]
  misc_feature (39)..(373): Homolog of NCBI NO: 16209608 NR Description: glyoxalase II [Oryza sativa]
LRPPASPLPSPFPHPVPRRRAATRRDATRAAAAPAGAGMRMFSKACSLVVSSLPRCSSSAPAIRGQPSLIPRVSRKWLGKPLMYGIGTLLVMPLRTIHGVGRMFGAARYLCNMTSVSSSLQIELVPCLQDNYAYILHDVDTGTVGVVDPSEAVPIINALEKRNQNLTYILNTHHHYDHTGGNLELKAKYGAKVIGSEKDKDRIPGIDITLSEGDTWMFAGHQVLVMETPGHTSGHVSFYFPGSGAIFTGDTLFSLSCGKLFEGTPEQMYSSLQKIVALPDVTKVYCGHEYTLSNSRFALSIEPGNEELQEYAASTADLRNKNTPTVPTTIAREKQCNPFLRTSSPEIKKRLSIPDHFDDARVLEVIRRAKDNF

SEQ ID NO: 65179 - protein, 335 aa, Triticum aestivum
  peptide (1)..(335): Ceres Seq. ID no. 15225095
  misc_feature (92)..(250): Pfam Name: Metallo-beta-lactamase superfamily Pfam Description: Metallo-beta-lactamase superfamily
  misc_feature (1)..(335): Homolog of NCBI NO: 2570340 NR Description: glyoxalase II mitochondrial isozyme [Arabidopsis
  misc_feature (1)..(335): Homolog of NCBI NO: 18406237 NR Description: glyoxalase II (hydroxyacylglutathione
  misc_feature (1)..(335): Homolog of NCBI NO: 30684920 NR Description: glyoxalase II, putative (hydroxyacylglutathione
  misc_feature (1)..(335): Homolog of NCBI NO: 15224661 NR Description: glyoxalase II, putative (hydroxyacylglutathione
  misc_feature (28)..(335): Homolog of NCBI NO: 25406895 NR Description: hypothetical protein [imported] - Arabidopsis
  misc_feature (1)..(335): Homolog of NCBI NO: 30679573 NR Description: glyoxalase II, putative (hydroxyacylglutathione
  misc_feature (1)..(335): Homolog of NCBI NO: 18390616 NR Description: glyoxalase II, putative (hydroxyacylglutathione
  misc_feature (3)..(335): Homolog of NCBI NO: 28143946 NR Description: glyoxalase II [Brassica juncea]
  misc_feature (1)..(335): Homolog of NCBI NO: 21070362 NR Description: glyoxalase II [Pennisetum glaucum]
  misc_feature (1)..(335): Homolog of NCBI NO: 16209608 NR Description: glyoxalase II [Oryza sativa]
MRMFSKACSLVVSSLPRCSSSAPAIRGQPSLIPRVSRKWLGKPLMYGIGTLLVMPLRTIHGVGRMFGAARYLCNMTSVSSSLQIELVPCLQDNYAYILHDVDTGTVGVVDPSEAVPIINALEKRNQNLTYILNTHHHYDHTGGNLELKAKYGAKVIGSEKDKDRIPGIDITLSEGDTWMFAGHQVLVMETPGHTSGHVSFYFPGSGAIFTGDTLFSLSCGKLFEGTPEQMYSSLQKIVALPDVTKVYCGHEYTLSNSRFALSIEPGNEELQEYAASTADLRNKNTPTVPTTIAREKQCNPFLRTSSPEIKKRLSIPDHFDDARVLEVIRRAKDNF

SEQ ID NO: 65180 - protein, 333 aa, Triticum aestivum
  peptide (1)..(333): Ceres Seq. ID no. 15225096
  misc_feature (90)..(248): Pfam Name: Metallo-beta-lactamase superfamily Pfam Description: Metallo-beta-lactamase superfamily
  misc_feature (1)..(333): Homolog of NCBI NO: 2570340 NR Description: glyoxalase II mitochondrial isozyme [Arabidopsis
  misc_feature (1)..(333): Homolog of NCBI NO: 18406237 NR Description: glyoxalase II (hydroxyacylglutathione
  misc_feature (1)..(333): Homolog of NCBI NO: 30684920 NR Description: glyoxalase II, putative (hydroxyacylglutathione
  misc_feature (1)..(333): Homolog of NCBI NO: 15224661 NR Description: glyoxalase II, putative (hydroxyacylglutathione
  misc_feature (26)..(333): Homolog of NCBI NO: 25406895 NR Description: hypothetical protein [imported] - Arabidopsis
  misc_feature (1)..(333): Homolog of NCBI NO: 30679573 NR Description: glyoxalase II, putative (hydroxyacylglutathione
  misc_feature (1)..(333): Homolog of NCBI NO: 18390616 NR Description: glyoxalase II, putative (hydroxyacylglutathione
  misc_feature (1)..(333): Homolog of NCBI NO: 28143946 NR Description: glyoxalase II [Brassica juncea]
  misc_feature (1)..(333): Homolog of NCBI NO: 21070362 NR Description: glyoxalase II [Pennisetum glaucum]
  misc_feature (1)..(333): Homolog of NCBI NO: 16209608 NR Description: glyoxalase II [Oryza sativa]
MFSKACSLVVSSLPRCSSSAPAIRGQPSLIPRVSRKWLGKPLMYGIGTLLVMPLRTIHGVGRMFGAARYLCNMTSVSSSLQIELVPCLQDNYAYILHDVDTGTVGVVDPSEAVPIINALEKRNQNLTYILNTHHHYDHTGGNLELKAKYGAKVIGSEKDKDRIPGIDITLSEGDTWMFAGHQVLVMETPGHTSGHVSFYFPGSGAIFTGDTLFSLSCGKLFEGTPEQMYSSLQKIVALPDVTKVYCGHEYTLSNSRFALSIEPGNEELQEYAASTADLRNKNTPTVPTTIAREKQCNPFLRTSSPEIKKRLSIPDHFDDARVLEVIRRAKDNF

SEQ ID NO: 65181 - DNA, 1582 bp, Triticum aestivum
  misc_feature (1)..(1582): Ceres Seq. ID no. 14303165
atttcgagacaattatgctgtgctggtccgtcgcactcgcacggaagaaaaggcccggagcgcagagacggccaaatgagttgctcataattccgtctcgctgctggttcgtttagcgccattctcccaggctgctacgaaactcagggccgcgtccgcgtcaatggcttcttgctgctgcccaatcattgcctggttcgtctctttcctcctcgtcttccccgtcctcgtctcctccgcgacggcgggcaatggcagcacattcggggaggagcagctcgggctccggcggatgaaggcccggctcgccagggtcagggaagcctctgtcaagacgatccagagccccgacggcgacgtcatagactgcgtgccctctcacctgcagcccgcgttcgatcatcccaggctgagaggccagaaaccagaggacgaacctgcggcgcggccagggaatgccggcgccgtggcagacgacgaggaggaggtcttgccgcagacgtggaggagctccggcgagtggtgccccaaggggacgataccggttaggcgggcgacggagggcgacctgctcagggccagctccgtccggaggttcgggatgaagccccggagtgccgcggcacggcgggactccaccagcaacggccatgagcacgcggtggggtacgtgagcggcgggcagttctacggcgccaaggcgagcctgaacgtgtggccggcgcacgtgtcgtcgccggcggagttcagcctgtcccagatctgggtcatctccggctccttcggcaacgacctcaacaccatcgaggccggctggcaggtcagccctgagctgtacggggacaacagccccaggttcttcacctactggaccaacgacgcgtaccaggagacggggtgctacaacctgcactgcgcggggttcgtgcagaccaacggccgggtggtgatcggcgccgccatcacgccggtgtcggcctacggcggccggcagttcgacatcacgctcatgatctggaaggaccccaagaagggcaactggtggctgcagctgggcccgtcgggcgcgctcgtgggctactggccgtcctccctcttcacccacctgggcgcgcgcggccgcggcggcgccgacatggtgcagttcggcggcgaggcggtcaacacgcggccgtccgggtcgcacacgcccacgcagatgggcagcggccggttccccggcgaagggtacggccgcgcggcctacttccggaacgtgcaggtcgtggactgggacaacaacctcatcccggcggccgggctacggctcctcgccgaccacccggggtgctacgacatcgccggcggccagggcggcgcgtggggcagctacttctactacggcgggcctggcaggaacgtccggtgcccctagaaccgatactgcttactcaggccacagatgctaattccagcaaaattaatataccacaaaagtctttagttataatttctttgcatgcatgcttgtttatgatcatagatagagtttttttgcactcgaatttatttgaaaggagggacattgactcgcattgcacgc

SEQ ID NO: 65182 - protein, 416 aa, Triticum aestivum
  peptide (1)..(416): Ceres Seq. ID no. 14303166
  misc_feature (175)..(375): Pfam Name: Arabidopsis proteins of unknown function Pfam Description: Arabidopsis proteins of unknown function
  misc_feature (118)..(416): Homolog of NCBI NO: 6573746 NR Description: F20B24.18 [Arabidopsis thaliana]
  misc_feature (3)..(416): Homolog of NCBI NO: 15220207 NR Description: expressed protein [Arabidopsis thaliana]
  misc_feature (24)..(416): Homolog of NCBI NO: 28416687 NR Description: At1g70550 [Arabidopsis thaliana]
  misc_feature (24)..(416): Homolog of NCBI NO: 30698726 NR Description: expressed protein [Arabidopsis thaliana]
  misc_feature (24)..(416): Homolog of NCBI NO: 25345697 NR Description: unknown protein F5A18.27 [imported] - Arabidopsis
  misc_feature (12)..(416): Homolog of NCBI NO: 30688348 NR Description: expressed protein [Arabidopsis thaliana]
  misc_feature (1)..(416): Homolog of NCBI NO: 15240622 NR Description: expressed protein [Arabidopsis thaliana]
  misc_feature (1)..(416): Homolog of NCBI NO: 21389708 NR Description: putative carboxyl-terminal proteinase [Gossypium
  misc_feature (22)..(164): Homolog of NCBI NO: 15528706 NR Description: P0583G08.7 [Oryza sativa (japonica
  misc_feature (165)..(416): Homolog of NCBI NO: 15528706 NR Description: P0583G08.7 [Oryza sativa (japonica
MASCCCPIIAWFVSFLLVFPVLVSSATAGNGSTFGEEQLGLRRMKARLARVREASVKTIQSPDGDVIDCVPSHLQPAFDHPRLRGQKPEDEPAARPGNAGAVADDEEEVLPQTWRSSGEWCPKGTIPVRRATEGDLLRASSVRRFGMKPRSAAARRDSTSNGHEHAVGYVSGGQFYGAKASLNVWPAHVSSPAEFSLSQIWVISGSFGNDLNTIEAGWQVSPELYGDNSPRFFTYWTNDAYQETGCYNLHCAGFVQTNGRVVIGAAITPVSAYGGRQFDITLMIWKDPKKGNWWLQLGPSGALVGYWPSSLFTHLGARGRGGADMVQFGGEAVNTRPSGSHTPTQMGSGRFPGEGYGRAAYFRNVQVVDWDNNLIPAAGLRLLADHPGCYDIAGGQGGAWGSYFYYGGPGRNVRCP

SEQ ID NO: 65183 - protein, 373 aa, Triticum aestivum
  peptide (1)..(373): Ceres Seq. ID no. 14303167
  misc_feature (132)..(332): Pfam Name: Arabidopsis proteins of unknown function Pfam Description: Arabidopsis proteins of unknown function
  misc_feature (75)..(373): Homolog of NCBI NO: 6573746 NR Description: F20B24.18 [Arabidopsis thaliana]
  misc_feature (1)..(373): Homolog of NCBI NO: 15220207 NR Description: expressed protein [Arabidopsis thaliana]
  misc_feature (1)..(373): Homolog of NCBI NO: 28416687 NR Description: At1g70550 [Arabidopsis thaliana]
  misc_feature (1)..(373): Homolog of NCBI NO: 30698726 NR Description: expressed protein [Arabidopsis thaliana]
  misc_feature (1)..(373): Homolog of NCBI NO: 25345697 NR Description: unknown protein F5A18.27 [imported] - Arabidopsis
  misc_feature (1)..(373): Homolog of NCBI NO: 30688348 NR Description: expressed protein [Arabidopsis thaliana]
  misc_feature (1)..(373): Homolog of NCBI NO: 15240622 NR Description: expressed protein [Arabidopsis thaliana]
  misc_feature (1)..(373): Homolog of NCBI NO: 21389708 NR Description: putative carboxyl-terminal proteinase [Gossypium
  misc_feature (1)..(121): Homolog of NCBI NO: 15528706 NR Description: P0583G08.7 [Oryza sativa (japonica
  misc_feature (122)..(373): Homolog of NCBI NO: 15528706 NR Description: P0583G08.7 [Oryza sativa (japonica
MKARLARVREASVKTIQSPDGDVIDCVPSHLQPAFDHPRLRGQKPEDEPAARPGNAGAVADDEEEVLPQTWRSSGEWCPKGTIPVRRATEGDLLRASSVRRFGMKPRSAAARRDSTSNGHEHAVGYVSGGQFYGAKASLNVWPAHVSSPAEFSLSQIWVISGSFGNDLNTIEAGWQVSPELYGDNSPRFFTYWTNDAYQETGCYNLHCAGFVQTNGRVVIGAAITPVSAYGGRQFDITLMIWKDPKKGNWWLQLGPSGALVGYWPSSLFTHLGARGRGGADMVQFGGEAVNTRPSGSHTPTQMGSGRFPGEGYGRAAYFRNVQVVDWDNNLIPAAGLRLLADHPGCYDIAGGQGGAWGSYFYYGGPGRNVRCP

SEQ ID NO: 65184 - protein, 270 aa, Triticum aestivum
  peptide (1)..(270): Ceres Seq. ID no. 14303168
  misc_feature (29)..(229): Pfam Name: Arabidopsis proteins of unknown function Pfam Description: Arabidopsis proteins of unknown function
  misc_feature (1)..(270): Homolog of NCBI NO: 6573746 NR Description: F20B24.18 [Arabidopsis thaliana]
  misc_feature (1)..(270): Homolog of NCBI NO: 15220207 NR Description: expressed protein [Arabidopsis thaliana]
  misc_feature (1)..(270): Homolog of NCBI NO: 28416687 NR Description: At1g70550 [Arabidopsis thaliana]
  misc_feature (1)..(270): Homolog of NCBI NO: 30698726 NR Description: expressed protein [Arabidopsis thaliana]
  misc_feature (1)..(270): Homolog of NCBI NO: 25345697 NR Description: unknown protein F5A18.27 [imported] - Arabidopsis
  misc_feature (1)..(270): Homolog of NCBI NO: 30688348 NR Description: expressed protein [Arabidopsis thaliana]
  misc_feature (1)..(270): Homolog of NCBI NO: 15240622 NR Description: expressed protein [Arabidopsis thaliana]
  misc_feature (1)..(270): Homolog of NCBI NO: 21389708 NR Description: putative carboxyl-terminal proteinase [Gossypium
  misc_feature (1)..(18): Homolog of NCBI NO: 15528706 NR Description: P0583G08.7 [Oryza sativa (japonica
  misc_feature (19)..(270): Homolog of NCBI NO: 15528706 NR Description: P0583G08.7 [Oryza sativa (japonica
MKPRSAAARRDSTSNGHEHAVGYVSGGQFYGAKASLNVWPAHVSSPAEFSLSQIWVISGSFGNDLNTIEAGWQVSPELYGDNSPRFFTYWTNDAYQETGCYNLHCAGFVQTNGRVVIGAAITPVSAYGGRQFDITLMIWKDPKKGNWWLQLGPSGALVGYWPSSLFTHLGARGRGGADMVQFGGEAVNTRPSGSHTPTQMGSGRFPGEGYGRAAYFRNVQVVDWDNNLIPAAGLRLLADHPGCYDIAGGQGGAWGSYFYYGGPGRNVRCP

SEQ ID NO: 65185 - DNA, 1157 bp, Triticum aestivum
  misc_feature (1)..(1157): Ceres Seq. ID no. 12617447
tccctaaaatcttccccaaaacccccattgctccgcgatgagacccgcagcaacagcggtagcagccaccgccgccgcgctccgagccgcgttcctcgcccctcccgctgccgccttccgcctcctccctccccgccgtgtcttcctcctccccctgcaccgcctctcctcctcctcgtccccggtcgcccctccttgcgccgcttcctccgactcccagccgccgccgttgcctgccttcatggacgcgcagttcgagtccttccgggcgcagctcgatggctcctccgccctccgcgaccgcatccgcgccgtcgtctccgaggtcgagtcagcctcccgggccgcctccgctgcgctcctcctcatccaccagcccgtccccctatctgatgtgctcggcaaggcgaaggcgcaggtggaggtgatcaaggggctgtactctcagctcgcggagatcctcaaagagtgccccggtcagtactacaggtaccatggggactggaagagtgagacacagtctgtggtgtcgatgctagcgttcacgcactggctcgagactggtggcctgctcacgcacgccgaggcccaggaaaagctaggattgggttctggggagtttggcctggacgttgaagactacctgactggattgtgcttcatgtccaatgattttcctagatatgtagtgaatcgggtcacggcgggtgactacgactgcccacggaaggtgctaagctttttgactgatctgcatgcttcatttaggatgctgaatctgcgcaatgacttcttgcgtaagaaatttgatgggatgaagtatgatttgagaagggtggaggaagtattttatgatgtgaagatacgcggacttgtccctggggagtcaaagcaggaggttgctcagtcatagacggtgagcggtgccgtaccatttacttgcaatcgacagctgtcatgtgttgtcgtcgttaccgatgatgtttatgttggaccgatggttcctagaaaaagctcatgctgtgaggatctctttttttgactgtagcatcgctttaagttcggcactttttcggacccacctagaggttggaaaatgacatgagaattattctgttgcaaaaaaaaaaaaaaaaaagcttatcgataccgtcgac

SEQ ID NO: 65186 - protein, 291 aa, Triticum aestivum
  peptide (1)..(291): Ceres Seq. ID no. 12617448
  misc_feature (84)..(279): Pfam Name: Translin family Pfam Description: Translin family
  misc_feature (73)..(278): Homolog of NCBI NO: 4759270 NR Description: translin
  misc_feature (73)..(278): Homolog of NCBI NO: 21730459 NR Description: Chain A, Crystal Structure Of Mouse TestisBRAIN
  misc_feature (73)..(278): Homolog of NCBI NO: 6755899 NR Description: translin; testis/brain-RNA-binding protein [Mus
  misc_feature (69)..(279): Homolog of NCBI NO: 6136058 NR Description: Translin
  misc_feature (73)..(287): Homolog of NCBI NO: 7648677 NR Description: translin [Xenopus laevis]
  misc_feature (197)..(282): Homolog of NCBI NO: 25408524 NR Description: translin-like protein [imported] - Arabidopsis
  misc_feature (73)..(287): Homolog of NCBI NO: 20129859 NR Description: CG11761-PA [Drosophila melanogaster]
  misc_feature (69)..(219): Homolog of NCBI NO: 25408524 NR Description: translin-like protein [imported] - Arabidopsis
  misc_feature (69)..(282): Homolog of NCBI NO: 18404301 NR Description: translin-like protein
  misc_feature (1)..(289): Homolog of NCBI NO: 37534782 NR Description: translin-like protein [Oryza sativa (japonica
MRPAATAVAATAAALRAAFLAPPAAAFRLLPPRRVFLLPLHRLSSSSSPVAPPCAASSDSQPPPLPAFMDAQFESFRAQLDGSSALRDRIRAVVSEVESASRAASAALLLIHQPVPLSDVLGKAKAQVEVIKGLYSQLAEILKECPGQYYRYHGDWKSETQSVVSMLAFTHWLETGGLLTHAEAQEKLGLGSGEFGLDVEDYLTGLCFMSNDFPRYVVNRVTAGDYDCPRKVLSFLTDLHASFRMLNLRNDFLRKKFDGMKYDLRRVEEVFYDVKIRGLVPGESKQEVAQS

SEQ ID NO: 65187 - protein, 223 aa, Triticum aestivum
  peptide (1)..(223): Ceres Seq. ID no. 12617449
  misc_feature (16)..(211): Pfam Name: Translin family Pfam Description: Translin family
  misc_feature (5)..(210): Homolog of NCBI NO: 4759270 NR Description: translin
  misc_feature (5)..(210): Homolog of NCBI NO: 21730459 NR Description: Chain A, Crystal Structure Of Mouse TestisBRAIN
  misc_feature (5)..(210): Homolog of NCBI NO: 6755899 NR Description: translin; testis/brain-RNA-binding protein [Mus
  misc_feature (1)..(211): Homolog of NCBI NO: 6136058 NR Description: Translin
  misc_feature (5)..(219): Homolog of NCBI NO: 7648677 NR Description: translin [Xenopus laevis]
  misc_feature (129)..(214): Homolog of NCBI NO: 25408524 NR Description: translin-like protein [imported] - Arabidopsis
  misc_feature (5)..(219): Homolog of NCBI NO: 20129859 NR Description: CG11761-PA [Drosophila melanogaster]
  misc_feature (1)..(151): Homolog of NCBI NO: 25408524 NR Description: translin-like protein [imported] - Arabidopsis
  misc_feature (1)..(214): Homolog of NCBI NO: 18404301 NR Description: translin-like protein
  misc_feature (1)..(221): Homolog of NCBI NO: 37534782 NR Description: translin-like protein [Oryza sativa (japonica
MDAQFESFRAQLDGSSALRDRIRAVVSEVESASRAASAALLLIHQPVPLSDVLGKAKAQVEVIKGLYSQLAEILKECPGQYYRYHGDWKSETQSVVSMLAFTHWLETGGLLTHAEAQEKLGLGSGEFGLDVEDYLTGLCFMSNDFPRYVVNRVTAGDYDCPRKVLSFLTDLHASFRMLNLRNDFLRKKFDGMKYDLRRVEEVFYDVKIRGLVPGESKQEVAQS

SEQ ID NO: 65188 - DNA, 1583 bp, Triticum aestivum
  misc_feature (1)..(1583): Ceres Seq. ID no. 13655915
gtgtgcttgccagcagtttgttgctcttcctcctccgccgccgctggaatggcactgccaaacatggccggcgacgccctcagggtagtcgacctcccgggccgcggccgcgcgctcctcgccgcccgcgacatcctcgagggcgaggtgctcctgtcggagtcgcccatcctcctctacccgtcctcgctcgcctccctctcctcctactgctccgcctgcttccgctcgctcccaccgccgccccacaccccctgcccttcctgccgcgccgccgccttctgctcccctgcctgcgccgccgcctcccacccgcgcctcctctgcgccgcgctctccagcggcctcgccgccgcccccgaggcgcaacaggagcccctcctcttcctcctctcggcctactcgctccaggagccctctctcagcgccatcctctctctctcctcggcaccctctccgacccagcagcaagacgccgcgggcctccacgccgcggtggcgtcggtggcgccgccgcacacgctgcccgcgggcttctcgctggacctcacggtggctctcctctccaaggaccggaccaacagcttctcgatcctggagccataccgccccgacgtgccgctggaggtccgcaaggcgcggtgctgcgcggtgtaccctcgcgcgtcactgctcaaccacgactgcctgcccaatgcttgccacttcgattatgccgacaggccggggccagggaacacggacatcgtcgtgcgctctctccatggtataacagaggggaaggaggtttgcatcagctatttcgcggccaattggaggtatgctgacaggcaacgcaggctgctggaggattatgggttccggtgtgagtgtgatcggtgtcagattgagagcaagtggaagtttgatgatgataatgatggtgctgatggggatgacaccatggaagaggagcatggcaaggaggtcgctgaagatggcggtgatgaggggatggagcaggaggaagggagtgacgacgatgacgacgatttcccgcatgccttcttctttgtgaggtatctgtgtgatcgtgaggactgctatggcatgcttgcgccgctgccacccttaccgaacggtgagctgtcccatgtatttgagtgcaatgcctgtgggcaactgaagaaggaggaagacgaggatgagcctgatgctggtgattgcagcatggaccagtaggatgtttgctgctgttttttgggagcacttggtggatggtgatgaaatggatgcaccggtcggcttccgtactttggggctgtttgccttgaagaactggtctaatgcacctgaagtcaggaagacgtatgttgtactgcatgatttcgttcactgaatgtgatttgtaggcaaccttgcctggacctgtacaattattattacgcctatatctatcttggccatgtgaacctggtgtggcgttaggaactgacagtgcaaagtccactcgtcagcgtatggattattgcccctctgtttatcttgcctttgacctgcatcattgcccgttcgttcaggttataaaaatcatctttctttgt

SEQ ID NO: 65189 - protein, 406 aa, Triticum aestivum
  peptide (1)..(406): Ceres Seq. ID no. 13655916
  misc_feature (27)..(275): Pfam Name: SET domain Pfam Description: SET domain
  misc_feature (27)..(99): Homolog of NCBI NO: 7486993 NR Description: probable SET-domain transcription regulator
  misc_feature (218)..(294): Homolog of NCBI NO: 7486993 NR Description: probable SET-domain transcription regulator
  misc_feature (303)..(344): Homolog of NCBI NO: 4154097 NR Description: unknown [Human herpesvirus 8]
  misc_feature (303)..(344): Homolog of NCBI NO: 4154097 NR Description: unknown [Human herpesvirus 8]
  misc_feature (22)..(299): Homolog of NCBI NO: 22450579 NR Description: unknown protein,3'-partial
  misc_feature (22)..(139): Homolog of NCBI NO: 40253402 NR Description: SET-domain transcriptional regulator-like protein
  misc_feature (27)..(329): Homolog of NCBI NO: 18399103 NR Description: SET-domain transcriptional regulator family
  misc_feature (27)..(392): Homolog of NCBI NO: 30680748 NR Description: SET-domain transcriptional regulator family
  misc_feature (98)..(404): Homolog of NCBI NO: 40253402 NR Description: SET-domain transcriptional regulator-like protein
  misc_feature (22)..(404): Homolog of NCBI NO: 40253403 NR Description: SET-domain transcriptional regulator-like protein
VCLPAVCCSSSSAAAGMALPNMAGDALRVVDLPGRGRALLAARDILEGEVLLSESPILLYPSSLASLSSYCSACFRSLPPPPHTPCPSCRAAAFCSPACAAASHPRLLCAALSSGLAAAPEAQQEPLLFLLSAYSLQEPSLSAILSLSSAPSPTQQQDAAGLHAAVASVAPPHTLPAGFSLDLTVALLSKDRTNSFSILEPYRPDVPLEVRKARCCAVYPRASLLNHDCLPNACHFDYADRPGPGNTDIVVRSLHGITEGKEVCISYFAANWRYADRQRRLLEDYGFRCECDRCQIESKWKFDDDNDGADGDDTMEEEHGKEVAEDGGDEGMEQEEGSDDDDDDFPHAFFFVRYLCDREDCYGMLAPLPPLPNGELSHVFECNACGQLKKEEDEDEPDAGDCSMDQ

SEQ ID NO: 65190 - protein, 390 aa, Triticum aestivum
  peptide (1)..(390): Ceres Seq. ID no. 13655917
  misc_feature (11)..(259): Pfam Name: SET domain Pfam Description: SET domain
  misc_feature (11)..(83): Homolog of NCBI NO: 7486993 NR Description: probable SET-domain transcription regulator
  misc_feature (202)..(278): Homolog of NCBI NO: 7486993 NR Description: probable SET-domain transcription regulator
  misc_feature (287)..(328): Homolog of NCBI NO: 4154097 NR Description: unknown [Human herpesvirus 8]
  misc_feature (287)..(328): Homolog of NCBI NO: 4154097 NR Description: unknown [Human herpesvirus 8]
  misc_feature (6)..(283): Homolog of NCBI NO: 22450579 NR Description: unknown protein,3'-partial
  misc_feature (6)..(123): Homolog of NCBI NO: 40253402 NR Description: SET-domain transcriptional regulator-like protein
  misc_feature (11)..(313): Homolog of NCBI NO: 18399103 NR Description: SET-domain transcriptional regulator family
  misc_feature (11)..(376): Homolog of NCBI NO: 30680748 NR Description: SET-domain transcriptional regulator family
  misc_feature (82)..(388): Homolog of NCBI NO: 40253402 NR Description: SET-domain transcriptional regulator-like protein
  misc_feature (6)..(388): Homolog of NCBI NO: 40253403 NR Description: SET-domain transcriptional regulator-like protein
MALPNMAGDALRVVDLPGRGRALLAARDILEGEVLLSESPILLYPSSLASLSSYCSACFRSLPPPPHTPCPSCRAAAFCSPACAAASHPRLLCAALSSGLAAAPEAQQEPLLFLLSAYSLQEPSLSAILSLSSAPSPTQQQDAAGLHAAVASVAPPHTLPAGFSLDLTVALLSKDRTNSFSILEPYRPDVPLEVRKARCCAVYPRASLLNHDCLPNACHFDYADRPGPGNTDIVVRSLHGITEGKEVCISYFAANWRYADRQRRLLEDYGFRCECDRCQIESKWKFDDDNDGADGDDTMEEEHGKEVAEDGGDEGMEQEEGSDDDDDDFPHAFFFVRYLCDREDCYGMLAPLPPLPNGELSHVFECNACGQLKKEEDEDEPDAGDCSMDQ

SEQ ID NO: 65191 - protein, 385 aa, Triticum aestivum
  peptide (1)..(385): Ceres Seq. ID no. 13655918
  misc_feature (6)..(254): Pfam Name: SET domain Pfam Description: SET domain
  misc_feature (6)..(78): Homolog of NCBI NO: 7486993 NR Description: probable SET-domain transcription regulator
  misc_feature (197)..(273): Homolog of NCBI NO: 7486993 NR Description: probable SET-domain transcription regulator
  misc_feature (282)..(323): Homolog of NCBI NO: 4154097 NR Description: unknown [Human herpesvirus 8]
  misc_feature (282)..(323): Homolog of NCBI NO: 4154097 NR Description: unknown [Human herpesvirus 8]
  misc_feature (1)..(278): Homolog of NCBI NO: 22450579 NR Description: unknown protein,3'-partial
  misc_feature (1)..(118): Homolog of NCBI NO: 40253402 NR Description: SET-domain transcriptional regulator-like protein
  misc_feature (6)..(308): Homolog of NCBI NO: 18399103 NR Description: SET-domain transcriptional regulator family
  misc_feature (6)..(371): Homolog of NCBI NO: 30680748 NR Description: SET-domain transcriptional regulator family
  misc_feature (77)..(383): Homolog of NCBI NO: 40253402 NR Description: SET-domain transcriptional regulator-like protein
  misc_feature (1)..(383): Homolog of NCBI NO: 40253403 NR Description: SET-domain transcriptional regulator-like protein
MAGDALRVVDLPGRGRALLAARDILEGEVLLSESPILLYPSSLASLSSYCSACFRSLPPPPHTPCPSCRAAAFCSPACAAASHPRLLCAALSSGLAAAPEAQQEPLLFLLSAYSLQEPSLSAILSLSSAPSPTQQQDAAGLHAAVASVAPPHTLPAGFSLDLTVALLSKDRTNSFSILEPYRPDVPLEVRKARCCAVYPRASLLNHDCLPNACHFDYADRPGPGNTDIVVRSLHGITEGKEVCISYFAANWRYADRQRRLLEDYGFRCECDRCQIESKWKFDDDNDGADGDDTMEEEHGKEVAEDGGDEGMEQEEGSDDDDDDFPHAFFFVRYLCDREDCYGMLAPLPPLPNGELSHVFECNACGQLKKEEDEDEPDAGDCSMDQ

SEQ ID NO: 65192 - DNA, 1277 bp, Triticum aestivum
  misc_feature (1)..(1277): Ceres Seq. ID no. 13585433
aacatcctaatcgaaaagaaagaaaaaaaaaactcctactagggaatctgctccgggcgcacgccggccggatcgccggcctcccgccgtcggcgcaccccaggaagagagatcggctcggctcatctgaggatttgcggagggcggccatggagggggcggaagctcctctccccgtccccacggagaagctctccatggatccaaatcgggatggggggaatcgaggtggtgtggtgctggtggccaccggcagcttcaatccccccacctacatgcacctgcgcatgttcgagcttgcaaaggacgagctgcagcagcgagggtactgtgttttgggtggatacatgtcgccggtgaacgacgcctacaagaagaaggacctcttgccggctgctcaccgggttcgcctctgcgaattggcgtgccgaagctcatctttcgtgatggttgatccctgggaggcaatgcagaaaggttatcagcgcaccttgaccgttctatctcgagttaagaactctctatgcaaggatggcttagctgatcaaggtggtgtcaaggtaatgcttttgtgtggttctgaccttctcgagtcattcagcacgccaggggtttggattccagatcaggtcagggccatatgtaaagactttggtgttgtctgtattcgtagggaaggaaaagatgttcaaaagctaatatccagcagcgagacactgcaagaatgcagggataacatcatttcggttgatgagattgtgccaaatcagatcagttcatccagagtaagagaatgtataagaaaacatctctcgataaagtatcttacttgcgacgaagtaatcgggtacattagagagcacagactgtacatggaaactggagagagtgataccagatcatgacaatgttgcaagcctttcggaacgaccgtcgagcatggactgtgccgccttgggcttcaatgttatgataaaatctgaactatcagcgacaagctgcgattatcatgaatgggtccgactgcctttgaagcatcatgaatggatgcaaatgtatggagaccagtaggctatacacaatacttgctactagaaggttcttgaatcttccttacattgttgtcaatgtatcggtctttcgaccaacagaatatatcgctaataaagcatttatatgacatgaaactctttgtcacagtaatattctgccatttgtttcatcctctatatgtaccaagatattattcagtaagtaatttgatgtgctacaaattc

SEQ ID NO: 65193 - protein, 300 aa, Triticum aestivum
  peptide (1)..(300): Ceres Seq. ID no. 13585434
  misc_feature (186)..(300): Homolog of NCBI NO: 10438792 NR Description: unnamed protein product [Homo sapiens]
  misc_feature (78)..(174): Homolog of NCBI NO: 21730493 NR Description: Chain A, Crystal Structure Of Nuclear Human
  misc_feature (186)..(300): Homolog of NCBI NO: 21730493 NR Description: Chain A, Crystal Structure Of Nuclear Human
  misc_feature (78)..(174): Homolog of NCBI NO: 18652051 NR Description: nicotinamide mononucleotide adenylyl transferase
  misc_feature (186)..(300): Homolog of NCBI NO: 18652051 NR Description: nicotinamide mononucleotide adenylyl transferase
  misc_feature (78)..(174): Homolog of NCBI NO: 20070321 NR Description: nicotinamide nucleotide adenylyltransferase 1
  misc_feature (186)..(300): Homolog of NCBI NO: 20070321 NR Description: nicotinamide nucleotide adenylyltransferase 1
  misc_feature (45)..(295): Homolog of NCBI NO: 6321447 NR Description: NAD(+) salvage pathway; Nma2p [Saccharomyces
  misc_feature (45)..(295): Homolog of NCBI NO: 6323360 NR Description: NAD(+) salvage pathway; Nma1p [Saccharomyces
  misc_feature (137)..(292): Homolog of NCBI NO: 22327861 NR Description: nicotinamide-nucleotide adenylyltransferase
HPNRKERKKKLLLGNLLRAHAGRIAGLPPSAHPRKRDRLGSSEDLRRAAMEGAEAPLPVPTEKLSMDPNRDGGNRGGVVLVATGSFNPPTYMHLRMFELAKDELQQRGYCVLGGYMSPVNDAYKKKDLLPAAHRVRLCELACRSSSFVMVDPWEAMQKGYQRTLTVLSRVKNSLCKDGLADQGGVKVMLLCGSDLLESFSTPGVWIPDQVRAICKDFGVVCIRREGKDVQKLISSSETLQECRDNIISVDEIVPNQISSSRVRECIRKHLSIKYLTCDEVIGYIREHRLYMETGESDTRS

SEQ ID NO: 65194 - protein, 251 aa, Triticum aestivum
  peptide (1)..(251): Ceres Seq. ID no. 13585435
  misc_feature (137)..(251): Homolog of NCBI NO: 10438792 NR Description: unnamed protein product [Homo sapiens]
  misc_feature (29)..(125): Homolog of NCBI NO: 21730493 NR Description: Chain A, Crystal Structure Of Nuclear Human
  misc_feature (137)..(251): Homolog of NCBI NO: 21730493 NR Description: Chain A, Crystal Structure Of Nuclear Human
  misc_feature (29)..(125): Homolog of NCBI NO: 18652051 NR Description: nicotinamide mononucleotide adenylyl transferase
  misc_feature (137)..(251): Homolog of NCBI NO: 18652051 NR Description: nicotinamide mononucleotide adenylyl transferase
  misc_feature (29)..(125): Homolog of NCBI NO: 20070321 NR Description: nicotinamide nucleotide adenylyltransferase 1
  misc_feature (137)..(251): Homolog of NCBI NO: 20070321 NR Description: nicotinamide nucleotide adenylyltransferase 1
  misc_feature (1)..(246): Homolog of NCBI NO: 6321447 NR Description: NAD(+) salvage pathway; Nma2p [Saccharomyces
  misc_feature (1)..(246): Homolog of NCBI NO: 6323360 NR Description: NAD(+) salvage pathway; Nma1p [Saccharomyces
  misc_feature (88)..(243): Homolog of NCBI NO: 22327861 NR Description: nicotinamide-nucleotide adenylyltransferase
MEGAEAPLPVPTEKLSMDPNRDGGNRGGVVLVATGSFNPPTYMHLRMFELAKDELQQRGYCVLGGYMSPVNDAYKKKDLLPAAHRVRLCELACRSSSFVMVDPWEAMQKGYQRTLTVLSRVKNSLCKDGLADQGGVKVMLLCGSDLLESFSTPGVWIPDQVRAICKDFGVVCIRREGKDVQKLISSSETLQECRDNIISVDEIVPNQISSSRVRECIRKHLSIKYLTCDEVIGYIREHRLYMETGESDTRS

SEQ ID NO: 65195 - protein, 235 aa, Triticum aestivum
  peptide (1)..(235): Ceres Seq. ID no. 13585436
  misc_feature (121)..(235): Homolog of NCBI NO: 10438792 NR Description: unnamed protein product [Homo sapiens]
  misc_feature (13)..(109): Homolog of NCBI NO: 21730493 NR Description: Chain A, Crystal Structure Of Nuclear Human
  misc_feature (121)..(235): Homolog of NCBI NO: 21730493 NR Description: Chain A, Crystal Structure Of Nuclear Human
  misc_feature (13)..(109): Homolog of NCBI NO: 18652051 NR Description: nicotinamide mononucleotide adenylyl transferase
  misc_feature (121)..(235): Homolog of NCBI NO: 18652051 NR Description: nicotinamide mononucleotide adenylyl transferase
  misc_feature (13)..(109): Homolog of NCBI NO: 20070321 NR Description: nicotinamide nucleotide adenylyltransferase 1
  misc_feature (121)..(235): Homolog of NCBI NO: 20070321 NR Description: nicotinamide nucleotide adenylyltransferase 1
  misc_feature (1)..(230): Homolog of NCBI NO: 6321447 NR Description: NAD(+) salvage pathway; Nma2p [Saccharomyces
  misc_feature (1)..(230): Homolog of NCBI NO: 6323360 NR Description: NAD(+) salvage pathway; Nma1p [Saccharomyces
  misc_feature (72)..(227): Homolog of NCBI NO: 22327861 NR Description: nicotinamide-nucleotide adenylyltransferase
MDPNRDGGNRGGVVLVATGSFNPPTYMHLRMFELAKDELQQRGYCVLGGYMSPVNDAYKKKDLLPAAHRVRLCELACRSSSFVMVDPWEAMQKGYQRTLTVLSRVKNSLCKDGLADQGGVKVMLLCGSDLLESFSTPGVWIPDQVRAICKDFGVVCIRREGKDVQKLISSSETLQECRDNIISVDEIVPNQISSSRVRECIRKHLSIKYLTCDEVIGYIREHRLYMETGESDTRS

SEQ ID NO: 65196 - DNA, 1706 bp, Triticum aestivum
  misc_feature (1)..(1706): Ceres Seq. ID no. 12521308
cccgagaagcagccacccaccccgacctccaccttgacggcgcccgccgccggcgtcgccgttcccaaatcgacgcgaccgaggaggccgtcgaaatggccggccgccgccgcagccgatcccgaatccacaccagcgacgacgacgacggggcgacccgtcccagccgccgccgccgccgcgcggaggtggctgtccctctgccggacggcggcgataccctgtcggagtcgctgcaggacgacagcagacctcctcctgcgccatcggagtcgctgccgttgccgttggacatgctttggaagatcctcctccttctgccaccgcagccgtcctcccgcctccgcgcatccgccgtctcccggcgctggcgaggcgtcgccaccgaccccaactttaaaagccagttccgtgtccaccgcaggaactgcaagccgccacccattctcggattatttgtgcgccgatggaagatggagttcaggcagggcttcctccacccttccgaccgtgtccctgccgagcgcttctccatcccgtcccgctacgacatccgtgggtgccgacatggtcgtgtgctcgctgtacaccgtgagtatgcaaagcttcttgtgtttgccccactctctggcgaggtgtgcaccctgtccgttcccgatgagttcaggccaccgtcttgcttccacctcaatggggcggtgctctgtgatgccaacgaccacgggccatgttcatggcatgtgccaccagagccccttcaaggtggtattgctttcaaggtattctatggaagatcgattcattacctctgtttactcgtcaaggtccaaaaaatggagtgtcgtcgtttcaaaagaggctccatgctccgttgattctgacgttccggcgatcctggttaataatcgactctactggctgctttcgtctaaagcccgtggtctccttgagtttgatttggataggcagagcctaactgtgatcgagtggcctactagtatgattgattccggaagccatgggatgatcaaaacagaggaaggcgcagttggcttggtcaggttttcattcccgagcctagaaatatggcagaggaagatcaatcagggtgttgccacgtggttggatccaaggatagttgatatgcataacgttcttgggatcccccctcagattggtaggagaagatggccatgcagtttgagaggctatgaggaggaaaaccatgtgatcattctgtatgttgatgatagtgcctacatggttgatcttaagtcaatgcaatccacaaaacttgatggaagccgttcgatgaatcgctgtcaccctttcaccagtttctatccaccagacatggccatataagaagcgccgatataggaacatggacacgaggatacgggcacagatacaaaagcattttccagaaacagccatacggcgacacggcgagtatatacataaataaataaagtacaacatgtattgttgtgaggacaagagtatatttgtaagatgtaaggtcaaagtactgcccatttgttttccgctttcagttccacgtttgtatatggctgagcttaatgcagctgattctgcaagtatatgtgagtgaaaaattcaggaaagggaaaatataatacagcatgtaatatggacataattatatttgtaagatgtgggatcaagtcttgattctgtcatgg

SEQ ID NO: 65197 - protein, 454 aa, Triticum aestivum
  peptide (1)..(454): Ceres Seq. ID no. 12521309
  misc_feature (237)..(282): Homolog of NCBI NO: 37531854 NR Description: hypothetical protein [Oryza sativa (japonica
  misc_feature (217)..(447): Homolog of NCBI NO: 37531214 NR Description: unknown protein [Oryza sativa (japonica
  misc_feature (263)..(453): Homolog of NCBI NO: 37530898 NR Description: hypothetical protein [Oryza sativa (japonica
  misc_feature (248)..(451): Homolog of NCBI NO: 37531024 NR Description: hypothetical protein [Oryza sativa (japonica
  misc_feature (217)..(448): Homolog of NCBI NO: 37530900 NR Description: hypothetical protein [Oryza sativa (japonica
  misc_feature (271)..(447): Homolog of NCBI NO: 37530924 NR Description: unknown protein [Oryza sativa (japonica
  misc_feature (242)..(448): Homolog of NCBI NO: 37530912 NR Description: hypothetical protein [Oryza sativa (japonica
  misc_feature (252)..(448): Homolog of NCBI NO: 37530914 NR Description: unknown protein [Oryza sativa (japonica
PEKQPPTPTSTLTAPAAGVAVPKSTRPRRPSKWPAAAAADPESTPATTTTGRPVPAAAAAARRWLSLCRTAAIPCRSRCRTTADLLLRHRSRCRCRWTCFGRSSSFCHRSRPPASAHPPSPGAGEASPPTPTLKASSVSTAGTASRHPFSDYLCADGRWSSGRASSTLPTVSLPSASPSRPATTSVGADMVVCSLYTVSMQSFLCLPHSLARCAPCPFPMSSGHRLASTSMGRCSVMPTTTGHVHGMCHQSPFKVVLLSRYSMEDRFITSVYSSRSKKWSVVVSKEAPCSVDSDVPAILVNNRLYWLLSSKARGLLEFDLDRQSLTVIEWPTSMIDSGSHGMIKTEEGAVGLVRFSFPSLEIWQRKINQGVATWLDPRIVDMHNVLGIPPQIGRRRWPCSLRGYEEENHVIILYVDDSAYMVDLKSMQSTKLDGSRSMNRCHPFTSFYPPDMAI

SEQ ID NO: 65198 - protein, 290 aa, Triticum aestivum
  peptide (1)..(290): Ceres Seq. ID no. 12521310
  misc_feature (94)..(244): Homolog of NCBI NO: 37530976 NR Description: unknown protein [Oryza sativa (japonica
  misc_feature (74)..(247): Homolog of NCBI NO: 37530944 NR Description: hypothetical protein [Oryza sativa (japonica
  misc_feature (85)..(237): Homolog of NCBI NO: 37530982 NR Description: unknown protein [Oryza sativa (japonica
  misc_feature (86)..(283): Homolog of NCBI NO: 37530900 NR Description: hypothetical protein [Oryza sativa (japonica
  misc_feature (86)..(249): Homolog of NCBI NO: 37531854 NR Description: hypothetical protein [Oryza sativa (japonica
  misc_feature (84)..(218): Homolog of NCBI NO: 37531214 NR Description: unknown protein [Oryza sativa (japonica
  misc_feature (94)..(220): Homolog of NCBI NO: 37531024 NR Description: hypothetical protein [Oryza sativa (japonica
  misc_feature (83)..(220): Homolog of NCBI NO: 37530924 NR Description: unknown protein [Oryza sativa (japonica
  misc_feature (165)..(239): Homolog of NCBI NO: 37530912 NR Description: hypothetical protein [Oryza sativa (japonica
  misc_feature (87)..(242): Homolog of NCBI NO: 37530914 NR Description: unknown protein [Oryza sativa (japonica
REAATHPDLHLDGARRRRRRSQIDATEEAVEMAGRRRSRSRIHTSDDDDGATRPSRRRRRAEVAVPLPDGGDTLSESLQDDSRPPPAPSESLPLPLDMLWKILLLLPPQPSSRLRASAVSRRWRGVATDPNFKSQFRVHRRNCKPPPILGLFVRRWKMEFRQGFLHPSDRVPAERFSIPSRYDIRGCRHGRVLAVHREYAKLLVFAPLSGEVCTLSVPDEFRPPSCFHLNGAVLCDANDHGPCSWHVPPEPLQGGIAFKVFYGRSIHYLCLLVKVQKMECRRFKRGSMLR

SEQ ID NO: 65199 - protein, 265 aa, Triticum aestivum
  peptide (1)..(265): Ceres Seq. ID no. 12521311
  misc_feature (48)..(93): Homolog of NCBI NO: 37531854 NR Description: hypothetical protein [Oryza sativa (japonica
  misc_feature (28)..(258): Homolog of NCBI NO: 37531214 NR Description: unknown protein [Oryza sativa (japonica
  misc_feature (74)..(264): Homolog of NCBI NO: 37530898 NR Description: hypothetical protein [Oryza sativa (japonica
  misc_feature (59)..(262): Homolog of NCBI NO: 37531024 NR Description: hypothetical protein [Oryza sativa (japonica
  misc_feature (28)..(259): Homolog of NCBI NO: 37530900 NR Description: hypothetical protein [Oryza sativa (japonica
  misc_feature (82)..(258): Homolog of NCBI NO: 37530924 NR Description: unknown protein [Oryza sativa (japonica
  misc_feature (53)..(259): Homolog of NCBI NO: 37530912 NR Description: hypothetical protein [Oryza sativa (japonica
  misc_feature (63)..(259): Homolog of NCBI NO: 37530914 NR Description: unknown protein [Oryza sativa (japonica
MVVCSLYTVSMQSFLCLPHSLARCAPCPFPMSSGHRLASTSMGRCSVMPTTTGHVHGMCHQSPFKVVLLSRYSMEDRFITSVYSSRSKKWSVVVSKEAPCSVDSDVPAILVNNRLYWLLSSKARGLLEFDLDRQSLTVIEWPTSMIDSGSHGMIKTEEGAVGLVRFSFPSLEIWQRKINQGVATWLDPRIVDMHNVLGIPPQIGRRRWPCSLRGYEEENHVIILYVDDSAYMVDLKSMQSTKLDGSRSMNRCHPFTSFYPPDMAI

SEQ ID NO: 65200 - DNA, 1528 bp, Triticum aestivum
  misc_feature (1)..(1528): Ceres Seq. ID no. 13598547
ctcgcgccgctggcccggcaatttccccactattccctccacaaccgaaaggtcccccccctcccctcaaaaaaaaaaaaaamcccaccccagcgccatggccgccgcctcctccgccgccgccgcctcctccgccgccgccgcccccgccgacacgtacgacatcccgtgggtggagaagtaccgccccagccgcgtcgccgatgtcgtcggcaacgccgacgccgtcagccgcctcgaggtcatcgcccgcgacggcaacatgcccaacctcatcctctccgggcctccggggaccgggaagacgacgagcatcctggcgctcgcccacgagatgctcgggcccagctaccgcgagggagtgctcgagctcaacgcctcggacgacagggggcttgatgtggtgcggaacaagatcaagatgttcgcgcagaagaaggtcacactgccacccggacggcacaagatcgtcatactggacgaagctgacagcatgacaacaggagcacagcaagcactgagaagaaccatggagatttattccaacaccacaagatttgctcttgcatgcaatacttcatctaaaatcattgaacccatccaaagtcgctgcgctattgtccggttctcgaggctttcagatcaggagatccttggccgccttatggtcgtggtggcagctgagaaggtcccttatgtgccagaaggtcttgaagccatcatttttactgctgatggtgacatgaggcaagctttgaacaatttgcaagctacagtcagcgggttccgttttgttaatcaagaaaatgtgttcaaggtatgcgatcaaccacatcccttgcatgtcaagagtatggtgaaaaatgtactcgatgggaagtttgatgaggcctgctctggcctaaagcaactctatgatttgggctactctcctactgacatcatcactaccctcttccgtgtcatcaagaactatgacatggctgaatatctgaagctggaactgctgaaggaaacgggatttgcgcacatgaggatctgtgatggcgttgggtcattccttcagctttctggccttctggccaaatttgctctggtgagagaaacagcaaaggcctaacgctgtgcagctgctctgacaccagttaacagtgttgtcatgcatagcctattttatcgctcctctgtcgtggtatctcagtgtgtaagatagttctttgctgaagtgaactatttatgcttgtttagcatcggagatgtagttgtagcctgtagtgactagtgaggagactgagtcctcgtagttcgagtactgctgtatttcggaactaatctgggtatttttcgggtcttttgtagtctattgagctgtcgtaccaccatcatgaaggaaccgtcagttatccaagtcaactgcatatcaattatggattggcagaaaatggattcatcatttccttgcatttttattttaggtctgaawttttacagtccaactgtctgaatttatgaacasagwtwamgcggg

SEQ ID NO: 65201 - protein, 372 aa, Triticum aestivum
  peptide (1)..(372): Ceres Seq. ID no. 15222366
  misc_feature (90)..(261): Pfam Name: ATPase family associated with various cellular Pfam Description: ATPase family associated with various cellular
  misc_feature (163)..(362): Homolog of NCBI NO: 30584413 NR Description: Homo sapiens replication factor C (activator 1)
  misc_feature (22)..(362): Homolog of NCBI NO: 28950096 NR Description: probable REPLICATION FACTOR C (40 KDA SUBUNIT)
  misc_feature (34)..(362): Homolog of NCBI NO: 539678 NR Description: replication factor C - human
  misc_feature (37)..(362): Homolog of NCBI NO: 12847419 NR Description: unnamed protein product [Mus musculus]
  misc_feature (35)..(362): Homolog of NCBI NO: 34871892 NR Description: replication factor C 2 (40kD) [Rattus norvegicus]
  misc_feature (37)..(362): Homolog of NCBI NO: 11177922 NR Description: replication factor C (activator 1) 2
  misc_feature (34)..(370): Homolog of NCBI NO: 1703053 NR Description: Activator 1 40 kDa subunit (Replication factor C
  misc_feature (42)..(372): Homolog of NCBI NO: 15221697 NR Description: replication factor -related [Arabidopsis
  misc_feature (41)..(372): Homolog of NCBI NO: 38344372 NR Description: OSJNBb0032E06.6 [Oryza sativa (japonica
  misc_feature (40)..(372): Homolog of NCBI NO: 15991286 NR Description: replication factor C 40kDa subunit
  misc_feature (28)..(28): Xaa is any aa, unknown or other
SRRWPGNFPTIPSTTERSPPSPQKKKKXHPSAMAAASSAAAASSAAAAPADTYDIPWVEKYRPSRVADVVGNADAVSRLEVIARDGNMPNLILSGPPGTGKTTSILALAHEMLGPSYREGVLELNASDDRGLDVVRNKIKMFAQKKVTLPPGRHKIVILDEADSMTTGAQQALRRTMEIYSNTTRFALACNTSSKIIEPIQSRCAIVRFSRLSDQEILGRLMVVVAAEKVPYVPEGLEAIIFTADGDMRQALNNLQATVSGFRFVNQENVFKVCDQPHPLHVKSMVKNVLDGKFDEACSGLKQLYDLGYSPTDIITTLFRVIKNYDMAEYLKLELLKETGFAHMRICDGVGSFLQLSGLLAKFALVRETAKA

SEQ ID NO: 65202 - protein, 340 aa, Triticum aestivum
  peptide (1)..(340): Ceres Seq. ID no. 15222367
  misc_feature (58)..(229): Pfam Name: ATPase family associated with various cellular Pfam Description: ATPase family associated with various cellular
  misc_feature (131)..(330): Homolog of NCBI NO: 30584413 NR Description: Homo sapiens replication factor C (activator 1)
  misc_feature (1)..(330): Homolog of NCBI NO: 28950096 NR Description: probable REPLICATION FACTOR C (40 KDA SUBUNIT)
  misc_feature (2)..(330): Homolog of NCBI NO: 539678 NR Description: replication factor C - human
  misc_feature (5)..(330): Homolog of NCBI NO: 12847419 NR Description: unnamed protein product [Mus musculus]
  misc_feature (3)..(330): Homolog of NCBI NO: 34871892 NR Description: replication factor C 2 (40kD) [Rattus norvegicus]
  misc_feature (5)..(330): Homolog of NCBI NO: 11177922 NR Description: replication factor C (activator 1) 2
  misc_feature (2)..(338): Homolog of NCBI NO: 1703053 NR Description: Activator 1 40 kDa subunit (Replication factor C
  misc_feature (10)..(340): Homolog of NCBI NO: 15221697 NR Description: replication factor -related [Arabidopsis
  misc_feature (9)..(340): Homolog of NCBI NO: 38344372 NR Description: OSJNBb0032E06.6 [Oryza sativa (japonica
  misc_feature (8)..(340): Homolog of NCBI NO: 15991286 NR Description: replication factor C 40kDa subunit
MAAASSAAAASSAAAAPADTYDIPWVEKYRPSRVADVVGNADAVSRLEVIARDGNMPNLILSGPPGTGKTTSILALAHEMLGPSYREGVLELNASDDRGLDVVRNKIKMFAQKKVTLPPGRHKIVILDEADSMTTGAQQALRRTMEIYSNTTRFALACNTSSKIIEPIQSRCAIVRFSRLSDQEILGRLMVVVAAEKVPYVPEGLEAIIFTADGDMRQALNNLQATVSGFRFVNQENVFKVCDQPHPLHVKSMVKNVLDGKFDEACSGLKQLYDLGYSPTDIITTLFRVIKNYDMAEYLKLELLKETGFAHMRICDGVGSFLQLSGLLAKFALVRETAKA

SEQ ID NO: 65203 - protein, 285 aa, Triticum aestivum
  peptide (1)..(285): Ceres Seq. ID no. 15222368
  misc_feature (3)..(174): Pfam Name: ATPase family associated with various cellular Pfam Description: ATPase family associated with various cellular
  misc_feature (76)..(275): Homolog of NCBI NO: 30584413 NR Description: Homo sapiens replication factor C (activator 1)
  misc_feature (1)..(275): Homolog of NCBI NO: 28950096 NR Description: probable REPLICATION FACTOR C (40 KDA SUBUNIT)
  misc_feature (1)..(275): Homolog of NCBI NO: 539678 NR Description: replication factor C - human
  misc_feature (1)..(275): Homolog of NCBI NO: 12847419 NR Description: unnamed protein product [Mus musculus]
  misc_feature (1)..(275): Homolog of NCBI NO: 34871892 NR Description: replication factor C 2 (40kD) [Rattus norvegicus]
  misc_feature (1)..(275): Homolog of NCBI NO: 11177922 NR Description: replication factor C (activator 1) 2
  misc_feature (1)..(283): Homolog of NCBI NO: 1703053 NR Description: Activator 1 40 kDa subunit (Replication factor C
  misc_feature (1)..(285): Homolog of NCBI NO: 15221697 NR Description: replication factor -related [Arabidopsis
  misc_feature (1)..(285): Homolog of NCBI NO: 38344372 NR Description: OSJNBb0032E06.6 [Oryza sativa (japonica
  misc_feature (1)..(285): Homolog of NCBI NO: 15991286 NR Description: replication factor C 40kDa subunit
MPNLILSGPPGTGKTTSILALAHEMLGPSYREGVLELNASDDRGLDVVRNKIKMFAQKKVTLPPGRHKIVILDEADSMTTGAQQALRRTMEIYSNTTRFALACNTSSKIIEPIQSRCAIVRFSRLSDQEILGRLMVVVAAEKVPYVPEGLEAIIFTADGDMRQALNNLQATVSGFRFVNQENVFKVCDQPHPLHVKSMVKNVLDGKFDEACSGLKQLYDLGYSPTDIITTLFRVIKNYDMAEYLKLELLKETGFAHMRICDGVGSFLQLSGLLAKFALVRETAKA

SEQ ID NO: 65204 - DNA, 1483 bp, Triticum aestivum
  misc_feature (1)..(1483): Ceres Seq. ID no. 13598532
atttcaaaacttccagatccacctagggtttgcgcctcttccctccgcccccatcacacaagccgcatcgagggggacgacgccgacctcggaccgtcggaagcaccatggagaagtacgagaagttggagaaggtcggggagggcacctacggcaaggtgtacaaggcgcaggacaaggcgacgggccaggtggtggcgctcaagaagacccgcctggagatggacgacgaagggatcccgcccaccgcgctccgtgagatctccctcctccgcctcctctccagctccctctacgtcgtccgcctccttgccgtcgagcaggccaccaagggcgggggcgccggcggtggagggaagcccgtcctctacctcgtcttcgagttccttgacactgacctcaagaagttcgtcgacgcctaccgccgtggacccgcccctaagccgctcccaacgcaggtcgtcaagagctttttgtatcagttatgcaaaggaattgcacactgccatggccatggtgttcttcatcgggatttaaagccccaaaatctcttggttgacaaggagaagatgatactgaaaattgcagatcttgggttaagtagagcttttactgttcctatgaaaagctacacccatgagatcgtgacgctttggtatagagctcctgaagtactgcttggagcaacacattactcaaccagtgttgatatttggtccatcggatgcatctttgccgagatggtcagaaaacaggctcttttccctggtgactctgagttacagcaactgcttcacattttcaagctgttgggaactcctaccgaggaggattggcctggagtaactgctctgagggactggcacgagtttcctcagtggaaagcacaaagattgacgcgtgcagtccctacactggaaccagaaggaattgacctgttatcgaaaatgctccagttcgacccggcgaacaggatctcagccaaagctgcgctagagcatccctatttcaacagcctcgacaagtctcagttctagctgttctagctaccgtgtgatttttctcaacttggtgtgtgtgctctgctcgccaacttgttccgccatgagatcgatgctgaaaacgcacgaaaccatgtttcatctacctacaatcagcaacggcgtgttgctggtagttggctcccatgagcgcccgtctcctagacctccagcacttgatttgccttgagaattattgactgaagatacttgttcagatcatgtaggagttttatttgctctgtacggaattgtttgatgagatgggtttgcggacaatagacatttgtgtagcataataaggtagtactggtatttgttaagaaaatgttgcttcatgacaagtgaagttatttggagctgcgaagtggtgagaggcgtgtgtccgtggaaggagctaatagttagcatttgatgtggacattgaaaaaaaaaaaaaaaaa

SEQ ID NO: 65205 - protein, 309 aa, Triticum aestivum
  peptide (1)..(309): Ceres Seq. ID no. 13598533
  misc_feature (4)..(301): Pfam Name: Protein kinase domain Pfam Description: Protein kinase domain
  misc_feature (1)..(309): Homolog of NCBI NO: 5921446 NR Description: CELL DIVISION CONTROL PROTEIN 2 HOMOLOG C
  misc_feature (1)..(309): Homolog of NCBI NO: 15232441 NR Description: cell division control protein 2 homolog B (CDC2B)
  misc_feature (1)..(309): Homolog of NCBI NO: 15224912 NR Description: cell divsion control protein, putative
  misc_feature (1)..(309): Homolog of NCBI NO: 7434326 NR Description: probable cdc2-like protein kinase cdc2MsD -
  misc_feature (2)..(309): Homolog of NCBI NO: 25989353 NR Description: cyclin-dependent kinase [Helianthus tuberosus]
  misc_feature (1)..(309): Homolog of NCBI NO: 11125683 NR Description: B1-type cyclin dependent kinase [Lycopersicon
  misc_feature (1)..(309): Homolog of NCBI NO: 9885801 NR Description: cyclin-dependent kinase B1-2 [Nicotiana tabacum]
  misc_feature (1)..(309): Homolog of NCBI NO: 9885799 NR Description: cyclin-dependent kinase B1-1 [Nicotiana tabacum]
  misc_feature (1)..(309): Homolog of NCBI NO: 27542763 NR Description: cyclin-dependent kinase-like protein [Sorghum
  misc_feature (1)..(309): Homolog of NCBI NO: 34907628 NR Description: putative cyclin-dependent kinase B1-1
MEKYEKLEKVGEGTYGKVYKAQDKATGQVVALKKTRLEMDDEGIPPTALREISLLRLLSSSLYVVRLLAVEQATKGGGAGGGGKPVLYLVFEFLDTDLKKFVDAYRRGPAPKPLPTQVVKSFLYQLCKGIAHCHGHGVLHRDLKPQNLLVDKEKMILKIADLGLSRAFTVPMKSYTHEIVTLWYRAPEVLLGATHYSTSVDIWSIGCIFAEMVRKQALFPGDSELQQLLHIFKLLGTPTEEDWPGVTALRDWHEFPQWKAQRLTRAVPTLEPEGIDLLSKMLQFDPANRISAKAALEHPYFNSLDKSQF

SEQ ID NO: 65206 - protein, 271 aa, Triticum aestivum
  peptide (1)..(271): Ceres Seq. ID no. 13598534
  misc_feature (1)..(263): Pfam Name: Protein kinase domain Pfam Description: Protein kinase domain
  misc_feature (1)..(271): Homolog of NCBI NO: 5921446 NR Description: CELL DIVISION CONTROL PROTEIN 2 HOMOLOG C
  misc_feature (1)..(271): Homolog of NCBI NO: 15232441 NR Description: cell division control protein 2 homolog B (CDC2B)
  misc_feature (1)..(271): Homolog of NCBI NO: 15224912 NR Description: cell divsion control protein, putative
  misc_feature (1)..(271): Homolog of NCBI NO: 7434326 NR Description: probable cdc2-like protein kinase cdc2MsD -
  misc_feature (1)..(271): Homolog of NCBI NO: 25989353 NR Description: cyclin-dependent kinase [Helianthus tuberosus]
  misc_feature (1)..(271): Homolog of NCBI NO: 11125683 NR Description: B1-type cyclin dependent kinase [Lycopersicon
  misc_feature (1)..(271): Homolog of NCBI NO: 9885801 NR Description: cyclin-dependent kinase B1-2 [Nicotiana tabacum]
  misc_feature (1)..(271): Homolog of NCBI NO: 9885799 NR Description: cyclin-dependent kinase B1-1 [Nicotiana tabacum]
  misc_feature (1)..(271): Homolog of NCBI NO: 27542763 NR Description: cyclin-dependent kinase-like protein [Sorghum
  misc_feature (1)..(271): Homolog of NCBI NO: 34907628 NR Description: putative cyclin-dependent kinase B1-1
MDDEGIPPTALREISLLRLLSSSLYVVRLLAVEQATKGGGAGGGGKPVLYLVFEFLDTDLKKFVDAYRRGPAPKPLPTQVVKSFLYQLCKGIAHCHGHGVLHRDLKPQNLLVDKEKMILKIADLGLSRAFTVPMKSYTHEIVTLWYRAPEVLLGATHYSTSVDIWSIGCIFAEMVRKQALFPGDSELQQLLHIFKLLGTPTEEDWPGVTALRDWHEFPQWKAQRLTRAVPTLEPEGIDLLSKMLQFDPANRISAKAALEHPYFNSLDKSQF

SEQ ID NO: 65207 - protein, 178 aa, Triticum aestivum
  peptide (1)..(178): Ceres Seq. ID no. 13598535
ISKLPDPPRVCASSLRPHHTSRIEGDDADLGPSEAPWRSTRSWRRSGRAPTARCTRRRTRRRARWWRSRRPAWRWTTKGSRPPRSVRSPSSASSPAPSTSSASLPSSRPPRAGAPAVEGSPSSTSSSSSLTLTSRSSSTPTAVDPPLSRSQRRSSRAFCISYAKELHTAMAMVFFIGI

SEQ ID NO: 65208 - DNA, 1368 bp, Triticum aestivum
  misc_feature (1)..(1368): Ceres Seq. ID no. 13597643
aaaacctcccccgactcctaaaaccttaaaccctagctccggccactcccccatggcggccatccgggtcatcctccctcatccccacctccccatcccctcgtggagaccccagctcaagccctcctcatcctatccccgccgcgcggtcgccgccccagcttcgctgtctccgtcgcccctcacggcttccctgcaactcggagatgtgatcgaggcgcagcagttcgatcggcaggcgcttaatgagatctttgaggtggcgcgggagatggaggccgtggagcgcagctcccacgggttccggagccgcgtccttgaggggtacctcatggccacgctcttctacgagccctccacccgcacgcgcctctccttcgaggccgccatgcgccgtcttggcggggaggtgctcactaccgagaacgctcgcgagttctcgtccgctgccaagggcgagaccctagaagataccataagaaccgttgaaggttattctgatattatcgttctgagacattttgaaagtggagctgccagaagagcagcggctactgcagaaattccggttattaatgcaggtgatgggccagggcaacatcctactcaggctttgttggatgtatatacaataaagagagagattggtaggctagatggaatcaaacttggtttggttggagaccttgccaatgggagaactgttcgttctctggcctatttgatcgctaagtaccagaacattaagatatacttcgtatctccagatgttgtaaaaatgaaggatgatattaaggagtacttaacttcacaaggtgttgaatgggaagaaagttcagatttattggatgtggcatccaggtgtgatgtaatttatcaaacacgcattcaaaaagaaagattcggagagaggatcgatcactatgaggcagctcgtgggaaatatattgtggataagaaggttttaggtgtgctgccaaagcatgctgttatcatgcatccccttccaaggctggatgagatcacagtagatgttgatagtgatccaagggctgcatattttaggcaggctaagaatggcctctacataaggatggcactgctcaaacttctgcttgttggccattgacattctttttcctggtgcgtgagctttgcgatgtcaaaggatcagaaatgtagtcttaatcattggctccaagttcaactgttcggtgctgtgcaaggtataagaaaattggatccttgcaagaataaagcaatgattgtatgatacatgctccataggaattttctctgttattatgtggaacatccttttccccaggatggaatgcaatgttcgaaaagaaaattatattttacctg

SEQ ID NO: 65209 - protein, 375 aa, Triticum aestivum
  peptide (1)..(375): Ceres Seq. ID no. 13597644
  misc_feature (218)..(372): Pfam Name: Aspartate/ornithine carbamoyltransferase, Pfam Description: Aspartate/ornithine carbamoyltransferase,
  misc_feature (108)..(374): Homolog of NCBI NO: 397385 NR Description: aspartate carbamoyltransferase [Lycopersicon
  misc_feature (108)..(374): Homolog of NCBI NO: 479713 NR Description: aspartate carbamoyltransferase (EC 2.1.3.2) -
  misc_feature (66)..(374): Homolog of NCBI NO: 15215706 NR Description: AT3g20330/MQC12_8 [Arabidopsis thaliana]
  misc_feature (66)..(374): Homolog of NCBI NO: 3914502 NR Description: Aspartate carbamoyltransferase 1, chloroplast
  misc_feature (66)..(374): Homolog of NCBI NO: 1076293 NR Description: aspartate carbamoyltransferase (EC 2.1.3.2) -
  misc_feature (66)..(374): Homolog of NCBI NO: 15231112 NR Description: aspartate carbamoyltransferase precursor
  misc_feature (66)..(374): Homolog of NCBI NO: 3914503 NR Description: Aspartate carbamoyltransferase 2, chloroplast
  misc_feature (62)..(374): Homolog of NCBI NO: 21535795 NR Description: aspartate carbamoyltransferase [Solanum tuberosum]
  misc_feature (66)..(374): Homolog of NCBI NO: 3914501 NR Description: Aspartate carbamoyltransferase 3, chloroplast
  misc_feature (18)..(374): Homolog of NCBI NO: 9453916 NR Description: aspartate carbamoyl transferase
KPPPTPKTLNPSSGHSPMAAIRVILPHPHLPIPSWRPQLKPSSSYPRRAVAAPASLSPSPLTASLQLGDVIEAQQFDRQALNEIFEVAREMEAVERSSHGFRSRVLEGYLMATLFYEPSTRTRLSFEAAMRRLGGEVLTTENAREFSSAAKGETLEDTIRTVEGYSDIIVLRHFESGAARRAAATAEIPVINAGDGPGQHPTQALLDVYTIKREIGRLDGIKLGLVGDLANGRTVRSLAYLIAKYQNIKIYFVSPDVVKMKDDIKEYLTSQGVEWEESSDLLDVASRCDVIYQTRIQKERFGERIDHYEAARGKYIVDKKVLGVLPKHAVIMHPLPRLDEITVDVDSDPRAAYFRQAKNGLYIRMALLKLLLVGH

SEQ ID NO: 65210 - protein, 358 aa, Triticum aestivum
  peptide (1)..(358): Ceres Seq. ID no. 13597645
  misc_feature (201)..(355): Pfam Name: Aspartate/ornithine carbamoyltransferase, Pfam Description: Aspartate/ornithine carbamoyltransferase,
  misc_feature (91)..(357): Homolog of NCBI NO: 397385 NR Description: aspartate carbamoyltransferase [Lycopersicon
  misc_feature (91)..(357): Homolog of NCBI NO: 479713 NR Description: aspartate carbamoyltransferase (EC 2.1.3.2) -
  misc_feature (49)..(357): Homolog of NCBI NO: 15215706 NR Description: AT3g20330/MQC12_8 [Arabidopsis thaliana]
  misc_feature (49)..(357): Homolog of NCBI NO: 3914502 NR Description: Aspartate carbamoyltransferase 1, chloroplast
  misc_feature (49)..(357): Homolog of NCBI NO: 1076293 NR Description: aspartate carbamoyltransferase (EC 2.1.3.2) -
  misc_feature (49)..(357): Homolog of NCBI NO: 15231112 NR Description: aspartate carbamoyltransferase precursor
  misc_feature (49)..(357): Homolog of NCBI NO: 3914503 NR Description: Aspartate carbamoyltransferase 2, chloroplast
  misc_feature (45)..(357): Homolog of NCBI NO: 21535795 NR Description: aspartate carbamoyltransferase [Solanum tuberosum]
  misc_feature (49)..(357): Homolog of NCBI NO: 3914501 NR Description: Aspartate carbamoyltransferase 3, chloroplast
  misc_feature (1)..(357): Homolog of NCBI NO: 9453916 NR Description: aspartate carbamoyl transferase
MAAIRVILPHPHLPIPSWRPQLKPSSSYPRRAVAAPASLSPSPLTASLQLGDVIEAQQFDRQALNEIFEVAREMEAVERSSHGFRSRVLEGYLMATLFYEPSTRTRLSFEAAMRRLGGEVLTTENAREFSSAAKGETLEDTIRTVEGYSDIIVLRHFESGAARRAAATAEIPVINAGDGPGQHPTQALLDVYTIKREIGRLDGIKLGLVGDLANGRTVRSLAYLIAKYQNIKIYFVSPDVVKMKDDIKEYLTSQGVEWEESSDLLDVASRCDVIYQTRIQKERFGERIDHYEAARGKYIVDKKVLGVLPKHAVIMHPLPRLDEITVDVDSDPRAAYFRQAKNGLYIRMALLKLLLVGH

SEQ ID NO: 65211 - protein, 285 aa, Triticum aestivum
  peptide (1)..(285): Ceres Seq. ID no. 13597646
  misc_feature (128)..(282): Pfam Name: Aspartate/ornithine carbamoyltransferase, Pfam Description: Aspartate/ornithine carbamoyltransferase,
  misc_feature (18)..(284): Homolog of NCBI NO: 397385 NR Description: aspartate carbamoyltransferase [Lycopersicon
  misc_feature (18)..(284): Homolog of NCBI NO: 479713 NR Description: aspartate carbamoyltransferase (EC 2.1.3.2) -
  misc_feature (1)..(284): Homolog of NCBI NO: 15215706 NR Description: AT3g20330/MQC12_8 [Arabidopsis thaliana]
  misc_feature (1)..(284): Homolog of NCBI NO: 3914502 NR Description: Aspartate carbamoyltransferase 1, chloroplast
  misc_feature (1)..(284): Homolog of NCBI NO: 1076293 NR Description: aspartate carbamoyltransferase (EC 2.1.3.2) -
  misc_feature (1)..(284): Homolog of NCBI NO: 15231112 NR Description: aspartate carbamoyltransferase precursor
  misc_feature (1)..(284): Homolog of NCBI NO: 3914503 NR Description: Aspartate carbamoyltransferase 2, chloroplast
  misc_feature (1)..(284): Homolog of NCBI NO: 21535795 NR Description: aspartate carbamoyltransferase [Solanum tuberosum]
  misc_feature (1)..(284): Homolog of NCBI NO: 3914501 NR Description: Aspartate carbamoyltransferase 3, chloroplast
  misc_feature (1)..(284): Homolog of NCBI NO: 9453916 NR Description: aspartate carbamoyl transferase
MEAVERSSHGFRSRVLEGYLMATLFYEPSTRTRLSFEAAMRRLGGEVLTTENAREFSSAAKGETLEDTIRTVEGYSDIIVLRHFESGAARRAAATAEIPVINAGDGPGQHPTQALLDVYTIKREIGRLDGIKLGLVGDLANGRTVRSLAYLIAKYQNIKIYFVSPDVVKMKDDIKEYLTSQGVEWEESSDLLDVASRCDVIYQTRIQKERFGERIDHYEAARGKYIVDKKVLGVLPKHAVIMHPLPRLDEITVDVDSDPRAAYFRQAKNGLYIRMALLKLLLVGH

SEQ ID NO: 65212 - DNA, 1343 bp, Triticum aestivum
  misc_feature (1)..(1343): Ceres Seq. ID no. 13656123
ccccgtcacttgctctatcccgagttagtgacacaagaatatttccctgtgcagtcttgtgctagctgccgtgtctaccaggaatggccgacggcgtccttccggcagcgctgacagtggcgttcctgctgctccttggaacaatcggcgccgcgcacggtcagctccagatggggttctactccgactcctgccccggcgccgaggacatggtcaccgccgccgtccaggaggccgccgcctcggacgccaccatcctccccgccctcgtccgcctccagttccacgactgcttcgtcagaggatgcgacgcgtcggtgctgatcacgagcgcgggcaacgccgcggaggtgaacaacaacaagcaccagggcctccgaggcctggatgtggttgaccgcgccaaggcggagctcgaggagcagtgccccggcgttccaacwktrkygtstctmctgcgccgacatcatcgctctcgccgcacgcgacgccatagccatgacgaacgggccgtcgttcgaggtgccgacggggcggcgcgacgggctgtcgtcgaacgtacgcgacgccgacgtgctgccggacgtgagtgactccatccaggtgctccgctccaagttcgccgccagcagcctcaacgaccgcgacctcgttctcctcacagcggcgcacacgatcggcaccacggcgtgcttcttcgtcaaggatcggctctacagctacccactgccgggcagccgcacggggtcggacccgtcgatcccggcggcgttcctgtcggagctcaaggcccggtgcgcgcccggcgacttcaacacgcgcgtgccgctggaccggggcagccagggaacattcgacgactccatcctccgcaacatccgtgcgggcctcgtccccatcgcctccgacgcggcgctcgaggccagcaacgccaccggcgcgctcgtcggcgcctacctcggcgcggcgtcctccagcttcgcgcaggactttgtgggcgccatgatcaagatgggcaccatcggcgccatcaccggcgacgccggcgagatcagggacgtatgctcggcgttcaacacgaactgatcgacgcgtcattgctataaaatcatacgaatggtcgcattcaaattagcactgtaaatctcttgcggaaacatgaattcattcctckttgsmwctkkaggggnnnaaaaaaaaaaaaaaaaaaaaaaaaaaaaaaaaaaaaaaaaaaaaaaaaaaaaaaaaaaaaaaaaaaaaaaaaaaaaaaaaaaaaaaagggraaaaaaaaaaaaaaagggcttaagggaacggggsaatccscccccccccaggggggcccc

SEQ ID NO: 65213 - protein, 232 aa, Triticum aestivum
  peptide (1)..(232): Ceres Seq. ID no. 15219796
  misc_feature (24)..(190): Pfam Name: Peroxidase Pfam Description: Peroxidase
  misc_feature (24)..(230): Homolog of NCBI NO: 19698450 NR Description: gaiacol peroxidase [Gossypium hirsutum]
  misc_feature (24)..(230): Homolog of NCBI NO: 6979323 NR Description: putative peroxidase [Oryza sativa]
  misc_feature (19)..(19): Xaa is any aa, unknown or other
  misc_feature (20)..(20): Xaa is any aa, unknown or other
  misc_feature (21)..(21): Xaa is any aa, unknown or other
  misc_feature (22)..(22): Xaa is any aa, unknown or other
  misc_feature (23)..(23): Xaa is any aa, unknown or other
MWLTAPRRSSRSSAPAFQXXXXXCADIIALAARDAIAMTNGPSFEVPTGRRDGLSSNVRDADVLPDVSDSIQVLRSKFAASSLNDRDLVLLTAAHTIGTTACFFVKDRLYSYPLPGSRTGSDPSIPAAFLSELKARCAPGDFNTRVPLDRGSQGTFDDSILRNIRAGLVPIASDAALEASNATGALVGAYLGAASSSFAQDFVGAMIKMGTIGAITGDAGEIRDVCSAFNTN

SEQ ID NO: 65214 - protein, 195 aa, Triticum aestivum
  peptide (1)..(195): Ceres Seq. ID no. 15219797
  misc_feature (1)..(153): Pfam Name: Peroxidase Pfam Description: Peroxidase
  misc_feature (1)..(193): Homolog of NCBI NO: 19698450 NR Description: gaiacol peroxidase [Gossypium hirsutum]
  misc_feature (1)..(193): Homolog of NCBI NO: 6979323 NR Description: putative peroxidase [Oryza sativa]
MTNGPSFEVPTGRRDGLSSNVRDADVLPDVSDSIQVLRSKFAASSLNDRDLVLLTAAHTIGTTACFFVKDRLYSYPLPGSRTGSDPSIPAAFLSELKARCAPGDFNTRVPLDRGSQGTFDDSILRNIRAGLVPIASDAALEASNATGALVGAYLGAASSSFAQDFVGAMIKMGTIGAITGDAGEIRDVCSAFNTN

SEQ ID NO: 65215 - protein, 169 aa, Triticum aestivum
  peptide (1)..(169): Ceres Seq. ID no. 15219798
  misc_feature (44)..(118): Pfam Name: Peroxidase Pfam Description: Peroxidase
  misc_feature (14)..(118): Homolog of NCBI NO: 19698450 NR Description: gaiacol peroxidase [Gossypium hirsutum]
  misc_feature (7)..(118): Homolog of NCBI NO: 6979323 NR Description: putative peroxidase [Oryza sativa]
  misc_feature (120)..(120): Xaa is any aa, unknown or other
  misc_feature (121)..(121): Xaa is any aa, unknown or other
  misc_feature (122)..(122): Xaa is any aa, unknown or other
  misc_feature (123)..(123): Xaa is any aa, unknown or other
  misc_feature (124)..(124): Xaa is any aa, unknown or other
MADGVLPAALTVAFLLLLGTIGAAHGQLQMGFYSDSCPGAEDMVTAAVQEAAASDATILPALVRLQFHDCFVRGCDASVLITSAGNAAEVNNNKHQGLRGLDVVDRAKAELEEQCPGVPXXXXXLRRHHRSRRTRRHSHDERAVVRGADGAARRAVVERTRRRRAAGRE

SEQ ID NO: 65216 - DNA, 1140 bp, Triticum aestivum
  misc_feature (1)..(1140): Ceres Seq. ID no. 13597609
cactttgacttcggagcaaccgcgaccacgtcggtagcataaagctttcgcccggctggctcgggtgagagagacagggaaggcggagggggcggaggctgggcggcagaggcggcgccgtcactctgttcttgcgctcatctccagaggaaggggagcgtcacggttcagcaatggcagctccgaatacctacgccgtccatctctcctcggagacccacaagatcgaggcctggtgcgaatcggacgaggctttggctaagcaactgcaggaggaggaggattcgctcgctacaagggaatttgccggcagcgtgtccttggaaccatcatcaccagctgttgagtataggcctgccaataatgcagctcaggtggcgacagaagataatgtcgatccggataatatgtcatacgagcaactgcaagcaatcggtgaagaagtaggaactcagtccagaggattatctgatgacctgatcagctacctggagccttttaggaacaaatgtaacttcttctcctgcaaaaagaataccgatgaatgtgtgatctgcaaatcgaactataaaagcctacagaagttgataagattgccctgcagccattgttaccatgcaaattgcataactcgctggcttaagattaacaaggcatgcccagtctgcaatgaggaggtattcggttaacttgcgatgttagtggagacgctgtggcctcctcgccgcatcatgataatggacaatcttgctctcctatagcctattatactataaaatacttgatggtctaccgtgctttaagaacaaatgtatttcggatcatgccatgtttgatgtcccccaacttagttttgtcattaaggtaatgataaatatgtgcgggcagtgggttatatagtttgcaattttccgagaatgcaaccgagcaggagcagctaagtagatgatgtggtttgctatgtcttgcacagtctttacatcagcccactgtgtaaagtccgaagcaagatttgtaaatgtttatataggacgtctctttttgactttgaaaggttcagacaagtgtgttctggggtttccaaaattttgggaacaaatcttgcatgtaaaaattataatggaatgaactgtgtttttc

SEQ ID NO: 65217 - protein, 171 aa, Triticum aestivum
  peptide (1)..(171): Ceres Seq. ID no. 13597610
  misc_feature (125)..(165): Pfam Name: Zinc finger, C3HC4 type (RING finger) Pfam Description: Zinc finger, C3HC4 type (RING finger)
  misc_feature (74)..(169): Homolog of NCBI NO: 4240031 NR Description: DNA binding zinc finger protein (Pspzf) [Pisum
  misc_feature (71)..(168): Homolog of NCBI NO: 15232746 NR Description: zinc-finger protein-related protein [Arabidopsis
  misc_feature (25)..(169): Homolog of NCBI NO: 18402411 NR Description: zinc finger (C3HC4-type RING finger) protein
  misc_feature (25)..(169): Homolog of NCBI NO: 21536693 NR Description: unknown [Arabidopsis thaliana]
  misc_feature (24)..(169): Homolog of NCBI NO: 10334499 NR Description: hypothetical protein [Cicer arietinum]
  misc_feature (56)..(171): Homolog of NCBI NO: 22331928 NR Description: zinc finger (C3HC4-type RING finger) protein
  misc_feature (12)..(171): Homolog of NCBI NO: 34898016 NR Description: ESTs C26000(C11448),AU082130(C11448) correspond a region of the predicted gene.~Similar to mRNA for zinc-finger
  misc_feature (1)..(171): Homolog of NCBI NO: 38567912 NR Description: OSJNBa0088I22.8 [Oryza sativa (japonica
MAAPNTYAVHLSSETHKIEAWCESDEALAKQLQEEEDSLATREFAGSVSLEPSSPAVEYRPANNAAQVATEDNVDPDNMSYEQLQAIGEEVGTQSRGLSDDLISYLEPFRNKCNFFSCKKNTDECVICKSNYKSLQKLIRLPCSHCYHANCITRWLKINKACPVCNEEVFG

SEQ ID NO: 65218 - protein, 93 aa, Triticum aestivum
  peptide (1)..(93): Ceres Seq. ID no. 13597611
  misc_feature (47)..(87): Pfam Name: Zinc finger, C3HC4 type (RING finger) Pfam Description: Zinc finger, C3HC4 type (RING finger)
  misc_feature (1)..(91): Homolog of NCBI NO: 4240031 NR Description: DNA binding zinc finger protein (Pspzf) [Pisum
  misc_feature (1)..(90): Homolog of NCBI NO: 15232746 NR Description: zinc-finger protein-related protein [Arabidopsis
  misc_feature (1)..(91): Homolog of NCBI NO: 18402411 NR Description: zinc finger (C3HC4-type RING finger) protein
  misc_feature (1)..(91): Homolog of NCBI NO: 21536693 NR Description: unknown [Arabidopsis thaliana]
  misc_feature (1)..(91): Homolog of NCBI NO: 10334499 NR Description: hypothetical protein [Cicer arietinum]
  misc_feature (1)..(93): Homolog of NCBI NO: 22331928 NR Description: zinc finger (C3HC4-type RING finger) protein
  misc_feature (1)..(93): Homolog of NCBI NO: 34898016 NR Description: ESTs C26000(C11448),AU082130(C11448) correspond a region of the predicted gene.~Similar to mRNA for zinc-finger
  misc_feature (1)..(93): Homolog of NCBI NO: 38567912 NR Description: OSJNBa0088I22.8 [Oryza sativa (japonica
MSYEQLQAIGEEVGTQSRGLSDDLISYLEPFRNKCNFFSCKKNTDECVICKSNYKSLQKLIRLPCSHCYHANCITRWLKINKACPVCNEEVFG

SEQ ID NO: 65219 - DNA, 1353 bp, Triticum aestivum
  misc_feature (1)..(1353): Ceres Seq. ID no. 12617639
aaaagtacgcctgaagccctacaggctcccgccgcccccctccccctcccgcccccaaaccctaacccctccgccaccatcgccgccaccgcggctcccctctcttcctcctcgccgcgacaccccgtccccgccctctccaccacgtccacaatcttcctccattagatttcgaggggtctcgggaggatggcgttcctgcagaaggtcgggaatgccctcaagcggtccgcgggctccggctcggcgatgctccaggcggtccggtccatgtcctcctccaaggtcttcgtcggaggcatctcgtacggcaccgatgaccagagcctcgcggatgcgttttccaactacggccaagtcgtggaatccaaggtgatcatggaccgtgaatctgggaggtcaagggggtttggtttcgtgacctacacttcggcggaggaggctggagctgccatcaccggaatggatgggaaggatctgcagggtcggatagtgagggtgagctatgctcatgaccgtggtagtcgtccaagttttggcggtggtggcggctatggcggcggtggtggcggctatggcggcggtgacggtggttacggtggagctggtggtgcctatggtggtggtggaggctacagcggaggtggtggatatgggggtggaggcagaggtggtggatacaatagtggtggcaattataattcaggatacaacagtgggggaaactatggtgcccctcaaggcgagcaaggtggctatgggggtgatgctggtttcacaggggttggtggtggtggatacgatgctgctcctgccaacaactatggcggcgatagcctgaatcaagggggtggagcacctcctgcatttggaggtggaaactatggcgtaggcaacgacagctacgcggacgatgcccctgttgatctgccccctggtaagctcaatgacctgctgaaggatctcaaatttgatgttggtggcaaggaggatggtgctggggaggacgccggcttggttgacgcggacatcaagagaagcgagggacaggatgactttcttgacgacgacttcagcaaggatgaagatgactacgccaacaagagaagctgaatgttggtccagcaagaagcatcagccgaataatttcccgtcgatatgttctccatgactgccttgtttttggtattgtcctgtgatgaagataataatgtagtgcttgcaaacaagttatgttcggtctcttagctacgttctgtacgtctgctttgtgtactgtgttctggattcatagtatggtgcgaacttgaacctgaactctgcatgtattgcacgctgtgaaattgcactttc

SEQ ID NO: 65220 - protein, 307 aa, Triticum aestivum
  peptide (1)..(307): Ceres Seq. ID no. 12617640
  misc_feature (33)..(95): Pfam Name: RNA recognition motif. (a.k.a. RRM, RBD, or RNP domain) Pfam Description: RNA recognition motif. (a.k.a. RRM, RBD, or RNP
  misc_feature (1)..(155): Homolog of NCBI NO: 15236359 NR Description: glycine-rich RNA-binding protein AtGRP2
  misc_feature (32)..(202): Homolog of NCBI NO: 15226605 NR Description: glycine-rich RNA binding protein AtGRP7
  misc_feature (32)..(189): Homolog of NCBI NO: 544423 NR Description: Glycine-rich RNA-binding protein 2
  misc_feature (11)..(246): Homolog of NCBI NO: 15822703 NR Description: RNA-binding protein precursor [Nicotiana tabacum]
  misc_feature (1)..(254): Homolog of NCBI NO: 15822703 NR Description: RNA-binding protein precursor [Nicotiana tabacum]
  misc_feature (1)..(253): Homolog of NCBI NO: 1084415 NR Description: RNA-binding protein - wood tobacco
  misc_feature (1)..(246): Homolog of NCBI NO: 15822705 NR Description: RNA-binding protein precursor [Solanum tuberosum]
  misc_feature (96)..(306): Homolog of NCBI NO: 37532692 NR Description: unknown protein [Oryza sativa (japonica
  misc_feature (1)..(238): Homolog of NCBI NO: 15221187 NR Description: glycine-rich RNA-binding protein; protein id:
  misc_feature (1)..(286): Homolog of NCBI NO: 15239505 NR Description: glycine-rich RNA-binding protein
MAFLQKVGNALKRSAGSGSAMLQAVRSMSSSKVFVGGISYGTDDQSLADAFSNYGQVVESKVIMDRESGRSRGFGFVTYTSAEEAGAAITGMDGKDLQGRIVRVSYAHDRGSRPSFGGGGGYGGGGGGYGGGDGGYGGAGGAYGGGGGYSGGGGYGGGGRGGGYNSGGNYNSGYNSGGNYGAPQGEQGGYGGDAGFTGVGGGGYDAAPANNYGGDSLNQGGGAPPAFGGGNYGVGNDSYADDAPVDLPPGKLNDLLKDLKFDVGGKEDGAGEDAGLVDADIKRSEGQDDFLDDDFSKDEDDYANKRS

SEQ ID NO: 65221 - protein, 287 aa, Triticum aestivum
  peptide (1)..(287): Ceres Seq. ID no. 12617641
  misc_feature (13)..(75): Pfam Name: RNA recognition motif. (a.k.a. RRM, RBD, or RNP domain) Pfam Description: RNA recognition motif. (a.k.a. RRM, RBD, or RNP
  misc_feature (1)..(135): Homolog of NCBI NO: 15236359 NR Description: glycine-rich RNA-binding protein AtGRP2
  misc_feature (12)..(182): Homolog of NCBI NO: 15226605 NR Description: glycine-rich RNA binding protein AtGRP7
  misc_feature (12)..(169): Homolog of NCBI NO: 544423 NR Description: Glycine-rich RNA-binding protein 2
  misc_feature (1)..(226): Homolog of NCBI NO: 15822703 NR Description: RNA-binding protein precursor [Nicotiana tabacum]
  misc_feature (1)..(234): Homolog of NCBI NO: 15822703 NR Description: RNA-binding protein precursor [Nicotiana tabacum]
  misc_feature (1)..(233): Homolog of NCBI NO: 1084415 NR Description: RNA-binding protein - wood tobacco
  misc_feature (1)..(226): Homolog of NCBI NO: 15822705 NR Description: RNA-binding protein precursor [Solanum tuberosum]
  misc_feature (76)..(286): Homolog of NCBI NO: 37532692 NR Description: unknown protein [Oryza sativa (japonica
  misc_feature (1)..(218): Homolog of NCBI NO: 15221187 NR Description: glycine-rich RNA-binding protein; protein id:
  misc_feature (1)..(266): Homolog of NCBI NO: 15239505 NR Description: glycine-rich RNA-binding protein
MLQAVRSMSSSKVFVGGISYGTDDQSLADAFSNYGQVVESKVIMDRESGRSRGFGFVTYTSAEEAGAAITGMDGKDLQGRIVRVSYAHDRGSRPSFGGGGGYGGGGGGYGGGDGGYGGAGGAYGGGGGYSGGGGYGGGGRGGGYNSGGNYNSGYNSGGNYGAPQGEQGGYGGDAGFTGVGGGGYDAAPANNYGGDSLNQGGGAPPAFGGGNYGVGNDSYADDAPVDLPPGKLNDLLKDLKFDVGGKEDGAGEDAGLVDADIKRSEGQDDFLDDDFSKDEDDYANKRS

SEQ ID NO: 65222 - protein, 280 aa, Triticum aestivum
  peptide (1)..(280): Ceres Seq. ID no. 12617642
  misc_feature (6)..(68): Pfam Name: RNA recognition motif. (a.k.a. RRM, RBD, or RNP domain) Pfam Description: RNA recognition motif. (a.k.a. RRM, RBD, or RNP
  misc_feature (1)..(128): Homolog of NCBI NO: 15236359 NR Description: glycine-rich RNA-binding protein AtGRP2
  misc_feature (5)..(175): Homolog of NCBI NO: 15226605 NR Description: glycine-rich RNA binding protein AtGRP7
  misc_feature (5)..(162): Homolog of NCBI NO: 544423 NR Description: Glycine-rich RNA-binding protein 2
  misc_feature (1)..(219): Homolog of NCBI NO: 15822703 NR Description: RNA-binding protein precursor [Nicotiana tabacum]
  misc_feature (1)..(227): Homolog of NCBI NO: 15822703 NR Description: RNA-binding protein precursor [Nicotiana tabacum]
  misc_feature (1)..(226): Homolog of NCBI NO: 1084415 NR Description: RNA-binding protein - wood tobacco
  misc_feature (1)..(219): Homolog of NCBI NO: 15822705 NR Description: RNA-binding protein precursor [Solanum tuberosum]
  misc_feature (69)..(279): Homolog of NCBI NO: 37532692 NR Description: unknown protein [Oryza sativa (japonica
  misc_feature (1)..(211): Homolog of NCBI NO: 15221187 NR Description: glycine-rich RNA-binding protein; protein id:
  misc_feature (1)..(259): Homolog of NCBI NO: 15239505 NR Description: glycine-rich RNA-binding protein
MSSSKVFVGGISYGTDDQSLADAFSNYGQVVESKVIMDRESGRSRGFGFVTYTSAEEAGAAITGMDGKDLQGRIVRVSYAHDRGSRPSFGGGGGYGGGGGGYGGGDGGYGGAGGAYGGGGGYSGGGGYGGGGRGGGYNSGGNYNSGYNSGGNYGAPQGEQGGYGGDAGFTGVGGGGYDAAPANNYGGDSLNQGGGAPPAFGGGNYGVGNDSYADDAPVDLPPGKLNDLLKDLKFDVGGKEDGAGEDAGLVDADIKRSEGQDDFLDDDFSKDEDDYANKRS

SEQ ID NO: 65223 - DNA, 1613 bp, Triticum aestivum
  misc_feature (1)..(1613): Ceres Seq. ID no. 13584612
aaaaaccccacaaatccatcccggccgaccgccgccgccgccgttgccacccccaccgccatgaatccggcatgcgcggaggcagcagccgccaagaagtcccggcacaaggacaagaaggagaagaaaaacaagcgcaaagacaccgcggagcacctcggcggcgagcccgcgacggccgacgaggaagccgtccacaagaagaagaagaagaagcacgcgaaggaggaggaggaggcggattcgaaggggaagccgacggtgagcatcgccgtcgccggttccgtcatcgacaacgcccagtccctcgagctcgccaccctcctggccggtcagatagcccgcgcggcggccgtattccgcatcgacgagatcgttgtcttcgacagcagcccacctgcggagaacggcggcggcggtgccgaagacgaagaggagagcggtgcgcggttcctcgttcgcatactggagtatctggagacgccgcagtacctgcgccgccgtctcttcccaatgcacaagaactttaaatatgtggggttgcttccgcctctggacgcgccgcaccatgtgcgcaagcatgagtggtctgaatttcgtgaaggtgtaacattgggcggggatcgttcaaagggtacacttgttgatgttgggttaagtcagaacgttctggttgagcaaatcctagaacaaggaaaaagggtaactgtagccatgggaaccaacagagaccttacaccagcttgtataaggaaagtcgttcctccgtcctcacccagcgaagaaatgggatcatattggggctataaagtccgctatgcttcaaatttaagtggtgttatcaatgattcaccatacaaggaaggatatgatcatatcattggcacttctgagcatggtgaaaccattatttcatctgagctaatcttaccttcattcaggcaccttttaattgcgtttggtggactggctggtctggaagaaagcatcgaagaggacccaaatctgaatggcaaaggtgcaaatgatgtattcgcatcttattttaatacatgccccaaccaaggtagcagaacaataaggacagaggaggcacttctcatatcccttcagtacttccaagaccccatcaggcgagcagggatatcgaattagaaggttttatgcagacacatgcaaatacaacattgcgcttaccaaaggattggctttaacgcttggaatagacatggaagatgcaccttgggtttgtttttgatggtcaatcgctggattgtagcacctacgggttttctgctcgggtcaagcactgtaaagcaaagaggaggtgcaagaataggtgatagctttaacttctattttgaaacaggcaaggcacacattttcattattaagaagagaatttgcctggttaattagaggaaaactgggcaaaagccaagatagcttgaacattgatgctagcattggtagagttttcttaagggggcattgatagagttgagaagaagatcagtgccccccaaaagagtgtttagagagggagcataattatcgtcggggatttgttttctttgctccaaattggctgaaatgagtgttttgtttttttt

SEQ ID NO: 65224 - protein, 384 aa, Triticum aestivum
  peptide (1)..(384): Ceres Seq. ID no. 13584613
  misc_feature (87)..(374): Pfam Name: Uncharacterized ACR, COG2106 Pfam Description: Uncharacterized ACR, COG2106
  misc_feature (15)..(378): Homolog of NCBI NO: 20129839 NR Description: CG12128-PA [Drosophila melanogaster]
  misc_feature (15)..(378): Homolog of NCBI NO: 21428350 NR Description: GM02932p [Drosophila melanogaster]
  misc_feature (67)..(381): Homolog of NCBI NO: 27369948 NR Description: DNA segment, Chr 2, Wayne State University 81,
  misc_feature (10)..(381): Homolog of NCBI NO: 34783965 NR Description: Unknown (protein for IMAGE:6142267) [Homo sapiens]
  misc_feature (37)..(381): Homolog of NCBI NO: 38679912 NR Description: hypothetical protein HSPC109 [Homo sapiens]
  misc_feature (37)..(381): Homolog of NCBI NO: 39794258 NR Description: Unknown (protein for MGC:75017) [Homo sapiens]
  misc_feature (37)..(381): Homolog of NCBI NO: 7512808 NR Description: hypothetical protein DKFZp566D143.1 - human
  misc_feature (32)..(107): Homolog of NCBI NO: 15239710 NR Description: hypothetical protein [Arabidopsis thaliana]
  misc_feature (97)..(380): Homolog of NCBI NO: 15239710 NR Description: hypothetical protein [Arabidopsis thaliana]
  misc_feature (56)..(363): Homolog of NCBI NO: 38346841 NR Description: OSJNBa0091C12.1 [Oryza sativa (japonica
KNPTNPSRPTAAAAVATPTAMNPACAEAAAAKKSRHKDKKEKKNKRKDTAEHLGGEPATADEEAVHKKKKKKHAKEEEEADSKGKPTVSIAVAGSVIDNAQSLELATLLAGQIARAAAVFRIDEIVVFDSSPPAENGGGGAEDEEESGARFLVRILEYLETPQYLRRRLFPMHKNFKYVGLLPPLDAPHHVRKHEWSEFREGVTLGGDRSKGTLVDVGLSQNVLVEQILEQGKRVTVAMGTNRDLTPACIRKVVPPSSPSEEMGSYWGYKVRYASNLSGVINDSPYKEGYDHIIGTSEHGETIISSELILPSFRHLLIAFGGLAGLEESIEEDPNLNGKGANDVFASYFNTCPNQGSRTIRTEEALLISLQYFQDPIRRAGISN

SEQ ID NO: 65225 - protein, 364 aa, Triticum aestivum
  peptide (1)..(364): Ceres Seq. ID no. 13584614
  misc_feature (67)..(354): Pfam Name: Uncharacterized ACR, COG2106 Pfam Description: Uncharacterized ACR, COG2106
  misc_feature (1)..(358): Homolog of NCBI NO: 20129839 NR Description: CG12128-PA [Drosophila melanogaster]
  misc_feature (1)..(358): Homolog of NCBI NO: 21428350 NR Description: GM02932p [Drosophila melanogaster]
  misc_feature (47)..(361): Homolog of NCBI NO: 27369948 NR Description: DNA segment, Chr 2, Wayne State University 81,
  misc_feature (1)..(361): Homolog of NCBI NO: 34783965 NR Description: Unknown (protein for IMAGE:6142267) [Homo sapiens]
  misc_feature (17)..(361): Homolog of NCBI NO: 38679912 NR Description: hypothetical protein HSPC109 [Homo sapiens]
  misc_feature (17)..(361): Homolog of NCBI NO: 39794258 NR Description: Unknown (protein for MGC:75017) [Homo sapiens]
  misc_feature (17)..(361): Homolog of NCBI NO: 7512808 NR Description: hypothetical protein DKFZp566D143.1 - human
  misc_feature (12)..(87): Homolog of NCBI NO: 15239710 NR Description: hypothetical protein [Arabidopsis thaliana]
  misc_feature (77)..(360): Homolog of NCBI NO: 15239710 NR Description: hypothetical protein [Arabidopsis thaliana]
  misc_feature (36)..(343): Homolog of NCBI NO: 38346841 NR Description: OSJNBa0091C12.1 [Oryza sativa (japonica
MNPACAEAAAAKKSRHKDKKEKKNKRKDTAEHLGGEPATADEEAVHKKKKKKHAKEEEEADSKGKPTVSIAVAGSVIDNAQSLELATLLAGQIARAAAVFRIDEIVVFDSSPPAENGGGGAEDEEESGARFLVRILEYLETPQYLRRRLFPMHKNFKYVGLLPPLDAPHHVRKHEWSEFREGVTLGGDRSKGTLVDVGLSQNVLVEQILEQGKRVTVAMGTNRDLTPACIRKVVPPSSPSEEMGSYWGYKVRYASNLSGVINDSPYKEGYDHIIGTSEHGETIISSELILPSFRHLLIAFGGLAGLEESIEEDPNLNGKGANDVFASYFNTCPNQGSRTIRTEEALLISLQYFQDPIRRAGISN

SEQ ID NO: 65226 - protein, 213 aa, Triticum aestivum
  peptide (1)..(213): Ceres Seq. ID no. 13584615
  misc_feature (1)..(203): Pfam Name: Uncharacterized ACR, COG2106 Pfam Description: Uncharacterized ACR, COG2106
  misc_feature (1)..(203): Homolog of NCBI NO: 39579860 NR Description: Hypothetical protein CBG24142 [Caenorhabditis
  misc_feature (1)..(207): Homolog of NCBI NO: 20129839 NR Description: CG12128-PA [Drosophila melanogaster]
  misc_feature (1)..(207): Homolog of NCBI NO: 21428350 NR Description: GM02932p [Drosophila melanogaster]
  misc_feature (1)..(210): Homolog of NCBI NO: 27369948 NR Description: DNA segment, Chr 2, Wayne State University 81,
  misc_feature (1)..(210): Homolog of NCBI NO: 34783965 NR Description: Unknown (protein for IMAGE:6142267) [Homo sapiens]
  misc_feature (1)..(210): Homolog of NCBI NO: 38679912 NR Description: hypothetical protein HSPC109 [Homo sapiens]
  misc_feature (1)..(210): Homolog of NCBI NO: 39794258 NR Description: Unknown (protein for MGC:75017) [Homo sapiens]
  misc_feature (1)..(210): Homolog of NCBI NO: 7512808 NR Description: hypothetical protein DKFZp566D143.1 - human
  misc_feature (1)..(209): Homolog of NCBI NO: 15239710 NR Description: hypothetical protein [Arabidopsis thaliana]
  misc_feature (1)..(192): Homolog of NCBI NO: 38346841 NR Description: OSJNBa0091C12.1 [Oryza sativa (japonica
MHKNFKYVGLLPPLDAPHHVRKHEWSEFREGVTLGGDRSKGTLVDVGLSQNVLVEQILEQGKRVTVAMGTNRDLTPACIRKVVPPSSPSEEMGSYWGYKVRYASNLSGVINDSPYKEGYDHIIGTSEHGETIISSELILPSFRHLLIAFGGLAGLEESIEEDPNLNGKGANDVFASYFNTCPNQGSRTIRTEEALLISLQYFQDPIRRAGISN

SEQ ID NO: 65227 - DNA, 1513 bp, Triticum aestivum
  misc_feature (1)..(1513): Ceres Seq. ID no. 13598548
atagagcgagtcttcttcttcctccctgctctgaccgagatccgctccagtggactcgattagggttagggtttgcctctccgatcgtgaggcgggttgctacatctgccttgttcgtcggattccggtagaatcaaccactcgatcgacttaatttcccccgccggtgctgcctctgttttgccgaagatgctgggcggactttacggcgacctcccgccgcccacctcggcggccggcgacgacgacaagccgaccgcctccgtctggtcgagcgccaccaagatggcaccgcccaccctccgcaagccctccgcgaccttcgcccctcccacgtccctcctcaggaaccagcacccccgccccgccgccgctcccaaggccagcgccgtccaccagcagcagcagcagcagccgccgcaccccctccccctcgcctccgccgtcaccaccaccaccgcagcgtccttccaccccgccctcgtcgccgtgcagtccaccgtgctcgaggagtacgaccccgccaggcccaacgactacgaggactaccgcaaggagaagctcaagcgggccaaggacgccgagatgaagaaggagctcgaccggaggcgccgcgaggaccaggagcgggagagggagcgcgagctgagggaggccgaggcacgcctgcgggaggagcagtccagggcctcctccctcaacatatccggcgaggaagcctggaagaggagggccgccatgagcggcgctggcggcggcgctactcctcagagggtctcgtctccgccccacggcgatgccagtggcttctccatcccaggctcctcctcctctggcttgggcgtgggcgccggcggccagatgaccgctgcccagagaatgatggccaagatggggtggaaggaaggccaggggctcggcaagcaagagcagggaatcacagcgcctctggttgctaggaagactgatcggagggcaggggttattgtcgatgagagcagttccaggaggcccagatcagccaactttgaaggccagcccaccagagtagtgctgctgcgtaacatgattggtccgggcgaggttgacgacgagctggaagacgagattgcctcggagtgctccaagtttggggctgtgttgcgcgtgctgatattcgagatcacccaggcaaacttccccgcagacgaagcagtgaggatcttcgtgctgttcgagaggacagaagattcaaccaaggcgttggtcgaactggaagggcgctactttggcggacgcatagtgcacgccaccttcttcgatgagggaaggttcgagaggaacgagctcgctccgatgcccggcgaagtaccagggttcgactaaaccttcataagcagactaaagaactggacgttggtgtctcgggtgtaatttaatctagagcatgaacgctgtttttctcttttcttttgaggacagtttacggcatgttgacctattgccgttttattattgcagagttgttattgtt

SEQ ID NO: 65228 - protein, 391 aa, Triticum aestivum
  peptide (1)..(391): Ceres Seq. ID no. 13598549
  misc_feature (288)..(367): Pfam Name: RNA recognition motif. (a.k.a. RRM, RBD, or RNP domain) Pfam Description: RNA recognition motif. (a.k.a. RRM, RBD, or RNP
  misc_feature (105)..(269): Homolog of NCBI NO: 30923532 NR Description: CG17540-PB.3 [Drosophila melanogaster]
  misc_feature (113)..(381): Homolog of NCBI NO: 14249678 NR Description: splicing factor (45kD) [Homo sapiens]
  misc_feature (113)..(381): Homolog of NCBI NO: 22779924 NR Description: RIKEN cDNA 2700027J02 [Mus musculus]
  misc_feature (113)..(381): Homolog of NCBI NO: 14290573 NR Description: Unknown (protein for IMAGE:3868191) [Homo sapiens]
  misc_feature (132)..(386): Homolog of NCBI NO: 21666569 NR Description: DNA repair enzyme [Toxoplasma gondii]
  misc_feature (132)..(386): Homolog of NCBI NO: 21666567 NR Description: DNA repair enzyme [Toxoplasma gondii]
  misc_feature (1)..(159): Homolog of NCBI NO: 34913374 NR Description: putative DNA damage repair protein
  misc_feature (1)..(390): Homolog of NCBI NO: 421829 NR Description: DNA-damage repair protein DRT111 precursor -
  misc_feature (1)..(390): Homolog of NCBI NO: 15220757 NR Description: DNA damage repair protein -related [Arabidopsis
  misc_feature (20)..(391): Homolog of NCBI NO: 34913374 NR Description: putative DNA damage repair protein
MLGGLYGDLPPPTSAAGDDDKPTASVWSSATKMAPPTLRKPSATFAPPTSLLRNQHPRPAAAPKASAVHQQQQQQPPHPLPLASAVTTTTAASFHPALVAVQSTVLEEYDPARPNDYEDYRKEKLKRAKDAEMKKELDRRRREDQERERERELREAEARLREEQSRASSLNISGEEAWKRRAAMSGAGGGATPQRVSSPPHGDASGFSIPGSSSSGLGVGAGGQMTAAQRMMAKMGWKEGQGLGKQEQGITAPLVARKTDRRAGVIVDESSSRRPRSANFEGQPTRVVLLRNMIGPGEVDDELEDEIASECSKFGAVLRVLIFEITQANFPADEAVRIFVLFERTEDSTKALVELEGRYFGGRIVHATFFDEGRFERNELAPMPGEVPGFD

SEQ ID NO: 65229 - protein, 359 aa, Triticum aestivum
  peptide (1)..(359): Ceres Seq. ID no. 13598550
  misc_feature (256)..(335): Pfam Name: RNA recognition motif. (a.k.a. RRM, RBD, or RNP domain) Pfam Description: RNA recognition motif. (a.k.a. RRM, RBD, or RNP
  misc_feature (73)..(237): Homolog of NCBI NO: 30923532 NR Description: CG17540-PB.3 [Drosophila melanogaster]
  misc_feature (81)..(349): Homolog of NCBI NO: 14249678 NR Description: splicing factor (45kD) [Homo sapiens]
  misc_feature (81)..(349): Homolog of NCBI NO: 22779924 NR Description: RIKEN cDNA 2700027J02 [Mus musculus]
  misc_feature (81)..(349): Homolog of NCBI NO: 14290573 NR Description: Unknown (protein for IMAGE:3868191) [Homo sapiens]
  misc_feature (100)..(354): Homolog of NCBI NO: 21666569 NR Description: DNA repair enzyme [Toxoplasma gondii]
  misc_feature (100)..(354): Homolog of NCBI NO: 21666567 NR Description: DNA repair enzyme [Toxoplasma gondii]
  misc_feature (1)..(127): Homolog of NCBI NO: 34913374 NR Description: putative DNA damage repair protein
  misc_feature (1)..(358): Homolog of NCBI NO: 421829 NR Description: DNA-damage repair protein DRT111 precursor -
  misc_feature (1)..(358): Homolog of NCBI NO: 15220757 NR Description: DNA damage repair protein -related [Arabidopsis
  misc_feature (1)..(359): Homolog of NCBI NO: 34913374 NR Description: putative DNA damage repair protein
MAPPTLRKPSATFAPPTSLLRNQHPRPAAAPKASAVHQQQQQQPPHPLPLASAVTTTTAASFHPALVAVQSTVLEEYDPARPNDYEDYRKEKLKRAKDAEMKKELDRRRREDQERERERELREAEARLREEQSRASSLNISGEEAWKRRAAMSGAGGGATPQRVSSPPHGDASGFSIPGSSSSGLGVGAGGQMTAAQRMMAKMGWKEGQGLGKQEQGITAPLVARKTDRRAGVIVDESSSRRPRSANFEGQPTRVVLLRNMIGPGEVDDELEDEIASECSKFGAVLRVLIFEITQANFPADEAVRIFVLFERTEDSTKALVELEGRYFGGRIVHATFFDEGRFERNELAPMPGEVPGFD

SEQ ID NO: 65230 - protein, 259 aa, Triticum aestivum
  peptide (1)..(259): Ceres Seq. ID no. 13598551
  misc_feature (156)..(235): Pfam Name: RNA recognition motif. (a.k.a. RRM, RBD, or RNP domain) Pfam Description: RNA recognition motif. (a.k.a. RRM, RBD, or RNP
  misc_feature (1)..(137): Homolog of NCBI NO: 30923532 NR Description: CG17540-PB.3 [Drosophila melanogaster]
  misc_feature (1)..(249): Homolog of NCBI NO: 14249678 NR Description: splicing factor (45kD) [Homo sapiens]
  misc_feature (1)..(249): Homolog of NCBI NO: 22779924 NR Description: RIKEN cDNA 2700027J02 [Mus musculus]
  misc_feature (1)..(249): Homolog of NCBI NO: 14290573 NR Description: Unknown (protein for IMAGE:3868191) [Homo sapiens]
  misc_feature (1)..(254): Homolog of NCBI NO: 21666569 NR Description: DNA repair enzyme [Toxoplasma gondii]
  misc_feature (1)..(254): Homolog of NCBI NO: 21666567 NR Description: DNA repair enzyme [Toxoplasma gondii]
  misc_feature (1)..(27): Homolog of NCBI NO: 34913374 NR Description: putative DNA damage repair protein
  misc_feature (1)..(258): Homolog of NCBI NO: 421829 NR Description: DNA-damage repair protein DRT111 precursor -
  misc_feature (1)..(258): Homolog of NCBI NO: 15220757 NR Description: DNA damage repair protein -related [Arabidopsis
  misc_feature (1)..(259): Homolog of NCBI NO: 34913374 NR Description: putative DNA damage repair protein
MKKELDRRRREDQERERERELREAEARLREEQSRASSLNISGEEAWKRRAAMSGAGGGATPQRVSSPPHGDASGFSIPGSSSSGLGVGAGGQMTAAQRMMAKMGWKEGQGLGKQEQGITAPLVARKTDRRAGVIVDESSSRRPRSANFEGQPTRVVLLRNMIGPGEVDDELEDEIASECSKFGAVLRVLIFEITQANFPADEAVRIFVLFERTEDSTKALVELEGRYFGGRIVHATFFDEGRFERNELAPMPGEVPGFD

SEQ ID NO: 65231 - DNA, 1031 bp, Triticum aestivum
  misc_feature (1)..(1031): Ceres Seq. ID no. 13585449
atttgcatttgatcacgcctctcaagtctacgcccatccgtctcacagcctctcggtctgggagacatcggctcaaagattactggagaaatggagacgagcgtgatcgtcctgtccgtcgtggtaggattgctcggggtcggaagcgccgtgctggggttcatcgccgagggcaccaagctcgagcggaatgacatcggggtgtccaagaccgagtgcgtgtaccccggcaacccggcgttcgcgctggggctggtcgcggcgctcctgctgctggcggcccagatcaccgtctcggccgccggccgctgctgcggctgctgcaagccccggggcgccgccttctccgcgtccaggcggaacatcggcgtcgtcttcgccgtcctctcatgggtggcgacggtgatcgcggagatctacttcgtgcagggcgcggcgtggaacgcgccggtgacgcgcgaggtcaacacggggtgctacttcgtcagggacggcgtgttcaggagggcggccatcctgagcatcatcgcaaccgtgctcgggatcaagtcctacttcttgcttcgcgccgctgcggccacggcggcggcggcggctgctgctgtgccaggatacccgggggccgtggcggggccgtcgttggcgggcgagcccaagcccgacgggatcgcgatgggtcaccctgctccgatgtacgggcaggcgccgtacgcgcactaccctccgcctccgaacgcgcaggggtacgggcagtacccgccccctccaaacgcgcaggggtatggacagtaccctcctcctgctcaggggtacgggcacggacactgattccagcccgctgctccccctcagggtcaaggatacgggcaagccgtgtagattgatcactggcctatgtgcaggcgtgctatgttcttctgtctctagtagaattctgctgcgtaaatcaccacacgggtcacggctcgtaggctgttcccgttgtggtgaatgatgatcgtctctgcttggaagtgcaaatttgagctttg

SEQ ID NO: 65232 - protein, 245 aa, Triticum aestivum
  peptide (1)..(245): Ceres Seq. ID no. 13585450
  misc_feature (174)..(245): Homolog of NCBI NO: 34907166 NR Description: P0423A12.20 [Oryza sativa (japonica
  misc_feature (5)..(166): Homolog of NCBI NO: 15225221 NR Description: expressed protein [Arabidopsis thaliana]
  misc_feature (166)..(245): Homolog of NCBI NO: 34907166 NR Description: P0423A12.20 [Oryza sativa (japonica
  misc_feature (1)..(170): Homolog of NCBI NO: 18391509 NR Description: expressed protein [Arabidopsis thaliana]
  misc_feature (3)..(172): Homolog of NCBI NO: 22748411 NR Description: hypothetical protein [Oryza sativa (japonica
  misc_feature (173)..(245): Homolog of NCBI NO: 323048 NR Description: surface antigen - Trypanosoma brucei
  misc_feature (173)..(245): Homolog of NCBI NO: 295376 NR Description: surface glycoprotein
  misc_feature (39)..(176): Homolog of NCBI NO: 10177066 NR Description: dbj|BAA92731.1~gene_id:MKP11.6~similar to unknown
  misc_feature (1)..(209): Homolog of NCBI NO: 34897938 NR Description: ESTs AU082454(S3638),D41267(S3638) correspond to region of the predicted gene.~Similar to Arabidopsis thaliana DNA
  misc_feature (1)..(176): Homolog of NCBI NO: 18418215 NR Description: expressed protein [Arabidopsis thaliana]
METSVIVLSVVVGLLGVGSAVLGFIAEGTKLERNDIGVSKTECVYPGNPAFALGLVAALLLLAAQITVSAAGRCCGCCKPRGAAFSASRRNIGVVFAVLSWVATVIAEIYFVQGAAWNAPVTREVNTGCYFVRDGVFRRAAILSIIATVLGIKSYFLLRAAAATAAAAAAAVPGYPGAVAGPSLAGEPKPDGIAMGHPAPMYGQAPYAHYPPPPNAQGYGQYPPPPNAQGYGQYPPPAQGYGHGH

SEQ ID NO: 65233 - protein, 164 aa, Triticum aestivum
  peptide (1)..(164): Ceres Seq. ID no. 13585451
MGGDGDRGDLLRAGRGVERAGDARGQHGVLLRQGRRVQEGGHPEHHRNRARDQVLLLASRRCGHGGGGGCCCARIPGGRGGAVVGGRAQARRDRDGSPCSDVRAGAVRALPSASERAGVRAVPAPSKRAGVWTVPSSCSGVRARTLIPARCSPSGSRIRASRVD

SEQ ID NO: 65234 - DNA, 1546 bp, Triticum aestivum
  misc_feature (1)..(1546): Ceres Seq. ID no. 13584616
atcccctctcccaccccaccaatctaccgtcgccggaccaggcgcgggccggggcgcgcgatgctgccgcagcagagccaggccgcggcgatgatgcagcaggcggccgcgatgcagtccatgtacgcgatgccgccgccgcctcaccaccaccacctcctcggcgccgcgccgccgcagcagatagagccaattctcactggaaatctgccacctggttttgatacaagtacatgccgcagtgtatatgtcggcaatattcatgttcaagtgactgaggcacttctccgagaggtttttcagagtgctggttcagttgacggatgcaagcttataagaaaagagaagtcctcatatggttttgttgactactacgaacgcggatcagctgccctagcaattttgacacttaacgggaagcaaatttttgggcagcctatcagagttaattgggcatatgctagcggtcagagggaggatacaacagaccatttccatatttttgttggtgatcttagccctgaggtcacggattctgcattatttgcattcttctcagcatattcccctaactgctctgatgctcgagtaatgtgggaccaaaagaccggaagatcaagaggttatggctttgtttccttcaggaatcaacaggatgcgcagagtgccataaatgacttaaatggtcagtggcttggaaatcggcagattcgttgcaactgggcaacaaaaggtgccaacagtggcgaggaccagctaacatcagattcgaaaagtatagctgatgtaaataacaatttcacagaaaatgcaaagcagaaatcaaacgaagatgctcccgagaataatccactgtacagaactgtttatgttgggaaccttgctcacgaggttactcaagacgtgcttcaccgtttcttccatgcacttggtgctggagccatcgaggaggtgcgtgtccagcatggcaaaggctttggttttgtcaagtacagcaatcatgccgaaactgcccttgcaattcagacgggtaatggtcgtattttgggtggtaaaccagtcaagtgttcctggggcaacaagcctacaccccctggtaccacctctgcgccactgccccctcctgctgctcctagccaccccgctgccgccgatctcgtagcgtatcaacgtgctattgcgatgagcaagatggcttcaacccaggcattgatgcaggctcagcatctcaggcacgcagccatggggatgggtgtaggtgcgagtcaggcgatgtacgatggtactttccagaacgtcggtgcctcgcagcagcaacagcagcagcagcagcagctcatgtactattaattccagccttggagggagctcatctttgtaatttgacccggattttattttttcttttctatcttcgtcgtgtctatatgcagtgtgacactatatgtcggtgttgccgtctggctgtgttggtagtgcaccgaatctgtgtctgtagtgatgcaagttgaccggttaatatcgaattttatgttattttctcgtg

SEQ ID NO: 65235 - protein, 449 aa, Triticum aestivum
  peptide (1)..(449): Ceres Seq. ID no. 13584617
  misc_feature (167)..(239): Pfam Name: RNA recognition motif. (a.k.a. RRM, RBD, or RNP domain) Pfam Description: RNA recognition motif. (a.k.a. RRM, RBD, or RNP
  misc_feature (19)..(449): Homolog of NCBI NO: 15221031 NR Description: oligouridylate binding protein (UBP1), putative
  misc_feature (24)..(437): Homolog of NCBI NO: 6996560 NR Description: oligouridylate binding protein [Nicotiana
  misc_feature (24)..(449): Homolog of NCBI NO: 18394471 NR Description: oligouridylate binding protein (UBP1), putative
  misc_feature (24)..(449): Homolog of NCBI NO: 21593280 NR Description: oligouridylate binding protein, putative
  misc_feature (24)..(449): Homolog of NCBI NO: 15231783 NR Description: oligouridylate binding protein (UBP1), putative
  misc_feature (351)..(449): Homolog of NCBI NO: 23928438 NR Description: putative oligouridylate binding protein [Zea mays]
  misc_feature (55)..(357): Homolog of NCBI NO: 23928438 NR Description: putative oligouridylate binding protein [Zea mays]
  misc_feature (356)..(449): Homolog of NCBI NO: 22208507 NR Description: putative oligouridylate binding protein [Sorghum
  misc_feature (21)..(355): Homolog of NCBI NO: 22208507 NR Description: putative oligouridylate binding protein [Sorghum
  misc_feature (21)..(449): Homolog of NCBI NO: 23237933 NR Description: putative oligouridylate binding protein
IPSPTPPIYRRRTRRGPGRAMLPQQSQAAAMMQQAAAMQSMYAMPPPPHHHHLLGAAPPQQIEPILTGNLPPGFDTSTCRSVYVGNIHVQVTEALLREVFQSAGSVDGCKLIRKEKSSYGFVDYYERGSAALAILTLNGKQIFGQPIRVNWAYASGQREDTTDHFHIFVGDLSPEVTDSALFAFFSAYSPNCSDARVMWDQKTGRSRGYGFVSFRNQQDAQSAINDLNGQWLGNRQIRCNWATKGANSGEDQLTSDSKSIADVNNNFTENAKQKSNEDAPENNPLYRTVYVGNLAHEVTQDVLHRFFHALGAGAIEEVRVQHGKGFGFVKYSNHAETALAIQTGNGRILGGKPVKCSWGNKPTPPGTTSAPLPPPAAPSHPAAADLVAYQRAIAMSKMASTQALMQAQHLRHAAMGMGVGASQAMYDGTFQNVGASQQQQQQQQQLMYY

SEQ ID NO: 65236 - protein, 429 aa, Triticum aestivum
  peptide (1)..(429): Ceres Seq. ID no. 13584618
  misc_feature (147)..(219): Pfam Name: RNA recognition motif. (a.k.a. RRM, RBD, or RNP domain) Pfam Description: RNA recognition motif. (a.k.a. RRM, RBD, or RNP
  misc_feature (1)..(429): Homolog of NCBI NO: 15221031 NR Description: oligouridylate binding protein (UBP1), putative
  misc_feature (4)..(417): Homolog of NCBI NO: 6996560 NR Description: oligouridylate binding protein [Nicotiana
  misc_feature (4)..(429): Homolog of NCBI NO: 18394471 NR Description: oligouridylate binding protein (UBP1), putative
  misc_feature (4)..(429): Homolog of NCBI NO: 21593280 NR Description: oligouridylate binding protein, putative
  misc_feature (4)..(429): Homolog of NCBI NO: 15231783 NR Description: oligouridylate binding protein (UBP1), putative
  misc_feature (331)..(429): Homolog of NCBI NO: 23928438 NR Description: putative oligouridylate binding protein [Zea mays]
  misc_feature (35)..(337): Homolog of NCBI NO: 23928438 NR Description: putative oligouridylate binding protein [Zea mays]
  misc_feature (336)..(429): Homolog of NCBI NO: 22208507 NR Description: putative oligouridylate binding protein [Sorghum
  misc_feature (1)..(335): Homolog of NCBI NO: 22208507 NR Description: putative oligouridylate binding protein [Sorghum
  misc_feature (1)..(429): Homolog of NCBI NO: 23237933 NR Description: putative oligouridylate binding protein
MLPQQSQAAAMMQQAAAMQSMYAMPPPPHHHHLLGAAPPQQIEPILTGNLPPGFDTSTCRSVYVGNIHVQVTEALLREVFQSAGSVDGCKLIRKEKSSYGFVDYYERGSAALAILTLNGKQIFGQPIRVNWAYASGQREDTTDHFHIFVGDLSPEVTDSALFAFFSAYSPNCSDARVMWDQKTGRSRGYGFVSFRNQQDAQSAINDLNGQWLGNRQIRCNWATKGANSGEDQLTSDSKSIADVNNNFTENAKQKSNEDAPENNPLYRTVYVGNLAHEVTQDVLHRFFHALGAGAIEEVRVQHGKGFGFVKYSNHAETALAIQTGNGRILGGKPVKCSWGNKPTPPGTTSAPLPPPAAPSHPAAADLVAYQRAIAMSKMASTQALMQAQHLRHAAMGMGVGASQAMYDGTFQNVGASQQQQQQQQQLMYY

SEQ ID NO: 65237 - protein, 419 aa, Triticum aestivum
  peptide (1)..(419): Ceres Seq. ID no. 13584619
  misc_feature (137)..(209): Pfam Name: RNA recognition motif. (a.k.a. RRM, RBD, or RNP domain) Pfam Description: RNA recognition motif. (a.k.a. RRM, RBD, or RNP
  misc_feature (1)..(419): Homolog of NCBI NO: 15221031 NR Description: oligouridylate binding protein (UBP1), putative
  misc_feature (1)..(407): Homolog of NCBI NO: 6996560 NR Description: oligouridylate binding protein [Nicotiana
  misc_feature (1)..(419): Homolog of NCBI NO: 18394471 NR Description: oligouridylate binding protein (UBP1), putative
  misc_feature (1)..(419): Homolog of NCBI NO: 21593280 NR Description: oligouridylate binding protein, putative
  misc_feature (1)..(419): Homolog of NCBI NO: 15231783 NR Description: oligouridylate binding protein (UBP1), putative
  misc_feature (321)..(419): Homolog of NCBI NO: 23928438 NR Description: putative oligouridylate binding protein [Zea mays]
  misc_feature (25)..(327): Homolog of NCBI NO: 23928438 NR Description: putative oligouridylate binding protein [Zea mays]
  misc_feature (326)..(419): Homolog of NCBI NO: 22208507 NR Description: putative oligouridylate binding protein [Sorghum
  misc_feature (1)..(325): Homolog of NCBI NO: 22208507 NR Description: putative oligouridylate binding protein [Sorghum
  misc_feature (1)..(419): Homolog of NCBI NO: 23237933 NR Description: putative oligouridylate binding protein
MMQQAAAMQSMYAMPPPPHHHHLLGAAPPQQIEPILTGNLPPGFDTSTCRSVYVGNIHVQVTEALLREVFQSAGSVDGCKLIRKEKSSYGFVDYYERGSAALAILTLNGKQIFGQPIRVNWAYASGQREDTTDHFHIFVGDLSPEVTDSALFAFFSAYSPNCSDARVMWDQKTGRSRGYGFVSFRNQQDAQSAINDLNGQWLGNRQIRCNWATKGANSGEDQLTSDSKSIADVNNNFTENAKQKSNEDAPENNPLYRTVYVGNLAHEVTQDVLHRFFHALGAGAIEEVRVQHGKGFGFVKYSNHAETALAIQTGNGRILGGKPVKCSWGNKPTPPGTTSAPLPPPAAPSHPAAADLVAYQRAIAMSKMASTQALMQAQHLRHAAMGMGVGASQAMYDGTFQNVGASQQQQQQQQQLMYY

SEQ ID NO: 65238 - DNA, 1896 bp, Triticum aestivum
  misc_feature (1)..(1896): Ceres Seq. ID no. 13584620
atccagtggatcccggtgaacggcacatggcggctaccaactctcgatcccctttcttcttcctcctcgcccgaaccccagctactctccatcttgtgtaatcgctacttgatcatgtatctgtgagtgagattgccaccatatattcgagctactactattgtgtaccttatatttggtatcagtcgccaccaccatcctctccgcagcgcgctctggctcacttcatcgagacgcgccgactccgccaagcgcgcctgcaactggaacacatggatccagcggtcaagtcctacctcgacaagctctcggctacgatggaggccaacacgacggctctgacggtgatcacctcccgtctcgacgatctagcggcgtggcggcctgatctggagaagtgcgtcgccgatctaggggaagcggtggctgcgctgcagcaagggcgcccgggctccaccaacggcgagggtacacaggcgccggcaccaacggcgccactgccagcgactcgtgccacggcaagtcgtgtcgctgaaggtgcggcgggcgcaccccacgggtccattgaccatggcgagttccacctgcaacgagggtcgacggtggtgtcatcccagacgccgccgccactcccgaccaacggtcagctcaaaatcccgtccccaaattctcttccatcgccttttgcgcatgctagtcagatgttagcggggctaggacaggcgcacccatccatcgctttccctcaattctcgagggagaatccaaatctctggaaaaccatgtgtgagcagtactttaacatgtttggaatacacgaatacttttaggttccgatggtggcgctgaatttttcagggcctgctgccatttggctgcaatccatacagaaaaaactgggatcatttacatgggaatcatttgctgccttgctatgcactagatttgggcgtgatacgcaccgaaatctaatccgtcggttctacaccattaagcagacttcctcaatagctaattttattgagaaatttgagcttattacaaatcacttgagttcatattcagattcaattcacccctactatttccttactcgttttgtggagggactgaggccggacatacgcgcggtggtcatagtgcagcggccgccggacctggacacagcttgtgctctagctctgctccaggaggaggtggctgatggagcaggcctggagtcgtcgcggcagttccactaccagtcacggcctccaaaggtgaacacgcgccctcccgcggcgctgccacttccaccaccatcgggtcgcccaccaccaccagctggggcggccgatcggcgtgggactgaagccgctcgagctgaagcggcgaaaatcaagactctgcgcgactacagaagagcgcgggggctatgcttcaagtgtggcgaacgatggggtcatgaccacacctgacccacgtcagtccagctccatgtggtcgaggaactcctggagctgtttggcatcgacgcagtcacggatcagcagagcttgccagcggacgagcaacagcaagatatagtcatggcgatctcatgatctgccgtgacgggaggggtgtcatctaaagctttttagctccgtgcttggattcaaggccgcgaagtgttgatgctcgtcgactccggaagcacaacttcttcttcctcctcgcccgaaccctagttactctcgatcttgtgtaatcgctacttgatcgtgtatctgtgagtgagattgccaccatatattcgagctactactactatgtaaaaaaaaaaaaaaaaaaaaaaaaaaaaaaaaaaaaaaaaaaaaaaaaaaaaaaaaaaaaccaaaaaaaaaaaaaaaaaggtttatcaataccgccaacctc

SEQ ID NO: 65239 - protein, 206 aa, Triticum aestivum
  peptide (1)..(206): Ceres Seq. ID no. 13584621
  misc_feature (1)..(93): Pfam Name: Retrotransposon gag protein Pfam Description: Retrotransposon gag protein
  misc_feature (1)..(206): Homolog of NCBI NO: 38567864 NR Description: OSJNBa0091D06.2 [Oryza sativa (japonica
  misc_feature (1)..(206): Homolog of NCBI NO: 18568269 NR Description: putative gag-pol polyprotein [Zea mays]
  misc_feature (1)..(206): Homolog of NCBI NO: 38567914 NR Description: OSJNBa0088I22.10 [Oryza sativa (japonica
  misc_feature (1)..(206): Homolog of NCBI NO: 38345213 NR Description: OSJNBb0043H09.2 [Oryza sativa (japonica
  misc_feature (1)..(206): Homolog of NCBI NO: 38346675 NR Description: OSJNBa0079C19.28 [Oryza sativa (japonica
  misc_feature (1)..(206): Homolog of NCBI NO: 15451606 NR Description: Putative mutator-like transposase [Oryza sativa]
  misc_feature (1)..(206): Homolog of NCBI NO: 38568032 NR Description: OSJNBa0065J03.2 [Oryza sativa (japonica
  misc_feature (1)..(206): Homolog of NCBI NO: 32489310 NR Description: OSJNBa0060B20.14 [Oryza sativa (japonica
  misc_feature (1)..(206): Homolog of NCBI NO: 37536012 NR Description: putative gag-pol polyprotein
  misc_feature (1)..(206): Homolog of NCBI NO: 38346427 NR Description: OSJNBa0019J05.12 [Oryza sativa (japonica
MVALNFSGPAAIWLQSIQKKLGSFTWESFAALLCTRFGRDTHRNLIRRFYTIKQTSSIANFIEKFELITNHLSSYSDSIHPYYFLTRFVEGLRPDIRAVVIVQRPPDLDTACALALLQEEVADGAGLESSRQFHYQSRPPKVNTRPPAALPLPPPSGRPPPPAGAADRRGTEAARAEAAKIKTLRDYRRARGLCFKCGERWGHDHT

SEQ ID NO: 65240 - protein, 185 aa, Triticum aestivum
  peptide (1)..(185): Ceres Seq. ID no. 13584622
  misc_feature (1)..(185): Homolog of NCBI NO: 21671877 NR Description: Putative retroelement [Oryza sativa (japonica
  misc_feature (1)..(185): Homolog of NCBI NO: 18568269 NR Description: putative gag-pol polyprotein [Zea mays]
  misc_feature (35)..(185): Homolog of NCBI NO: 38567914 NR Description: OSJNBa0088I22.10 [Oryza sativa (japonica
  misc_feature (128)..(185): Homolog of NCBI NO: 38345213 NR Description: OSJNBb0043H09.2 [Oryza sativa (japonica
  misc_feature (128)..(185): Homolog of NCBI NO: 38346675 NR Description: OSJNBa0079C19.28 [Oryza sativa (japonica
  misc_feature (111)..(185): Homolog of NCBI NO: 15451606 NR Description: Putative mutator-like transposase [Oryza sativa]
  misc_feature (148)..(185): Homolog of NCBI NO: 38568032 NR Description: OSJNBa0065J03.2 [Oryza sativa (japonica
  misc_feature (35)..(185): Homolog of NCBI NO: 32489310 NR Description: OSJNBa0060B20.14 [Oryza sativa (japonica
  misc_feature (4)..(185): Homolog of NCBI NO: 37536012 NR Description: putative gag-pol polyprotein
  misc_feature (148)..(185): Homolog of NCBI NO: 38346427 NR Description: OSJNBa0019J05.12 [Oryza sativa (japonica
MDPAVKSYLDKLSATMEANTTALTVITSRLDDLAAWRPDLEKCVADLGEAVAALQQGRPGSTNGEGTQAPAPTAPLPATRATASRVAEGAAGAPHGSIDHGEFHLQRGSTVVSSQTPPPLPTNGQLKIPSPNSLPSPFAHASQMLAGLGQAHPSIAFPQFSRENPNLWKTMCEQYFNMFGIHEYF

SEQ ID NO: 65241 - protein, 170 aa, Triticum aestivum
  peptide (1)..(170): Ceres Seq. ID no. 13584623
  misc_feature (1)..(170): Homolog of NCBI NO: 21671877 NR Description: Putative retroelement [Oryza sativa (japonica
  misc_feature (1)..(170): Homolog of NCBI NO: 18568269 NR Description: putative gag-pol polyprotein [Zea mays]
  misc_feature (20)..(170): Homolog of NCBI NO: 38567914 NR Description: OSJNBa0088I22.10 [Oryza sativa (japonica
  misc_feature (113)..(170): Homolog of NCBI NO: 38345213 NR Description: OSJNBb0043H09.2 [Oryza sativa (japonica
  misc_feature (113)..(170): Homolog of NCBI NO: 38346675 NR Description: OSJNBa0079C19.28 [Oryza sativa (japonica
  misc_feature (96)..(170): Homolog of NCBI NO: 15451606 NR Description: Putative mutator-like transposase [Oryza sativa]
  misc_feature (133)..(170): Homolog of NCBI NO: 38568032 NR Description: OSJNBa0065J03.2 [Oryza sativa (japonica
  misc_feature (20)..(170): Homolog of NCBI NO: 32489310 NR Description: OSJNBa0060B20.14 [Oryza sativa (japonica
  misc_feature (1)..(170): Homolog of NCBI NO: 37536012 NR Description: putative gag-pol polyprotein
  misc_feature (133)..(170): Homolog of NCBI NO: 38346427 NR Description: OSJNBa0019J05.12 [Oryza sativa (japonica
MEANTTALTVITSRLDDLAAWRPDLEKCVADLGEAVAALQQGRPGSTNGEGTQAPAPTAPLPATRATASRVAEGAAGAPHGSIDHGEFHLQRGSTVVSSQTPPPLPTNGQLKIPSPNSLPSPFAHASQMLAGLGQAHPSIAFPQFSRENPNLWKTMCEQYFNMFGIHEYF

SEQ ID NO: 65242 - DNA, 1783 bp, Triticum aestivum
  misc_feature (1)..(1783): Ceres Seq. ID no. 14316025
acgcaaaaagggacgaaaaaccaaacttctcccgcaagactggctcgcaccaaatcgcatcgcccttggagtcgcccctcactgatcccttggcgtcctgcttcccaagccacagcccacaggcccccacgcccagctcctcccgctccgatttcacagcctgcgagctagccatgtcgattcggccgctgttgctgccggagccgccgggcgaggtggatcgggcgccggagatcttcgcgggtggcgtggccgcggtgcgccgcgcagttgtcatcgggaacggctgcgccggcgccgagaaccagtgcctcggcctcgtccgcgccctcggcctggccgaccgcctcacgctctaccgtattatcaggccaaccggaggaatcaacaagtggctgcactttctccctatctccttgcataaaatggtggaccaagtactcagacatatactgtctaacacgacattcacaacactgtttcaaggaaaactgtcggcaccttatcctgtcagtaatgttcaatctcttggattgtcttctgtactggaagcagattccaaaaggatagtgacaatggtccgtgataccttcgagaaggaaggcctggcgatagttgttgcttgtggccgtgataccataccatatgcaagctctgtaaggtgtttagctccagataatgtctttgtcattcagatacaacaccccaggtatcgccttgataggtttgatttggtggtgactcctcgccatgattactacgctttaactgcaaagggacaacaagaagtaccgtggctttttcggagatggattactccacgagaaccacccggtcctaatgtggtcctgacgtctggagcacttcaccaagcagattctgctgcactacgcattgctgctacaaactggcatgatgaacttgctcccttgccaaagccattggtagtagtaaatattggagaaccaacaagaaactgtaattatggtgtagaccttgccaagcagttggtaagctcactgcacaatgtttcagagacctgtggaagtgtcagaatttcattttccaggagaacgccacaaaacgtgtccgatcttatattgagagagttcagcacacatccaaagttctacatttggggtggtgaagaacctaacccacacctagggcatcttgcatgggccgatgctttcatcataacagcagactcgataagtatgctaagtgaggcgtgcagcactgggaagccggtctatgtcgttggaactgagcattgcaggtggaaattctcagattttcacaacactctgcagaaacgaggggctgttcgtcctttcactggatcagaagatatgtcagacagctggagctaccctcctctgaacgatgccattgatgtggctgcacgggttcgtgaagtgcttgcacaacgtggatggacagtgggttaatagcggtcgaagcagagaaaaagagtgccatttttgctcagttacgttccaagcccagacaattcagagcctgcatttcagttatcttagttgcatctgcatgaggattttttttgccatatgaccgttgcaagacgacatcgcttcttttcaaaagatggctatatttttgggaacatactgtgtaaagttttgagcaatcacacatagacagcagtgtttattcttggcatattcatgcattattgtacctagtgttatgctgtaaagaagccgatagaagtgcgaacggaagttaaaaatctttgtccttggaacgaggtgacatcatg

SEQ ID NO: 65243 - protein, 482 aa, Triticum aestivum
  peptide (1)..(482): Ceres Seq. ID no. 14316026
  misc_feature (92)..(475): Pfam Name: Protein of unknown function (DUF1022) Pfam Description: Protein of unknown function (DUF1022)
  misc_feature (206)..(251): Homolog of NCBI NO: 16127081 NR Description: conserved hypothetical protein [Caulobacter
  misc_feature (264)..(478): Homolog of NCBI NO: 16127081 NR Description: conserved hypothetical protein [Caulobacter
  misc_feature (86)..(451): Homolog of NCBI NO: 9759316 NR Description: gene_id:MBL20.6~similar to unknown
  misc_feature (86)..(161): Homolog of NCBI NO: 18415120 NR Description: expressed protein [Arabidopsis thaliana]
  misc_feature (132)..(481): Homolog of NCBI NO: 18415120 NR Description: expressed protein [Arabidopsis thaliana]
  misc_feature (60)..(119): Homolog of NCBI NO: 9757815 NR Description: gene_id:MWD9.14~similar to unknown
  misc_feature (120)..(481): Homolog of NCBI NO: 9757815 NR Description: gene_id:MWD9.14~similar to unknown
  misc_feature (60)..(481): Homolog of NCBI NO: 18420465 NR Description: expressed protein [Arabidopsis thaliana]
  misc_feature (75)..(246): Homolog of NCBI NO: 38346329 NR Description: OJ000126_13.11 [Oryza sativa (japonica
  misc_feature (281)..(469): Homolog of NCBI NO: 38346329 NR Description: OJ000126_13.11 [Oryza sativa (japonica
AKRDEKPNFSRKTGSHQIASPLESPLTDPLASCFPSHSPQAPTPSSSRSDFTACELAMSIRPLLLPEPPGEVDRAPEIFAGGVAAVRRAVVIGNGCAGAENQCLGLVRALGLADRLTLYRIIRPTGGINKWLHFLPISLHKMVDQVLRHILSNTTFTTLFQGKLSAPYPVSNVQSLGLSSVLEADSKRIVTMVRDTFEKEGLAIVVACGRDTIPYASSVRCLAPDNVFVIQIQHPRYRLDRFDLVVTPRHDYYALTAKGQQEVPWLFRRWITPREPPGPNVVLTSGALHQADSAALRIAATNWHDELAPLPKPLVVVNIGEPTRNCNYGVDLAKQLVSSLHNVSETCGSVRISFSRRTPQNVSDLILREFSTHPKFYIWGGEEPNPHLGHLAWADAFIITADSISMLSEACSTGKPVYVVGTEHCRWKFSDFHNTLQKRGAVRPFTGSEDMSDSWSYPPLNDAIDVAARVREVLAQRGWTVG

SEQ ID NO: 65244 - protein, 425 aa, Triticum aestivum
  peptide (1)..(425): Ceres Seq. ID no. 14316027
  misc_feature (35)..(418): Pfam Name: Protein of unknown function (DUF1022) Pfam Description: Protein of unknown function (DUF1022)
  misc_feature (149)..(194): Homolog of NCBI NO: 16127081 NR Description: conserved hypothetical protein [Caulobacter
  misc_feature (207)..(421): Homolog of NCBI NO: 16127081 NR Description: conserved hypothetical protein [Caulobacter
  misc_feature (29)..(394): Homolog of NCBI NO: 9759316 NR Description: gene_id:MBL20.6~similar to unknown
  misc_feature (29)..(104): Homolog of NCBI NO: 18415120 NR Description: expressed protein [Arabidopsis thaliana]
  misc_feature (75)..(424): Homolog of NCBI NO: 18415120 NR Description: expressed protein [Arabidopsis thaliana]
  misc_feature (3)..(62): Homolog of NCBI NO: 9757815 NR Description: gene_id:MWD9.14~similar to unknown
  misc_feature (63)..(424): Homolog of NCBI NO: 9757815 NR Description: gene_id:MWD9.14~similar to unknown
  misc_feature (3)..(424): Homolog of NCBI NO: 18420465 NR Description: expressed protein [Arabidopsis thaliana]
  misc_feature (18)..(189): Homolog of NCBI NO: 38346329 NR Description: OJ000126_13.11 [Oryza sativa (japonica
  misc_feature (224)..(412): Homolog of NCBI NO: 38346329 NR Description: OJ000126_13.11 [Oryza sativa (japonica
MSIRPLLLPEPPGEVDRAPEIFAGGVAAVRRAVVIGNGCAGAENQCLGLVRALGLADRLTLYRIIRPTGGINKWLHFLPISLHKMVDQVLRHILSNTTFTTLFQGKLSAPYPVSNVQSLGLSSVLEADSKRIVTMVRDTFEKEGLAIVVACGRDTIPYASSVRCLAPDNVFVIQIQHPRYRLDRFDLVVTPRHDYYALTAKGQQEVPWLFRRWITPREPPGPNVVLTSGALHQADSAALRIAATNWHDELAPLPKPLVVVNIGEPTRNCNYGVDLAKQLVSSLHNVSETCGSVRISFSRRTPQNVSDLILREFSTHPKFYIWGGEEPNPHLGHLAWADAFIITADSISMLSEACSTGKPVYVVGTEHCRWKFSDFHNTLQKRGAVRPFTGSEDMSDSWSYPPLNDAIDVAARVREVLAQRGWTVG

SEQ ID NO: 65245 - protein, 341 aa, Triticum aestivum
  peptide (1)..(341): Ceres Seq. ID no. 14316028
  misc_feature (1)..(334): Pfam Name: Protein of unknown function (DUF1022) Pfam Description: Protein of unknown function (DUF1022)
  misc_feature (139)..(341): Homolog of NCBI NO: 22968024 NR Description: hypothetical protein [Rhodospirillum rubrum]
  misc_feature (65)..(110): Homolog of NCBI NO: 16127081 NR Description: conserved hypothetical protein [Caulobacter
  misc_feature (123)..(337): Homolog of NCBI NO: 16127081 NR Description: conserved hypothetical protein [Caulobacter
  misc_feature (1)..(310): Homolog of NCBI NO: 9759316 NR Description: gene_id:MBL20.6~similar to unknown
  misc_feature (1)..(20): Homolog of NCBI NO: 18415120 NR Description: expressed protein [Arabidopsis thaliana]
  misc_feature (1)..(340): Homolog of NCBI NO: 18415120 NR Description: expressed protein [Arabidopsis thaliana]
  misc_feature (1)..(340): Homolog of NCBI NO: 9757815 NR Description: gene_id:MWD9.14~similar to unknown
  misc_feature (1)..(340): Homolog of NCBI NO: 18420465 NR Description: expressed protein [Arabidopsis thaliana]
  misc_feature (1)..(105): Homolog of NCBI NO: 38346329 NR Description: OJ000126_13.11 [Oryza sativa (japonica
  misc_feature (140)..(328): Homolog of NCBI NO: 38346329 NR Description: OJ000126_13.11 [Oryza sativa (japonica
MVDQVLRHILSNTTFTTLFQGKLSAPYPVSNVQSLGLSSVLEADSKRIVTMVRDTFEKEGLAIVVACGRDTIPYASSVRCLAPDNVFVIQIQHPRYRLDRFDLVVTPRHDYYALTAKGQQEVPWLFRRWITPREPPGPNVVLTSGALHQADSAALRIAATNWHDELAPLPKPLVVVNIGEPTRNCNYGVDLAKQLVSSLHNVSETCGSVRISFSRRTPQNVSDLILREFSTHPKFYIWGGEEPNPHLGHLAWADAFIITADSISMLSEACSTGKPVYVVGTEHCRWKFSDFHNTLQKRGAVRPFTGSEDMSDSWSYPPLNDAIDVAARVREVLAQRGWTVG

SEQ ID NO: 65246 - DNA, 1097 bp, Triticum aestivum
  misc_feature (1)..(1097): Ceres Seq. ID no. 12625805
gatatccggcatcgccgcgtctctcacataaacgcacgcttccatcgggacaagacagcggcgcgtagcaaagggaacacggcgaggccggcgatggatgtcaagtgccggcgtctggaggggaaggtggccgtcgtgacggcttccacgcagggcatcggcctcgccatcgccgagcgcctcggccgggagggcgccgcggtcgtcatctcctcccgcaagcagaaaaacgtggacgatgcggtggagggcctcagggcaaaggggatcaccgtggtcggggccgtctgccacgtctccaacgccgagcagcgcaagcaccttgttgacacggccgtcaagaatttcggacatattgatattgttgtctccaatgccgctgcaaatccttctgtggatagcatactagagatgaaagagtcagttcttgacaagctatgggacattaatgtcaaagcttctattcttctacttcaggacgccgcaccacatttgaggaagggatcatctgtgatactaatttcttcaattgctggctataatcctgatgcagctttaacgatgtatggtgttacaaagactgccctttttggtctcacgaaggctcttgctactgagatgggcccaaatacccgtgttaactgtatagctcctgggtttgttcctacacgttttgctggtttcctcacaactaatgagaccattagaaatgaacttatcgagaggagcataattaagagattgggtagcgtggaagacatggcttcagccgccgctttcctggcatccgacgatgcatccttcattacagctgaaacaattgttgttgctggaggaacacaatcaagactatagagaagttttgagggtcaatcagccacagtgtcctgatcaataaatatagtgatactagtaggtctagtatacaacatttcaagtgcgcttagatataaacaagatgcagtgtaataaatttgatgttggggtgccatacaatcttgcaaggacgaatgatagtctatcggcattgtggtccgaacatgtattgttgtataacctgtgttcatgtataggaattgcgatgaagtgacagagtg

SEQ ID NO: 65247 - protein, 284 aa, Triticum aestivum
  peptide (1)..(284): Ceres Seq. ID no. 12625806
  misc_feature (32)..(284): Homolog of NCBI NO: 39593247 NR Description: Hypothetical protein CBG09503 [Caenorhabditis
  misc_feature (39)..(284): Homolog of NCBI NO: 27807351 NR Description: NADPH-dependent retinol dehydrogenase/reductase
  misc_feature (39)..(284): Homolog of NCBI NO: 17298119 NR Description: carbonyl reductase/NADP-retinol dehydrogenase
  misc_feature (39)..(284): Homolog of NCBI NO: 11559416 NR Description: NADPH-dependent retinol dehydrogenase/reductase
  misc_feature (37)..(284): Homolog of NCBI NO: 21355319 NR Description: CG10672-PA [Drosophila melanogaster]
  misc_feature (26)..(284): Homolog of NCBI NO: 33337583 NR Description: Hep27-like protein [Homo sapiens]
  misc_feature (39)..(284): Homolog of NCBI NO: 11559412 NR Description: NADPH-dependent retinol dehydrogenase/reductase
  misc_feature (26)..(284): Homolog of NCBI NO: 7023407 NR Description: unnamed protein product [Homo sapiens]
  misc_feature (37)..(284): Homolog of NCBI NO: 33991766 NR Description: Unknown (protein for MGC:65987) [Danio rerio]
  misc_feature (37)..(284): Homolog of NCBI NO: 18412959 NR Description: coded for by A. thaliana cDNA Z18000
DIRHRRVSHINARFHRDKTAARSKGNTARPAMDVKCRRLEGKVAVVTASTQGIGLAIAERLGREGAAVVISSRKQKNVDDAVEGLRAKGITVVGAVCHVSNAEQRKHLVDTAVKNFGHIDIVVSNAAANPSVDSILEMKESVLDKLWDINVKASILLLQDAAPHLRKGSSVILISSIAGYNPDAALTMYGVTKTALFGLTKALATEMGPNTRVNCIAPGFVPTRFAGFLTTNETIRNELIERSIIKRLGSVEDMASAAAFLASDDASFITAETIVVAGGTQSRL

SEQ ID NO: 65248 - protein, 253 aa, Triticum aestivum
  peptide (1)..(253): Ceres Seq. ID no. 12625807
  misc_feature (1)..(253): Homolog of NCBI NO: 39593247 NR Description: Hypothetical protein CBG09503 [Caenorhabditis
  misc_feature (8)..(253): Homolog of NCBI NO: 27807351 NR Description: NADPH-dependent retinol dehydrogenase/reductase
  misc_feature (8)..(253): Homolog of NCBI NO: 17298119 NR Description: carbonyl reductase/NADP-retinol dehydrogenase
  misc_feature (8)..(253): Homolog of NCBI NO: 11559416 NR Description: NADPH-dependent retinol dehydrogenase/reductase
  misc_feature (6)..(253): Homolog of NCBI NO: 21355319 NR Description: CG10672-PA [Drosophila melanogaster]
  misc_feature (1)..(253): Homolog of NCBI NO: 33337583 NR Description: Hep27-like protein [Homo sapiens]
  misc_feature (8)..(253): Homolog of NCBI NO: 11559412 NR Description: NADPH-dependent retinol dehydrogenase/reductase
  misc_feature (1)..(253): Homolog of NCBI NO: 7023407 NR Description: unnamed protein product [Homo sapiens]
  misc_feature (6)..(253): Homolog of NCBI NO: 33991766 NR Description: Unknown (protein for MGC:65987) [Danio rerio]
  misc_feature (6)..(253): Homolog of NCBI NO: 18412959 NR Description: coded for by A. thaliana cDNA Z18000
MDVKCRRLEGKVAVVTASTQGIGLAIAERLGREGAAVVISSRKQKNVDDAVEGLRAKGITVVGAVCHVSNAEQRKHLVDTAVKNFGHIDIVVSNAAANPSVDSILEMKESVLDKLWDINVKASILLLQDAAPHLRKGSSVILISSIAGYNPDAALTMYGVTKTALFGLTKALATEMGPNTRVNCIAPGFVPTRFAGFLTTNETIRNELIERSIIKRLGSVEDMASAAAFLASDDASFITAETIVVAGGTQSRL

SEQ ID NO: 65249 - protein, 147 aa, Triticum aestivum
  peptide (1)..(147): Ceres Seq. ID no. 12625808
  misc_feature (1)..(147): Homolog of NCBI NO: 39593247 NR Description: Hypothetical protein CBG09503 [Caenorhabditis
  misc_feature (1)..(147): Homolog of NCBI NO: 27807351 NR Description: NADPH-dependent retinol dehydrogenase/reductase
  misc_feature (1)..(147): Homolog of NCBI NO: 17298119 NR Description: carbonyl reductase/NADP-retinol dehydrogenase
  misc_feature (1)..(147): Homolog of NCBI NO: 11559416 NR Description: NADPH-dependent retinol dehydrogenase/reductase
  misc_feature (1)..(147): Homolog of NCBI NO: 21355319 NR Description: CG10672-PA [Drosophila melanogaster]
  misc_feature (1)..(147): Homolog of NCBI NO: 33337583 NR Description: Hep27-like protein [Homo sapiens]
  misc_feature (1)..(147): Homolog of NCBI NO: 11559412 NR Description: NADPH-dependent retinol dehydrogenase/reductase
  misc_feature (1)..(147): Homolog of NCBI NO: 7023407 NR Description: unnamed protein product [Homo sapiens]
  misc_feature (1)..(147): Homolog of NCBI NO: 33991766 NR Description: Unknown (protein for MGC:65987) [Danio rerio]
  misc_feature (1)..(147): Homolog of NCBI NO: 18412959 NR Description: coded for by A. thaliana cDNA Z18000
MKESVLDKLWDINVKASILLLQDAAPHLRKGSSVILISSIAGYNPDAALTMYGVTKTALFGLTKALATEMGPNTRVNCIAPGFVPTRFAGFLTTNETIRNELIERSIIKRLGSVEDMASAAAFLASDDASFITAETIVVAGGTQSRL

SEQ ID NO: 65250 - DNA, 1483 bp, Triticum aestivum
  misc_feature (1)..(1483): Ceres Seq. ID no. 13598565
acacacatcgatcagcagcagcctcaagcaaacgcaaactcgtactgctagcccgtgtagtttgttaagcagcaagcttgcatccacacatcgatcggcagaccaccgtggtcaccggacaccaatccaccatgccgtccattgacaaggccaccgacaacggcgagatgaagcagcggcagccggagcaggagctggtctgcgtcacgggggccggaggcttcatcggctcctgggtcgtgaaggagctcctcctccgcggctaccgcgtcaggggaaccgccagggaccccgctgaccaaaagaacgcacacctgctggcgatggagggcgccgaggagaggctcaccctgtgccgggccgacgttcttgactacgacggcctccgcaccgccttccgcggctgccacggcgtcttccacgtcgcctcgccagtctccaacgacccggacctcgtgccggtcgccgtggaggggacgaggaacgtgatcagagcggcggcggacgcgggcgtgcggcgcgtggtgttcacttcgtcctatggcgccgtgcacatggaccccaaccgcaggcccgacgcagtgctcgacgagtcgtgctggagcgactatgagtactgcaaaaacacagggaacatgtactgctgcgccaagatgatggcggagatcacggcgacggaggaggcggccaagaggggcctggagctagcggtggtggtgccgtccatgaccatgggccccatgctgcagcagtcgctcaacttcagcagcagccacgtggcccgctacctcaccggcgcaaagcccacctacccgaatgccgtcgccgcctacaccgacgtccgtgatgtcgcccgcgcgcacgtcttcgtctacgagcacccggacgcgcgcggccgctacctctgcatcggtgccgtgctgcaccgcgcgcatttccttcagctcctcggcgacctctttcctcagtacaacataaccgccaagtgcgaagacgacgacaattccatggccaagccatacaagttctcgaaccggaggctgagggagctcggattagagttcactccgttgagggaaagcttgtacgagacagtgatgtgcttgcagaaaaagggctatctgcctctccccgttgttcccatagcacagaagcgtgcgtacttgtaacagggcaggacaggggataagcccatctgatgaaacaacaagagcaaagccgcaagaacaaaagaagatactatccggattttggagcttcagcatagaattaattgtgtattcctacaaagcacagtgtggcatgtaaatagaattaaaaccacaataagtattttggaacggagggagtactacctccgtctaggtgaataagtcattcgcgcagttctaggtcatcgatttgaggaattaaacatatgctaaaaaaaaaaaaaaaaaagcttatcgataccgtcgacctcgagggggggcccggtacccaa

SEQ ID NO: 65251 - protein, 345 aa, Triticum aestivum
  peptide (1)..(345): Ceres Seq. ID no. 15222372
  misc_feature (25)..(308): Pfam Name: NAD dependent epimerase/dehydratase family Pfam Description: NAD dependent epimerase/dehydratase family
  misc_feature (21)..(337): Homolog of NCBI NO: 10304406 NR Description: cinnamoyl-CoA reductase [Eucalyptus saligna]
  misc_feature (21)..(337): Homolog of NCBI NO: 7431407 NR Description: cinnamoyl-CoA reductase (EC 1.2.1.44) CCR - cider
  misc_feature (21)..(337): Homolog of NCBI NO: 25989515 NR Description: cinnamoyl CoA reductase [Eucalyptus globulus]
  misc_feature (20)..(334): Homolog of NCBI NO: 7239228 NR Description: cinnamoyl CoA reductase; CCR [Populus tremuloides]
  misc_feature (21)..(334): Homolog of NCBI NO: 40233135 NR Description: cinnamoyl CoA reductase [Populus tomentosa]
  misc_feature (21)..(334): Homolog of NCBI NO: 2960364 NR Description: cinnamoyl CoA reductase [Populus balsamifera
  misc_feature (21)..(334): Homolog of NCBI NO: 9998901 NR Description: cinnamoyl-CoA reductase [Populus balsamifera
  misc_feature (20)..(332): Homolog of NCBI NO: 34902518 NR Description: putative cinnamoyl-CoA reductase
  misc_feature (20)..(335): Homolog of NCBI NO: 34902520 NR Description: putative cinnamoyl-CoA reductase
  misc_feature (8)..(345): Homolog of NCBI NO: 18307514 NR Description: cinnamoyl CoA reductase [Oryza sativa]
MPSIDKATDNGEMKQRQPEQELVCVTGAGGFIGSWVVKELLLRGYRVRGTARDPADQKNAHLLAMEGAEERLTLCRADVLDYDGLRTAFRGCHGVFHVASPVSNDPDLVPVAVEGTRNVIRAAADAGVRRVVFTSSYGAVHMDPNRRPDAVLDESCWSDYEYCKNTGNMYCCAKMMAEITATEEAAKRGLELAVVVPSMTMGPMLQQSLNFSSSHVARYLTGAKPTYPNAVAAYTDVRDVARAHVFVYEHPDARGRYLCIGAVLHRAHFLQLLGDLFPQYNITAKCEDDDNSMAKPYKFSNRRLRELGLEFTPLRESLYETVMCLQKKGYLPLPVVPIAQKRAYL

SEQ ID NO: 65252 - protein, 333 aa, Triticum aestivum
  peptide (1)..(333): Ceres Seq. ID no. 15222373
  misc_feature (13)..(296): Pfam Name: NAD dependent epimerase/dehydratase family Pfam Description: NAD dependent epimerase/dehydratase family
  misc_feature (9)..(325): Homolog of NCBI NO: 10304406 NR Description: cinnamoyl-CoA reductase [Eucalyptus saligna]
  misc_feature (9)..(325): Homolog of NCBI NO: 7431407 NR Description: cinnamoyl-CoA reductase (EC 1.2.1.44) CCR - cider
  misc_feature (9)..(325): Homolog of NCBI NO: 25989515 NR Description: cinnamoyl CoA reductase [Eucalyptus globulus]
  misc_feature (8)..(322): Homolog of NCBI NO: 7239228 NR Description: cinnamoyl CoA reductase; CCR [Populus tremuloides]
  misc_feature (9)..(322): Homolog of NCBI NO: 40233135 NR Description: cinnamoyl CoA reductase [Populus tomentosa]
  misc_feature (9)..(322): Homolog of NCBI NO: 2960364 NR Description: cinnamoyl CoA reductase [Populus balsamifera
  misc_feature (9)..(322): Homolog of NCBI NO: 9998901 NR Description: cinnamoyl-CoA reductase [Populus balsamifera
  misc_feature (8)..(320): Homolog of NCBI NO: 34902518 NR Description: putative cinnamoyl-CoA reductase
  misc_feature (8)..(323): Homolog of NCBI NO: 34902520 NR Description: putative cinnamoyl-CoA reductase
  misc_feature (1)..(333): Homolog of NCBI NO: 18307514 NR Description: cinnamoyl CoA reductase [Oryza sativa]
MKQRQPEQELVCVTGAGGFIGSWVVKELLLRGYRVRGTARDPADQKNAHLLAMEGAEERLTLCRADVLDYDGLRTAFRGCHGVFHVASPVSNDPDLVPVAVEGTRNVIRAAADAGVRRVVFTSSYGAVHMDPNRRPDAVLDESCWSDYEYCKNTGNMYCCAKMMAEITATEEAAKRGLELAVVVPSMTMGPMLQQSLNFSSSHVARYLTGAKPTYPNAVAAYTDVRDVARAHVFVYEHPDARGRYLCIGAVLHRAHFLQLLGDLFPQYNITAKCEDDDNSMAKPYKFSNRRLRELGLEFTPLRESLYETVMCLQKKGYLPLPVVPIAQKRAYL

SEQ ID NO: 65253 - protein, 281 aa, Triticum aestivum
  peptide (1)..(281): Ceres Seq. ID no. 15222374
  misc_feature (1)..(244): Pfam Name: NAD dependent epimerase/dehydratase family Pfam Description: NAD dependent epimerase/dehydratase family
  misc_feature (1)..(273): Homolog of NCBI NO: 10304406 NR Description: cinnamoyl-CoA reductase [Eucalyptus saligna]
  misc_feature (1)..(273): Homolog of NCBI NO: 7431407 NR Description: cinnamoyl-CoA reductase (EC 1.2.1.44) CCR - cider
  misc_feature (1)..(273): Homolog of NCBI NO: 25989515 NR Description: cinnamoyl CoA reductase [Eucalyptus globulus]
  misc_feature (1)..(270): Homolog of NCBI NO: 7239228 NR Description: cinnamoyl CoA reductase; CCR [Populus tremuloides]
  misc_feature (1)..(270): Homolog of NCBI NO: 40233135 NR Description: cinnamoyl CoA reductase [Populus tomentosa]
  misc_feature (1)..(270): Homolog of NCBI NO: 2960364 NR Description: cinnamoyl CoA reductase [Populus balsamifera
  misc_feature (1)..(270): Homolog of NCBI NO: 9998901 NR Description: cinnamoyl-CoA reductase [Populus balsamifera
  misc_feature (1)..(268): Homolog of NCBI NO: 34902518 NR Description: putative cinnamoyl-CoA reductase
  misc_feature (1)..(271): Homolog of NCBI NO: 34902520 NR Description: putative cinnamoyl-CoA reductase
  misc_feature (1)..(281): Homolog of NCBI NO: 18307514 NR Description: cinnamoyl CoA reductase [Oryza sativa]
MEGAEERLTLCRADVLDYDGLRTAFRGCHGVFHVASPVSNDPDLVPVAVEGTRNVIRAAADAGVRRVVFTSSYGAVHMDPNRRPDAVLDESCWSDYEYCKNTGNMYCCAKMMAEITATEEAAKRGLELAVVVPSMTMGPMLQQSLNFSSSHVARYLTGAKPTYPNAVAAYTDVRDVARAHVFVYEHPDARGRYLCIGAVLHRAHFLQLLGDLFPQYNITAKCEDDDNSMAKPYKFSNRRLRELGLEFTPLRESLYETVMCLQKKGYLPLPVVPIAQKRAYL

SEQ ID NO: 65254 - DNA, 1212 bp, Triticum aestivum
  misc_feature (1)..(1212): Ceres Seq. ID no. 13598589
gagtaggacagccccagaggaggaggatacacagccgctagctcttcccccgcggcgcccgatctcgtcgtacttggagccttggaggagactcgaaccctaatcccctcccgccgcaggagagatcccgctcagcctcggctccaatccgcgactcgactcgactcgaagctccagctccgccgccgccccccgccgctgccgatggatccgaagctggtggaggtgacgcagctgatcgaccgcttcaaggcggccttcaaggccagcaatttcgacgtctgctcgaccctcctctcgcagctcaaggtcctcctcaccaagttccccagccttcccccggtgttccagcagacgcccaacgccgtggaggagctcaagcttgcgagggaaatttatgagcaggcagttattttgagtgtgaaaatggaagaccaagatgcatttgaaagggacttctgccagctcaagccgtattacatggacacatgtggcataattcccccatcatcggaggagtacccaatcatgggggctaaccttctgaggctgttagtccagaatagaattgcggagttccacactgagctggagcttcttcccgccaaagcgctggataatgcttacatcaagcacggggttgagctcgagcagtcctttatggagggcgcatacaaccgcgtgctgagcgctcgacaaaccgcgccgcatgaaacctacatatacttcatggaccttctcgtcaaaacggttagagacgagatagctgggtgcagcgagaagggatatgattacctgtcaataaacgacgcgaagcagatgtttaagttcagctccgacaaggaactgcaacagtacatcgcagaggagcaccccgagtgggatgtcaaggacggccgggtcttgttccagaaggcgaaggagtcccagccctgcaaggagatcccggcggcgccggtcatcaaccagacccttggctacgcgagggaattggagaggattgtgtgatttgtttgcctcttttttcttcatctttggactgagtttcccatgaagaggtggattattggattgccctgtgactcggctgtactattttgttaaatcgtttgtttcacctagggtttccaaagctacacaactgtgaaatgtcggcctaaaatggcacaagaaacaatgcctgttatgttaatcaattgattgtgtaagcgg

SEQ ID NO: 65255 - protein, 267 aa, Triticum aestivum
  peptide (1)..(267): Ceres Seq. ID no. 13598590
  misc_feature (109)..(267): Pfam Name: 26S proteasome non-ATPase regulatory subunit Nin1/mts3 Pfam Description: 26S proteasome non-ATPase regulatory subunit
  misc_feature (20)..(267): Homolog of NCBI NO: 4506233 NR Description: proteasome 26S non-ATPase subunit 8
  misc_feature (10)..(267): Homolog of NCBI NO: 26371077 NR Description: unnamed protein product [Mus musculus]
  misc_feature (10)..(267): Homolog of NCBI NO: 34855658 NR Description: similar to proteasome 26S non-ATPase subunit 8
  misc_feature (5)..(267): Homolog of NCBI NO: 40787635 NR Description: Unknown (protein for IMAGE:6055235) [Homo sapiens]
  misc_feature (10)..(267): Homolog of NCBI NO: 13278567 NR Description: RIKEN cDNA 6720456J22 gene [Mus musculus]
  misc_feature (27)..(267): Homolog of NCBI NO: 21357229 NR Description: CG4157-PA [Drosophila melanogaster]
  misc_feature (8)..(267): Homolog of NCBI NO: 38372874 NR Description: Probable 26S proteasome non-ATPase regulatory
  misc_feature (109)..(267): Homolog of NCBI NO: 15238267 NR Description: hypothetical protein [Arabidopsis thaliana]
  misc_feature (1)..(267): Homolog of NCBI NO: 15217661 NR Description: 26S proteasome regulatory subunit (RPN12),
  misc_feature (1)..(267): Homolog of NCBI NO: 17297985 NR Description: 26S proteasome regulatory particle non-ATPase
MDPKLVEVTQLIDRFKAAFKASNFDVCSTLLSQLKVLLTKFPSLPPVFQQTPNAVEELKLAREIYEQAVILSVKMEDQDAFERDFCQLKPYYMDTCGIIPPSSEEYPIMGANLLRLLVQNRIAEFHTELELLPAKALDNAYIKHGVELEQSFMEGAYNRVLSARQTAPHETYIYFMDLLVKTVRDEIAGCSEKGYDYLSINDAKQMFKFSSDKELQQYIAEEHPEWDVKDGRVLFQKAKESQPCKEIPAAPVINQTLGYARELERIV

SEQ ID NO: 65256 - protein, 193 aa, Triticum aestivum
  peptide (1)..(193): Ceres Seq. ID no. 13598591
  misc_feature (35)..(193): Pfam Name: 26S proteasome non-ATPase regulatory subunit Nin1/mts3 Pfam Description: 26S proteasome non-ATPase regulatory subunit
  misc_feature (1)..(193): Homolog of NCBI NO: 4506233 NR Description: proteasome 26S non-ATPase subunit 8
  misc_feature (1)..(193): Homolog of NCBI NO: 26371077 NR Description: unnamed protein product [Mus musculus]
  misc_feature (1)..(193): Homolog of NCBI NO: 34855658 NR Description: similar to proteasome 26S non-ATPase subunit 8
  misc_feature (1)..(193): Homolog of NCBI NO: 40787635 NR Description: Unknown (protein for IMAGE:6055235) [Homo sapiens]
  misc_feature (1)..(193): Homolog of NCBI NO: 13278567 NR Description: RIKEN cDNA 6720456J22 gene [Mus musculus]
  misc_feature (1)..(193): Homolog of NCBI NO: 21357229 NR Description: CG4157-PA [Drosophila melanogaster]
  misc_feature (1)..(193): Homolog of NCBI NO: 38372874 NR Description: Probable 26S proteasome non-ATPase regulatory
  misc_feature (35)..(193): Homolog of NCBI NO: 15238267 NR Description: hypothetical protein [Arabidopsis thaliana]
  misc_feature (1)..(193): Homolog of NCBI NO: 15217661 NR Description: 26S proteasome regulatory subunit (RPN12),
  misc_feature (1)..(193): Homolog of NCBI NO: 17297985 NR Description: 26S proteasome regulatory particle non-ATPase
MEDQDAFERDFCQLKPYYMDTCGIIPPSSEEYPIMGANLLRLLVQNRIAEFHTELELLPAKALDNAYIKHGVELEQSFMEGAYNRVLSARQTAPHETYIYFMDLLVKTVRDEIAGCSEKGYDYLSINDAKQMFKFSSDKELQQYIAEEHPEWDVKDGRVLFQKAKESQPCKEIPAAPVINQTLGYARELERIV

SEQ ID NO: 65257 - protein, 175 aa, Triticum aestivum
  peptide (1)..(175): Ceres Seq. ID no. 13598592
  misc_feature (17)..(175): Pfam Name: 26S proteasome non-ATPase regulatory subunit Nin1/mts3 Pfam Description: 26S proteasome non-ATPase regulatory subunit
  misc_feature (1)..(175): Homolog of NCBI NO: 4506233 NR Description: proteasome 26S non-ATPase subunit 8
  misc_feature (1)..(175): Homolog of NCBI NO: 26371077 NR Description: unnamed protein product [Mus musculus]
  misc_feature (1)..(175): Homolog of NCBI NO: 34855658 NR Description: similar to proteasome 26S non-ATPase subunit 8
  misc_feature (1)..(175): Homolog of NCBI NO: 40787635 NR Description: Unknown (protein for IMAGE:6055235) [Homo sapiens]
  misc_feature (1)..(175): Homolog of NCBI NO: 13278567 NR Description: RIKEN cDNA 6720456J22 gene [Mus musculus]
  misc_feature (1)..(175): Homolog of NCBI NO: 21357229 NR Description: CG4157-PA [Drosophila melanogaster]
  misc_feature (1)..(175): Homolog of NCBI NO: 38372874 NR Description: Probable 26S proteasome non-ATPase regulatory
  misc_feature (17)..(175): Homolog of NCBI NO: 15238267 NR Description: hypothetical protein [Arabidopsis thaliana]
  misc_feature (1)..(175): Homolog of NCBI NO: 15217661 NR Description: 26S proteasome regulatory subunit (RPN12),
  misc_feature (1)..(175): Homolog of NCBI NO: 17297985 NR Description: 26S proteasome regulatory particle non-ATPase
MDTCGIIPPSSEEYPIMGANLLRLLVQNRIAEFHTELELLPAKALDNAYIKHGVELEQSFMEGAYNRVLSARQTAPHETYIYFMDLLVKTVRDEIAGCSEKGYDYLSINDAKQMFKFSSDKELQQYIAEEHPEWDVKDGRVLFQKAKESQPCKEIPAAPVINQTLGYARELERIV

SEQ ID NO: 65258 - DNA, 1826 bp, Triticum aestivum
  misc_feature (1)..(1826): Ceres Seq. ID no. 13597647
gaccattacctagaacatcctaatcgaaaaaaaaataaaccaagagagagagagggaggaagggcggaaggcggagtggagcgaccccgaataaccctagcttcttcctggtcctcgtcgtcgccgtggccctcctactcgccagccacccggccggcgccccgatcccgccgccatggtgctcggcaagatcgccatcgtcatcggctcagggatcatcggaaccatggtcaccggcggcgacggcagcaagcttccggacctcagggacgtgctctccttctccttcaagttcatgaagcaggacaagaaggaaggctcgtccaacgcctcgccgcagaacgacctcttgttgtctcaggtcaactatctcagggatcagctccaagcattgtcccgtgaggctcaatgcccgcagattatcaacgtcaatggcggaccaggcgctggtgcttatggtttaacttttattgctgttggagccattggctatttatacataagatggaagggatggaaaatttctgatatgatgtttgtcaccaagcgtggcttggctgatgcctgcaacatagttggcaaacaattggatcaggtttcagaaagtgttcatgcttcaaaaaagcatttggctggaaggatcgaccgagtcgattgtagtctagatgaatgccacgaaattattgaagccacagggaaagaggttacagtcatacatggagatctaagtgcctttcaggaggaaatacaatcagttcaccatgttgtccgcactctggagacaaagcttggacgccttgcatatactcaagatcacacaacacgaggaatacatgagttatgtgagttcactaaaagattggatcggagtccgaaagccgatactcttaaggtcacagcatcaactcctctccctgcaatcgagtcttcagaaggaattactaggactgcttcgttgccgtcaggttcagaacccgtgtctcctgtagctcaatcacctagagcagatccacctaaggttctgcgttcgtctacagccatatcagcatcaggactgagtatgctagctggaactacagcaatacctaaaagggctgtgatcaaccgggcaacttcgatgaaggaaggagtgccgacccccgaggccccaaagaacacttcaagcgcagcagcagcaaccatcaagagacctgtttcgggttcgagccggttcggtttcctgcggggtttcgccagttgagggacaggcgaacagtgatgatatactacatatggcactgccttgctgtggtttgtgccaaaggacagcacgacatcccagtaacctttttttattacttgtaacatttattatctatctatccatctagctagatatgcagggcaggtaaggtagtagaaaaacatggcagtgggcaaaggaaggggaatttgctttgccagacaaatttttgtagaaagcaaaatatgtatggtggagatacgaggggcggtgatatgatggcaagagatgcgttacgtacactgtcatttactcgcatggttaattttggcgaagcaaggatgatgcatacgaggtttctgatctcgatatcaatggatattacatgtagccgcatctggaagatgcggatgaaaacagtgtcttgttcgagtctagcgagtcatgtagcgggggactgctactgttttaagtatgggcaagcaagaatgttgctgataagaaaaggagacctggtagctggtggtgttgctctaccaccattctgttgctgatgctttgcaccatgaataaaatcaatctgcttagcatgttttgtgcaccc

SEQ ID NO: 65259 - protein, 354 aa, Triticum aestivum
  peptide (1)..(354): Ceres Seq. ID no. 15222156
  misc_feature (1)..(215): Homolog of NCBI NO: 18396143 NR Description: bZIP family transcription factor [Arabidopsis
  misc_feature (1)..(295): Homolog of NCBI NO: 18390460 NR Description: expressed protein [Arabidopsis thaliana]
  misc_feature (1)..(314): Homolog of NCBI NO: 7208775 NR Description: hypothetical protein [Cicer arietinum]
  misc_feature (88)..(151): Homolog of NCBI NO: 34893996 NR Description: P0672D08.6 [Oryza sativa (japonica
  misc_feature (219)..(308): Homolog of NCBI NO: 34893996 NR Description: P0672D08.6 [Oryza sativa (japonica
  misc_feature (1)..(275): Homolog of NCBI NO: 30688826 NR Description: expressed protein [Arabidopsis thaliana]
  misc_feature (1)..(296): Homolog of NCBI NO: 22329773 NR Description: expressed protein [Arabidopsis thaliana]
  misc_feature (1)..(252): Homolog of NCBI NO: 34894218 NR Description: P0439B06.30 [Oryza sativa (japonica
  misc_feature (1)..(39): Homolog of NCBI NO: 15128438 NR Description: contains EST D16001(C2001)~similar to Oryza
  misc_feature (62)..(354): Homolog of NCBI NO: 15128438 NR Description: contains EST D16001(C2001)~similar to Oryza
MVLGKIAIVIGSGIIGTMVTGGDGSKLPDLRDVLSFSFKFMKQDKKEGSSNASPQNDLLLSQVNYLRDQLQALSREAQCPQIINVNGGPGAGAYGLTFIAVGAIGYLYIRWKGWKISDMMFVTKRGLADACNIVGKQLDQVSESVHASKKHLAGRIDRVDCSLDECHEIIEATGKEVTVIHGDLSAFQEEIQSVHHVVRTLETKLGRLAYTQDHTTRGIHELCEFTKRLDRSPKADTLKVTASTPLPAIESSEGITRTASLPSGSEPVSPVAQSPRADPPKVLRSSTAISASGLSMLAGTTAIPKRAVINRATSMKEGVPTPEAPKNTSSAAAATIKRPVSGSSRFGFLRGFAS

SEQ ID NO: 65260 - protein, 337 aa, Triticum aestivum
  peptide (1)..(337): Ceres Seq. ID no. 15222157
  misc_feature (1)..(198): Homolog of NCBI NO: 18396143 NR Description: bZIP family transcription factor [Arabidopsis
  misc_feature (1)..(278): Homolog of NCBI NO: 18390460 NR Description: expressed protein [Arabidopsis thaliana]
  misc_feature (1)..(297): Homolog of NCBI NO: 7208775 NR Description: hypothetical protein [Cicer arietinum]
  misc_feature (71)..(134): Homolog of NCBI NO: 34893996 NR Description: P0672D08.6 [Oryza sativa (japonica
  misc_feature (202)..(291): Homolog of NCBI NO: 34893996 NR Description: P0672D08.6 [Oryza sativa (japonica
  misc_feature (1)..(258): Homolog of NCBI NO: 30688826 NR Description: expressed protein [Arabidopsis thaliana]
  misc_feature (1)..(279): Homolog of NCBI NO: 22329773 NR Description: expressed protein [Arabidopsis thaliana]
  misc_feature (1)..(235): Homolog of NCBI NO: 34894218 NR Description: P0439B06.30 [Oryza sativa (japonica
  misc_feature (1)..(22): Homolog of NCBI NO: 15128438 NR Description: contains EST D16001(C2001)~similar to Oryza
  misc_feature (45)..(337): Homolog of NCBI NO: 15128438 NR Description: contains EST D16001(C2001)~similar to Oryza
MVTGGDGSKLPDLRDVLSFSFKFMKQDKKEGSSNASPQNDLLLSQVNYLRDQLQALSREAQCPQIINVNGGPGAGAYGLTFIAVGAIGYLYIRWKGWKISDMMFVTKRGLADACNIVGKQLDQVSESVHASKKHLAGRIDRVDCSLDECHEIIEATGKEVTVIHGDLSAFQEEIQSVHHVVRTLETKLGRLAYTQDHTTRGIHELCEFTKRLDRSPKADTLKVTASTPLPAIESSEGITRTASLPSGSEPVSPVAQSPRADPPKVLRSSTAISASGLSMLAGTTAIPKRAVINRATSMKEGVPTPEAPKNTSSAAAATIKRPVSGSSRFGFLRGFAS

SEQ ID NO: 65261 - protein, 314 aa, Triticum aestivum
  peptide (1)..(314): Ceres Seq. ID no. 15222158
  misc_feature (1)..(175): Homolog of NCBI NO: 21537323 NR Description: unknown [Arabidopsis thaliana]
  misc_feature (1)..(175): Homolog of NCBI NO: 18396143 NR Description: bZIP family transcription factor [Arabidopsis
  misc_feature (1)..(255): Homolog of NCBI NO: 18390460 NR Description: expressed protein [Arabidopsis thaliana]
  misc_feature (1)..(274): Homolog of NCBI NO: 7208775 NR Description: hypothetical protein [Cicer arietinum]
  misc_feature (48)..(111): Homolog of NCBI NO: 34893996 NR Description: P0672D08.6 [Oryza sativa (japonica
  misc_feature (179)..(268): Homolog of NCBI NO: 34893996 NR Description: P0672D08.6 [Oryza sativa (japonica
  misc_feature (1)..(235): Homolog of NCBI NO: 30688826 NR Description: expressed protein [Arabidopsis thaliana]
  misc_feature (1)..(256): Homolog of NCBI NO: 22329773 NR Description: expressed protein [Arabidopsis thaliana]
  misc_feature (1)..(212): Homolog of NCBI NO: 34894218 NR Description: P0439B06.30 [Oryza sativa (japonica
  misc_feature (22)..(314): Homolog of NCBI NO: 15128438 NR Description: contains EST D16001(C2001)~similar to Oryza
MKQDKKEGSSNASPQNDLLLSQVNYLRDQLQALSREAQCPQIINVNGGPGAGAYGLTFIAVGAIGYLYIRWKGWKISDMMFVTKRGLADACNIVGKQLDQVSESVHASKKHLAGRIDRVDCSLDECHEIIEATGKEVTVIHGDLSAFQEEIQSVHHVVRTLETKLGRLAYTQDHTTRGIHELCEFTKRLDRSPKADTLKVTASTPLPAIESSEGITRTASLPSGSEPVSPVAQSPRADPPKVLRSSTAISASGLSMLAGTTAIPKRAVINRATSMKEGVPTPEAPKNTSSAAAATIKRPVSGSSRFGFLRGFAS

SEQ ID NO: 65262 - DNA, 1088 bp, Triticum aestivum
  misc_feature (1)..(1088): Ceres Seq. ID no. 13585437
agtcagccatacaggtcgatcacgggagttttgactcttgaacccgatttggagcaaccgagcggcgagcggcgcgggcgcgggagcggccaaggagtgcgacagtgcgaccggcaaccggcagccggcgcggcttgctgtcgtctcggcgaaggcgcgcccagatctactaaagcaatcacatggcaactctgaaagatgcagtagcacggaagcctatactggcaacaatccgcctgcttgttccagctggtgctgcacgtcctgcaccaccagttggtccggcactcggtttttataggctcaatttgatggcgttctgcaaggatttcaatgcaaggacccagaaatacaaggcagaaactcctatgcaggtcacgctaactgcctacaaagatagcactttcgagtttgtagtcaagtcgccgtccgtttcatggttcctcaagaaggcagcaggaattgagaccgccagcactcgtcctggtcacaacgttgtgtcatccctaacactccgccacgtttacgagattgcaaaacttaaacaagctgaccccttctgcaagcatatgtcactcgaggcgttgtgcaaatctatcattggcacagctaactcaatgggcattgagattgtcaaggatctctgagtggattggctcgtctccaatactaccaagctcctaccttcccaggtgacatttgtgagctgtagtttctcattgatgtgggagaagatgggagtttttcaactgttgatccttactgagctcttcagcccaggcaatattttcattttcttcatacccagtcttcagctgttcctgctgcaatgttgatctcttccatgggagatatttcacggaaaataatgttacttctaagcttgcgccagacgaacaatattatccatttctgttaccttgccaagttgctagttgtttgtttacttttggtatcattgtcatttctcgtgtaatggcaatgtatttgaaacacaaatatgtaatggttaattttggtgcttttacatgacttttacttgcaactttaaaaaaaaaaaaaaaaaacggcacgagaagcttatcgat

SEQ ID NO: 65263 - protein, 154 aa, Triticum aestivum
  peptide (1)..(154): Ceres Seq. ID no. 13585438
  misc_feature (80)..(150): Pfam Name: Ribosomal protein L11, RNA binding domain Pfam Description: Ribosomal protein L11, RNA binding domain
  misc_feature (17)..(151): Homolog of NCBI NO: 7767188 NR Description: Chain L, Seven Ribosomal Proteins Fitted To A Microscopic Map Of The Large 50s Subunit At 7.5 Angstroms
  misc_feature (11)..(152): Homolog of NCBI NO: 22966134 NR Description: hypothetical protein [Rhodospirillum rubrum]
  misc_feature (11)..(151): Homolog of NCBI NO: 15988475 NR Description: Chain A, Fitting Of L11 Protein And Elongation G (Ef-G) In The Cryo-Em Map Of E. Coli 70s Ribosome Bound With
  misc_feature (11)..(151): Homolog of NCBI NO: 15643220 NR Description: ribosomal protein L11 [Thermotoga maritima]
  misc_feature (11)..(151): Homolog of NCBI NO: 7767082 NR Description: Chain A, Crystal Structure Of The Ribosomal
  misc_feature (11)..(151): Homolog of NCBI NO: 7245461 NR Description: Chain K, Fitting Of Components With Known
  misc_feature (17)..(151): Homolog of NCBI NO: 19115007 NR Description: probable 50S ribosomal protein L11
  misc_feature (1)..(154): Homolog of NCBI NO: 15237029 NR Description: ribosomal protein L11p family [Arabidopsis
  misc_feature (1)..(154): Homolog of NCBI NO: 15823668 NR Description: mitochondrial ribosomal protein L11 [Triticum
  misc_feature (3)..(154): Homolog of NCBI NO: 37535204 NR Description: putative ribosomal protein L11
MATLKDAVARKPILATIRLLVPAGAARPAPPVGPALGFYRLNLMAFCKDFNARTQKYKAETPMQVTLTAYKDSTFEFVVKSPSVSWFLKKAAGIETASTRPGHNVVSSLTLRHVYEIAKLKQADPFCKHMSLEALCKSIIGTANSMGIEIVKDL

SEQ ID NO: 65264 - protein, 111 aa, Triticum aestivum
  peptide (1)..(111): Ceres Seq. ID no. 13585439
  misc_feature (37)..(107): Pfam Name: Ribosomal protein L11, RNA binding domain Pfam Description: Ribosomal protein L11, RNA binding domain
  misc_feature (1)..(108): Homolog of NCBI NO: 7767188 NR Description: Chain L, Seven Ribosomal Proteins Fitted To A Microscopic Map Of The Large 50s Subunit At 7.5 Angstroms
  misc_feature (1)..(109): Homolog of NCBI NO: 22966134 NR Description: hypothetical protein [Rhodospirillum rubrum]
  misc_feature (1)..(108): Homolog of NCBI NO: 15643220 NR Description: ribosomal protein L11 [Thermotoga maritima]
  misc_feature (1)..(108): Homolog of NCBI NO: 7767082 NR Description: Chain A, Crystal Structure Of The Ribosomal
  misc_feature (1)..(108): Homolog of NCBI NO: 15988475 NR Description: Chain A, Fitting Of L11 Protein And Elongation G (Ef-G) In The Cryo-Em Map Of E. Coli 70s Ribosome Bound With
  misc_feature (1)..(108): Homolog of NCBI NO: 7245461 NR Description: Chain K, Fitting Of Components With Known
  misc_feature (1)..(108): Homolog of NCBI NO: 19115007 NR Description: probable 50S ribosomal protein L11
  misc_feature (1)..(111): Homolog of NCBI NO: 15237029 NR Description: ribosomal protein L11p family [Arabidopsis
  misc_feature (1)..(111): Homolog of NCBI NO: 15823668 NR Description: mitochondrial ribosomal protein L11 [Triticum
  misc_feature (1)..(111): Homolog of NCBI NO: 37535204 NR Description: putative ribosomal protein L11
MAFCKDFNARTQKYKAETPMQVTLTAYKDSTFEFVVKSPSVSWFLKKAAGIETASTRPGHNVVSSLTLRHVYEIAKLKQADPFCKHMSLEALCKSIIGTANSMGIEIVKDL

SEQ ID NO: 65265 - protein, 92 aa, Triticum aestivum
  peptide (1)..(92): Ceres Seq. ID no. 13585440
  misc_feature (18)..(88): Pfam Name: Ribosomal protein L11, RNA binding domain Pfam Description: Ribosomal protein L11, RNA binding domain
  misc_feature (1)..(89): Homolog of NCBI NO: 7767188 NR Description: Chain L, Seven Ribosomal Proteins Fitted To A Microscopic Map Of The Large 50s Subunit At 7.5 Angstroms
  misc_feature (1)..(90): Homolog of NCBI NO: 22966134 NR Description: hypothetical protein [Rhodospirillum rubrum]
  misc_feature (1)..(89): Homolog of NCBI NO: 15643220 NR Description: ribosomal protein L11 [Thermotoga maritima]
  misc_feature (1)..(89): Homolog of NCBI NO: 15988475 NR Description: Chain A, Fitting Of L11 Protein And Elongation G (Ef-G) In The Cryo-Em Map Of E. Coli 70s Ribosome Bound With
  misc_feature (1)..(89): Homolog of NCBI NO: 7767082 NR Description: Chain A, Crystal Structure Of The Ribosomal
  misc_feature (1)..(89): Homolog of NCBI NO: 7245461 NR Description: Chain K, Fitting Of Components With Known
  misc_feature (1)..(89): Homolog of NCBI NO: 19115007 NR Description: probable 50S ribosomal protein L11
  misc_feature (1)..(92): Homolog of NCBI NO: 15237029 NR Description: ribosomal protein L11p family [Arabidopsis
  misc_feature (1)..(92): Homolog of NCBI NO: 15823668 NR Description: mitochondrial ribosomal protein L11 [Triticum
  misc_feature (1)..(92): Homolog of NCBI NO: 37535204 NR Description: putative ribosomal protein L11
MQVTLTAYKDSTFEFVVKSPSVSWFLKKAAGIETASTRPGHNVVSSLTLRHVYEIAKLKQADPFCKHMSLEALCKSIIGTANSMGIEIVKDL

SEQ ID NO: 65266 - DNA, 1210 bp, Triticum aestivum
  misc_feature (1)..(1210): Ceres Seq. ID no. 13597551
ctacggccgcttagccaacgcgaggcgccgccggagacggcgatgcaggcggcggcctcttaccggggcgcggcaggccaccgccgcgccggccacccctcccggcgccctcccggtccctctcttcttctacccgtcagcgtcgctggcgtcggccgtttctccgacgcggcggttccgctccgagtcggctccctgccccttcctcgggctcgcggcggcggcgatttcgcgcggctggatgccagggacggggaggcgtggcagctgacgcgcgcgctcgggctaatccttcctggtcaccagaaaatggtgcatgctaacctgctgaaaactgctgttctttcaacaatgtcgatgctcataatgcctcttgaggcatcagcggagacatgtcaaccaactagttcttttgccaatatgccgattttcattgctgtcgctctaataggagctgctgtgggtggattattagcacggcaaagaaaggacgaactgaagcgattgaataatcaacttcgtcagattaatactgcccttagaaggcaggcacagattgaatcgtttgcccccggccttacttatgcgcctgtagggagagcaggagaaattgaggtcattgttgatcccaggaagcagcagttggtggtaaatttgaaaaatgggaagaattatatgaggaatcaggaccttgataaggcagtaatggagttcaagacagctctggagcttgcagaaagcataggggatcgctttgaggagaagaaagctgcgcgaggattaggcgcatcactacaaaggttgggacagtacagagaagcaatgagctggtactacaaggttctggcgctatcaaaggagaccggcgaggattctggctgcaccgaggcctacggcgcgatagccgactgctgcgtcgatctcggcgacttggaaggagcagcgaagctgtatgacgagtacatatcaaggctgcagccccgtgattgagcgctcggaccgttgttggagatcaaacacatcatatgccagagcccgtccgttgccctgcttctgatgtcgcggttgcttgcttgctatctggcggaaaacgagccgattttgcttgtcttttaacttggttggagcacttggattgtccatgaggagcccctctctacttgtgtatatgaatttcgatggtgctatggcatgtgctggttcagagttc

SEQ ID NO: 65267 - protein, 329 aa, Triticum aestivum
  peptide (1)..(329): Ceres Seq. ID no. 13597552
  misc_feature (295)..(326): Pfam Name: TPR Domain Pfam Description: TPR Domain
  misc_feature (208)..(323): Homolog of NCBI NO: 23125284 NR Description: hypothetical protein [Nostoc punctiforme]
  misc_feature (113)..(326): Homolog of NCBI NO: 18400278 NR Description: tetratricopeptide repeat (TPR)-containing protein
  misc_feature (113)..(326): Homolog of NCBI NO: 9294636 NR Description: emb|CAB41081.1~gene_id:MAG2.7~similar to unknown
  misc_feature (102)..(326): Homolog of NCBI NO: 34914598 NR Description: P0520B06.12 [Oryza sativa (japonica
LRPLSQREAPPETAMQAAASYRGAAGHRRAGHPSRRPPGPSLLLPVSVAGVGRFSDAAVPLRVGSLPLPRARGGGDFARLDARDGEAWQLTRALGLILPGHQKMVHANLLKTAVLSTMSMLIMPLEASAETCQPTSSFANMPIFIAVALIGAAVGGLLARQRKDELKRLNNQLRQINTALRRQAQIESFAPGLTYAPVGRAGEIEVIVDPRKQQLVVNLKNGKNYMRNQDLDKAVMEFKTALELAESIGDRFEEKKAARGLGASLQRLGQYREAMSWYYKVLALSKETGEDSGCTEAYGAIADCCVDLGDLEGAAKLYDEYISRLQPRD

SEQ ID NO: 65268 - protein, 315 aa, Triticum aestivum
  peptide (1)..(315): Ceres Seq. ID no. 13597553
  misc_feature (281)..(312): Pfam Name: TPR Domain Pfam Description: TPR Domain
  misc_feature (194)..(309): Homolog of NCBI NO: 23125284 NR Description: hypothetical protein [Nostoc punctiforme]
  misc_feature (99)..(312): Homolog of NCBI NO: 18400278 NR Description: tetratricopeptide repeat (TPR)-containing protein
  misc_feature (99)..(312): Homolog of NCBI NO: 9294636 NR Description: emb|CAB41081.1~gene_id:MAG2.7~similar to unknown
  misc_feature (88)..(312): Homolog of NCBI NO: 34914598 NR Description: P0520B06.12 [Oryza sativa (japonica
MQAAASYRGAAGHRRAGHPSRRPPGPSLLLPVSVAGVGRFSDAAVPLRVGSLPLPRARGGGDFARLDARDGEAWQLTRALGLILPGHQKMVHANLLKTAVLSTMSMLIMPLEASAETCQPTSSFANMPIFIAVALIGAAVGGLLARQRKDELKRLNNQLRQINTALRRQAQIESFAPGLTYAPVGRAGEIEVIVDPRKQQLVVNLKNGKNYMRNQDLDKAVMEFKTALELAESIGDRFEEKKAARGLGASLQRLGQYREAMSWYYKVLALSKETGEDSGCTEAYGAIADCCVDLGDLEGAAKLYDEYISRLQPRD

SEQ ID NO: 65269 - protein, 226 aa, Triticum aestivum
  peptide (1)..(226): Ceres Seq. ID no. 13597554
  misc_feature (192)..(223): Pfam Name: TPR Domain Pfam Description: TPR Domain
  misc_feature (105)..(220): Homolog of NCBI NO: 23125284 NR Description: hypothetical protein [Nostoc punctiforme]
  misc_feature (10)..(223): Homolog of NCBI NO: 18400278 NR Description: tetratricopeptide repeat (TPR)-containing protein
  misc_feature (10)..(223): Homolog of NCBI NO: 9294636 NR Description: emb|CAB41081.1~gene_id:MAG2.7~similar to unknown
  misc_feature (1)..(223): Homolog of NCBI NO: 34914598 NR Description: P0520B06.12 [Oryza sativa (japonica
MVHANLLKTAVLSTMSMLIMPLEASAETCQPTSSFANMPIFIAVALIGAAVGGLLARQRKDELKRLNNQLRQINTALRRQAQIESFAPGLTYAPVGRAGEIEVIVDPRKQQLVVNLKNGKNYMRNQDLDKAVMEFKTALELAESIGDRFEEKKAARGLGASLQRLGQYREAMSWYYKVLALSKETGEDSGCTEAYGAIADCCVDLGDLEGAAKLYDEYISRLQPRD

SEQ ID NO: 65270 - DNA, 549 bp, Triticum aestivum
  misc_feature (1)..(549): Ceres Seq. ID no. 13597555
agagctccgtccccccgcgtcgccgcttagcgtacgcaccaccgcaccggcagcaggcgaggggcggccggcgacctactttggagcgcagacggaaggtttctacattttccatggcgcttgtggtgatgtgcgggcagccgtgcagcggcaagtcagaggctgcagcttgtctcgctgccgctcttcgctcctccgtgcttgacgttactgtccgcgtcattgacgagtcatcgctccatcttggacgcgatgaaagctacaaagatatggttgtggagaaaaacttaagaggagttttgagatcagaagttgataggtccgtgtcacgggatggcataatcatcgtggattctctgaacaatattaaggggtaccgatacgagctgtggtgtcttgcgcgtgcttcgggaataagatattgtgtgttcttttgtgatacagaagtggaccattgtagggattggaacgtcaagcgtcaggagaaaggagaaccctcatatgatagcaatatatttgaagatctggcaaggagatttgagaggcctg

SEQ ID NO: 65271 - protein, 182 aa, Triticum aestivum
  peptide (1)..(182): Ceres Seq. ID no. 13597556
  misc_feature (38)..(142): Homolog of NCBI NO: 40744828 NR Description: hypothetical protein AN2499.2 [Aspergillus
  misc_feature (38)..(181): Homolog of NCBI NO: 6322739 NR Description: Protein involved in resistance to K. lactis
  misc_feature (38)..(181): Homolog of NCBI NO: 19115468 NR Description: similarity to S. cerevisiae kti12 protein
  misc_feature (38)..(181): Homolog of NCBI NO: 39583457 NR Description: Hypothetical protein CBG21524 [Caenorhabditis
  misc_feature (38)..(181): Homolog of NCBI NO: 33300521 NR Description: Hypothetical protein Y57G11C.43 [Caenorhabditis
  misc_feature (38)..(145): Homolog of NCBI NO: 20270210 NR Description: RIKEN cDNA 1110001A12 [Mus musculus]
  misc_feature (38)..(145): Homolog of NCBI NO: 19923939 NR Description: hypothetical protein BC012173 [Homo sapiens]
  misc_feature (38)..(181): Homolog of NCBI NO: 28850452 NR Description: similar to similarity to S. cerevisiae kti12
  misc_feature (38)..(181): Homolog of NCBI NO: 23504265 NR Description: DRL1 protein [Arabidopsis thaliana]
  misc_feature (38)..(181): Homolog of NCBI NO: 15222972 NR Description: expressed protein [Arabidopsis thaliana]
SSVPPRRRLAYAPPHRQQARGGRRPTLERRRKVSTFSMALVVMCGQPCSGKSEAAACLAAALRSSVLDVTVRVIDESSLHLGRDESYKDMVVEKNLRGVLRSEVDRSVSRDGIIIVDSLNNIKGYRYELWCLARASGIRYCVFFCDTEVDHCRDWNVKRQEKGEPSYDSNIFEDLARRFERP

SEQ ID NO: 65272 - protein, 145 aa, Triticum aestivum
  peptide (1)..(145): Ceres Seq. ID no. 13597557
  misc_feature (1)..(105): Homolog of NCBI NO: 40744828 NR Description: hypothetical protein AN2499.2 [Aspergillus
  misc_feature (1)..(144): Homolog of NCBI NO: 6322739 NR Description: Protein involved in resistance to K. lactis
  misc_feature (1)..(144): Homolog of NCBI NO: 19115468 NR Description: similarity to S. cerevisiae kti12 protein
  misc_feature (1)..(144): Homolog of NCBI NO: 39583457 NR Description: Hypothetical protein CBG21524 [Caenorhabditis
  misc_feature (1)..(144): Homolog of NCBI NO: 33300521 NR Description: Hypothetical protein Y57G11C.43 [Caenorhabditis
  misc_feature (1)..(108): Homolog of NCBI NO: 20270210 NR Description: RIKEN cDNA 1110001A12 [Mus musculus]
  misc_feature (1)..(108): Homolog of NCBI NO: 19923939 NR Description: hypothetical protein BC012173 [Homo sapiens]
  misc_feature (1)..(144): Homolog of NCBI NO: 28850452 NR Description: similar to similarity to S. cerevisiae kti12
  misc_feature (1)..(144): Homolog of NCBI NO: 23504265 NR Description: DRL1 protein [Arabidopsis thaliana]
  misc_feature (1)..(144): Homolog of NCBI NO: 15222972 NR Description: expressed protein [Arabidopsis thaliana]
MALVVMCGQPCSGKSEAAACLAAALRSSVLDVTVRVIDESSLHLGRDESYKDMVVEKNLRGVLRSEVDRSVSRDGIIIVDSLNNIKGYRYELWCLARASGIRYCVFFCDTEVDHCRDWNVKRQEKGEPSYDSNIFEDLARRFERP

SEQ ID NO: 65273 - protein, 140 aa, Triticum aestivum
  peptide (1)..(140): Ceres Seq. ID no. 13597558
  misc_feature (1)..(100): Homolog of NCBI NO: 40744828 NR Description: hypothetical protein AN2499.2 [Aspergillus
  misc_feature (1)..(139): Homolog of NCBI NO: 6322739 NR Description: Protein involved in resistance to K. lactis
  misc_feature (1)..(139): Homolog of NCBI NO: 19115468 NR Description: similarity to S. cerevisiae kti12 protein
  misc_feature (1)..(139): Homolog of NCBI NO: 39583457 NR Description: Hypothetical protein CBG21524 [Caenorhabditis
  misc_feature (1)..(139): Homolog of NCBI NO: 33300521 NR Description: Hypothetical protein Y57G11C.43 [Caenorhabditis
  misc_feature (1)..(103): Homolog of NCBI NO: 20270210 NR Description: RIKEN cDNA 1110001A12 [Mus musculus]
  misc_feature (1)..(103): Homolog of NCBI NO: 19923939 NR Description: hypothetical protein BC012173 [Homo sapiens]
  misc_feature (1)..(139): Homolog of NCBI NO: 28850452 NR Description: similar to similarity to S. cerevisiae kti12
  misc_feature (1)..(139): Homolog of NCBI NO: 23504265 NR Description: DRL1 protein [Arabidopsis thaliana]
  misc_feature (1)..(139): Homolog of NCBI NO: 15222972 NR Description: expressed protein [Arabidopsis thaliana]
MCGQPCSGKSEAAACLAAALRSSVLDVTVRVIDESSLHLGRDESYKDMVVEKNLRGVLRSEVDRSVSRDGIIIVDSLNNIKGYRYELWCLARASGIRYCVFFCDTEVDHCRDWNVKRQEKGEPSYDSNIFEDLARRFERP

SEQ ID NO: 65274 - DNA, 1479 bp, Triticum aestivum
  misc_feature (1)..(1479): Ceres Seq. ID no. 13597559
acacagcccactcgcagcagcagtgccactaccagcgcacaccaatccagctgattttgagcacgagcagctcttgcccaacagccaccgtcgtcggctactgtcatccatggccatgaggaacgcgacgcagcaggtggtccgggccttggagccgtccctcaccaggagccttcatgcgtccccggacagcaagaagatcgtgggcgtgttctacaagggcggcgagtacgcggggcagaaccccaacttcgtggggtgtgtggagaacgcgctgggcatccgtagctggctcgagtcgcagggccaccagtacatcgtcaccgacgacaaggacggccccaactgcgagctagagaagcacatcgcggacgcgcacgtgctcatcaccacgccgttccacccggcgtacgtgagcgcggaccggatcaggcgcggcaagaacctggagctgctcctcacggcggggatcggctccgaccacatcgagctgtcggcggcggcggccgcggggctgaccgtcgccgaggtcacgggcagcaacaccgtgtcggtggcggaggaccagctgatgcgcatcctggtcctcatgcgcaacttcctgccgggccaccaccaagccatcaacggggagtgggacctcgccggcatcgcgcaccgggcctacgacctggagggcaagacggtgggcaccgtcggcgccggccgcatcgggaagctgctgctccagcgcctcaagccattcggctgcaacctgctctaccacgacaagctccgcgtcgacgccgcgctggagaaggagctcggcgccgccttcgaggaggacctcgacgccatgctgcccaagtgcgacgtcgtcgtgctcaacatgccgctcaccgagaagacaaagggcatgttcaacaaggagaagatcgccaagatgaagaaaggcgtcatcatcgtgaacaacgctcgtggagcgatcatggatacgcaggcagtggcagacgcttgcaagagtaggcacatcgctggatacggcggcgacgtgtggtacccgcagccggcgcccaaggagcacccgtggaggtacatgcccaacaacgcaatgaccccgcacatctccggcaccaccattgacggccagctgaggtacgcggccggtgtgaaggacatgctggagaggtacttcaagggacaggacttcccggagcccaactacattgtcaaggaaggcaagctcgccagccagtaccagtgagcgtccatccatggagccgcagctgcacgcctgcatcagcatgccggttaccagaaactaaataaaagatgcttggccgttgcaatggccatcacccataaatatatctatacctaaataaaatggaacaaaaactggttgctttaatttgctatcagcttcctttgctgtatttttctcgtacactgtccttcgctgtatttcgtttgaactataataaagtcaaagtgttgtcc

SEQ ID NO: 65275 - protein, 413 aa, Triticum aestivum
  peptide (1)..(413): Ceres Seq. ID no. 13597560
  misc_feature (82)..(179): Pfam Name: D-isomer specific 2-hydroxyacid dehydrogenase, Pfam Description: D-isomer specific 2-hydroxyacid dehydrogenase,
  misc_feature (310)..(411): Homolog of NCBI NO: 416574 NR Description: PROBABLE FORMATE DEHYDROGENASE (NAD-DEPENDENT
  misc_feature (70)..(311): Homolog of NCBI NO: 416574 NR Description: PROBABLE FORMATE DEHYDROGENASE (NAD-DEPENDENT
  misc_feature (310)..(411): Homolog of NCBI NO: 40738675 NR Description: FDH_EMENI Probable formate dehydrogenase
  misc_feature (70)..(311): Homolog of NCBI NO: 40738675 NR Description: FDH_EMENI Probable formate dehydrogenase
  misc_feature (37)..(413): Homolog of NCBI NO: 15241492 NR Description: formate dehydrogenase (FDH) [Arabidopsis
  misc_feature (40)..(413): Homolog of NCBI NO: 21263612 NR Description: Formate dehydrogenase, mitochondrial precursor
  misc_feature (49)..(413): Homolog of NCBI NO: 38636526 NR Description: formate dehydrogenase [Quercus robur]
  misc_feature (39)..(413): Homolog of NCBI NO: 542089 NR Description: formate dehydrogenase (EC 1.2.1.2) precursor,
  misc_feature (37)..(413): Homolog of NCBI NO: 21263611 NR Description: Formate dehydrogenase, mitochondrial precursor
  misc_feature (37)..(413): Homolog of NCBI NO: 26454627 NR Description: Formate dehydrogenase, mitochondrial precursor
HSPLAAAVPLPAHTNPADFEHEQLLPNSHRRRLLSSMAMRNATQQVVRALEPSLTRSLHASPDSKKIVGVFYKGGEYAGQNPNFVGCVENALGIRSWLESQGHQYIVTDDKDGPNCELEKHIADAHVLITTPFHPAYVSADRIRRGKNLELLLTAGIGSDHIELSAAAAAGLTVAEVTGSNTVSVAEDQLMRILVLMRNFLPGHHQAINGEWDLAGIAHRAYDLEGKTVGTVGAGRIGKLLLQRLKPFGCNLLYHDKLRVDAALEKELGAAFEEDLDAMLPKCDVVVLNMPLTEKTKGMFNKEKIAKMKKGVIIVNNARGAIMDTQAVADACKSRHIAGYGGDVWYPQPAPKEHPWRYMPNNAMTPHISGTTIDGQLRYAAGVKDMLERYFKGQDFPEPNYIVKEGKLASQYQ

SEQ ID NO: 65276 - protein, 377 aa, Triticum aestivum
  peptide (1)..(377): Ceres Seq. ID no. 13597561
  misc_feature (46)..(143): Pfam Name: D-isomer specific 2-hydroxyacid dehydrogenase, Pfam Description: D-isomer specific 2-hydroxyacid dehydrogenase,
  misc_feature (274)..(375): Homolog of NCBI NO: 416574 NR Description: PROBABLE FORMATE DEHYDROGENASE (NAD-DEPENDENT
  misc_feature (34)..(275): Homolog of NCBI NO: 416574 NR Description: PROBABLE FORMATE DEHYDROGENASE (NAD-DEPENDENT
  misc_feature (274)..(375): Homolog of NCBI NO: 40738675 NR Description: FDH_EMENI Probable formate dehydrogenase
  misc_feature (34)..(275): Homolog of NCBI NO: 40738675 NR Description: FDH_EMENI Probable formate dehydrogenase
  misc_feature (1)..(377): Homolog of NCBI NO: 15241492 NR Description: formate dehydrogenase (FDH) [Arabidopsis
  misc_feature (4)..(377): Homolog of NCBI NO: 21263612 NR Description: Formate dehydrogenase, mitochondrial precursor
  misc_feature (13)..(377): Homolog of NCBI NO: 38636526 NR Description: formate dehydrogenase [Quercus robur]
  misc_feature (3)..(377): Homolog of NCBI NO: 542089 NR Description: formate dehydrogenase (EC 1.2.1.2) precursor,
  misc_feature (1)..(377): Homolog of NCBI NO: 21263611 NR Description: Formate dehydrogenase, mitochondrial precursor
  misc_feature (1)..(377): Homolog of NCBI NO: 26454627 NR Description: Formate dehydrogenase, mitochondrial precursor
MAMRNATQQVVRALEPSLTRSLHASPDSKKIVGVFYKGGEYAGQNPNFVGCVENALGIRSWLESQGHQYIVTDDKDGPNCELEKHIADAHVLITTPFHPAYVSADRIRRGKNLELLLTAGIGSDHIELSAAAAAGLTVAEVTGSNTVSVAEDQLMRILVLMRNFLPGHHQAINGEWDLAGIAHRAYDLEGKTVGTVGAGRIGKLLLQRLKPFGCNLLYHDKLRVDAALEKELGAAFEEDLDAMLPKCDVVVLNMPLTEKTKGMFNKEKIAKMKKGVIIVNNARGAIMDTQAVADACKSRHIAGYGGDVWYPQPAPKEHPWRYMPNNAMTPHISGTTIDGQLRYAAGVKDMLERYFKGQDFPEPNYIVKEGKLASQYQ

SEQ ID NO: 65277 - protein, 375 aa, Triticum aestivum
  peptide (1)..(375): Ceres Seq. ID no. 13597562
  misc_feature (44)..(141): Pfam Name: D-isomer specific 2-hydroxyacid dehydrogenase, Pfam Description: D-isomer specific 2-hydroxyacid dehydrogenase,
  misc_feature (272)..(373): Homolog of NCBI NO: 416574 NR Description: PROBABLE FORMATE DEHYDROGENASE (NAD-DEPENDENT
  misc_feature (32)..(273): Homolog of NCBI NO: 416574 NR Description: PROBABLE FORMATE DEHYDROGENASE (NAD-DEPENDENT
  misc_feature (272)..(373): Homolog of NCBI NO: 40738675 NR Description: FDH_EMENI Probable formate dehydrogenase
  misc_feature (32)..(273): Homolog of NCBI NO: 40738675 NR Description: FDH_EMENI Probable formate dehydrogenase
  misc_feature (1)..(375): Homolog of NCBI NO: 15241492 NR Description: formate dehydrogenase (FDH) [Arabidopsis
  misc_feature (2)..(375): Homolog of NCBI NO: 21263612 NR Description: Formate dehydrogenase, mitochondrial precursor
  misc_feature (11)..(375): Homolog of NCBI NO: 38636526 NR Description: formate dehydrogenase [Quercus robur]
  misc_feature (1)..(375): Homolog of NCBI NO: 542089 NR Description: formate dehydrogenase (EC 1.2.1.2) precursor,
  misc_feature (1)..(375): Homolog of NCBI NO: 21263611 NR Description: Formate dehydrogenase, mitochondrial precursor
  misc_feature (1)..(375): Homolog of NCBI NO: 26454627 NR Description: Formate dehydrogenase, mitochondrial precursor
MRNATQQVVRALEPSLTRSLHASPDSKKIVGVFYKGGEYAGQNPNFVGCVENALGIRSWLESQGHQYIVTDDKDGPNCELEKHIADAHVLITTPFHPAYVSADRIRRGKNLELLLTAGIGSDHIELSAAAAAGLTVAEVTGSNTVSVAEDQLMRILVLMRNFLPGHHQAINGEWDLAGIAHRAYDLEGKTVGTVGAGRIGKLLLQRLKPFGCNLLYHDKLRVDAALEKELGAAFEEDLDAMLPKCDVVVLNMPLTEKTKGMFNKEKIAKMKKGVIIVNNARGAIMDTQAVADACKSRHIAGYGGDVWYPQPAPKEHPWRYMPNNAMTPHISGTTIDGQLRYAAGVKDMLERYFKGQDFPEPNYIVKEGKLASQYQ

SEQ ID NO: 65278 - DNA, 1328 bp, Triticum aestivum
  misc_feature (1)..(1328): Ceres Seq. ID no. 13655934
acacgcgcgcacccacgcataggtcgctctcctgctccgctctcccttcgcgtccaagcctccctcccatccccgctgcaccgcaagtcaaccgcctttccacctcctccgccccctcgccgtcgcctccttcctggcgcaacgccagtatatagagccgcacaggcattcctttgctgccacgacaaagaggaggcagaggttcgcaaggttgaaactgcaatcccggcgacggcaaaggcttctctttagttagctagcgtagcagacttctattcatatactgttcttgcgtgctctgcacttcttggctagctagctggtcggccatggcggatcaccagaggcagaggatccacccggtggacctggaggcgggccagccgaggccctcggcgccgctggtgccgccggggagctcgttccggtccgacaagggcgaccctgccgcggccccggacaggaggccgccgcaccaccagccgctgcccccgccgaagcggcgcaggggctgctgctgccgcttcatctgctgcgtcctggtgaccgtcatcctgctcgccgtcctcgccgcggtggccctgggcgcgctctacctggtgttccagcccaaggcgccccactactcggtggaccggctgtcggtgtcgcagttccaggtggacccgaccctcacggcgagcgcgcggttcgacgtcacggtgacggcggcgaaccccaacagccgcatcggcatcttctacgagcgcgggtccagcctgagcgtgtggtacgacacccaccggctcgcccagggcgcgctcccggccttctaccagggccgccgcaacacgacggtgctgggcgtggtaatggccgggcaggcgcagctgggcagcgcggtggtggcggcgctgcgcgacgagcagcagacgggcgccgtgccgctggtgttccgcgccgacgtgcccgtgcgggtggagctcggcagcctcaagctgtggacggtcacgtccagggtgcgctgcgacctcgtcgtcgacagcctcctcaacgccagcagccagatcaagatcaaggccagcaactgcaagttcagcttgaagctgtgatcggcccttgtctttcttttcgttcatggtgtagtgtaattctttgggtggttcgttctggggataggtcgatcgagttcttcgccctgtgggcgcgctggattcttttggcagcagagagccgtgccgtgtttgcatcggtgcactcccgccccctagcatatcttttctagtagctccgtgcatgtacatcttgtgtagagttgatattaccttgcgttagagaggagtaataat

SEQ ID NO: 65279 - protein, 253 aa, Triticum aestivum
  peptide (1)..(253): Ceres Seq. ID no. 13655935
  misc_feature (57)..(248): Homolog of NCBI NO: 34909192 NR Description: P0425G02.19 [Oryza sativa (japonica
  misc_feature (27)..(253): Homolog of NCBI NO: 15242167 NR Description: hypothetical protein [Arabidopsis thaliana]
  misc_feature (17)..(252): Homolog of NCBI NO: 38636986 NR Description: unknown protein [Oryza sativa (japonica
  misc_feature (21)..(246): Homolog of NCBI NO: 18401317 NR Description: expressed protein [Arabidopsis thaliana]
  misc_feature (6)..(253): Homolog of NCBI NO: 15221846 NR Description: hypothetical protein [Arabidopsis thaliana]
  misc_feature (8)..(253): Homolog of NCBI NO: 38344198 NR Description: OSJNBa0064G10.14 [Oryza sativa (japonica
  misc_feature (1)..(253): Homolog of NCBI NO: 10178216 NR Description: gb|AAF23842.1~gene_id:MLF18.15~similar to unknown
  misc_feature (1)..(253): Homolog of NCBI NO: 15239459 NR Description: hypothetical protein [Arabidopsis thaliana]
  misc_feature (5)..(253): Homolog of NCBI NO: 6686408 NR Description: F1E22.7 [Arabidopsis thaliana]
  misc_feature (5)..(253): Homolog of NCBI NO: 18408342 NR Description: expressed protein [Arabidopsis thaliana]
MADHQRQRIHPVDLEAGQPRPSAPLVPPGSSFRSDKGDPAAAPDRRPPHHQPLPPPKRRRGCCCRFICCVLVTVILLAVLAAVALGALYLVFQPKAPHYSVDRLSVSQFQVDPTLTASARFDVTVTAANPNSRIGIFYERGSSLSVWYDTHRLAQGALPAFYQGRRNTTVLGVVMAGQAQLGSAVVAALRDEQQTGAVPLVFRADVPVRVELGSLKLWTVTSRVRCDLVVDSLLNASSQIKIKASNCKFSLKL

SEQ ID NO: 65280 - DNA, 1945 bp, Triticum aestivum
  misc_feature (1)..(1945): Ceres Seq. ID no. 13585454
atcactcgacacatcgacccttgactcgagtagacgcaacaacagcaccgacttgaccaaagtaacttccttctcggcatgagcggctcatcagccattgcccttgcaatccgcccaacctcgcatccctttccccgaggagtggcagagctcgcctccctcgcgtcgtcgtcctcgtcggcatgagcggtttcctcgctgtggccggcaagattgtcacgttcctgctgtgggtgctcttcctggtcctgcagacagccaccaaggttgtcgggggcctcctgcaggttgcaccgccagccgagccacaagaagagccgcaaccagaagcagcaccacgacccagatcgccgccggctgcgaggaaccgcgccggcggcggccccgcggatccatacggtccgcagtcacagctgtgggacccaccaccgcccccccacaccgctccggtgacggatgagtatcactcgtcctcgatctaccggcggcgggtgagcgccccgcaggccgctgaagatttggtggtttcctccagcagttactctcattcggccgtggcagcagcgccagcctctccggctcatgccgtctcagtgccaccagtgtcgcggacaattaagacaccggcagttgccagtaagcggcccaagctggagaggaagtactccaagattgtggaccagtaccgctccttggatgaggttattgaagcattagcgcaagctggcctcgagtcttccaatttaatcattggaattgatttcacgaaaagtaatgaatggacaggaaagagttcattcaatggtgtgagcctgcatcatattggtgatgcccccaatccttacgagcaggcaatctccatcattggacaaacactgtcagcttttgatgaggataacttaattccgtgctatggttttggagatgcatctacacatgaccaagatgtatttgccttcaaccctgacgaaagaccatgctatgggtttcaggaggctttggctcgatatagagaaattgttcctcatcttcgtctttccggtcctacatcattttctccaataattgaaatggccacaaccattgttgagcaaagcggtggccaataccatgttttagtaataattgccgatggacaagtcacacgaagtgttaacactgaatttggtcaattaagtacccaagagcagatgactgtagatgctattgtgcaagccagtgaatttcctttgtctataattctggtcggagttggagatggtccttgggacatgatgaatgaatttgatgacaacattcctgctagatcttttgacaatttccagtttgtcaacttcaccggaatcatgtcaaaaaagatcagtcaaagcaacaaggagacagagtttgctctttcagcactcatggaaatacctttgcagtacaaagcaacattacagcttggaatactggggcgtcgacttgcaaagtctccagagcgagttccacttcctcctccttttgcaagttataataccacctcaagagcagcaccatcttgggcaaataacttccgaagtgtgccttctaatcttagggaggaggcgactttagattcaacaatcacaccgtcagttacacccccaccagctgcagatgctagagcatcagaactccaattctgcccagtttgccttgccaaaccccgggacatggcatttggttgtggtcatcagacttgttcagggtgtggaccgcaggtcgtggattgccctatctgtcgaaggccaattgatacaagagtaaaactatactaacagcctcacatgcctgactaggtttgactgaagtacgctggagtgttgaaagtagaatccatggaaaagaaaaagaactccgtttgcactgtagcttgtaccataaagaaaatgaataacagttgtgtactgcacaaaaaaaaaaaaaa

SEQ ID NO: 65281 - protein, 537 aa, Triticum aestivum
  peptide (1)..(537): Ceres Seq. ID no. 13585455
  misc_feature (475)..(537): Homolog of NCBI NO: 18412353 NR Description: copine-related [Arabidopsis thaliana]
  misc_feature (149)..(455): Homolog of NCBI NO: 18412353 NR Description: copine-related [Arabidopsis thaliana]
  misc_feature (455)..(537): Homolog of NCBI NO: 22328041 NR Description: copine-related [Arabidopsis thaliana]
  misc_feature (156)..(480): Homolog of NCBI NO: 22328041 NR Description: copine-related [Arabidopsis thaliana]
  misc_feature (111)..(537): Homolog of NCBI NO: 30697566 NR Description: copine-related [Arabidopsis thaliana]
  misc_feature (111)..(537): Homolog of NCBI NO: 18408863 NR Description: copine-related [Arabidopsis thaliana]
  misc_feature (127)..(525): Homolog of NCBI NO: 20804894 NR Description: P0497A05.19 [Oryza sativa (japonica
  misc_feature (476)..(537): Homolog of NCBI NO: 15232157 NR Description: copine-related [Arabidopsis thaliana]
  misc_feature (56)..(497): Homolog of NCBI NO: 15232157 NR Description: copine-related [Arabidopsis thaliana]
  misc_feature (96)..(537): Homolog of NCBI NO: 15241400 NR Description: copine-related [Arabidopsis thaliana]
MSGFLAVAGKIVTFLLWVLFLVLQTATKVVGGLLQVAPPAEPQEEPQPEAAPRPRSPPAARNRAGGGPADPYGPQSQLWDPPPPPHTAPVTDEYHSSSIYRRRVSAPQAAEDLVVSSSSYSHSAVAAAPASPAHAVSVPPVSRTIKTPAVASKRPKLERKYSKIVDQYRSLDEVIEALAQAGLESSNLIIGIDFTKSNEWTGKSSFNGVSLHHIGDAPNPYEQAISIIGQTLSAFDEDNLIPCYGFGDASTHDQDVFAFNPDERPCYGFQEALARYREIVPHLRLSGPTSFSPIIEMATTIVEQSGGQYHVLVIIADGQVTRSVNTEFGQLSTQEQMTVDAIVQASEFPLSIILVGVGDGPWDMMNEFDDNIPARSFDNFQFVNFTGIMSKKISQSNKETEFALSALMEIPLQYKATLQLGILGRRLAKSPERVPLPPPFASYNTTSRAAPSWANNFRSVPSNLREEATLDSTITPSVTPPPAADARASELQFCPVCLAKPRDMAFGCGHQTCSGCGPQVVDCPICRRPIDTRVKLY

SEQ ID NO: 65282 - DNA, 1321 bp, Triticum aestivum
  misc_feature (1)..(1321): Ceres Seq. ID no. 13584630
aaaccgaaacactttctctctctcccttgtttctcgtgctcggaaaccctagccgcacgaagacttcgcctcgcccccacatcgcccgccgtctgacctgcctacgagggcgaacgatggccgcggagaactactggaggtacgccgacgcgcggcagcagcaggccatggtggcggctgcggcggccgcggcggggatggcccctgcagctaccgttgcgcaggccgcgacggccgcggggggcatgcagcagcaccagcaccagcaccagcaccagcaggcggcgatggcgcaacagcagcagcagcagcaacagcagcagcaggcggccgcgccgtcgcttaagcgcgcgcgcccagactatggcgatggtcctggaggacaagagatggctggatattatccgcgggaaaatgcaggttaccactcacttagagacaatgaagcaattggagcatcttacgaccgctacttacgcaatgggatgccttctgtggcagccaatgaaccaagtagggcagttgttggtgccatgggtggagctgcaatggttggtggtggaatgagtggatatcctgttgatgaccgccgtatgatgggtgtcgttggtatggacagcagagccatggggtatggtgcaagacctgagcctcctcttcccccggatgcatccaacaccttgtatattgaaggtctgcctgcaaactgcacccgtagggaggtttcacatatattccgcccttttgttggtttccgtgaagtgaggcttgtcaacaaagagtcaagacaccctggtggagatcctcatgtcctgtgtttcgttgattttgatagccctgcccaagctactattgcacttgaagccctgcaaggttataagtttgacgaacacgatcgtgaatcagcccatttaaggctgcaattctcgcgctttcctggtccgaggtcagctggcgggcctcgtggtaggcgttaagtcgtgcgggtcaggcggttgacgaacctaccgtttatacgagcgatcgaacctgcttggtgtaacgctttgcgccgaattctccgccggtggctcgtagggttcgtcagcccttgtcgtgaaagcgtgaaaaggacgatgcaataatctcgctgttcagtatccattagattctcggggtcgcatgtgtgtctgctttagtatttatggtctactgtattttgttatctcgcggcgtgacccagacaatatcagtcttttatcatgtgtaacgctaactttcttaaagcacttgctcgtttgtttagccgtgctagtaatatcaactcttttcttcgtcttgc

SEQ ID NO: 65283 - protein, 324 aa, Triticum aestivum
  peptide (1)..(324): Ceres Seq. ID no. 13584631
  misc_feature (227)..(301): Pfam Name: RNA recognition motif. (a.k.a. RRM, RBD, or RNP domain) Pfam Description: RNA recognition motif. (a.k.a. RRM, RBD, or RNP
  misc_feature (50)..(115): Homolog of NCBI NO: 6448931 NR Description: zeste protein [Drosophila virilis]
  misc_feature (45)..(324): Homolog of NCBI NO: 6324132 NR Description: Protein involved in regulation of cell size;
  misc_feature (266)..(324): Homolog of NCBI NO: 15218968 NR Description: hypothetical protein [Arabidopsis thaliana]
  misc_feature (56)..(324): Homolog of NCBI NO: 25513502 NR Description: F16F4.3 protein - Arabidopsis thaliana
  misc_feature (175)..(324): Homolog of NCBI NO: 26450151 NR Description: unknown protein [Arabidopsis thaliana]
  misc_feature (125)..(321): Homolog of NCBI NO: 23304837 NR Description: RNA-binding protein [Medicago truncatula]
  misc_feature (101)..(324): Homolog of NCBI NO: 30699215 NR Description: expressed protein [Arabidopsis thaliana]
  misc_feature (244)..(324): Homolog of NCBI NO: 25553563 NR Description: OSJNBa0038F22.13 [Oryza sativa (japonica
  misc_feature (78)..(251): Homolog of NCBI NO: 25553563 NR Description: OSJNBa0038F22.13 [Oryza sativa (japonica
TETLSLSPLFLVLGNPSRTKTSPRPHIARRLTCLRGRTMAAENYWRYADARQQQAMVAAAAAAAGMAPAATVAQAATAAGGMQQHQHQHQHQQAAMAQQQQQQQQQQQAAAPSLKRARPDYGDGPGGQEMAGYYPRENAGYHSLRDNEAIGASYDRYLRNGMPSVAANEPSRAVVGAMGGAAMVGGGMSGYPVDDRRMMGVVGMDSRAMGYGARPEPPLPPDASNTLYIEGLPANCTRREVSHIFRPFVGFREVRLVNKESRHPGGDPHVLCFVDFDSPAQATIALEALQGYKFDEHDRESAHLRLQFSRFPGPRSAGGPRGRR

SEQ ID NO: 65284 - protein, 286 aa, Triticum aestivum
  peptide (1)..(286): Ceres Seq. ID no. 13584632
  misc_feature (189)..(263): Pfam Name: RNA recognition motif. (a.k.a. RRM, RBD, or RNP domain) Pfam Description: RNA recognition motif. (a.k.a. RRM, RBD, or RNP
  misc_feature (12)..(77): Homolog of NCBI NO: 6448931 NR Description: zeste protein [Drosophila virilis]
  misc_feature (7)..(286): Homolog of NCBI NO: 6324132 NR Description: Protein involved in regulation of cell size;
  misc_feature (228)..(286): Homolog of NCBI NO: 15218968 NR Description: hypothetical protein [Arabidopsis thaliana]
  misc_feature (18)..(286): Homolog of NCBI NO: 25513502 NR Description: F16F4.3 protein - Arabidopsis thaliana
  misc_feature (137)..(286): Homolog of NCBI NO: 26450151 NR Description: unknown protein [Arabidopsis thaliana]
  misc_feature (87)..(283): Homolog of NCBI NO: 23304837 NR Description: RNA-binding protein [Medicago truncatula]
  misc_feature (63)..(286): Homolog of NCBI NO: 30699215 NR Description: expressed protein [Arabidopsis thaliana]
  misc_feature (206)..(286): Homolog of NCBI NO: 25553563 NR Description: OSJNBa0038F22.13 [Oryza sativa (japonica
  misc_feature (40)..(213): Homolog of NCBI NO: 25553563 NR Description: OSJNBa0038F22.13 [Oryza sativa (japonica
MAAENYWRYADARQQQAMVAAAAAAAGMAPAATVAQAATAAGGMQQHQHQHQHQQAAMAQQQQQQQQQQQAAAPSLKRARPDYGDGPGGQEMAGYYPRENAGYHSLRDNEAIGASYDRYLRNGMPSVAANEPSRAVVGAMGGAAMVGGGMSGYPVDDRRMMGVVGMDSRAMGYGARPEPPLPPDASNTLYIEGLPANCTRREVSHIFRPFVGFREVRLVNKESRHPGGDPHVLCFVDFDSPAQATIALEALQGYKFDEHDRESAHLRLQFSRFPGPRSAGGPRGRR

SEQ ID NO: 65285 - protein, 269 aa, Triticum aestivum
  peptide (1)..(269): Ceres Seq. ID no. 13584633
  misc_feature (172)..(246): Pfam Name: RNA recognition motif. (a.k.a. RRM, RBD, or RNP domain) Pfam Description: RNA recognition motif. (a.k.a. RRM, RBD, or RNP
  misc_feature (1)..(60): Homolog of NCBI NO: 6448931 NR Description: zeste protein [Drosophila virilis]
  misc_feature (1)..(269): Homolog of NCBI NO: 6324132 NR Description: Protein involved in regulation of cell size;
  misc_feature (211)..(269): Homolog of NCBI NO: 15218968 NR Description: hypothetical protein [Arabidopsis thaliana]
  misc_feature (1)..(269): Homolog of NCBI NO: 25513502 NR Description: F16F4.3 protein - Arabidopsis thaliana
  misc_feature (120)..(269): Homolog of NCBI NO: 26450151 NR Description: unknown protein [Arabidopsis thaliana]
  misc_feature (70)..(266): Homolog of NCBI NO: 23304837 NR Description: RNA-binding protein [Medicago truncatula]
  misc_feature (46)..(269): Homolog of NCBI NO: 30699215 NR Description: expressed protein [Arabidopsis thaliana]
  misc_feature (189)..(269): Homolog of NCBI NO: 25553563 NR Description: OSJNBa0038F22.13 [Oryza sativa (japonica
  misc_feature (23)..(196): Homolog of NCBI NO: 25553563 NR Description: OSJNBa0038F22.13 [Oryza sativa (japonica
MVAAAAAAAGMAPAATVAQAATAAGGMQQHQHQHQHQQAAMAQQQQQQQQQQQAAAPSLKRARPDYGDGPGGQEMAGYYPRENAGYHSLRDNEAIGASYDRYLRNGMPSVAANEPSRAVVGAMGGAAMVGGGMSGYPVDDRRMMGVVGMDSRAMGYGARPEPPLPPDASNTLYIEGLPANCTRREVSHIFRPFVGFREVRLVNKESRHPGGDPHVLCFVDFDSPAQATIALEALQGYKFDEHDRESAHLRLQFSRFPGPRSAGGPRGRR

SEQ ID NO: 65286 - DNA, 1052 bp, Triticum aestivum
  misc_feature (1)..(1052): Ceres Seq. ID no. 12617659
tgacattttctcctcccgacctccgtaccaaacacagccaaccgctccaaatcgccgaagctactctctcctatcggcgagaagaagtgggggagatcttcgtcttcagcactcgcgcgcgcaagctcattcgctccagatcttcccttaccatcgtagatctcacgaccccaagccgccacgcccccaacgaaaccctagctcgcgcccctccgccgcgtaggggcgccgccatgggcatcgtgttcacgcggctcttctcgtcggtattcggaaaccgcgaggcccgcatcctcgtcctcggcctcgacaatgccggcaagactactatcctctatcggctgcagatgggggaggtcgtttccacgatcccaacgatcgggttcaacgtggagacggtgcagtacaataacatcaagttccaagtttgggatctcggtggtcaaacaagcatcaggccatactggagatgctactttccaaacactcaggctatcatatatgttgttgattcaagtgatactgataggctggtaactgcaaaagaagaatttcattccatccttgaggaggatgagctgaaaggtgcggttgtccttgtatatgcgaataaacaggaccttccaggtgcacttgatgatgctgccataactgaatcattagaacttcacaagattaagagccgccaatgggcaattttcaaaacatctgctataaaaggggaggggctttttgaaggcttgaactggctcagtaatgcactcaagtccggaggcagctaatgtaggaggcccagcctccattccgtgaatcattgcttgatggtaaggaacagtgacgatgacagccttctcgctagtctgcgtgaaaatcagaatctctttatttcaactccggaagttatacacaatcagttatctgtagagtgcttgttgaagtttccagatacaacactaggtgtaccatgtcgagagcaagaatatatttgtagaaaataccgagcaaacgattacggtttgaaatatgtggcttacaccgcgtaaaatttcacc

SEQ ID NO: 65287 - protein, 259 aa, Triticum aestivum
  peptide (1)..(259): Ceres Seq. ID no. 12617660
  misc_feature (81)..(254): Pfam Name: ADP-ribosylation factor family Pfam Description: ADP-ribosylation factor family
  misc_feature (61)..(256): Homolog of NCBI NO: 34909214 NR Description: putative ADP-ribosylation factor
  misc_feature (78)..(254): Homolog of NCBI NO: 29841386 NR Description: similar to GenBank Accession Number M61127
  misc_feature (78)..(256): Homolog of NCBI NO: 11131026 NR Description: ADP-ribosylation factor
  misc_feature (78)..(256): Homolog of NCBI NO: 11693150 NR Description: ADP-ribosylation factor-like 1 [Rattus
  misc_feature (78)..(256): Homolog of NCBI NO: 39653273 NR Description: ADP-ribosylation factor [Medicago sativa]
  misc_feature (78)..(256): Homolog of NCBI NO: 13385340 NR Description: ADP-ribosylation-like 1 [Mus musculus]
  misc_feature (78)..(256): Homolog of NCBI NO: 4502227 NR Description: ADP-ribosylation factor-like 1 [Homo sapiens]
  misc_feature (78)..(257): Homolog of NCBI NO: 3182922 NR Description: ADP-ribosylation factor 1
  misc_feature (78)..(257): Homolog of NCBI NO: 30682545 NR Description: ADP-ribosylation factor 3 (ARF3) [Arabidopsis
  misc_feature (78)..(259): Homolog of NCBI NO: 40253742 NR Description: putative ADP-ribosylation factor 3
TFSPPDLRTKHSQPLQIAEATLSYRREEVGEIFVFSTRARKLIRSRSSLTIVDLTTPSRHAPNETLARAPPPRRGAAMGIVFTRLFSSVFGNREARILVLGLDNAGKTTILYRLQMGEVVSTIPTIGFNVETVQYNNIKFQVWDLGGQTSIRPYWRCYFPNTQAIIYVVDSSDTDRLVTAKEEFHSILEEDELKGAVVLVYANKQDLPGALDDAAITESLELHKIKSRQWAIFKTSAIKGEGLFEGLNWLSNALKSGGS

SEQ ID NO: 65288 - protein, 182 aa, Triticum aestivum
  peptide (1)..(182): Ceres Seq. ID no. 12617661
  misc_feature (4)..(177): Pfam Name: ADP-ribosylation factor family Pfam Description: ADP-ribosylation factor family
  misc_feature (1)..(179): Homolog of NCBI NO: 34909214 NR Description: putative ADP-ribosylation factor
  misc_feature (1)..(177): Homolog of NCBI NO: 29841386 NR Description: similar to GenBank Accession Number M61127
  misc_feature (1)..(179): Homolog of NCBI NO: 11131026 NR Description: ADP-ribosylation factor
  misc_feature (1)..(179): Homolog of NCBI NO: 11693150 NR Description: ADP-ribosylation factor-like 1 [Rattus
  misc_feature (1)..(179): Homolog of NCBI NO: 39653273 NR Description: ADP-ribosylation factor [Medicago sativa]
  misc_feature (1)..(179): Homolog of NCBI NO: 13385340 NR Description: ADP-ribosylation-like 1 [Mus musculus]
  misc_feature (1)..(179): Homolog of NCBI NO: 4502227 NR Description: ADP-ribosylation factor-like 1 [Homo sapiens]
  misc_feature (1)..(180): Homolog of NCBI NO: 3182922 NR Description: ADP-ribosylation factor 1
  misc_feature (1)..(180): Homolog of NCBI NO: 30682545 NR Description: ADP-ribosylation factor 3 (ARF3) [Arabidopsis
  misc_feature (1)..(182): Homolog of NCBI NO: 40253742 NR Description: putative ADP-ribosylation factor 3
MGIVFTRLFSSVFGNREARILVLGLDNAGKTTILYRLQMGEVVSTIPTIGFNVETVQYNNIKFQVWDLGGQTSIRPYWRCYFPNTQAIIYVVDSSDTDRLVTAKEEFHSILEEDELKGAVVLVYANKQDLPGALDDAAITESLELHKIKSRQWAIFKTSAIKGEGLFEGLNWLSNALKSGGS

SEQ ID NO: 65289 - protein, 144 aa, Triticum aestivum
  peptide (1)..(144): Ceres Seq. ID no. 12617662
  misc_feature (1)..(139): Pfam Name: ADP-ribosylation factor family Pfam Description: ADP-ribosylation factor family
  misc_feature (1)..(141): Homolog of NCBI NO: 34909214 NR Description: putative ADP-ribosylation factor
  misc_feature (1)..(139): Homolog of NCBI NO: 29841386 NR Description: similar to GenBank Accession Number M61127
  misc_feature (1)..(141): Homolog of NCBI NO: 11131026 NR Description: ADP-ribosylation factor
  misc_feature (1)..(141): Homolog of NCBI NO: 11693150 NR Description: ADP-ribosylation factor-like 1 [Rattus
  misc_feature (1)..(141): Homolog of NCBI NO: 39653273 NR Description: ADP-ribosylation factor [Medicago sativa]
  misc_feature (1)..(141): Homolog of NCBI NO: 13385340 NR Description: ADP-ribosylation-like 1 [Mus musculus]
  misc_feature (1)..(141): Homolog of NCBI NO: 4502227 NR Description: ADP-ribosylation factor-like 1 [Homo sapiens]
  misc_feature (1)..(142): Homolog of NCBI NO: 3182922 NR Description: ADP-ribosylation factor 1
  misc_feature (1)..(142): Homolog of NCBI NO: 30682545 NR Description: ADP-ribosylation factor 3 (ARF3) [Arabidopsis
  misc_feature (1)..(144): Homolog of NCBI NO: 40253742 NR Description: putative ADP-ribosylation factor 3
MGEVVSTIPTIGFNVETVQYNNIKFQVWDLGGQTSIRPYWRCYFPNTQAIIYVVDSSDTDRLVTAKEEFHSILEEDELKGAVVLVYANKQDLPGALDDAAITESLELHKIKSRQWAIFKTSAIKGEGLFEGLNWLSNALKSGGS

SEQ ID NO: 65290 - DNA, 561 bp, Triticum aestivum
  misc_feature (1)..(561): Ceres Seq. ID no. 13597688
ctcctctcttcgtgagcctcgactcgtgtctcctctccttccacagagagagggagcaccaccgccgcacggcccgcgtgacctagaccccgccctccgccgccgtattgattcggctgcgctgctgggagctatggcgggcggctctaggggcggcttccccgcctggatgaccgccgccgcggcgcgcatcgacctctccggcggcgccgccgccacgtccggctcacagcctccccaacctgggcctccggccgcggtggtggccgaccaggagctcgggatggccgagcgtgccctctccgccgcaagcgccgccttcatctccgccatcatcgttaaccctctcgacgtnnnnaagacgaggttgcaggcgcaggccgcgggggtgccttactaccaagcaccccagatggcggcgctcggcccggatgcgatactgtctgagttgcgatgctctccatcatgcacacgtggtatcattttgggaagcgaacctatttgcccacccgattgctttcagtacaagggaacagttgatgtattcttgaaagttgttag

SEQ ID NO: 65291 - protein, 186 aa, Triticum aestivum
  peptide (1)..(186): Ceres Seq. ID no. 13597689
  misc_feature (80)..(185): Homolog of NCBI NO: 30690323 NR Description: mitochondrial carrier protein family [Arabidopsis
  misc_feature (80)..(185): Homolog of NCBI NO: 19310377 NR Description: At2g46320/F11C10.1 [Arabidopsis thaliana]
  misc_feature (80)..(185): Homolog of NCBI NO: 25408981 NR Description: hypothetical protein At2g46320 [imported] -
  misc_feature (80)..(185): Homolog of NCBI NO: 26449442 NR Description: unknown protein [Arabidopsis thaliana]
  misc_feature (38)..(146): Homolog of NCBI NO: 40253479 NR Description: unknown protein [Oryza sativa (japonica
  misc_feature (88)..(185): Homolog of NCBI NO: 18417093 NR Description: mitochondrial carrier protein family [Arabidopsis
  misc_feature (88)..(185): Homolog of NCBI NO: 7486963 NR Description: hypothetical protein T13J8.50 - Arabidopsis
  misc_feature (38)..(185): Homolog of NCBI NO: 40253478 NR Description: putative mitochondrial carrier protein
  misc_feature (118)..(118): Xaa is any aa, unknown or other
  misc_feature (119)..(119): Xaa is any aa, unknown or other
SSLREPRLVSPLLPQREGAPPPHGPRDLDPALRRRIDSAALLGAMAGGSRGGFPAWMTAAAARIDLSGGAAATSGSQPPQPGPPAAVVADQELGMAERALSAASAAFISAIIVNPLDXXKTRLQAQAAGVPYYQAPQMAALGPDAILSELRCSPSCTRGIILGSEPICPPDCFQYKGTVDVFLKVV

SEQ ID NO: 65292 - protein, 142 aa, Triticum aestivum
  peptide (1)..(142): Ceres Seq. ID no. 13597690
  misc_feature (36)..(141): Homolog of NCBI NO: 30690323 NR Description: mitochondrial carrier protein family [Arabidopsis
  misc_feature (36)..(141): Homolog of NCBI NO: 19310377 NR Description: At2g46320/F11C10.1 [Arabidopsis thaliana]
  misc_feature (36)..(141): Homolog of NCBI NO: 25408981 NR Description: hypothetical protein At2g46320 [imported] -
  misc_feature (36)..(141): Homolog of NCBI NO: 26449442 NR Description: unknown protein [Arabidopsis thaliana]
  misc_feature (1)..(102): Homolog of NCBI NO: 40253479 NR Description: unknown protein [Oryza sativa (japonica
  misc_feature (44)..(141): Homolog of NCBI NO: 18417093 NR Description: mitochondrial carrier protein family [Arabidopsis
  misc_feature (44)..(141): Homolog of NCBI NO: 7486963 NR Description: hypothetical protein T13J8.50 - Arabidopsis
  misc_feature (1)..(141): Homolog of NCBI NO: 40253478 NR Description: putative mitochondrial carrier protein
  misc_feature (74)..(74): Xaa is any aa, unknown or other
  misc_feature (75)..(75): Xaa is any aa, unknown or other
MAGGSRGGFPAWMTAAAARIDLSGGAAATSGSQPPQPGPPAAVVADQELGMAERALSAASAAFISAIIVNPLDXXKTRLQAQAAGVPYYQAPQMAALGPDAILSELRCSPSCTRGIILGSEPICPPDCFQYKGTVDVFLKVV

SEQ ID NO: 65293 - protein, 130 aa, Triticum aestivum
  peptide (1)..(130): Ceres Seq. ID no. 13597691
  misc_feature (24)..(129): Homolog of NCBI NO: 30690323 NR Description: mitochondrial carrier protein family [Arabidopsis
  misc_feature (24)..(129): Homolog of NCBI NO: 19310377 NR Description: At2g46320/F11C10.1 [Arabidopsis thaliana]
  misc_feature (24)..(129): Homolog of NCBI NO: 25408981 NR Description: hypothetical protein At2g46320 [imported] -
  misc_feature (24)..(129): Homolog of NCBI NO: 26449442 NR Description: unknown protein [Arabidopsis thaliana]
  misc_feature (1)..(90): Homolog of NCBI NO: 40253479 NR Description: unknown protein [Oryza sativa (japonica
  misc_feature (32)..(129): Homolog of NCBI NO: 18417093 NR Description: mitochondrial carrier protein family [Arabidopsis
  misc_feature (32)..(129): Homolog of NCBI NO: 7486963 NR Description: hypothetical protein T13J8.50 - Arabidopsis
  misc_feature (1)..(129): Homolog of NCBI NO: 40253478 NR Description: putative mitochondrial carrier protein
  misc_feature (62)..(62): Xaa is any aa, unknown or other
  misc_feature (63)..(63): Xaa is any aa, unknown or other
MTAAAARIDLSGGAAATSGSQPPQPGPPAAVVADQELGMAERALSAASAAFISAIIVNPLDXXKTRLQAQAAGVPYYQAPQMAALGPDAILSELRCSPSCTRGIILGSEPICPPDCFQYKGTVDVFLKVV

SEQ ID NO: 65294 - DNA, 1436 bp, Triticum aestivum
  misc_feature (1)..(1436): Ceres Seq. ID no. 13598582
tccgccgcgcacgcacacaacctccatctcttccccccttccgcagaaccctagctgtccacaagtctcttcgtcggcgatggcggcggcggagaacgccggggacgtggcggcgggggagagccgcaagctgttcgtgggtggcatcccgtcctcagcgcaggagacggagctgcggggtcactttgcccgcttcggtgcggtgcgctcaatcgtcgtgatgcgggacaaggagtcgggccacggccgcgggttcgggttcgtcgagttcgaggacgaagaagcggccgccaaggcgctcggcgatggggagaggcccaagcacttcatctgcggccgactggtggacgttaagagggcgcgtgctagacctcctcggaacttgggcgagcaacctgtgcatcaacatcagcatcagcatcagctggaacagggtccagttcagggtcaccaagacgctggggacagtaccgaggccagtagtgacagtatgagctatgcttcaaagaaggtattcattggtggtttgcgtgacaacatcacagaggaggagttcagagcttactttgaggcgtttggcactgtaacagatgttgttgtgatatacgacagcctgacaagcaggtcaaggggttttggttttgtcacctttgattccgaggaagctgtgagaaaggtgatggggcaaagctttcatgacttgaaagggacaagggtggaagcaaagatcgctatccccaaggatgctcagtattaccgtaatggccgaggtcgtggctcaagaacctttggcggaaggggtcctgttggctttgatggttcaacataccaaccgtacaataaccgacatggtttctacaatggctatatgccacaacctgttcccacacatccctactatcatggcctctattttggtatgggaggcaatccctatgcaaatgcatatccaaaccatgcagtcatggcaaatgttccaaacatggtggcaaggcgtccagtatatagcccatatcccccaatgtatcctggctatggttttgcatacagaagtggttatgcgggtgctgcaccttctgttcagtatggcgttaatggtggcagggattacatgaatgaccaagactctatggatgtacaagaacttgacagcactgctaccattgctacaaagtttgaatacatgaagctaggttcacaatgacgttctgggcaattatttctacactgatgacagcggaagtcgcaactgtgaagacatgagctgagattctttggttgacaagtacatcattggaaattatcaacttacccccattccttgtttcaactgcatgtagactgaaaacattcaagttccaactggctgttgagctcacatgccttgtaccaatgcttaaatccttttaatgtatcagaatcagaacatttgatgc

SEQ ID NO: 65295 - protein, 400 aa, Triticum aestivum
  peptide (1)..(400): Ceres Seq. ID no. 13598583
  misc_feature (171)..(240): Pfam Name: RNA recognition motif. (a.k.a. RRM, RBD, or RNP domain) Pfam Description: RNA recognition motif. (a.k.a. RRM, RBD, or RNP
  misc_feature (43)..(86): Homolog of NCBI NO: 7439958 NR Description: probable ribonucleoprotein - Arabidopsis thaliana
  misc_feature (143)..(376): Homolog of NCBI NO: 7439958 NR Description: probable ribonucleoprotein - Arabidopsis thaliana
  misc_feature (43)..(337): Homolog of NCBI NO: 25456498 NR Description: RNA binding protein [imported] - Arabidopsis
  misc_feature (43)..(337): Homolog of NCBI NO: 15217975 NR Description: RNA-binding protein [Arabidopsis thaliana]
  misc_feature (43)..(123): Homolog of NCBI NO: 22328624 NR Description: heterogeneous nuclear ribonucleoprotein (hnRNP),
  misc_feature (143)..(376): Homolog of NCBI NO: 22328624 NR Description: heterogeneous nuclear ribonucleoprotein (hnRNP),
  misc_feature (43)..(123): Homolog of NCBI NO: 15226106 NR Description: heterogeneous nuclear ribonucleoprotein (hnRNP),
  misc_feature (143)..(363): Homolog of NCBI NO: 15226106 NR Description: heterogeneous nuclear ribonucleoprotein (hnRNP),
  misc_feature (43)..(368): Homolog of NCBI NO: 37535274 NR Description: putative RNA-binding protein
  misc_feature (24)..(400): Homolog of NCBI NO: 28201305 NR Description: putative RNA binding protein
PPRTHTTSISSPLPQNPSCPQVSSSAMAAAENAGDVAAGESRKLFVGGIPSSAQETELRGHFARFGAVRSIVVMRDKESGHGRGFGFVEFEDEEAAAKALGDGERPKHFICGRLVDVKRARARPPRNLGEQPVHQHQHQHQLEQGPVQGHQDAGDSTEASSDSMSYASKKVFIGGLRDNITEEEFRAYFEAFGTVTDVVVIYDSLTSRSRGFGFVTFDSEEAVRKVMGQSFHDLKGTRVEAKIAIPKDAQYYRNGRGRGSRTFGGRGPVGFDGSTYQPYNNRHGFYNGYMPQPVPTHPYYHGLYFGMGGNPYANAYPNHAVMANVPNMVARRPVYSPYPPMYPGYGFAYRSGYAGAAPSVQYGVNGGRDYMNDQDSMDVQELDSTATIATKFEYMKLGSQ

SEQ ID NO: 65296 - protein, 374 aa, Triticum aestivum
  peptide (1)..(374): Ceres Seq. ID no. 13598584
  misc_feature (145)..(214): Pfam Name: RNA recognition motif. (a.k.a. RRM, RBD, or RNP domain) Pfam Description: RNA recognition motif. (a.k.a. RRM, RBD, or RNP
  misc_feature (17)..(60): Homolog of NCBI NO: 7439958 NR Description: probable ribonucleoprotein - Arabidopsis thaliana
  misc_feature (117)..(350): Homolog of NCBI NO: 7439958 NR Description: probable ribonucleoprotein - Arabidopsis thaliana
  misc_feature (17)..(311): Homolog of NCBI NO: 25456498 NR Description: RNA binding protein [imported] - Arabidopsis
  misc_feature (17)..(311): Homolog of NCBI NO: 15217975 NR Description: RNA-binding protein [Arabidopsis thaliana]
  misc_feature (17)..(97): Homolog of NCBI NO: 22328624 NR Description: heterogeneous nuclear ribonucleoprotein (hnRNP),
  misc_feature (117)..(350): Homolog of NCBI NO: 22328624 NR Description: heterogeneous nuclear ribonucleoprotein (hnRNP),
  misc_feature (17)..(97): Homolog of NCBI NO: 15226106 NR Description: heterogeneous nuclear ribonucleoprotein (hnRNP),
  misc_feature (117)..(337): Homolog of NCBI NO: 15226106 NR Description: heterogeneous nuclear ribonucleoprotein (hnRNP),
  misc_feature (17)..(342): Homolog of NCBI NO: 37535274 NR Description: putative RNA-binding protein
  misc_feature (1)..(374): Homolog of NCBI NO: 28201305 NR Description: putative RNA binding protein
MAAAENAGDVAAGESRKLFVGGIPSSAQETELRGHFARFGAVRSIVVMRDKESGHGRGFGFVEFEDEEAAAKALGDGERPKHFICGRLVDVKRARARPPRNLGEQPVHQHQHQHQLEQGPVQGHQDAGDSTEASSDSMSYASKKVFIGGLRDNITEEEFRAYFEAFGTVTDVVVIYDSLTSRSRGFGFVTFDSEEAVRKVMGQSFHDLKGTRVEAKIAIPKDAQYYRNGRGRGSRTFGGRGPVGFDGSTYQPYNNRHGFYNGYMPQPVPTHPYYHGLYFGMGGNPYANAYPNHAVMANVPNMVARRPVYSPYPPMYPGYGFAYRSGYAGAAPSVQYGVNGGRDYMNDQDSMDVQELDSTATIATKFEYMKLGSQ

SEQ ID NO: 65297 - protein, 327 aa, Triticum aestivum
  peptide (1)..(327): Ceres Seq. ID no. 13598585
  misc_feature (98)..(167): Pfam Name: RNA recognition motif. (a.k.a. RRM, RBD, or RNP domain) Pfam Description: RNA recognition motif. (a.k.a. RRM, RBD, or RNP
  misc_feature (1)..(13): Homolog of NCBI NO: 7439958 NR Description: probable ribonucleoprotein - Arabidopsis thaliana
  misc_feature (70)..(303): Homolog of NCBI NO: 7439958 NR Description: probable ribonucleoprotein - Arabidopsis thaliana
  misc_feature (1)..(264): Homolog of NCBI NO: 25456498 NR Description: RNA binding protein [imported] - Arabidopsis
  misc_feature (1)..(264): Homolog of NCBI NO: 15217975 NR Description: RNA-binding protein [Arabidopsis thaliana]
  misc_feature (1)..(50): Homolog of NCBI NO: 22328624 NR Description: heterogeneous nuclear ribonucleoprotein (hnRNP),
  misc_feature (70)..(303): Homolog of NCBI NO: 22328624 NR Description: heterogeneous nuclear ribonucleoprotein (hnRNP),
  misc_feature (1)..(50): Homolog of NCBI NO: 15226106 NR Description: heterogeneous nuclear ribonucleoprotein (hnRNP),
  misc_feature (70)..(290): Homolog of NCBI NO: 15226106 NR Description: heterogeneous nuclear ribonucleoprotein (hnRNP),
  misc_feature (1)..(295): Homolog of NCBI NO: 37535274 NR Description: putative RNA-binding protein
  misc_feature (1)..(327): Homolog of NCBI NO: 28201305 NR Description: putative RNA binding protein
MRDKESGHGRGFGFVEFEDEEAAAKALGDGERPKHFICGRLVDVKRARARPPRNLGEQPVHQHQHQHQLEQGPVQGHQDAGDSTEASSDSMSYASKKVFIGGLRDNITEEEFRAYFEAFGTVTDVVVIYDSLTSRSRGFGFVTFDSEEAVRKVMGQSFHDLKGTRVEAKIAIPKDAQYYRNGRGRGSRTFGGRGPVGFDGSTYQPYNNRHGFYNGYMPQPVPTHPYYHGLYFGMGGNPYANAYPNHAVMANVPNMVARRPVYSPYPPMYPGYGFAYRSGYAGAAPSVQYGVNGGRDYMNDQDSMDVQELDSTATIATKFEYMKLGSQ

SEQ ID NO: 65298 - DNA, 1247 bp, Triticum aestivum
  misc_feature (1)..(1247): Ceres Seq. ID no. 13584577
gtgctagctagctggcctgattcgcgtgagttcatccatccatccaccatggcctccgaccgcctcgccgccctcaaggccttcgacgagaccaaggccggcgtgaagggcctcgtggacgccggcgtcaaggccgtcccggacatcttccgccaccctcccgacccgctcccccagtgcaccaaggtcgccgccatcccggtcgtcgacctctcgggtccccgctcggaggtggtcgccgcggtgagggaggcggcgcggacggcgggcttcttccagctggtgaaccacggcgtgccggaggcggccatgtcggggatgctggcggcggtgcggcggttcaacgaggagcccgcggaggccaaggcgccctactacacgcgggacgccgcgcggcgcgtgcgctacaactgcaacgccgacctcttccggaccctggtgggcaagtggcgcgacaccatctacatggacgacgtggaccggctggcggcgggcgaggaggaggaggtcctcccgccggcgtgccggggcgtcgcgcccaagtacacggcgcagatacggatgctggggcgcgcgctcttcgagctgctgtcggaggccctgggcgtgcggcgcgggtacctggaggaggaggccggctgcctggggacgctcagcgtcgccggccactactacccggcgtgcccggagccgcacctgacgctgggcgccgtcaggcacaacgaccccggcttcctcaccgtgctgctccaggacggggtcggcggcctccaggtgctcacggacgtcgaggacggcgaagggaacgtgtccgccgcgtgggccgacgtgccggcggtgccgggggcgctggtggtgaacgtcggcgacttcctgcagctggtgtccaacgacaggttcaggagcgtcgcgcaccgcgtggtggccaacagcgtggggccccggatgtcggtggcgtgcttcttcagggccaagggagcgaccgtgtgcgccccggtggtggcggacgggggtggcccgccgcgctacaggaccgtcacggcggaggagctgctccgctcgtccgggaagcagaacgggctccgcgacgtgaggctctagctggcgagcctcaagaaagcagagagcagagacgaggcgtgaatgcatgttgggacatggtgatgaaatgcgtgtcgatgaagttggagctttgcatgaatttgcttatctttgtctgaaaaataaataaatttgcttatctgctg

SEQ ID NO: 65299 - protein, 366 aa, Triticum aestivum
  peptide (1)..(366): Ceres Seq. ID no. 13584578
  misc_feature (215)..(322): Pfam Name: 2OG-Fe(II) oxygenase superfamily Pfam Description: 2OG-Fe(II) oxygenase superfamily
  misc_feature (13)..(352): Homolog of NCBI NO: 1916643 NR Description: desacetoxyvindoline 4-hydroxylase [Catharanthus
  misc_feature (20)..(350): Homolog of NCBI NO: 119640 NR Description: 1-AMINOCYCLOPROPANE-1-CARBOXYLATE OXIDASE HOMOLOG
  misc_feature (20)..(350): Homolog of NCBI NO: 15721876 NR Description: CmE8 [Cucumis melo]
  misc_feature (14)..(350): Homolog of NCBI NO: 5031283 NR Description: unknown [Prunus armeniaca]
  misc_feature (14)..(356): Homolog of NCBI NO: 30679748 NR Description: 2-oxoglutarate-dependent dioxygenase, putative
  misc_feature (15)..(352): Homolog of NCBI NO: 29123084 NR Description: 2-oxoglutarate-dependent oxygenase [Zea mays]
  misc_feature (19)..(352): Homolog of NCBI NO: 40253419 NR Description: putative 2-oxoglutarate-dependent oxygenase
  misc_feature (19)..(357): Homolog of NCBI NO: 40253427 NR Description: putative 2-oxoglutarate-dependent oxygenase
  misc_feature (19)..(357): Homolog of NCBI NO: 40253423 NR Description: putative 2-oxoglutarate-dependent oxygenase
  misc_feature (19)..(357): Homolog of NCBI NO: 40253431 NR Description: putative 2-oxoglutarate-dependent oxygenase
VLASWPDSREFIHPSTMASDRLAALKAFDETKAGVKGLVDAGVKAVPDIFRHPPDPLPQCTKVAAIPVVDLSGPRSEVVAAVREAARTAGFFQLVNHGVPEAAMSGMLAAVRRFNEEPAEAKAPYYTRDAARRVRYNCNADLFRTLVGKWRDTIYMDDVDRLAAGEEEEVLPPACRGVAPKYTAQIRMLGRALFELLSEALGVRRGYLEEEAGCLGTLSVAGHYYPACPEPHLTLGAVRHNDPGFLTVLLQDGVGGLQVLTDVEDGEGNVSAAWADVPAVPGALVVNVGDFLQLVSNDRFRSVAHRVVANSVGPRMSVACFFRAKGATVCAPVVADGGGPPRYRTVTAEELLRSSGKQNGLRDVRL

SEQ ID NO: 65300 - protein, 350 aa, Triticum aestivum
  peptide (1)..(350): Ceres Seq. ID no. 13584579
  misc_feature (199)..(306): Pfam Name: 2OG-Fe(II) oxygenase superfamily Pfam Description: 2OG-Fe(II) oxygenase superfamily
  misc_feature (1)..(336): Homolog of NCBI NO: 1916643 NR Description: desacetoxyvindoline 4-hydroxylase [Catharanthus
  misc_feature (4)..(334): Homolog of NCBI NO: 119640 NR Description: 1-AMINOCYCLOPROPANE-1-CARBOXYLATE OXIDASE HOMOLOG
  misc_feature (4)..(334): Homolog of NCBI NO: 15721876 NR Description: CmE8 [Cucumis melo]
  misc_feature (1)..(334): Homolog of NCBI NO: 5031283 NR Description: unknown [Prunus armeniaca]
  misc_feature (1)..(340): Homolog of NCBI NO: 30679748 NR Description: 2-oxoglutarate-dependent dioxygenase, putative
  misc_feature (1)..(336): Homolog of NCBI NO: 29123084 NR Description: 2-oxoglutarate-dependent oxygenase [Zea mays]
  misc_feature (3)..(336): Homolog of NCBI NO: 40253419 NR Description: putative 2-oxoglutarate-dependent oxygenase
  misc_feature (3)..(341): Homolog of NCBI NO: 40253427 NR Description: putative 2-oxoglutarate-dependent oxygenase
  misc_feature (3)..(341): Homolog of NCBI NO: 40253423 NR Description: putative 2-oxoglutarate-dependent oxygenase
  misc_feature (3)..(341): Homolog of NCBI NO: 40253431 NR Description: putative 2-oxoglutarate-dependent oxygenase
MASDRLAALKAFDETKAGVKGLVDAGVKAVPDIFRHPPDPLPQCTKVAAIPVVDLSGPRSEVVAAVREAARTAGFFQLVNHGVPEAAMSGMLAAVRRFNEEPAEAKAPYYTRDAARRVRYNCNADLFRTLVGKWRDTIYMDDVDRLAAGEEEEVLPPACRGVAPKYTAQIRMLGRALFELLSEALGVRRGYLEEEAGCLGTLSVAGHYYPACPEPHLTLGAVRHNDPGFLTVLLQDGVGGLQVLTDVEDGEGNVSAAWADVPAVPGALVVNVGDFLQLVSNDRFRSVAHRVVANSVGPRMSVACFFRAKGATVCAPVVADGGGPPRYRTVTAEELLRSSGKQNGLRDVRL

SEQ ID NO: 65301 - protein, 263 aa, Triticum aestivum
  peptide (1)..(263): Ceres Seq. ID no. 13584580
  misc_feature (112)..(219): Pfam Name: 2OG-Fe(II) oxygenase superfamily Pfam Description: 2OG-Fe(II) oxygenase superfamily
  misc_feature (1)..(249): Homolog of NCBI NO: 1916643 NR Description: desacetoxyvindoline 4-hydroxylase [Catharanthus
  misc_feature (1)..(247): Homolog of NCBI NO: 119640 NR Description: 1-AMINOCYCLOPROPANE-1-CARBOXYLATE OXIDASE HOMOLOG
  misc_feature (1)..(247): Homolog of NCBI NO: 15721876 NR Description: CmE8 [Cucumis melo]
  misc_feature (1)..(247): Homolog of NCBI NO: 5031283 NR Description: unknown [Prunus armeniaca]
  misc_feature (1)..(253): Homolog of NCBI NO: 30679748 NR Description: 2-oxoglutarate-dependent dioxygenase, putative
  misc_feature (1)..(249): Homolog of NCBI NO: 29123084 NR Description: 2-oxoglutarate-dependent oxygenase [Zea mays]
  misc_feature (1)..(249): Homolog of NCBI NO: 40253419 NR Description: putative 2-oxoglutarate-dependent oxygenase
  misc_feature (1)..(254): Homolog of NCBI NO: 40253427 NR Description: putative 2-oxoglutarate-dependent oxygenase
  misc_feature (1)..(254): Homolog of NCBI NO: 40253423 NR Description: putative 2-oxoglutarate-dependent oxygenase
  misc_feature (1)..(254): Homolog of NCBI NO: 40253431 NR Description: putative 2-oxoglutarate-dependent oxygenase
MSGMLAAVRRFNEEPAEAKAPYYTRDAARRVRYNCNADLFRTLVGKWRDTIYMDDVDRLAAGEEEEVLPPACRGVAPKYTAQIRMLGRALFELLSEALGVRRGYLEEEAGCLGTLSVAGHYYPACPEPHLTLGAVRHNDPGFLTVLLQDGVGGLQVLTDVEDGEGNVSAAWADVPAVPGALVVNVGDFLQLVSNDRFRSVAHRVVANSVGPRMSVACFFRAKGATVCAPVVADGGGPPRYRTVTAEELLRSSGKQNGLRDVRL

SEQ ID NO: 65302 - DNA, 1368 bp, Triticum aestivum
  misc_feature (1)..(1368): Ceres Seq. ID no. 13597612
acttgtcatggccttggcctccttcgcggtgtcgcccccaatcgccgcctgcgccgccgtcctccgccgcgccatgtcgttctcctccgtctccgctgcgtcgcagacgagggtgggtgtggtgcagatgacctccgtgggggacctcgacgccaactacgccacctgctcccgcctcaccaaggaagctgctgcggccggagtcaaatttctttgcttccctgaggtcttctccttcataggatccaaggatggcgagtctgttaagctagccgaaccattagatggcccaataatgcagagatattgctcacttgcaaatgagtcaagtatttggttgtctcttggagggtttcaagaaaggggcccagatgattcacaccagtacaacactcatgtattaatcgatgaatctggaaaagttaggagctcataccggaaaattcatttgtttgatgtggatgtacctggcaacatggtgtataaggaaagccgtttcacgacagcaggtgataccgtcgtagcggtggatagcccttttggacgattgggccttactgtttgctatgatttgagatttccagagctttaccaatgtttgcgttttaagcatcaagctcaggtcttgctcgtaccatctgcattcacaaaggtaactggggaagcacactgggaaattctccttcgtgctcgtgcaattgagacacaatgttatgttattgctgcggctcaagctggaaaacacaatgagaaaagagaaagctatggcgattctataattattgacccatggggaacagttatagctcgacttccagatcgactgtccactggatttgcagtagcagatatcgacttgtcaaaagttgaggctgtgcgaaccaaaatgccaatctctgtgcaccgcaagtttgagagcatctggaagtcctcatcactataatagttgaaggtggtcttgcacgcttcgccgctcttattctcacattccggagattcttcttttgtgtataataactgccattttgttcacaagatggtccagttcgattgggatttccagtgagacatgtcatagaactaaataagctacaactgtagtagcatatctagtaaatagggcatatccaaacatggctcagagcaccttatgacttggtttgagatggcttctacctcagcttatggtccagataaaccagaagccgttccaaacccaaagcttaggaacagcttaggttgtgtttgattgggccttagggtcttttaagccaaaagctcaaccaaatccagcgaatttgatgtttgtgtgtatgttgacatgtacaaatgcatggtagcggtactttcatgagtttgtcacttttt

SEQ ID NO: 65303 - protein, 313 aa, Triticum aestivum
  peptide (1)..(313): Ceres Seq. ID no. 15222147
  misc_feature (43)..(303): Homolog of NCBI NO: 39584853 NR Description: Hypothetical protein CBG13323 [Caenorhabditis
  misc_feature (23)..(303): Homolog of NCBI NO: 18204913 NR Description: nitrilase 1 [Mus musculus]
  misc_feature (27)..(303): Homolog of NCBI NO: 17556280 NR Description: Nitrilase and fragile histidine triad fusion
  misc_feature (23)..(303): Homolog of NCBI NO: 6754856 NR Description: nitrilase 1 [Mus musculus]
  misc_feature (23)..(303): Homolog of NCBI NO: 3242980 NR Description: nitrilase homolog 1 [Mus musculus]
  misc_feature (35)..(306): Homolog of NCBI NO: 28828435 NR Description: similar to Y56A3A.13.p
  misc_feature (30)..(311): Homolog of NCBI NO: 9367118 NR Description: Nit protein 1 [Xenopus laevis]
  misc_feature (17)..(303): Homolog of NCBI NO: 5031947 NR Description: nitrilase 1 [Homo sapiens]
  misc_feature (37)..(298): Homolog of NCBI NO: 25407452 NR Description: nitrilase 1 like protein [imported] - Arabidopsis
  misc_feature (37)..(302): Homolog of NCBI NO: 18413157 NR Description: nitrilase 1 like protein [Arabidopsis thaliana]
LVMALASFAVSPPIAACAAVLRRAMSFSSVSAASQTRVGVVQMTSVGDLDANYATCSRLTKEAAAAGVKFLCFPEVFSFIGSKDGESVKLAEPLDGPIMQRYCSLANESSIWLSLGGFQERGPDDSHQYNTHVLIDESGKVRSSYRKIHLFDVDVPGNMVYKESRFTTAGDTVVAVDSPFGRLGLTVCYDLRFPELYQCLRFKHQAQVLLVPSAFTKVTGEAHWEILLRARAIETQCYVIAAAQAGKHNEKRESYGDSIIIDPWGTVIARLPDRLSTGFAVADIDLSKVEAVRTKMPISVHRKFESIWKSSSL

SEQ ID NO: 65304 - protein, 311 aa, Triticum aestivum
  peptide (1)..(311): Ceres Seq. ID no. 15222148
  misc_feature (41)..(301): Homolog of NCBI NO: 39584853 NR Description: Hypothetical protein CBG13323 [Caenorhabditis
  misc_feature (21)..(301): Homolog of NCBI NO: 18204913 NR Description: nitrilase 1 [Mus musculus]
  misc_feature (25)..(301): Homolog of NCBI NO: 17556280 NR Description: Nitrilase and fragile histidine triad fusion
  misc_feature (21)..(301): Homolog of NCBI NO: 6754856 NR Description: nitrilase 1 [Mus musculus]
  misc_feature (21)..(301): Homolog of NCBI NO: 3242980 NR Description: nitrilase homolog 1 [Mus musculus]
  misc_feature (33)..(304): Homolog of NCBI NO: 28828435 NR Description: similar to Y56A3A.13.p
  misc_feature (28)..(309): Homolog of NCBI NO: 9367118 NR Description: Nit protein 1 [Xenopus laevis]
  misc_feature (15)..(301): Homolog of NCBI NO: 5031947 NR Description: nitrilase 1 [Homo sapiens]
  misc_feature (35)..(296): Homolog of NCBI NO: 25407452 NR Description: nitrilase 1 like protein [imported] - Arabidopsis
  misc_feature (35)..(300): Homolog of NCBI NO: 18413157 NR Description: nitrilase 1 like protein [Arabidopsis thaliana]
MALASFAVSPPIAACAAVLRRAMSFSSVSAASQTRVGVVQMTSVGDLDANYATCSRLTKEAAAAGVKFLCFPEVFSFIGSKDGESVKLAEPLDGPIMQRYCSLANESSIWLSLGGFQERGPDDSHQYNTHVLIDESGKVRSSYRKIHLFDVDVPGNMVYKESRFTTAGDTVVAVDSPFGRLGLTVCYDLRFPELYQCLRFKHQAQVLLVPSAFTKVTGEAHWEILLRARAIETQCYVIAAAQAGKHNEKRESYGDSIIIDPWGTVIARLPDRLSTGFAVADIDLSKVEAVRTKMPISVHRKFESIWKSSSL

SEQ ID NO: 65305 - protein, 289 aa, Triticum aestivum
  peptide (1)..(289): Ceres Seq. ID no. 15222149
  misc_feature (19)..(279): Homolog of NCBI NO: 39584853 NR Description: Hypothetical protein CBG13323 [Caenorhabditis
  misc_feature (1)..(279): Homolog of NCBI NO: 18204913 NR Description: nitrilase 1 [Mus musculus]
  misc_feature (3)..(279): Homolog of NCBI NO: 17556280 NR Description: Nitrilase and fragile histidine triad fusion
  misc_feature (1)..(279): Homolog of NCBI NO: 6754856 NR Description: nitrilase 1 [Mus musculus]
  misc_feature (1)..(279): Homolog of NCBI NO: 3242980 NR Description: nitrilase homolog 1 [Mus musculus]
  misc_feature (11)..(282): Homolog of NCBI NO: 28828435 NR Description: similar to Y56A3A.13.p
  misc_feature (6)..(287): Homolog of NCBI NO: 9367118 NR Description: Nit protein 1 [Xenopus laevis]
  misc_feature (1)..(279): Homolog of NCBI NO: 5031947 NR Description: nitrilase 1 [Homo sapiens]
  misc_feature (13)..(274): Homolog of NCBI NO: 25407452 NR Description: nitrilase 1 like protein [imported] - Arabidopsis
  misc_feature (13)..(278): Homolog of NCBI NO: 18413157 NR Description: nitrilase 1 like protein [Arabidopsis thaliana]
MSFSSVSAASQTRVGVVQMTSVGDLDANYATCSRLTKEAAAAGVKFLCFPEVFSFIGSKDGESVKLAEPLDGPIMQRYCSLANESSIWLSLGGFQERGPDDSHQYNTHVLIDESGKVRSSYRKIHLFDVDVPGNMVYKESRFTTAGDTVVAVDSPFGRLGLTVCYDLRFPELYQCLRFKHQAQVLLVPSAFTKVTGEAHWEILLRARAIETQCYVIAAAQAGKHNEKRESYGDSIIIDPWGTVIARLPDRLSTGFAVADIDLSKVEAVRTKMPISVHRKFESIWKSSSL

SEQ ID NO: 65306 - DNA, 936 bp, Triticum aestivum
  misc_feature (1)..(936): Ceres Seq. ID no. 15178534
gaaatcgcacaatctcagaggccaaaaccctcgcccccaaacaccccaccgccggcgatctcctcctcctcctccgatggatctctcagctgtccacgccgcgctctccgccaagtcctactccgccatcgccaccctctgcgacgacctcctcctccaggttgcgtcccggggcgtcgccaccgacgactggccttacgccgttcatctcctcgcccatctctacctcaacgacctgaacagcgcgaggtttctatggaaaacggtgccgcaggaggtgaaggaagctcatccggagctgggcgccatctggaagattggccagtgcctctggaaccgtgactatgctggggtctatacttccgcacaggggttcgagtgggggcctgaaatcgctgattttgtggccggcttcctagaaagctacagaaagaggatatttgagctgttgacttctgcgtataccacaatcagcattgcagatgtggctcacttcatggggatgagcgaggaggatgctactaactatgcggtgcaaaatggttggagtctggatgtggcaaccaagatgcttactgtcagaaaacagaagccccagactaaccagaagcttgatgcaagcaaactgcagcgtttgaccgaatgtgttttccacctggagcactgatgccatccgttccgcttttaaggcgcctattaatcgtacatggtggtagcttaatactgcacggctagattgtgttttggctggaaaggagagatcgctctgtactgaatatgcgtcttctggttgagcgagcttgccatttctgtcttgtttgcttgttaacaaggagtgcgtgtattgaagttaagcgaatgattactgtgcctatgttgaacctattagttgttttaagtgatgtgaagtttgaaattagaaaaaaaaaaaaaaaa

SEQ ID NO: 65307 - protein, 221 aa, Triticum aestivum
  peptide (1)..(221): Ceres Seq. ID no. 15178535
  misc_feature (34)..(195): Homolog of NCBI NO: 5729779 NR Description: COP9 homolog [Homo sapiens]
  misc_feature (36)..(198): Homolog of NCBI NO: 38648875 NR Description: Unknown (protein for MGC:72985) [Rattus
  misc_feature (43)..(221): Homolog of NCBI NO: 28374344 NR Description: Similar to COP9 homolog [Danio rerio]
  misc_feature (39)..(221): Homolog of NCBI NO: 38566156 NR Description: COP9 signalosome subunit 8 isoform 1 [Silurana
  misc_feature (26)..(139): Homolog of NCBI NO: 34897554 NR Description: OSJNBa0042L16.14 [Oryza sativa (japonica
  misc_feature (26)..(221): Homolog of NCBI NO: 15236410 NR Description: COP9 protein [Arabidopsis thaliana]
  misc_feature (26)..(221): Homolog of NCBI NO: 7484675 NR Description: multisubunit regulator protein COP9 - spinach
  misc_feature (26)..(221): Homolog of NCBI NO: 29468343 NR Description: CSN8 [Nicotiana benthamiana]
  misc_feature (26)..(221): Homolog of NCBI NO: 38345448 NR Description: OSJNBa0042L16.3 [Oryza sativa (japonica
KSHNLRGQNPRPQTPHRRRSPPPPPMDLSAVHAALSAKSYSAIATLCDDLLLQVASRGVATDDWPYAVHLLAHLYLNDLNSARFLWKTVPQEVKEAHPELGAIWKIGQCLWNRDYAGVYTSAQGFEWGPEIADFVAGFLESYRKRIFELLTSAYTTISIADVAHFMGMSEEDATNYAVQNGWSLDVATKMLTVRKQKPQTNQKLDASKLQRLTECVFHLEH

SEQ ID NO: 65308 - protein, 196 aa, Triticum aestivum
  peptide (1)..(196): Ceres Seq. ID no. 15178536
  misc_feature (9)..(170): Homolog of NCBI NO: 5729779 NR Description: COP9 homolog [Homo sapiens]
  misc_feature (11)..(173): Homolog of NCBI NO: 38648875 NR Description: Unknown (protein for MGC:72985) [Rattus
  misc_feature (18)..(196): Homolog of NCBI NO: 28374344 NR Description: Similar to COP9 homolog [Danio rerio]
  misc_feature (14)..(196): Homolog of NCBI NO: 38566156 NR Description: COP9 signalosome subunit 8 isoform 1 [Silurana
  misc_feature (1)..(114): Homolog of NCBI NO: 34897554 NR Description: OSJNBa0042L16.14 [Oryza sativa (japonica
  misc_feature (1)..(196): Homolog of NCBI NO: 15236410 NR Description: COP9 protein [Arabidopsis thaliana]
  misc_feature (1)..(196): Homolog of NCBI NO: 7484675 NR Description: multisubunit regulator protein COP9 - spinach
  misc_feature (1)..(196): Homolog of NCBI NO: 29468343 NR Description: CSN8 [Nicotiana benthamiana]
  misc_feature (1)..(196): Homolog of NCBI NO: 38345448 NR Description: OSJNBa0042L16.3 [Oryza sativa (japonica
MDLSAVHAALSAKSYSAIATLCDDLLLQVASRGVATDDWPYAVHLLAHLYLNDLNSARFLWKTVPQEVKEAHPELGAIWKIGQCLWNRDYAGVYTSAQGFEWGPEIADFVAGFLESYRKRIFELLTSAYTTISIADVAHFMGMSEEDATNYAVQNGWSLDVATKMLTVRKQKPQTNQKLDASKLQRLTECVFHLEH

SEQ ID NO: 65309 - protein, 113 aa, Triticum aestivum
  peptide (1)..(113): Ceres Seq. ID no. 15178537
EIAQSQRPKPSPPNTPPPAISSSSSDGSLSCPRRALRQVLLRHRHPLRRPPPPGCVPGRRHRRLALRRSSPRPSLPQRPEQREVSMENGAAGGEGSSSGAGRHLEDWPVPLEP

SEQ ID NO: 65310 - DNA, 1130 bp, Triticum aestivum
  misc_feature (1)..(1130): Ceres Seq. ID no. 13656105
atcccagccctacctgccattttcctccgttcgttcatctccttcgcctcgccaccgtccctcctcctctcttccctccctcatccctcatctcgtgtcggctcgaaagtcgaaaccctagaccaaccaccctcccctagtacgtaggaacagggacagagatgtatgcagaccagatctccaccggccgcaagcgctccatccatgaccgccttgacgccgacctcccctccgaccgcggcggcgcggacgccgccggccgggctcgtaacgcgctgtccaagaggcaacgacaaactgatgataaatggaagcatgatctttaccgggatgatgaatcagcttcaagatcagttgatccacgggatttgcgattcaagcttcagaagaaaagctctcagcaagggtttgctggccaaaagggttccggggtacgtgatctacgtgagatgttatctggaacaatgcacgcacaaccatcaaatgttgaccctcaaaagaggaaaccggtgtcagaggttgtgaaagtcacaaggcgtgaaattgttgatgaaaggcctgtacgcctaagtaagaaagtatcaaaaccatcaacatccaagaagacttctcagccaaaggctgaaagtccactcgacagttttctgaaatcacttggacttgagaagtattctattaccttccaggcggaggaggttgacatggcggccctacgtcacatgactgaaagtgatctcaaggcgttgggcatcccgatgggtcctaggaagaagattacccttgccttggaatccagagcgtagggcaatgtccctggagtacaatgtagaaaagcagggagatgtggtaggtttttgctcatctgcaaatttggcatatcttggaaagcagtggtacaggtaaacaatgcggtgtctcttgtaatggcatgttgctgtaagattattagactgctgttgtttatctggtctgcatgctttcctggccagaccagctgatttaactgatgaggtatccgtgctgttgaagctgcggtgatgttctcgctgtatactattattatgccttttttttcattggaaactggcattattagagtaatagagttgagattcttcagttagtatttc

SEQ ID NO: 65311 - protein, 213 aa, Triticum aestivum; identical to SEQ ID NO: 56059
  peptide (1)..(213): Ceres Seq. ID no. 13656106
  misc_feature (153)..(209): Pfam Name: SAM domain (Sterile alpha motif) Pfam Description: SAM domain (Sterile alpha motif)
  misc_feature (143)..(211): Homolog of NCBI NO: 22330538 NR Description: expressed protein [Arabidopsis thaliana]
  misc_feature (140)..(209): Homolog of NCBI NO: 38345636 NR Description: OSJNBb0048E02.6 [Oryza sativa (japonica
  misc_feature (1)..(209): Homolog of NCBI NO: 30695517 NR Description: expressed protein [Arabidopsis thaliana]
  misc_feature (1)..(212): Homolog of NCBI NO: 18397861 NR Description: expressed protein [Arabidopsis thaliana]
  misc_feature (1)..(199): Homolog of NCBI NO: 39546279 NR Description: OSJNBa0083D01.12 [Oryza sativa (japonica

SEQ ID NO: 65312 - protein, 119 aa, Triticum aestivum; identical to SEQ ID NO: 56060
  peptide (1)..(119): Ceres Seq. ID no. 13656107

SEQ ID NO: 65313 - protein, 117 aa, Triticum aestivum; identical to SEQ ID NO: 56061
  peptide (1)..(117): Ceres Seq. ID no. 13656108
  misc_feature (57)..(113): Pfam Name: SAM domain (Sterile alpha motif) Pfam Description: SAM domain (Sterile alpha motif)
  misc_feature (47)..(115): Homolog of NCBI NO: 22330538 NR Description: expressed protein [Arabidopsis thaliana]
  misc_feature (44)..(113): Homolog of NCBI NO: 38345636 NR Description: OSJNBb0048E02.6 [Oryza sativa (japonica
  misc_feature (1)..(113): Homolog of NCBI NO: 30695517 NR Description: expressed protein [Arabidopsis thaliana]
  misc_feature (1)..(116): Homolog of NCBI NO: 18397861 NR Description: expressed protein [Arabidopsis thaliana]
  misc_feature (1)..(103): Homolog of NCBI NO: 39546279 NR Description: OSJNBa0083D01.12 [Oryza sativa (japonica

SEQ ID NO: 65314 - DNA, 1128 bp, Triticum aestivum
  misc_feature (1)..(1128): Ceres Seq. ID no. 12617704
ctaggtctaagcagagctctttttttggtcgctcctcgacctcggggtggaaatcgtaaaagctctgggcgaagagaaaccccctttcctccgcaccgatgttctccgctgttcgatcccgagccctcggccgatggcgcccgccgccgcaccttctcccgcgcctcctctcctccgccggcgcctcgtcggcccggccggcggagcttatcgagctctcggaggtggagaaggtgctgcacgacgtccgggcgggggacgtgcgtgtgttccccgtcggcgagggcgggctccacggcggcgcttgtgcggactacatggtcgtcgccaccggccgctccgactggcacgtccgcaacatcgctcaggccatactttacaagataaagcagaaacagaagggttctaatcgaatattgatgccgagtgtagaaggccagcaagctggaaagtgggttgtcattgattctggaagtatcatcatccacgcgcttgaagaaagagcaagagagtactatgatttggaaagtatttggacaaaggcggtgtcccctaacatttctgttcaggagttggagacctcacttgtgaagacgcgccgcagggacctgtcacaaaaacccatgaagagcatttgagttaatgtgctgcggtctgtagtgggtttgttcaaggtttgtcagattggcagcgtcaagcttgtttgtgtcaagaaccttggaaggataggcttgcaaggttgcttgtgaatgagaccgtctggattcatgccagcatgatgtctctctgtcaagtttgcttcagctatcttttatcatgtcgtcgtttgcaagttcaagccaagattgtggactttttttgcttctttcattttgttattcaccccttcgttggatggtaatcataatactatactatcttgaagccaaggtaacacgttggacaatttagggtgtgtttgtttgggctgcaacttctaagttgcaacggctccctctggaaggaggagctgtagttgttaggttgacgatgaggtgcagctgtttggtagttttgttgtagcagctatggctgatgctgaaatgtgccgtcatacttgtagttgcgatcacatttaaatacttagat

SEQ ID NO: 65315 - protein, 179 aa, Triticum aestivum
  peptide (1)..(179): Ceres Seq. ID no. 12617705
  misc_feature (37)..(147): Pfam Name: Domain of unknown function DUF143 Pfam Description: Domain of unknown function DUF143
  misc_feature (37)..(158): Homolog of NCBI NO: 22983541 NR Description: hypothetical protein [Burkholderia fungorum]
  misc_feature (40)..(147): Homolog of NCBI NO: 21232046 NR Description: conserved hypothetical protein
  misc_feature (65)..(152): Homolog of NCBI NO: 22962163 NR Description: hypothetical protein [Rhodopseudomonas palustris]
  misc_feature (28)..(152): Homolog of NCBI NO: 17936652 NR Description: conserved hypothetical protein
  misc_feature (28)..(152): Homolog of NCBI NO: 15890026 NR Description: AGR_C_5039p [Agrobacterium tumefaciens]
  misc_feature (1)..(146): Homolog of NCBI NO: 23109914 NR Description: hypothetical protein [Novosphingobium
  misc_feature (49)..(149): Homolog of NCBI NO: 39998299 NR Description: iojap-related protein [Geobacter sulfurreducens
  misc_feature (72)..(147): Homolog of NCBI NO: 33519773 NR Description: conserved hypothetical protein
  misc_feature (1)..(177): Homolog of NCBI NO: 21536608 NR Description: unknown [Arabidopsis thaliana]
  misc_feature (1)..(177): Homolog of NCBI NO: 18408812 NR Description: expressed protein
MFSAVRSRALGRWRPPPHLLPRLLSSAGASSARPAELIELSEVEKVLHDVRAGDVRVFPVGEGGLHGGACADYMVVATGRSDWHVRNIAQAILYKIKQKQKGSNRILMPSVEGQQAGKWVVIDSGSIIIHALEERAREYYDLESIWTKAVSPNISVQELETSLVKTRRRDLSQKPMKSI

SEQ ID NO: 65316 - protein, 128 aa, Triticum aestivum
  peptide (1)..(128): Ceres Seq. ID no. 12617706
LGLSRALFLVAPRPRGGNRKSSGRRETPFPPHRCSPLFDPEPSADGARRRTFSRASSPPPAPRRPGRRSLSSSRRWRRCCTTSGRGTCVCSPSARAGSTAALVRTTWSSPPAAPTGTSATSLRPYFTR

SEQ ID NO: 65317 - protein, 106 aa, Triticum aestivum
  peptide (1)..(106): Ceres Seq. ID no. 12617707
  misc_feature (1)..(74): Pfam Name: Domain of unknown function DUF143 Pfam Description: Domain of unknown function DUF143
  misc_feature (1)..(85): Homolog of NCBI NO: 22983541 NR Description: hypothetical protein [Burkholderia fungorum]
  misc_feature (1)..(74): Homolog of NCBI NO: 21232046 NR Description: conserved hypothetical protein
  misc_feature (1)..(79): Homolog of NCBI NO: 22962163 NR Description: hypothetical protein [Rhodopseudomonas palustris]
  misc_feature (1)..(79): Homolog of NCBI NO: 17936652 NR Description: conserved hypothetical protein
  misc_feature (1)..(79): Homolog of NCBI NO: 15890026 NR Description: AGR_C_5039p [Agrobacterium tumefaciens]
  misc_feature (1)..(73): Homolog of NCBI NO: 23109914 NR Description: hypothetical protein [Novosphingobium
  misc_feature (1)..(76): Homolog of NCBI NO: 39998299 NR Description: iojap-related protein [Geobacter sulfurreducens
  misc_feature (1)..(74): Homolog of NCBI NO: 33519773 NR Description: conserved hypothetical protein
  misc_feature (1)..(104): Homolog of NCBI NO: 21536608 NR Description: unknown [Arabidopsis thaliana]
  misc_feature (1)..(104): Homolog of NCBI NO: 18408812 NR Description: expressed protein
MVVATGRSDWHVRNIAQAILYKIKQKQKGSNRILMPSVEGQQAGKWVVIDSGSIIIHALEERAREYYDLESIWTKAVSPNISVQELETSLVKTRRRDLSQKPMKSI

SEQ ID NO: 65318 - DNA, 1184 bp, Triticum aestivum
  misc_feature (1)..(1184): Ceres Seq. ID no. 14303553
ttttttcttcttgctcagcctcggacgcaatggccgccgttggtcttctcggcgtgcgtccagctccggcgaccggccgccttgagaggcaggcgagggcttcacctgacgcggttagctggggctggcgtgcccgcgcgcgcccccttcggtccgttccgccgcccgggcgagcggggaggggcggggcaagggcggcgaggcccttgcgcgccgcgatgggcggcggcgacctgtacgccctcgacttcgacggcgtcttctgcgacagctgcggcgagagctccctctccgccgtcaaggccgccaaggtgaggtggccgtgggcgtttgagcaggtcgacgccgccatggaagagtggatagtggagcagatgcacacccttcgtccagtgatagaaacaggatatgagaacctgttgcttgtaaggttgcttgttgagatccagataccctctgctcgaaagtcatcagttgcagatgggcttagcatccaagaaatattggacaactggtcaaaactgttgcccactctcatggacgagtggcaagaagatagggaatctcttgtagatctctttggccgtgtaagggatgactggcttgaaaatgatttgtctggctggataggtgctaacaggttttatcctgggacggctgatgcattaaagctttcaagctctgaactttacatagtcacaacaaaacagagtagatttactggagcactacttaaagaattggctggagtagattttccctctgaaaggatatatggccttggcactggtccgaaggtaaaagttctccagcagttgcaggaaatgccacagcaccaaggtcttacacttcatttcgtcgaggaccgactagcaactctgaagaacgtgataaaagaaccagcgctggacaaatggaacctctacctggtgaaatggggatacaacacgcaagaagagagggaagaagcaggggccatatcgaggatccagctcatcgatctcccagatttcagtaagcagctgaaataagtaactggcagacctagatgcagccttcgaaactttgtttttgttggacgcgctcgtaaacagcaacggatttacttgacttttatttattattgtttgcatatttgtgaagtggtttatttcgtcagttctcctagagactgactttaccag

SEQ ID NO: 65319 - protein, 342 aa, Triticum aestivum
  peptide (1)..(342): Ceres Seq. ID no. 14303554
  misc_feature (78)..(273): Pfam Name: haloacid dehalogenase-like hydrolase Pfam Description: haloacid dehalogenase-like hydrolase
  misc_feature (78)..(337): Homolog of NCBI NO: 22299234 NR Description: ORF_ID:tlr1691~hypothetical protein
  misc_feature (78)..(338): Homolog of NCBI NO: 16331243 NR Description: unknown protein [Synechocystis sp. PCC 6803]
  misc_feature (77)..(338): Homolog of NCBI NO: 37521612 NR Description: hypothetical protein glr2043 [Gloeobacter
  misc_feature (78)..(339): Homolog of NCBI NO: 23124072 NR Description: hypothetical protein [Nostoc punctiforme]
  misc_feature (78)..(339): Homolog of NCBI NO: 17231355 NR Description: hypothetical protein [Nostoc sp. PCC 7120]
  misc_feature (155)..(303): Homolog of NCBI NO: 16660293 NR Description: hypothetical protein [Musa acuminata]
  misc_feature (260)..(284): Homolog of NCBI NO: 38194220 NR Description: unknown protein [Oryza sativa (japonica
  misc_feature (75)..(263): Homolog of NCBI NO: 38194220 NR Description: unknown protein [Oryza sativa (japonica
  misc_feature (76)..(342): Homolog of NCBI NO: 18406942 NR Description: expressed protein [Arabidopsis thaliana]
  misc_feature (75)..(342): Homolog of NCBI NO: 22324441 NR Description: contains ESTs
FSSCSASDAMAAVGLLGVRPAPATGRLERQARASPDAVSWGWRARARPLRSVPPPGRAGRGGARAARPLRAAMGGGDLYALDFDGVFCDSCGESSLSAVKAAKVRWPWAFEQVDAAMEEWIVEQMHTLRPVIETGYENLLLVRLLVEIQIPSARKSSVADGLSIQEILDNWSKLLPTLMDEWQEDRESLVDLFGRVRDDWLENDLSGWIGANRFYPGTADALKLSSSELYIVTTKQSRFTGALLKELAGVDFPSERIYGLGTGPKVKVLQQLQEMPQHQGLTLHFVEDRLATLKNVIKEPALDKWNLYLVKWGYNTQEEREEAGAISRIQLIDLPDFSKQLK

SEQ ID NO: 65320 - protein, 333 aa, Triticum aestivum
  peptide (1)..(333): Ceres Seq. ID no. 14303555
  misc_feature (69)..(264): Pfam Name: haloacid dehalogenase-like hydrolase Pfam Description: haloacid dehalogenase-like hydrolase
  misc_feature (69)..(328): Homolog of NCBI NO: 22299234 NR Description: ORF_ID:tlr1691~hypothetical protein
  misc_feature (69)..(329): Homolog of NCBI NO: 16331243 NR Description: unknown protein [Synechocystis sp. PCC 6803]
  misc_feature (68)..(329): Homolog of NCBI NO: 37521612 NR Description: hypothetical protein glr2043 [Gloeobacter
  misc_feature (69)..(330): Homolog of NCBI NO: 23124072 NR Description: hypothetical protein [Nostoc punctiforme]
  misc_feature (69)..(330): Homolog of NCBI NO: 17231355 NR Description: hypothetical protein [Nostoc sp. PCC 7120]
  misc_feature (146)..(294): Homolog of NCBI NO: 16660293 NR Description: hypothetical protein [Musa acuminata]
  misc_feature (251)..(275): Homolog of NCBI NO: 38194220 NR Description: unknown protein [Oryza sativa (japonica
  misc_feature (66)..(254): Homolog of NCBI NO: 38194220 NR Description: unknown protein [Oryza sativa (japonica
  misc_feature (67)..(333): Homolog of NCBI NO: 18406942 NR Description: expressed protein [Arabidopsis thaliana]
  misc_feature (66)..(333): Homolog of NCBI NO: 22324441 NR Description: contains ESTs
MAAVGLLGVRPAPATGRLERQARASPDAVSWGWRARARPLRSVPPPGRAGRGGARAARPLRAAMGGGDLYALDFDGVFCDSCGESSLSAVKAAKVRWPWAFEQVDAAMEEWIVEQMHTLRPVIETGYENLLLVRLLVEIQIPSARKSSVADGLSIQEILDNWSKLLPTLMDEWQEDRESLVDLFGRVRDDWLENDLSGWIGANRFYPGTADALKLSSSELYIVTTKQSRFTGALLKELAGVDFPSERIYGLGTGPKVKVLQQLQEMPQHQGLTLHFVEDRLATLKNVIKEPALDKWNLYLVKWGYNTQEEREEAGAISRIQLIDLPDFSKQLK

SEQ ID NO: 65321 - protein, 270 aa, Triticum aestivum
  peptide (1)..(270): Ceres Seq. ID no. 14303556
  misc_feature (6)..(201): Pfam Name: haloacid dehalogenase-like hydrolase Pfam Description: haloacid dehalogenase-like hydrolase
  misc_feature (6)..(265): Homolog of NCBI NO: 22299234 NR Description: ORF_ID:tlr1691~hypothetical protein
  misc_feature (6)..(266): Homolog of NCBI NO: 16331243 NR Description: unknown protein [Synechocystis sp. PCC 6803]
  misc_feature (5)..(266): Homolog of NCBI NO: 37521612 NR Description: hypothetical protein glr2043 [Gloeobacter
  misc_feature (6)..(267): Homolog of NCBI NO: 23124072 NR Description: hypothetical protein [Nostoc punctiforme]
  misc_feature (6)..(267): Homolog of NCBI NO: 17231355 NR Description: hypothetical protein [Nostoc sp. PCC 7120]
  misc_feature (83)..(231): Homolog of NCBI NO: 16660293 NR Description: hypothetical protein [Musa acuminata]
  misc_feature (188)..(212): Homolog of NCBI NO: 38194220 NR Description: unknown protein [Oryza sativa (japonica
  misc_feature (3)..(191): Homolog of NCBI NO: 38194220 NR Description: unknown protein [Oryza sativa (japonica
  misc_feature (4)..(270): Homolog of NCBI NO: 18406942 NR Description: expressed protein [Arabidopsis thaliana]
  misc_feature (3)..(270): Homolog of NCBI NO: 22324441 NR Description: contains ESTs
MGGGDLYALDFDGVFCDSCGESSLSAVKAAKVRWPWAFEQVDAAMEEWIVEQMHTLRPVIETGYENLLLVRLLVEIQIPSARKSSVADGLSIQEILDNWSKLLPTLMDEWQEDRESLVDLFGRVRDDWLENDLSGWIGANRFYPGTADALKLSSSELYIVTTKQSRFTGALLKELAGVDFPSERIYGLGTGPKVKVLQQLQEMPQHQGLTLHFVEDRLATLKNVIKEPALDKWNLYLVKWGYNTQEEREEAGAISRIQLIDLPDFSKQLK

SEQ ID NO: 65322 - DNA, 1547 bp, Triticum aestivum
  misc_feature (1)..(1547): Ceres Seq. ID no. 13597580
atcgaaaaatcgatgcaattcgggaaaaaaaggaaaacgtgggaactggaatatccccacttctccgcggaaccccccaccatttctcctctctgctctcaagctcgctcgcaccaatggccggctcccggctcgtccatctcttccttctcatcctcttcttcccctccctccgcgccgcccccaacaccaccgccgtggtgtccaggatcgcatttggctcctgcgccaaccagagcgcgccccagcccgtgtgggaggccatcgtggggttcgacccgcaggtcttcatctggctcggggacaacgtctacggggacaacaagcgcccgttccgggtgttcgggagggagcgcacggtggggccctggaggaacgtgccgcgcttctacccggcgaccgaggaggagctgcgccggaagtacgagctggccaaggctaacccggggtacgccaagctgagggagagggctagggtcattggaacatgggatgaccatgattatggagtgaatgatgcaggaaaggaatatagtgggaaagtgttatcccaaaggcttctattagatttcctggatgaagacgaagacagtccacggaggaaacaagcaggtgtttatgcctcatacatgtttggccccgaaggaaaacgtgtaaaggtaataatgttggacaccagatatcacagagacccactcttaagtgatggaactatacttggagatcctcagtggcagtggctggagagggagctacgtggtcctcagtcagagatgaccatcattggatcttcaattcaggtggtgtccaatctttctgccaccactcgacctttgttctatgtggagtcttgggcatgctttccgagggaaagagaacggctgtttagactgatcgatagcacaatatttcaatctgttatgagacttctggcttggctgacaccaacccccatgcgagtcttcagccctaactgccgtcacaaatcatgctcatatggtcagccaaattttggagcaatcgaaatagattggaatgcagtaactccacgggttaaaattgaactaagagatttacagggcaattctgttgatggtgtggagttccctatatctgagctgaagccatcaantgcacatgcaaacaaaaaagaagggcattcttttgaagcacattgtagtctcgaaacagagcttccatggctgctacggtaccgccttgcgatgctattctttggcaccattgccgtttttgtcgttgctttggtgcttgtcggaatcgcttgctgttcagctactaaaatgtttactaggaagtgcaagatggcatagctacacatgacagtggacaagagcagagacttttcgatctgactagtgttggacactgaccaggtgagcagggatgttgattggccaaggatcaacatgacacttacttgattgtgaatatggcacgctgtgagcacatactggaaagtgtaacgaagctgtgacgagtcttcatataggtggagaaatgatgccatggaaatccgtttggttggc

SEQ ID NO: 65323 - protein, 442 aa, Triticum aestivum
  peptide (1)..(442): Ceres Seq. ID no. 15222137
  misc_feature (73)..(309): Homolog of NCBI NO: 37519932 NR Description: hypothetical protein gll0363 [Gloeobacter
  misc_feature (129)..(231): Homolog of NCBI NO: 23491463 NR Description: Arabidopsis thaliana P42251 [Plasmodium yoelii
  misc_feature (234)..(301): Homolog of NCBI NO: 23613643 NR Description: hypothetical protein, conserved [Plasmodium
  misc_feature (141)..(231): Homolog of NCBI NO: 23613643 NR Description: hypothetical protein, conserved [Plasmodium
  misc_feature (304)..(441): Homolog of NCBI NO: 13430796 NR Description: unknown protein [Arabidopsis thaliana]
  misc_feature (45)..(301): Homolog of NCBI NO: 13430796 NR Description: unknown protein [Arabidopsis thaliana]
  misc_feature (304)..(441): Homolog of NCBI NO: 15238950 NR Description: expressed protein [Arabidopsis thaliana]
  misc_feature (45)..(301): Homolog of NCBI NO: 15238950 NR Description: expressed protein [Arabidopsis thaliana]
  misc_feature (377)..(377): Xaa is any aa, unknown or other
RKIDAIREKKENVGTGISPLLRGTPHHFSSLLSSSLAPMAGSRLVHLFLLILFFPSLRAAPNTTAVVSRIAFGSCANQSAPQPVWEAIVGFDPQVFIWLGDNVYGDNKRPFRVFGRERTVGPWRNVPRFYPATEEELRRKYELAKANPGYAKLRERARVIGTWDDHDYGVNDAGKEYSGKVLSQRLLLDFLDEDEDSPRRKQAGVYASYMFGPEGKRVKVIMLDTRYHRDPLLSDGTILGDPQWQWLERELRGPQSEMTIIGSSIQVVSNLSATTRPLFYVESWACFPRERERLFRLIDSTIFQSVMRLLAWLTPTPMRVFSPNCRHKSCSYGQPNFGAIEIDWNAVTPRVKIELRDLQGNSVDGVEFPISELKPSXAHANKKEGHSFEAHCSLETELPWLLRYRLAMLFFGTIAVFVVALVLVGIACCSATKMFTRKCKMA

SEQ ID NO: 65324 - protein, 404 aa, Triticum aestivum
  peptide (1)..(404): Ceres Seq. ID no. 15222138
  misc_feature (35)..(271): Homolog of NCBI NO: 37519932 NR Description: hypothetical protein gll0363 [Gloeobacter
  misc_feature (91)..(193): Homolog of NCBI NO: 23491463 NR Description: Arabidopsis thaliana P42251 [Plasmodium yoelii
  misc_feature (196)..(263): Homolog of NCBI NO: 23613643 NR Description: hypothetical protein, conserved [Plasmodium
  misc_feature (103)..(193): Homolog of NCBI NO: 23613643 NR Description: hypothetical protein, conserved [Plasmodium
  misc_feature (266)..(403): Homolog of NCBI NO: 13430796 NR Description: unknown protein [Arabidopsis thaliana]
  misc_feature (7)..(263): Homolog of NCBI NO: 13430796 NR Description: unknown protein [Arabidopsis thaliana]
  misc_feature (266)..(403): Homolog of NCBI NO: 15238950 NR Description: expressed protein [Arabidopsis thaliana]
  misc_feature (7)..(263): Homolog of NCBI NO: 15238950 NR Description: expressed protein [Arabidopsis thaliana]
  misc_feature (339)..(339): Xaa is any aa, unknown or other
MAGSRLVHLFLLILFFPSLRAAPNTTAVVSRIAFGSCANQSAPQPVWEAIVGFDPQVFIWLGDNVYGDNKRPFRVFGRERTVGPWRNVPRFYPATEEELRRKYELAKANPGYAKLRERARVIGTWDDHDYGVNDAGKEYSGKVLSQRLLLDFLDEDEDSPRRKQAGVYASYMFGPEGKRVKVIMLDTRYHRDPLLSDGTILGDPQWQWLERELRGPQSEMTIIGSSIQVVSNLSATTRPLFYVESWACFPRERERLFRLIDSTIFQSVMRLLAWLTPTPMRVFSPNCRHKSCSYGQPNFGAIEIDWNAVTPRVKIELRDLQGNSVDGVEFPISELKPSXAHANKKEGHSFEAHCSLETELPWLLRYRLAMLFFGTIAVFVVALVLVGIACCSATKMFTRKCKMA

SEQ ID NO: 65325 - protein, 233 aa, Triticum aestivum
  peptide (1)..(233): Ceres Seq. ID no. 15222139
  misc_feature (1)..(100): Homolog of NCBI NO: 37519932 NR Description: hypothetical protein gll0363 [Gloeobacter
  misc_feature (1)..(22): Homolog of NCBI NO: 23491463 NR Description: Arabidopsis thaliana P42251 [Plasmodium yoelii
  misc_feature (25)..(92): Homolog of NCBI NO: 23613643 NR Description: hypothetical protein, conserved [Plasmodium
  misc_feature (1)..(22): Homolog of NCBI NO: 23613643 NR Description: hypothetical protein, conserved [Plasmodium
  misc_feature (95)..(232): Homolog of NCBI NO: 13430796 NR Description: unknown protein [Arabidopsis thaliana]
  misc_feature (1)..(92): Homolog of NCBI NO: 13430796 NR Description: unknown protein [Arabidopsis thaliana]
  misc_feature (95)..(232): Homolog of NCBI NO: 15238950 NR Description: expressed protein [Arabidopsis thaliana]
  misc_feature (1)..(92): Homolog of NCBI NO: 15238950 NR Description: expressed protein [Arabidopsis thaliana]
  misc_feature (168)..(168): Xaa is any aa, unknown or other
MFGPEGKRVKVIMLDTRYHRDPLLSDGTILGDPQWQWLERELRGPQSEMTIIGSSIQVVSNLSATTRPLFYVESWACFPRERERLFRLIDSTIFQSVMRLLAWLTPTPMRVFSPNCRHKSCSYGQPNFGAIEIDWNAVTPRVKIELRDLQGNSVDGVEFPISELKPSXAHANKKEGHSFEAHCSLETELPWLLRYRLAMLFFGTIAVFVVALVLVGIACCSATKMFTRKCKMA

SEQ ID NO: 65326 - DNA, 1251 bp, Triticum aestivum
  misc_feature (1)..(1251): Ceres Seq. ID no. 13597706
atcacgcggcgctaacgagtagcgacgcggacaggggttgcgtgacactaccggcactgcagaagcacgggagccatggcgcgggaggaggaaggacccgcaatgatggacgccgcggagcgacgcctccgcgtggtctccgcgcacctcgagccgcaggccggcgccaccgctggcctcgcctctaaccccaccgccggcgagtacgcccacgtgcagggctacagcgttgttcttcctgaaaagttgcaaactggaaagtggaacgtgtaccgatctgcagagtcacctctgcgtttaattaacagatttcctgctactccagacattggaacactgcatgataattttgtgtatgcagtcgagacttttacagattgtaggtatctgggtacaagagtgtgcgctgatggagcagtcggagactacaaatggatgacgtatggagaagctagtacgagcagaactgcaataggttctggtcttatttatcatggaatatctgaaggtgcacgcattggtctgtattttataaacagacctgagtggatcataattgatcatgcttgtgctgcatattcatatgtatctgtaccactttatgatactcttggtccagatgcagttcagttcattgtgaaccatgcaacagtagaaactattttctgtgtgcctcaaacactaagcactctgctaagcttcctaactcaaatgccatgtgtccgccttatagtggtagttggtggagacaatgcaaatacgccatctacaacagcagctgctggagtggaaatcataacttactccaggctacacagccagggaaagatgagttctcaaacttaccgtcctccaaaacctgaagatgttgccactatctgctacacgagtggcactactggcacaccaaagggagctgttctttctcatgagaacttaatcgcgaatgttgcaggatcaagcttgggcgttaagttttacccctccgacgtgtatatctcatacctacctttagctcacatctatgagagagctaaccaaattgcactgcttcactatggagttgccattggattttaccaaggggtatgtagattttgaactatttaagatgagagctagtagtactttgcattgttgtatagaaactgaacgacatgaaggacatgtattgagagaagtaactgataatatgtgatcttgtataagttttactcatctaatgcaatagtttgcacttgagttgttttt

SEQ ID NO: 65327 - protein, 341 aa, Triticum aestivum
  peptide (1)..(341): Ceres Seq. ID no. 13597707
  misc_feature (122)..(337): Pfam Name: AMP-binding enzyme Pfam Description: AMP-binding enzyme
  misc_feature (84)..(340): Homolog of NCBI NO: 28436862 NR Description: similar to fatty acid Coenzyme A ligase [Xenopus
  misc_feature (70)..(338): Homolog of NCBI NO: 28565633 NR Description: fatty acyl-CoA synthetase [Dictyostelium
  misc_feature (84)..(340): Homolog of NCBI NO: 27882609 NR Description: similar to fatty acid Coenzyme A ligase [Xenopus
  misc_feature (13)..(337): Homolog of NCBI NO: 6671960 NR Description: putative long-chain-fatty-acid--CoA ligase
  misc_feature (15)..(337): Homolog of NCBI NO: 22327099 NR Description: AMP-binding protein, putative [Arabidopsis
  misc_feature (15)..(337): Homolog of NCBI NO: 20805875 NR Description: long chain acyl-CoA synthetase 7 [Arabidopsis
  misc_feature (13)..(337): Homolog of NCBI NO: 7437846 NR Description: probable long-chain-fatty-acid-CoA ligase (EC
  misc_feature (13)..(337): Homolog of NCBI NO: 20805873 NR Description: long chain acyl-CoA synthetase 6 [Arabidopsis
  misc_feature (13)..(337): Homolog of NCBI NO: 18397422 NR Description: AMP-binding protein, putative [Arabidopsis
  misc_feature (13)..(337): Homolog of NCBI NO: 13516481 NR Description: long-chain acyl-CoA synthetase [Arabidopsis
MAREEEGPAMMDAAERRLRVVSAHLEPQAGATAGLASNPTAGEYAHVQGYSVVLPEKLQTGKWNVYRSAESPLRLINRFPATPDIGTLHDNFVYAVETFTDCRYLGTRVCADGAVGDYKWMTYGEASTSRTAIGSGLIYHGISEGARIGLYFINRPEWIIIDHACAAYSYVSVPLYDTLGPDAVQFIVNHATVETIFCVPQTLSTLLSFLTQMPCVRLIVVVGGDNANTPSTTAAAGVEIITYSRLHSQGKMSSQTYRPPKPEDVATICYTSGTTGTPKGAVLSHENLIANVAGSSLGVKFYPSDVYISYLPLAHIYERANQIALLHYGVAIGFYQGVCRF

SEQ ID NO: 65328 - protein, 332 aa, Triticum aestivum
  peptide (1)..(332): Ceres Seq. ID no. 13597708
  misc_feature (113)..(328): Pfam Name: AMP-binding enzyme Pfam Description: AMP-binding enzyme
  misc_feature (75)..(331): Homolog of NCBI NO: 28436862 NR Description: similar to fatty acid Coenzyme A ligase [Xenopus
  misc_feature (61)..(329): Homolog of NCBI NO: 28565633 NR Description: fatty acyl-CoA synthetase [Dictyostelium
  misc_feature (75)..(331): Homolog of NCBI NO: 27882609 NR Description: similar to fatty acid Coenzyme A ligase [Xenopus
  misc_feature (4)..(328): Homolog of NCBI NO: 6671960 NR Description: putative long-chain-fatty-acid--CoA ligase
  misc_feature (6)..(328): Homolog of NCBI NO: 22327099 NR Description: AMP-binding protein, putative [Arabidopsis
  misc_feature (6)..(328): Homolog of NCBI NO: 20805875 NR Description: long chain acyl-CoA synthetase 7 [Arabidopsis
  misc_feature (4)..(328): Homolog of NCBI NO: 7437846 NR Description: probable long-chain-fatty-acid-CoA ligase (EC
  misc_feature (4)..(328): Homolog of NCBI NO: 20805873 NR Description: long chain acyl-CoA synthetase 6 [Arabidopsis
  misc_feature (4)..(328): Homolog of NCBI NO: 18397422 NR Description: AMP-binding protein, putative [Arabidopsis
  misc_feature (4)..(328): Homolog of NCBI NO: 13516481 NR Description: long-chain acyl-CoA synthetase [Arabidopsis
MMDAAERRLRVVSAHLEPQAGATAGLASNPTAGEYAHVQGYSVVLPEKLQTGKWNVYRSAESPLRLINRFPATPDIGTLHDNFVYAVETFTDCRYLGTRVCADGAVGDYKWMTYGEASTSRTAIGSGLIYHGISEGARIGLYFINRPEWIIIDHACAAYSYVSVPLYDTLGPDAVQFIVNHATVETIFCVPQTLSTLLSFLTQMPCVRLIVVVGGDNANTPSTTAAAGVEIITYSRLHSQGKMSSQTYRPPKPEDVATICYTSGTTGTPKGAVLSHENLIANVAGSSLGVKFYPSDVYISYLPLAHIYERANQIALLHYGVAIGFYQGVCRF

SEQ ID NO: 65329 - protein, 331 aa, Triticum aestivum
  peptide (1)..(331): Ceres Seq. ID no. 13597709
  misc_feature (112)..(327): Pfam Name: AMP-binding enzyme Pfam Description: AMP-binding enzyme
  misc_feature (74)..(330): Homolog of NCBI NO: 28436862 NR Description: similar to fatty acid Coenzyme A ligase [Xenopus
  misc_feature (60)..(328): Homolog of NCBI NO: 28565633 NR Description: fatty acyl-CoA synthetase [Dictyostelium
  misc_feature (74)..(330): Homolog of NCBI NO: 27882609 NR Description: similar to fatty acid Coenzyme A ligase [Xenopus
  misc_feature (3)..(327): Homolog of NCBI NO: 6671960 NR Description: putative long-chain-fatty-acid--CoA ligase
  misc_feature (5)..(327): Homolog of NCBI NO: 22327099 NR Description: AMP-binding protein, putative [Arabidopsis
  misc_feature (5)..(327): Homolog of NCBI NO: 20805875 NR Description: long chain acyl-CoA synthetase 7 [Arabidopsis
  misc_feature (3)..(327): Homolog of NCBI NO: 7437846 NR Description: probable long-chain-fatty-acid-CoA ligase (EC
  misc_feature (3)..(327): Homolog of NCBI NO: 20805873 NR Description: long chain acyl-CoA synthetase 6 [Arabidopsis
  misc_feature (3)..(327): Homolog of NCBI NO: 18397422 NR Description: AMP-binding protein, putative [Arabidopsis
  misc_feature (3)..(327): Homolog of NCBI NO: 13516481 NR Description: long-chain acyl-CoA synthetase [Arabidopsis
MDAAERRLRVVSAHLEPQAGATAGLASNPTAGEYAHVQGYSVVLPEKLQTGKWNVYRSAESPLRLINRFPATPDIGTLHDNFVYAVETFTDCRYLGTRVCADGAVGDYKWMTYGEASTSRTAIGSGLIYHGISEGARIGLYFINRPEWIIIDHACAAYSYVSVPLYDTLGPDAVQFIVNHATVETIFCVPQTLSTLLSFLTQMPCVRLIVVVGGDNANTPSTTAAAGVEIITYSRLHSQGKMSSQTYRPPKPEDVATICYTSGTTGTPKGAVLSHENLIANVAGSSLGVKFYPSDVYISYLPLAHIYERANQIALLHYGVAIGFYQGVCRF

SEQ ID NO: 65330 - DNA, 1875 bp, Triticum aestivum
  misc_feature (1)..(1875): Ceres Seq. ID no. 13590644
ccctctgaagcctcctcccacccccctcaacgccgccgccgcaacccggaaaccctaaccaaaccccccagcgccacaccatggcgtccgcctacgaccgggaggacggcctcgcgccgccgcagccgcacggcggcggccccgccgacgcctacgatcccaactacgtcccggactcggtgaagaccttcgtggtgcacctgtaccgccacatccgcgacaagaacgtctacgagatccaccagatgtacgagggcggcttccagcgcctctccgaccgcctcttccgcgacacgccctggccgtcggccgaggccgtggcgccctactgcgacggcgaccacgtcttcctcctcctctaccgcgagctctggtaccgccacgcctacgcgcgcctctcccccctcaccgccagccaccgctccgagtcctggaacaactactgcgacctcttcagcgtcgtcctccacggcgtcgtcaacatgcagctgcctaaccagtggctgtgggacatggtggacgagttcgtctaccagttccagagcttctgccagtaccgcgccaagctcaagaacaagacggaagacgagctccagcagctaaagcagtttgacaaggcatggaatgtctatggggttctcaattacctgcaagcactcgttgagaagtccatgatcgcacagattctggagagggagaaagaggggctggagtcgtttaccgccaccgacgggtatgactaccagggtgggagcaatgtgctcaaggtcctgggttactacagcatgattgggcttctcaggatacactgccttcttggtgattaccacactggcctcaagtgcttggcaccgatcaaccttaaccagcagggggtctacaccattgtgattgggagtcacatctcgacaatctatcattatggatttgcaaaccttatgatgcgcaggtatgtcgatgctaccaaggaattcaacaaaattctgctttacattataaagtataagcagtaccatcagaaatcccctcagtatgaccagattctgaagaaaaatgagcagatgtatgcgctgctggcaatttgcctatctctgtgtccgcagaacaaactcatagatgaaaatgttagcgcccagctgaaagaaaagtacaatgacaaaatgacaaagatgcagaggtttgatgatgaagcatatgctgcctacgatgagctattttcgtatgcctgccccaagtttattacgccatcacctccagttctggaccagccacttacaaattataaccaggacgcctatcggcttcaattgaagctgttcctgtatgaagtgaagcagcaacagctgctttctgggatccggagctatctaaagttatactcagcaataactatcaccaaacttgcccagtatatggaaatggatgaggcaacacttaggtctatccttatgacgtacaagcacaaaatgcatgcagttgacagtaatgggaaaattgtatccagtgcagactttgatttctacattaatgaggatgttattcatgtcgtggagtccaagtcgaccaagcgccatggtgactactttttgagacagattttaaagtttgaagaaaccattgctgaattggacaaggtacagcttgactgagcatggtagagatcatggaggagagaaacgtcccaggatcctgttttccttttcttttttcctattgtgagaggcagttgtgatggctactgttagcagagcattagttgtgccttctggtacactttttgactcagtgaagcattggcaattcactgtattatcccgtttctagttcctgtwtgctatttgacgagtaatccgtcggttacgaattgagaacttg

SEQ ID NO: 65331 - protein, 522 aa, Triticum aestivum
  peptide (1)..(522): Ceres Seq. ID no. 15220986
  misc_feature (17)..(521): Homolog of NCBI NO: 21358039 NR Description: CG5642-PA [Drosophila melanogaster]
  misc_feature (47)..(519): Homolog of NCBI NO: 21553089 NR Description: eukaryotic translation initiation factor 3,
  misc_feature (47)..(519): Homolog of NCBI NO: 27503211 NR Description: Similar to eukaryotic translation initiation
  misc_feature (47)..(519): Homolog of NCBI NO: 7705433 NR Description: eukaryotic translation initiation factor 3,
  misc_feature (47)..(519): Homolog of NCBI NO: 18700307 NR Description: tyrosine-rich heat shock protein [Mus musculus]
  misc_feature (47)..(519): Homolog of NCBI NO: 34866934 NR Description: similar to Eukaryotic translation initiation
  misc_feature (47)..(519): Homolog of NCBI NO: 38174413 NR Description: Unknown (protein for MGC:75896) [Silurana
  misc_feature (1)..(522): Homolog of NCBI NO: 23397253 NR Description: unknown protein [Arabidopsis thaliana]
  misc_feature (1)..(522): Homolog of NCBI NO: 22327068 NR Description: expressed protein [Arabidopsis thaliana]
  misc_feature (18)..(498): Homolog of NCBI NO: 34904274 NR Description: Homo sapiens HSPC025-like protein
MASAYDREDGLAPPQPHGGGPADAYDPNYVPDSVKTFVVHLYRHIRDKNVYEIHQMYEGGFQRLSDRLFRDTPWPSAEAVAPYCDGDHVFLLLYRELWYRHAYARLSPLTASHRSESWNNYCDLFSVVLHGVVNMQLPNQWLWDMVDEFVYQFQSFCQYRAKLKNKTEDELQQLKQFDKAWNVYGVLNYLQALVEKSMIAQILEREKEGLESFTATDGYDYQGGSNVLKVLGYYSMIGLLRIHCLLGDYHTGLKCLAPINLNQQGVYTIVIGSHISTIYHYGFANLMMRRYVDATKEFNKILLYIIKYKQYHQKSPQYDQILKKNEQMYALLAICLSLCPQNKLIDENVSAQLKEKYNDKMTKMQRFDDEAYAAYDELFSYACPKFITPSPPVLDQPLTNYNQDAYRLQLKLFLYEVKQQQLLSGIRSYLKLYSAITITKLAQYMEMDEATLRSILMTYKHKMHAVDSNGKIVSSADFDFYINEDVIHVVESKSTKRHGDYFLRQILKFEETIAELDKVQLD

SEQ ID NO: 65332 - protein, 467 aa, Triticum aestivum
  peptide (1)..(467): Ceres Seq. ID no. 15220987
  misc_feature (1)..(466): Homolog of NCBI NO: 21358039 NR Description: CG5642-PA [Drosophila melanogaster]
  misc_feature (1)..(464): Homolog of NCBI NO: 21553089 NR Description: eukaryotic translation initiation factor 3,
  misc_feature (1)..(464): Homolog of NCBI NO: 27503211 NR Description: Similar to eukaryotic translation initiation
  misc_feature (1)..(464): Homolog of NCBI NO: 7705433 NR Description: eukaryotic translation initiation factor 3,
  misc_feature (1)..(464): Homolog of NCBI NO: 18700307 NR Description: tyrosine-rich heat shock protein [Mus musculus]
  misc_feature (1)..(464): Homolog of NCBI NO: 34866934 NR Description: similar to Eukaryotic translation initiation
  misc_feature (1)..(464): Homolog of NCBI NO: 38174413 NR Description: Unknown (protein for MGC:75896) [Silurana
  misc_feature (1)..(467): Homolog of NCBI NO: 23397253 NR Description: unknown protein [Arabidopsis thaliana]
  misc_feature (1)..(467): Homolog of NCBI NO: 22327068 NR Description: expressed protein [Arabidopsis thaliana]
  misc_feature (1)..(443): Homolog of NCBI NO: 34904274 NR Description: Homo sapiens HSPC025-like protein
MYEGGFQRLSDRLFRDTPWPSAEAVAPYCDGDHVFLLLYRELWYRHAYARLSPLTASHRSESWNNYCDLFSVVLHGVVNMQLPNQWLWDMVDEFVYQFQSFCQYRAKLKNKTEDELQQLKQFDKAWNVYGVLNYLQALVEKSMIAQILEREKEGLESFTATDGYDYQGGSNVLKVLGYYSMIGLLRIHCLLGDYHTGLKCLAPINLNQQGVYTIVIGSHISTIYHYGFANLMMRRYVDATKEFNKILLYIIKYKQYHQKSPQYDQILKKNEQMYALLAICLSLCPQNKLIDENVSAQLKEKYNDKMTKMQRFDDEAYAAYDELFSYACPKFITPSPPVLDQPLTNYNQDAYRLQLKLFLYEVKQQQLLSGIRSYLKLYSAITITKLAQYMEMDEATLRSILMTYKHKMHAVDSNGKIVSSADFDFYINEDVIHVVESKSTKRHGDYFLRQILKFEETIAELDKVQLD

SEQ ID NO: 65333 - protein, 388 aa, Triticum aestivum
  peptide (1)..(388): Ceres Seq. ID no. 15220988
  misc_feature (1)..(387): Homolog of NCBI NO: 21358039 NR Description: CG5642-PA [Drosophila melanogaster]
  misc_feature (1)..(385): Homolog of NCBI NO: 21553089 NR Description: eukaryotic translation initiation factor 3,
  misc_feature (1)..(385): Homolog of NCBI NO: 27503211 NR Description: Similar to eukaryotic translation initiation
  misc_feature (1)..(385): Homolog of NCBI NO: 7705433 NR Description: eukaryotic translation initiation factor 3,
  misc_feature (1)..(385): Homolog of NCBI NO: 18700307 NR Description: tyrosine-rich heat shock protein [Mus musculus]
  misc_feature (1)..(385): Homolog of NCBI NO: 34866934 NR Description: similar to Eukaryotic translation initiation
  misc_feature (1)..(385): Homolog of NCBI NO: 38174413 NR Description: Unknown (protein for MGC:75896) [Silurana
  misc_feature (1)..(388): Homolog of NCBI NO: 23397253 NR Description: unknown protein [Arabidopsis thaliana]
  misc_feature (1)..(388): Homolog of NCBI NO: 22327068 NR Description: expressed protein [Arabidopsis thaliana]
  misc_feature (1)..(364): Homolog of NCBI NO: 34904274 NR Description: Homo sapiens HSPC025-like protein
MQLPNQWLWDMVDEFVYQFQSFCQYRAKLKNKTEDELQQLKQFDKAWNVYGVLNYLQALVEKSMIAQILEREKEGLESFTATDGYDYQGGSNVLKVLGYYSMIGLLRIHCLLGDYHTGLKCLAPINLNQQGVYTIVIGSHISTIYHYGFANLMMRRYVDATKEFNKILLYIIKYKQYHQKSPQYDQILKKNEQMYALLAICLSLCPQNKLIDENVSAQLKEKYNDKMTKMQRFDDEAYAAYDELFSYACPKFITPSPPVLDQPLTNYNQDAYRLQLKLFLYEVKQQQLLSGIRSYLKLYSAITITKLAQYMEMDEATLRSILMTYKHKMHAVDSNGKIVSSADFDFYINEDVIHVVESKSTKRHGDYFLRQILKFEETIAELDKVQLD

SEQ ID NO: 65334 - DNA, 1599 bp, Triticum aestivum
  misc_feature (1)..(1599): Ceres Seq. ID no. 13597613
aaatcgaaaacgaaacccaaacccaaatcgcttccgttacgaaattcccccaaatctatcccccgtcggatcgatcgccgccgccgccatgtcgtcgtcggcgccgctcccgctgcagcgctacttctgccaccagtgcgaccgcgccgtcgccatcgccgcgccggcctcccgcgacgacgaggtcttctgcccgctctgcgccggggggttcgtcgaggagctcctcgacgacgaggaccccccaaaccctagcccccaaatccaccccttcttccccctcgccagcttcctcgacctccgcaaccccagcgacctcgccggggtcctcggcccgccctccccctctgcgccccgcgccgcctccgcctccgccaacaaccagttcgacgtcaccgacttcctccacggccacctcggcggcctcctctccggcggcgccaccatccagatcgtcctcgagggttcctccttccccggcggcttcgcctccttcggcgccgggggccccgtccccggcggggtcagcctcggcgactacttcatgggatccggcctcgagcagctcatccagcagctcgccgagaacgaccccagccgctacggcaccccgccagccgccaaggccgccgtcgccgccctgcccgatgtcgccgtctctgctgacatgatggccgccgacgggggcgcccagtgcgccgtctgtatggacgacttccttctcggcgccgccgccaagcagctcccctgcaagcacgtctttcacaaggactgcatcctgccgtggctcaacctccacagctcctgccctgtctgccgccatgagatgcccactgatgaccctgactatgagaaccaccagcgccaggctgctgcccctgctgctgctgcggcagcgcctgcgtcccctggtggcggcccttcgcctagggtcatggagaggaggttcaggatctccctgccgtggcctctcagggccgcttttggcgcgcagcaggcggagagcagcgaccaggatgctgctggctctggtgactacaacgacgatccgaatgcgagcggtcgctcgtatgatgatcttgactgaagcgcctgcaaggaagagggcaacaggggggataaggaggggcaaacggactggctggaagaaggaagggagtctgaatgcgaggaagagaagacaagaagaaggaagacttatgttgttgttgttgatccaaattgaattggaagcttttttggtgatgaagagtggcgccgtccgtctattgatctccgttgcctcctctcccctcccctcccctctttgcctgtcatggttgtagaaagagagagagaaaagtagagatgatattcttttgttgcctggtctggtctggtctggtctggttggtgggttgacttgactgaatatataccttcttgtgggaaggaagaagctccctccttcctaacttgtctgtgttatcatagtacaattgtctgtctgtgtcgattggtcggtcttcctttctctcttgtggggttggaagaaagtaagaaagggaactctagcgatccgatccgaccctcttatatatacataatgtgttatacatg

SEQ ID NO: 65335 - protein, 361 aa, Triticum aestivum
  peptide (1)..(361): Ceres Seq. ID no. 13597614
  misc_feature (232)..(272): Pfam Name: Zinc finger, C3HC4 type (RING finger) Pfam Description: Zinc finger, C3HC4 type (RING finger)
  misc_feature (41)..(349): Homolog of NCBI NO: 18405518 NR Description: RING-H2 finger protein (RHC1a) [Arabidopsis
  misc_feature (25)..(279): Homolog of NCBI NO: 14719329 NR Description: putative RING-H2 finger protein [Oryza sativa]
  misc_feature (172)..(356): Homolog of NCBI NO: 15241188 NR Description: expressed protein [Arabidopsis thaliana]
  misc_feature (41)..(75): Homolog of NCBI NO: 34903272 NR Description: unnamed protein product [Oryza sativa (japonica
  misc_feature (174)..(338): Homolog of NCBI NO: 34903272 NR Description: unnamed protein product [Oryza sativa (japonica
  misc_feature (40)..(86): Homolog of NCBI NO: 18405411 NR Description: expressed protein [Arabidopsis thaliana]
  misc_feature (171)..(280): Homolog of NCBI NO: 18405411 NR Description: expressed protein [Arabidopsis thaliana]
  misc_feature (83)..(353): Homolog of NCBI NO: 37535546 NR Description: putative zinc finger protein
  misc_feature (20)..(347): Homolog of NCBI NO: 15231003 NR Description: expressed protein [Arabidopsis thaliana]
  misc_feature (20)..(347): Homolog of NCBI NO: 11994207 NR Description: gene_id:MPN9.20~unknown protein [Arabidopsis
NRKRNPNPNRFRYEIPPNLSPVGSIAAAAMSSSAPLPLQRYFCHQCDRAVAIAAPASRDDEVFCPLCAGGFVEELLDDEDPPNPSPQIHPFFPLASFLDLRNPSDLAGVLGPPSPSAPRAASASANNQFDVTDFLHGHLGGLLSGGATIQIVLEGSSFPGGFASFGAGGPVPGGVSLGDYFMGSGLEQLIQQLAENDPSRYGTPPAAKAAVAALPDVAVSADMMAADGGAQCAVCMDDFLLGAAAKQLPCKHVFHKDCILPWLNLHSSCPVCRHEMPTDDPDYENHQRQAAAPAAAAAAPASPGGGPSPRVMERRFRISLPWPLRAAFGAQQAESSDQDAAGSGDYNDDPNASGRSYDDLD

SEQ ID NO: 65336 - protein, 332 aa, Triticum aestivum
  peptide (1)..(332): Ceres Seq. ID no. 13597615
  misc_feature (203)..(243): Pfam Name: Zinc finger, C3HC4 type (RING finger) Pfam Description: Zinc finger, C3HC4 type (RING finger)
  misc_feature (12)..(320): Homolog of NCBI NO: 18405518 NR Description: RING-H2 finger protein (RHC1a) [Arabidopsis
  misc_feature (1)..(250): Homolog of NCBI NO: 14719329 NR Description: putative RING-H2 finger protein [Oryza sativa]
  misc_feature (143)..(327): Homolog of NCBI NO: 15241188 NR Description: expressed protein [Arabidopsis thaliana]
  misc_feature (12)..(46): Homolog of NCBI NO: 34903272 NR Description: unnamed protein product [Oryza sativa (japonica
  misc_feature (145)..(309): Homolog of NCBI NO: 34903272 NR Description: unnamed protein product [Oryza sativa (japonica
  misc_feature (11)..(57): Homolog of NCBI NO: 18405411 NR Description: expressed protein [Arabidopsis thaliana]
  misc_feature (142)..(251): Homolog of NCBI NO: 18405411 NR Description: expressed protein [Arabidopsis thaliana]
  misc_feature (54)..(324): Homolog of NCBI NO: 37535546 NR Description: putative zinc finger protein
  misc_feature (1)..(318): Homolog of NCBI NO: 15231003 NR Description: expressed protein [Arabidopsis thaliana]
  misc_feature (1)..(318): Homolog of NCBI NO: 11994207 NR Description: gene_id:MPN9.20~unknown protein [Arabidopsis
MSSSAPLPLQRYFCHQCDRAVAIAAPASRDDEVFCPLCAGGFVEELLDDEDPPNPSPQIHPFFPLASFLDLRNPSDLAGVLGPPSPSAPRAASASANNQFDVTDFLHGHLGGLLSGGATIQIVLEGSSFPGGFASFGAGGPVPGGVSLGDYFMGSGLEQLIQQLAENDPSRYGTPPAAKAAVAALPDVAVSADMMAADGGAQCAVCMDDFLLGAAAKQLPCKHVFHKDCILPWLNLHSSCPVCRHEMPTDDPDYENHQRQAAAPAAAAAAPASPGGGPSPRVMERRFRISLPWPLRAAFGAQQAESSDQDAAGSGDYNDDPNASGRSYDDLD

SEQ ID NO: 65337 - protein, 222 aa, Triticum aestivum
  peptide (1)..(222): Ceres Seq. ID no. 13597616
  misc_feature (21)..(222): Pfam Name: Extensin-like region Pfam Description: Extensin-like region
  misc_feature (20)..(222): Homolog of NCBI NO: 186396 NR Description: mucin
  misc_feature (12)..(222): Homolog of NCBI NO: 5420387 NR Description: proteophosphoglycan [Leishmania major]
  misc_feature (21)..(222): Homolog of NCBI NO: 13592175 NR Description: ppg3 [Leishmania major]
  misc_feature (11)..(222): Homolog of NCBI NO: 186396 NR Description: mucin
  misc_feature (12)..(222): Homolog of NCBI NO: 13592175 NR Description: ppg3 [Leishmania major]
  misc_feature (21)..(222): Homolog of NCBI NO: 11359723 NR Description: proteophosphoglycan, membrane-associated
  misc_feature (16)..(222): Homolog of NCBI NO: 20138131 NR Description: Vegetative cell wall protein gp1 precursor
  misc_feature (20)..(222): Homolog of NCBI NO: 188864 NR Description: mucin
  misc_feature (11)..(222): Homolog of NCBI NO: 188864 NR Description: mucin
  misc_feature (36)..(222): Homolog of NCBI NO: 11359723 NR Description: proteophosphoglycan, membrane-associated
IENETQTQIASVTKFPQIYPPSDRSPPPPCRRRRRSRCSATSATSATAPSPSPRRPPATTRSSARSAPGGSSRSSSTTRTPQTLAPKSTPSSPSPASSTSATPATSPGSSARPPPLRPAPPPPPPTTSSTSPTSSTATSAASSPAAPPSRSSSRVPPSPAASPPSAPGAPSPAGSASATTSWDPASSSSSSSSPRTTPAATAPRQPPRPPSPPCPMSPSLLT

SEQ ID NO: 65338 - DNA, 1214 bp, Triticum aestivum
  misc_feature (1)..(1214): Ceres Seq. ID no. 13662799
agctatcatcccgcacccgcacgagctcaaccactctctctctctctctcttctacctctgccccgtcctccatggaggggcgagcgagtgtgtgagttgagtctgacttgcatgtgagccagcctacagcgagcacacggcccatcctagacagagagagagagagagagaggaagtaatcttgcttgcttgcttagttgggttgggttgggttgtgctttgtgtgtgcgtctatggcgctgccggcggagaggcgggcggaggaggccgcgggcgtcggcgggtgccgggcgccggccggccagggcgggctgcccatcgggttccggttccggcccaccgacgaggagctgctgctgcactacctgcgccgcaaggccctctcctgccccctccccgccgacatcatccccgtcgccgacctcgcgcgcctccacccatcggacctgccaggcgaggccgacggcgagcgctacttcttccacctgccggcgacggggtgctggcggaagggcggcggcgcgggcagggcgggcggcagcggcgtgtggagggcctccgggaaggagcggctggtcgtggcgccacgctgcggccggcctatcggcgccaagcggacgctcgtcttctgccgcccaggcggcgcgcgcaccggctgggccatgcacgagtaccgcctgctccccgccggcctcgccgcttacgccacacccaagagcctccacgccgccaaggactgggtggtctgccgcgtgttcaagaaggccacgccagcgcgccacggcacagcggggcggcgtaggggggacgccgacgccgacatgacaccggcgtcaccgtccccggcgtcctcctgcgtgaccgagtcgggcatggaggaggacgatgatgagaccgcctctaacctggcgcggcgagaggattagagcagctgacctgacctcaatcatggtccctgtaattttctaatgagtgcccctttaattcgtcgatctgctaatgtggtactagtccgtagtagcagcagtagtaatcatcagccccaacttatcaggagaaacaaaccgagctcaagcaatcagcaaaccgagctcaagcaatcaaacacctcaccatgtttgacgagtgagctgagactgagagctcactgtgaatcaaagagttcatgttccaacgttaaattggagttcttttgcacaaaaaaaaaaaaaaa

SEQ ID NO: 65339 - protein, 230 aa, Triticum aestivum
  peptide (1)..(230): Ceres Seq. ID no. 13662800
  misc_feature (74)..(150): Pfam Name: No apical meristem (NAM) protein Pfam Description: No apical meristem (NAM) protein
  misc_feature (27)..(177): Homolog of NCBI NO: 7489024 NR Description: hypothetical protein SENU5, senescence
  misc_feature (27)..(230): Homolog of NCBI NO: 15226119 NR Description: No apical meristem (NAM) protein family
  misc_feature (27)..(207): Homolog of NCBI NO: 40786563 NR Description: putative NAC-domain protein
  misc_feature (10)..(183): Homolog of NCBI NO: 21554226 NR Description: NAM-like protein [Arabidopsis thaliana]
  misc_feature (10)..(183): Homolog of NCBI NO: 20466640 NR Description: NAM-like protein [Arabidopsis thaliana]
  misc_feature (10)..(183): Homolog of NCBI NO: 15219110 NR Description: No apical meristem (NAM) protein family
  misc_feature (10)..(183): Homolog of NCBI NO: 15232606 NR Description: No apical meristem (NAM) protein family
  misc_feature (27)..(196): Homolog of NCBI NO: 15240042 NR Description: No apical meristem (NAM) protein family
  misc_feature (9)..(74): Homolog of NCBI NO: 34907026 NR Description: contains EST C27594(C52325)~unknown protein
  misc_feature (74)..(223): Homolog of NCBI NO: 34907026 NR Description: contains EST C27594(C52325)~unknown protein
MALPAERRAEEAAGVGGCRAPAGQGGLPIGFRFRPTDEELLLHYLRRKALSCPLPADIIPVADLARLHPSDLPGEADGERYFFHLPATGCWRKGGGAGRAGGSGVWRASGKERLVVAPRCGRPIGAKRTLVFCRPGGARTGWAMHEYRLLPAGLAAYATPKSLHAAKDWVVCRVFKKATPARHGTAGRRRGDADADMTPASPSPASSCVTESGMEEDDDETASNLARRED

SEQ ID NO: 65340 - DNA, 1180 bp, Triticum aestivum
  misc_feature (1)..(1180): Ceres Seq. ID no. 13584593
aaacaatccagtgaaccgcccatgctcaccctcccgtgcttcaccactcctcctcaacctccaccgacccggccggtccggtccggtccggtcccggctccggaagtctccagaacccggacaaccaccgccacgcgggcccgcatggcagggtcacgtccctcacgcgccgctacctccggcgagacctgctcgcaccaccccctcataaatactggtgcgcccaagcctcgccgcagatcgaccgcgctcgccctctccactttcctgctgctggtgctgttaaccggactccccgacgccgccgtcgccgccaacatgaccgaggtctgcgtcaaggccgccgtcggccaccccgacacgctcggcgactgtcccttctcccagagggtgctgctcacgctggaggagaagaaggtgccctaccagatgaagctcatcgacgtcagcaacaagcccgactggttcctgaagatcaatccagagggcaaggtgcctgtgtataacggtggtgatggcaaatggattgctgattctgatgtgatcactcaagtcattgaggagaagtacccaactccatcacttgtgacccctgctgaatatgcatcagtgggatcaaagatcttctccacctttgtcacgttcttgaagagcaaggatgccagcgatggttcggagaaggcacttgttgatgagctgcaggcgctcgaagagcacctgaaggcccatggaccctacatcaatggggcgaacatctccgctgtcgatctcagcctggctccgaagctctaccatctccaggtcgccctggagcacttcaagggctggaaggtccctgaaaccctgaccagcgtccatgcctacaccgaggctctcttcagccgcgagtcgttcgtcaagaccaaggcgaccaaggagaacctgatcgccgggtgggcgccgaaagtgaacccgtaagccctcccgccgctcggagacccggcccacccccgtcgtgtgagagtagcgacgggcctcatctgtctaggttggaataatgcgagcgagccttgatgtgctctggttgtcgcaagacgtgcacttgctgcctgggctgtgccctgcctggcttgtgtgtgtgggtgtgggtgatatgtgtgtggtctgtcctctttcgtgtgaatgaataatggagctgcgt

SEQ ID NO: 65341 - protein, 318 aa, Triticum aestivum
  peptide (1)..(318): Ceres Seq. ID no. 13584594
  misc_feature (225)..(296): Pfam Name: Glutathione S-transferase, C-terminal domain Pfam Description: Glutathione S-transferase, C-terminal domain
  misc_feature (102)..(316): Homolog of NCBI NO: 22653415 NR Description: dehydroascorbate reductase [Brassica juncea]
  misc_feature (109)..(318): Homolog of NCBI NO: 15223576 NR Description: dehydroascorbate reductase, putative [Arabidopsis
  misc_feature (102)..(316): Homolog of NCBI NO: 18418055 NR Description: dehydroascorbate reductase, putative [Arabidopsis
  misc_feature (102)..(316): Homolog of NCBI NO: 10952514 NR Description: dehydroascorbate reductase [Arabidopsis thaliana]
  misc_feature (109)..(317): Homolog of NCBI NO: 15222163 NR Description: dehydroascorbate reductase, putative [Arabidopsis
  misc_feature (109)..(317): Homolog of NCBI NO: 21593056 NR Description: GSH-dependent dehydroascorbate reductase 1,
  misc_feature (109)..(318): Homolog of NCBI NO: 28192427 NR Description: dehydroascorbate reductase [Nicotiana tabacum]
  misc_feature (109)..(317): Homolog of NCBI NO: 6939839 NR Description: GSH-dependent dehydroascorbate reductase 1
  misc_feature (109)..(317): Homolog of NCBI NO: 28192425 NR Description: dehydroascorbate reductase [Oryza sativa]
  misc_feature (107)..(318): Homolog of NCBI NO: 28192421 NR Description: dehydroascorbate reductase [Triticum aestivum]
KQSSEPPMLTLPCFTTPPQPPPTRPVRSGPVPAPEVSRTRTTTATRARMAGSRPSRAATSGETCSHHPLINTGAPKPRRRSTALALSTFLLLVLLTGLPDAAVAANMTEVCVKAAVGHPDTLGDCPFSQRVLLTLEEKKVPYQMKLIDVSNKPDWFLKINPEGKVPVYNGGDGKWIADSDVITQVIEEKYPTPSLVTPAEYASVGSKIFSTFVTFLKSKDASDGSEKALVDELQALEEHLKAHGPYINGANISAVDLSLAPKLYHLQVALEHFKGWKVPETLTSVHAYTEALFSRESFVKTKATKENLIAGWAPKVNP

SEQ ID NO: 65342 - protein, 311 aa, Triticum aestivum
  peptide (1)..(311): Ceres Seq. ID no. 13584595
  misc_feature (218)..(289): Pfam Name: Glutathione S-transferase, C-terminal domain Pfam Description: Glutathione S-transferase, C-terminal domain
  misc_feature (95)..(309): Homolog of NCBI NO: 22653415 NR Description: dehydroascorbate reductase [Brassica juncea]
  misc_feature (102)..(311): Homolog of NCBI NO: 15223576 NR Description: dehydroascorbate reductase, putative [Arabidopsis
  misc_feature (95)..(309): Homolog of NCBI NO: 18418055 NR Description: dehydroascorbate reductase, putative [Arabidopsis
  misc_feature (95)..(309): Homolog of NCBI NO: 10952514 NR Description: dehydroascorbate reductase [Arabidopsis thaliana]
  misc_feature (102)..(310): Homolog of NCBI NO: 15222163 NR Description: dehydroascorbate reductase, putative [Arabidopsis
  misc_feature (102)..(310): Homolog of NCBI NO: 21593056 NR Description: GSH-dependent dehydroascorbate reductase 1,
  misc_feature (102)..(311): Homolog of NCBI NO: 28192427 NR Description: dehydroascorbate reductase [Nicotiana tabacum]
  misc_feature (102)..(310): Homolog of NCBI NO: 6939839 NR Description: GSH-dependent dehydroascorbate reductase 1
  misc_feature (102)..(310): Homolog of NCBI NO: 28192425 NR Description: dehydroascorbate reductase [Oryza sativa]
  misc_feature (100)..(311): Homolog of NCBI NO: 28192421 NR Description: dehydroascorbate reductase [Triticum aestivum]
MLTLPCFTTPPQPPPTRPVRSGPVPAPEVSRTRTTTATRARMAGSRPSRAATSGETCSHHPLINTGAPKPRRRSTALALSTFLLLVLLTGLPDAAVAANMTEVCVKAAVGHPDTLGDCPFSQRVLLTLEEKKVPYQMKLIDVSNKPDWFLKINPEGKVPVYNGGDGKWIADSDVITQVIEEKYPTPSLVTPAEYASVGSKIFSTFVTFLKSKDASDGSEKALVDELQALEEHLKAHGPYINGANISAVDLSLAPKLYHLQVALEHFKGWKVPETLTSVHAYTEALFSRESFVKTKATKENLIAGWAPKVNP

SEQ ID NO: 65343 - protein, 270 aa, Triticum aestivum
  peptide (1)..(270): Ceres Seq. ID no. 13584596
  misc_feature (177)..(248): Pfam Name: Glutathione S-transferase, C-terminal domain Pfam Description: Glutathione S-transferase, C-terminal domain
  misc_feature (54)..(268): Homolog of NCBI NO: 22653415 NR Description: dehydroascorbate reductase [Brassica juncea]
  misc_feature (61)..(270): Homolog of NCBI NO: 15223576 NR Description: dehydroascorbate reductase, putative [Arabidopsis
  misc_feature (54)..(268): Homolog of NCBI NO: 18418055 NR Description: dehydroascorbate reductase, putative [Arabidopsis
  misc_feature (54)..(268): Homolog of NCBI NO: 10952514 NR Description: dehydroascorbate reductase [Arabidopsis thaliana]
  misc_feature (61)..(269): Homolog of NCBI NO: 15222163 NR Description: dehydroascorbate reductase, putative [Arabidopsis
  misc_feature (61)..(269): Homolog of NCBI NO: 21593056 NR Description: GSH-dependent dehydroascorbate reductase 1,
  misc_feature (61)..(270): Homolog of NCBI NO: 28192427 NR Description: dehydroascorbate reductase [Nicotiana tabacum]
  misc_feature (61)..(269): Homolog of NCBI NO: 6939839 NR Description: GSH-dependent dehydroascorbate reductase 1
  misc_feature (61)..(269): Homolog of NCBI NO: 28192425 NR Description: dehydroascorbate reductase [Oryza sativa]
  misc_feature (59)..(270): Homolog of NCBI NO: 28192421 NR Description: dehydroascorbate reductase [Triticum aestivum]
MAGSRPSRAATSGETCSHHPLINTGAPKPRRRSTALALSTFLLLVLLTGLPDAAVAANMTEVCVKAAVGHPDTLGDCPFSQRVLLTLEEKKVPYQMKLIDVSNKPDWFLKINPEGKVPVYNGGDGKWIADSDVITQVIEEKYPTPSLVTPAEYASVGSKIFSTFVTFLKSKDASDGSEKALVDELQALEEHLKAHGPYINGANISAVDLSLAPKLYHLQVALEHFKGWKVPETLTSVHAYTEALFSRESFVKTKATKENLIAGWAPKVNP

SEQ ID NO: 65344 - DNA, 1444 bp, Triticum aestivum
  misc_feature (1)..(1444): Ceres Seq. ID no. 13597581
acgcaacggtccaatcgacgagtttgaaacctaccctctccccaacggtcggcttcggagcggcacacatggcggtggcggcggcggcgggagacctggcggtgcttgacgcggagactctggcgctgctggggggagggcccgatatggcgccggtggccgtgtgcggcgagtgggagaccttcaaggagaacgtgcggccgctgaaacgcgggcggaacgtcggcctcctcaaccaagccctcaaggcgcacaccgaccccgcccagcgtgccgccctcctcgccgaacgcaggaggatgatcgaagcaatagaagagtaccaaggggaagatccgctccagccatgggtagactgcatcaaatgggttcaggagtcgttcccggccggcggggagttctcagggctggtcgtgatctacgagcagtgtgtgcgtgcattttggcacgatgagcggtacaaggatgatctccggtacctcaaagtctggttagaatatgctgggaactgttcggacgctgaggtgatattcaggttcctggagtccaaccggattggtgagggccatgctgttttctacattcgctatgcattgctaatggagtcgaagaacaaggttaagaaagttgacgagatctttaatcttggaatagctaggamagcaaagcctgtggagaagttggaaactacatacagggcatttcttgggagatcaaccagaaagaaggaacacgaggatgataccgcaagtgatgatccgcccgtacgcaaattcggtagtgacttgaaccgtggtgaaactagaggtcagcatgcagagaattcccacatgttggcaaaacctagggtaaagctgcaaagaatcgatgttaatacaccgatttcaatttacaaagagaacccattgccaagtcagggccttgagagagctaggagcaaagacagggcgtggaacacccttggaacacaagcagatagaaacaaagaaaataacatgatgcctgccagatggacctcgcacaagattccaccaaaggtagcagcacgacaagcagttccgccagctcgtgtcagctccattgaggtctttgtagatgaagaatgtgccgaggaaccagccccgcctcgagtgccaaagagtccaaaaccatctgttctgaagcttaggcaagcaacaagcaaaaaccttaagaaggaatcagaattgcttaaggagaatccgctgcgcaacttcccgctgagcagccttagataattaacagtaatattgttgacgacttgtttgaatctgttcctttatgccaaataagctttagactctaaagcttatagatgcaccaagcattgtaggctcgaatcgattgttgtggtccgtgtacactagtttgattgattaatcctcatcgaggtgaggattgaataaaatcttcagttttgtcacgc

SEQ ID NO: 65345 - protein, 417 aa, Triticum aestivum
  peptide (1)..(417): Ceres Seq. ID no. 15222140
  misc_feature (251)..(370): Homolog of NCBI NO: 25370767 NR Description: hypothetical protein At2g33560 [imported] -
  misc_feature (57)..(390): Homolog of NCBI NO: 22128593 NR Description: spindle checkpoint protein BubR1 [Xenopus laevis]
  misc_feature (57)..(409): Homolog of NCBI NO: 29725501 NR Description: spindle checkpoint protein BubR1 [Gallus gallus]
  misc_feature (317)..(371): Homolog of NCBI NO: 26396196 NR Description: Mitotic spindle checkpoint component mad3
  misc_feature (59)..(237): Homolog of NCBI NO: 26396196 NR Description: Mitotic spindle checkpoint component mad3
  misc_feature (57)..(120): Homolog of NCBI NO: 25370767 NR Description: hypothetical protein At2g33560 [imported] -
  misc_feature (167)..(250): Homolog of NCBI NO: 25370767 NR Description: hypothetical protein At2g33560 [imported] -
  misc_feature (20)..(219): Homolog of NCBI NO: 5441887 NR Description: Similar to Arabidopsis thaliana BAC genomic
  misc_feature (57)..(415): Homolog of NCBI NO: 21593781 NR Description: unknown [Arabidopsis thaliana]
  misc_feature (57)..(415): Homolog of NCBI NO: 18403316 NR Description: expressed protein [Arabidopsis thaliana]
  misc_feature (220)..(220): Xaa is any aa, unknown or other
ATVQSTSLKPTLSPTVGFGAAHMAVAAAAGDLAVLDAETLALLGGGPDMAPVAVCGEWETFKENVRPLKRGRNVGLLNQALKAHTDPAQRAALLAERRRMIEAIEEYQGEDPLQPWVDCIKWVQESFPAGGEFSGLVVIYEQCVRAFWHDERYKDDLRYLKVWLEYAGNCSDAEVIFRFLESNRIGEGHAVFYIRYALLMESKNKVKKVDEIFNLGIARXAKPVEKLETTYRAFLGRSTRKKEHEDDTASDDPPVRKFGSDLNRGETRGQHAENSHMLAKPRVKLQRIDVNTPISIYKENPLPSQGLERARSKDRAWNTLGTQADRNKENNMMPARWTSHKIPPKVAARQAVPPARVSSIEVFVDEECAEEPAPPRVPKSPKPSVLKLRQATSKNLKKESELLKENPLRNFPLSSLR

SEQ ID NO: 65346 - protein, 395 aa, Triticum aestivum
  peptide (1)..(395): Ceres Seq. ID no. 15222141
  misc_feature (229)..(348): Homolog of NCBI NO: 25370767 NR Description: hypothetical protein At2g33560 [imported] -
  misc_feature (35)..(368): Homolog of NCBI NO: 22128593 NR Description: spindle checkpoint protein BubR1 [Xenopus laevis]
  misc_feature (35)..(387): Homolog of NCBI NO: 29725501 NR Description: spindle checkpoint protein BubR1 [Gallus gallus]
  misc_feature (295)..(349): Homolog of NCBI NO: 26396196 NR Description: Mitotic spindle checkpoint component mad3
  misc_feature (37)..(215): Homolog of NCBI NO: 26396196 NR Description: Mitotic spindle checkpoint component mad3
  misc_feature (35)..(98): Homolog of NCBI NO: 25370767 NR Description: hypothetical protein At2g33560 [imported] -
  misc_feature (145)..(228): Homolog of NCBI NO: 25370767 NR Description: hypothetical protein At2g33560 [imported] -
  misc_feature (1)..(197): Homolog of NCBI NO: 5441887 NR Description: Similar to Arabidopsis thaliana BAC genomic
  misc_feature (35)..(393): Homolog of NCBI NO: 21593781 NR Description: unknown [Arabidopsis thaliana]
  misc_feature (35)..(393): Homolog of NCBI NO: 18403316 NR Description: expressed protein [Arabidopsis thaliana]
  misc_feature (198)..(198): Xaa is any aa, unknown or other
MAVAAAAGDLAVLDAETLALLGGGPDMAPVAVCGEWETFKENVRPLKRGRNVGLLNQALKAHTDPAQRAALLAERRRMIEAIEEYQGEDPLQPWVDCIKWVQESFPAGGEFSGLVVIYEQCVRAFWHDERYKDDLRYLKVWLEYAGNCSDAEVIFRFLESNRIGEGHAVFYIRYALLMESKNKVKKVDEIFNLGIARXAKPVEKLETTYRAFLGRSTRKKEHEDDTASDDPPVRKFGSDLNRGETRGQHAENSHMLAKPRVKLQRIDVNTPISIYKENPLPSQGLERARSKDRAWNTLGTQADRNKENNMMPARWTSHKIPPKVAARQAVPPARVSSIEVFVDEECAEEPAPPRVPKSPKPSVLKLRQATSKNLKKESELLKENPLRNFPLSSLR

SEQ ID NO: 65347 - protein, 369 aa, Triticum aestivum
  peptide (1)..(369): Ceres Seq. ID no. 15222142
  misc_feature (203)..(322): Homolog of NCBI NO: 25370767 NR Description: hypothetical protein At2g33560 [imported] -
  misc_feature (9)..(342): Homolog of NCBI NO: 22128593 NR Description: spindle checkpoint protein BubR1 [Xenopus laevis]
  misc_feature (9)..(361): Homolog of NCBI NO: 29725501 NR Description: spindle checkpoint protein BubR1 [Gallus gallus]
  misc_feature (269)..(323): Homolog of NCBI NO: 26396196 NR Description: Mitotic spindle checkpoint component mad3
  misc_feature (11)..(189): Homolog of NCBI NO: 26396196 NR Description: Mitotic spindle checkpoint component mad3
  misc_feature (9)..(72): Homolog of NCBI NO: 25370767 NR Description: hypothetical protein At2g33560 [imported] -
  misc_feature (119)..(202): Homolog of NCBI NO: 25370767 NR Description: hypothetical protein At2g33560 [imported] -
  misc_feature (1)..(171): Homolog of NCBI NO: 5441887 NR Description: Similar to Arabidopsis thaliana BAC genomic
  misc_feature (9)..(367): Homolog of NCBI NO: 21593781 NR Description: unknown [Arabidopsis thaliana]
  misc_feature (9)..(367): Homolog of NCBI NO: 18403316 NR Description: expressed protein [Arabidopsis thaliana]
  misc_feature (172)..(172): Xaa is any aa, unknown or other
MAPVAVCGEWETFKENVRPLKRGRNVGLLNQALKAHTDPAQRAALLAERRRMIEAIEEYQGEDPLQPWVDCIKWVQESFPAGGEFSGLVVIYEQCVRAFWHDERYKDDLRYLKVWLEYAGNCSDAEVIFRFLESNRIGEGHAVFYIRYALLMESKNKVKKVDEIFNLGIARXAKPVEKLETTYRAFLGRSTRKKEHEDDTASDDPPVRKFGSDLNRGETRGQHAENSHMLAKPRVKLQRIDVNTPISIYKENPLPSQGLERARSKDRAWNTLGTQADRNKENNMMPARWTSHKIPPKVAARQAVPPARVSSIEVFVDEECAEEPAPPRVPKSPKPSVLKLRQATSKNLKKESELLKENPLRNFPLSSLR

SEQ ID NO: 65348 - DNA, 1477 bp, Triticum aestivum
  misc_feature (1)..(1477): Ceres Seq. ID no. 13597582
atggatggccaacaagccaaacgccacctaaaggtatccggaccggatatccaggacagataggatgcctcggagatgcccttgctccccgatcccaagtcgtcaagttcgctgcacctcccgtccccgtggtgccctcgccgtgacctcaccggcggccgctatgacctcgccggcttccacctcttcctggttctccggaatcgtgcgcacagcatccggcaatcccccttcttcagccatgcctcccgccggcggcgtcacctccgcccccgtctcccttcccgacacccctgctgccgtgagcggcaagggtggcgtcgttgcccctgtagccaccacaggcgtaggtgctcgcaggaagcagctccagggcacgctgttcaagtacgggcccaagtccgctcaggttgcgtttaggactggtgattttacccgtcaggtgattttcattggtggtttggcagatgggctcttagcaactgattacttggaaccattgtcacttgcgttggaggttgagaaatggtcactggttcaaccattactttcttcatcatatactggatacggaatttccaccttggagcaagatgcattggaacttgatcagctcatcggttacttgataaataaagataattctgaaggagtaatactgctcggtcacagcactggttgccaggatattatacattacatgcggacaaactttgcatgttccaaagcagtttctggggtaattttgcaggccccagtaagtgacagggagtatagggcaactcttccagaaacaggagaaatgatagatctagcagcgaaaatgattagtgcgggccgtggaatggatttgatgcccagagaagcaaattcagatgctccaattactgcctacaggttccactccctttgtgcatatatgggtgatgatgatatgttcagttctgatcttagtgaagatcagctgaagcagagacttggtcatatgtcaaccacacagtgcctggttgttttttcaatggcggatgagtatgtccctgaatacgtcgataagaaggcacttgtagacagactctctcgtgcacttggagattcagagaaagttgaaataaaatggggaaaccatgctctttccaacagggtgcaagaggctgtcgaggttattgtagattttgttaagagggagggacccaaaggatgggacgatccatggagctagatacaatagtcatatgatgcaatctttacccccctttacctgttagaatctttcgtttttgtagttttcttagtcaattttctatgtactaatgttctgatctatttaattttattgtgtaaacccttgtctagtacttgattctcgatctcgtgttcatctgtggacattcagatatgctgtttgaaaattgtaagttgtaatgctactatctctggaatgttcctctttgtctattcagagtgtttttttaaggct

SEQ ID NO: 65349 - protein, 384 aa, Triticum aestivum
  peptide (1)..(384): Ceres Seq. ID no. 15222143
  misc_feature (127)..(213): Homolog of NCBI NO: 40739433 NR Description: hypothetical protein AN6239.2 [Aspergillus
  misc_feature (99)..(213): Homolog of NCBI NO: 40739421 NR Description: hypothetical protein AN6793.2 [Aspergillus
  misc_feature (99)..(374): Homolog of NCBI NO: 19173345 NR Description: hypothetical protein [Encephalitozoon cuniculi]
  misc_feature (120)..(308): Homolog of NCBI NO: 19114904 NR Description: hypothetical protein; sequence orphan
  misc_feature (273)..(351): Homolog of NCBI NO: 40741836 NR Description: hypothetical protein AN4948.2 [Aspergillus
  misc_feature (104)..(213): Homolog of NCBI NO: 40741836 NR Description: hypothetical protein AN4948.2 [Aspergillus
  misc_feature (286)..(384): Homolog of NCBI NO: 34900044 NR Description: hypothetical protein~predicted by GeneMark.hmm
  misc_feature (39)..(291): Homolog of NCBI NO: 34900046 NR Description: contains EST C72879(E2411)~similar to Arabidopsis
  misc_feature (28)..(384): Homolog of NCBI NO: 15239639 NR Description: expressed protein [Arabidopsis thaliana]
  misc_feature (39)..(384): Homolog of NCBI NO: 34393295 NR Description: unknown protein [Oryza sativa (japonica
MPRRCPCSPIPSRQVRCTSRPRGALAVTSPAAAMTSPASTSSWFSGIVRTASGNPPSSAMPPAGGVTSAPVSLPDTPAAVSGKGGVVAPVATTGVGARRKQLQGTLFKYGPKSAQVAFRTGDFTRQVIFIGGLADGLLATDYLEPLSLALEVEKWSLVQPLLSSSYTGYGISTLEQDALELDQLIGYLINKDNSEGVILLGHSTGCQDIIHYMRTNFACSKAVSGVILQAPVSDREYRATLPETGEMIDLAAKMISAGRGMDLMPREANSDAPITAYRFHSLCAYMGDDDMFSSDLSEDQLKQRLGHMSTTQCLVVFSMADEYVPEYVDKKALVDRLSRALGDSEKVEIKWGNHALSNRVQEAVEVIVDFVKREGPKGWDDPWS

SEQ ID NO: 65350 - protein, 351 aa, Triticum aestivum
  peptide (1)..(351): Ceres Seq. ID no. 15222144
  misc_feature (94)..(180): Homolog of NCBI NO: 40739433 NR Description: hypothetical protein AN6239.2 [Aspergillus
  misc_feature (66)..(180): Homolog of NCBI NO: 40739421 NR Description: hypothetical protein AN6793.2 [Aspergillus
  misc_feature (66)..(341): Homolog of NCBI NO: 19173345 NR Description: hypothetical protein [Encephalitozoon cuniculi]
  misc_feature (87)..(275): Homolog of NCBI NO: 19114904 NR Description: hypothetical protein; sequence orphan
  misc_feature (240)..(318): Homolog of NCBI NO: 40741836 NR Description: hypothetical protein AN4948.2 [Aspergillus
  misc_feature (71)..(180): Homolog of NCBI NO: 40741836 NR Description: hypothetical protein AN4948.2 [Aspergillus
  misc_feature (253)..(351): Homolog of NCBI NO: 34900044 NR Description: hypothetical protein~predicted by GeneMark.hmm
  misc_feature (6)..(258): Homolog of NCBI NO: 34900046 NR Description: contains EST C72879(E2411)~similar to Arabidopsis
  misc_feature (1)..(351): Homolog of NCBI NO: 15239639 NR Description: expressed protein [Arabidopsis thaliana]
  misc_feature (6)..(351): Homolog of NCBI NO: 34393295 NR Description: unknown protein [Oryza sativa (japonica
MTSPASTSSWFSGIVRTASGNPPSSAMPPAGGVTSAPVSLPDTPAAVSGKGGVVAPVATTGVGARRKQLQGTLFKYGPKSAQVAFRTGDFTRQVIFIGGLADGLLATDYLEPLSLALEVEKWSLVQPLLSSSYTGYGISTLEQDALELDQLIGYLINKDNSEGVILLGHSTGCQDIIHYMRTNFACSKAVSGVILQAPVSDREYRATLPETGEMIDLAAKMISAGRGMDLMPREANSDAPITAYRFHSLCAYMGDDDMFSSDLSEDQLKQRLGHMSTTQCLVVFSMADEYVPEYVDKKALVDRLSRALGDSEKVEIKWGNHALSNRVQEAVEVIVDFVKREGPKGWDDPWS

SEQ ID NO: 65351 - protein, 325 aa, Triticum aestivum
  peptide (1)..(325): Ceres Seq. ID no. 15222145
  misc_feature (68)..(154): Homolog of NCBI NO: 40739433 NR Description: hypothetical protein AN6239.2 [Aspergillus
  misc_feature (40)..(154): Homolog of NCBI NO: 40739421 NR Description: hypothetical protein AN6793.2 [Aspergillus
  misc_feature (40)..(315): Homolog of NCBI NO: 19173345 NR Description: hypothetical protein [Encephalitozoon cuniculi]
  misc_feature (61)..(249): Homolog of NCBI NO: 19114904 NR Description: hypothetical protein; sequence orphan
  misc_feature (214)..(292): Homolog of NCBI NO: 40741836 NR Description: hypothetical protein AN4948.2 [Aspergillus
  misc_feature (45)..(154): Homolog of NCBI NO: 40741836 NR Description: hypothetical protein AN4948.2 [Aspergillus
  misc_feature (227)..(325): Homolog of NCBI NO: 34900044 NR Description: hypothetical protein~predicted by GeneMark.hmm
  misc_feature (1)..(232): Homolog of NCBI NO: 34900046 NR Description: contains EST C72879(E2411)~similar to Arabidopsis
  misc_feature (1)..(325): Homolog of NCBI NO: 15239639 NR Description: expressed protein [Arabidopsis thaliana]
  misc_feature (1)..(325): Homolog of NCBI NO: 34393295 NR Description: unknown protein [Oryza sativa (japonica
MPPAGGVTSAPVSLPDTPAAVSGKGGVVAPVATTGVGARRKQLQGTLFKYGPKSAQVAFRTGDFTRQVIFIGGLADGLLATDYLEPLSLALEVEKWSLVQPLLSSSYTGYGISTLEQDALELDQLIGYLINKDNSEGVILLGHSTGCQDIIHYMRTNFACSKAVSGVILQAPVSDREYRATLPETGEMIDLAAKMISAGRGMDLMPREANSDAPITAYRFHSLCAYMGDDDMFSSDLSEDQLKQRLGHMSTTQCLVVFSMADEYVPEYVDKKALVDRLSRALGDSEKVEIKWGNHALSNRVQEAVEVIVDFVKREGPKGWDDPWS

SEQ ID NO: 65352 - DNA, 1410 bp, Triticum aestivum
  misc_feature (1)..(1410): Ceres Seq. ID no. 12617729
atccataacccggctgcccctcgcccgtctccgccgcaccccccaaaaccctagctcccctccccaccccgccccccaccgccgccgccgcccgcgaagatgccgccgaacctcgagtgccggatgtacgagccgcggttcccggaggtggacgcggcggtgatgatccaggtgaagcacatcgccgacatgggcgcctacgtctcgctcctcgagtacaacaacatcgagggcatgatcctcttctccgagctctcccgccgccgcatccgctccatctcctccctcatcaaggtcggccgccaggagccctccatggtgctccgcgtcgaccgcgacaagggctacatcgacctctccaagcgccgggtctcggaggaggaggccgccacctgcgaggaccgctacaacaagtccaagctcgtccactccatcatgcgccacgccgccgacaccctcggcgtcgacctcgagcccctctaccagcgcatcggctggccgctctaccgcaggtacggccacgcctttgaggccttcaagctcatcgtcaccgaccccgacggggtgctcgacgtcctcacctacgaggagaccgtcgtcggacccgatggcgaggaggtgactaaagttgtgccggcggtcacccctgaggttaaggatgccctggtcaagaacataaggaggagaatgacaccacagcctcttaagattcgtgctgatgttgagatgaaatgcttccagtttgacggtgttctccacattaaggaagccatgaggaaagctgaagctgctggaaacgctgattgccctgtgaagattaagctagttgctcctccgctttatgttctgaccacacagacacttgacaaagaccaggggatagcagttctgacaaatgcaaccaaaatttgtgccgaggcaattgaaaagcacaaggggaaattggtggtgaaggaagcagctagagctgtgagcgagagagacgacaagctgtttgcggacacgattgagaagctcaagctagcaggtgaggaggtcgacggcgacgacgatagcgaggaggaggactctggcatgggagacgtagacttcacaaaggctggcgctggcgcggactgagcgggtctcctcccaggtgggatgagattgcttgtacagcgccagcaatgaaggggaagaatgtttggctcctcctgtttgtttgaggaggcacgttggatggatggacgagtgtttactctgttattagatattgatgatcagttgtaggctacccgtagtcttacagattgatttgcttttcgctgagcactgattctgaatactgttaattgcgcttttgctacctgttttcatcagcatttatacatggattttgcttatcgttgctcactaagtggaatttggtgc

SEQ ID NO: 65353 - protein, 339 aa, Triticum aestivum
  peptide (1)..(339): Ceres Seq. ID no. 12617730
  misc_feature (14)..(89): Pfam Name: S1 RNA binding domain Pfam Description: S1 RNA binding domain
  misc_feature (179)..(324): Homolog of NCBI NO: 19114993 NR Description: eukaryotic translation initiation factor 2 alpha
  misc_feature (7)..(184): Homolog of NCBI NO: 19114993 NR Description: eukaryotic translation initiation factor 2 alpha
  misc_feature (185)..(326): Homolog of NCBI NO: 40744551 NR Description: hypothetical protein AN3156.2 [Aspergillus
  misc_feature (7)..(166): Homolog of NCBI NO: 40744551 NR Description: hypothetical protein AN3156.2 [Aspergillus
  misc_feature (1)..(264): Homolog of NCBI NO: 4588003 NR Description: hypothetical EIF-2-Alpha [Arabidopsis thaliana]
  misc_feature (1)..(337): Homolog of NCBI NO: 13549160 NR Description: protein synthesis initiation factor eIF2 alpha
  misc_feature (1)..(337): Homolog of NCBI NO: 15239135 NR Description: eukaryotic translation initiation factor 2 alpha
  misc_feature (1)..(337): Homolog of NCBI NO: 21537411 NR Description: putative eukaryotic translation initiation factor
  misc_feature (1)..(337): Homolog of NCBI NO: 18405334 NR Description: putative eukaryotic translation initiation factor
  misc_feature (3)..(338): Homolog of NCBI NO: 34898218 NR Description: putative eukaryotic translation initiation factor
MPPNLECRMYEPRFPEVDAAVMIQVKHIADMGAYVSLLEYNNIEGMILFSELSRRRIRSISSLIKVGRQEPSMVLRVDRDKGYIDLSKRRVSEEEAATCEDRYNKSKLVHSIMRHAADTLGVDLEPLYQRIGWPLYRRYGHAFEAFKLIVTDPDGVLDVLTYEETVVGPDGEEVTKVVPAVTPEVKDALVKNIRRRMTPQPLKIRADVEMKCFQFDGVLHIKEAMRKAEAAGNADCPVKIKLVAPPLYVLTTQTLDKDQGIAVLTNATKICAEAIEKHKGKLVVKEAARAVSERDDKLFADTIEKLKLAGEEVDGDDDSEEEDSGMGDVDFTKAGAGAD

SEQ ID NO: 65354 - protein, 331 aa, Triticum aestivum
  peptide (1)..(331): Ceres Seq. ID no. 12617731
  misc_feature (6)..(81): Pfam Name: S1 RNA binding domain Pfam Description: S1 RNA binding domain
  misc_feature (171)..(316): Homolog of NCBI NO: 19114993 NR Description: eukaryotic translation initiation factor 2 alpha
  misc_feature (1)..(176): Homolog of NCBI NO: 19114993 NR Description: eukaryotic translation initiation factor 2 alpha
  misc_feature (177)..(318): Homolog of NCBI NO: 40744551 NR Description: hypothetical protein AN3156.2 [Aspergillus
  misc_feature (1)..(158): Homolog of NCBI NO: 40744551 NR Description: hypothetical protein AN3156.2 [Aspergillus
  misc_feature (1)..(256): Homolog of NCBI NO: 4588003 NR Description: hypothetical EIF-2-Alpha [Arabidopsis thaliana]
  misc_feature (1)..(329): Homolog of NCBI NO: 13549160 NR Description: protein synthesis initiation factor eIF2 alpha
  misc_feature (1)..(329): Homolog of NCBI NO: 15239135 NR Description: eukaryotic translation initiation factor 2 alpha
  misc_feature (1)..(329): Homolog of NCBI NO: 21537411 NR Description: putative eukaryotic translation initiation factor
  misc_feature (1)..(329): Homolog of NCBI NO: 18405334 NR Description: putative eukaryotic translation initiation factor
  misc_feature (1)..(330): Homolog of NCBI NO: 34898218 NR Description: putative eukaryotic translation initiation factor
MYEPRFPEVDAAVMIQVKHIADMGAYVSLLEYNNIEGMILFSELSRRRIRSISSLIKVGRQEPSMVLRVDRDKGYIDLSKRRVSEEEAATCEDRYNKSKLVHSIMRHAADTLGVDLEPLYQRIGWPLYRRYGHAFEAFKLIVTDPDGVLDVLTYEETVVGPDGEEVTKVVPAVTPEVKDALVKNIRRRMTPQPLKIRADVEMKCFQFDGVLHIKEAMRKAEAAGNADCPVKIKLVAPPLYVLTTQTLDKDQGIAVLTNATKICAEAIEKHKGKLVVKEAARAVSERDDKLFADTIEKLKLAGEEVDGDDDSEEEDSGMGDVDFTKAGAGAD

SEQ ID NO: 65355 - protein, 318 aa, Triticum aestivum
  peptide (1)..(318): Ceres Seq. ID no. 12617732
  misc_feature (1)..(68): Pfam Name: S1 RNA binding domain Pfam Description: S1 RNA binding domain
  misc_feature (158)..(303): Homolog of NCBI NO: 19114993 NR Description: eukaryotic translation initiation factor 2 alpha
  misc_feature (1)..(163): Homolog of NCBI NO: 19114993 NR Description: eukaryotic translation initiation factor 2 alpha
  misc_feature (164)..(305): Homolog of NCBI NO: 40744551 NR Description: hypothetical protein AN3156.2 [Aspergillus
  misc_feature (1)..(145): Homolog of NCBI NO: 40744551 NR Description: hypothetical protein AN3156.2 [Aspergillus
  misc_feature (1)..(243): Homolog of NCBI NO: 4588003 NR Description: hypothetical EIF-2-Alpha [Arabidopsis thaliana]
  misc_feature (1)..(316): Homolog of NCBI NO: 13549160 NR Description: protein synthesis initiation factor eIF2 alpha
  misc_feature (1)..(316): Homolog of NCBI NO: 15239135 NR Description: eukaryotic translation initiation factor 2 alpha
  misc_feature (1)..(316): Homolog of NCBI NO: 21537411 NR Description: putative eukaryotic translation initiation factor
  misc_feature (1)..(316): Homolog of NCBI NO: 18405334 NR Description: putative eukaryotic translation initiation factor
  misc_feature (1)..(317): Homolog of NCBI NO: 34898218 NR Description: putative eukaryotic translation initiation factor
MIQVKHIADMGAYVSLLEYNNIEGMILFSELSRRRIRSISSLIKVGRQEPSMVLRVDRDKGYIDLSKRRVSEEEAATCEDRYNKSKLVHSIMRHAADTLGVDLEPLYQRIGWPLYRRYGHAFEAFKLIVTDPDGVLDVLTYEETVVGPDGEEVTKVVPAVTPEVKDALVKNIRRRMTPQPLKIRADVEMKCFQFDGVLHIKEAMRKAEAAGNADCPVKIKLVAPPLYVLTTQTLDKDQGIAVLTNATKICAEAIEKHKGKLVVKEAARAVSERDDKLFADTIEKLKLAGEEVDGDDDSEEEDSGMGDVDFTKAGAGAD

SEQ ID NO: 65356 - DNA, 1501 bp, Triticum aestivum
  misc_feature (1)..(1501): Ceres Seq. ID no. 14303596
agtttgttaagttaggagcttgtgatcaaggcagcaaggcgagaagctgaagctctagctagctctggcgggcatgtttccggcggaggcgtcgttcgccggcgcggaagcggccatgctgccgcccttcttcgtgggctccatgtggcagtcggcgccaggcggcggcgcggctgccttgtccgaggaggacgaggtagccgccgctgcggctgccgaggcagcgcacgaccgcgcggtggcggcgacgcggaaccaccgcgaggccgagaagcgccgccgcgagcggatcaagtcgcacctcgaccgcctccgcgccgtcctcgcctgcgaccccaagatagacaaggcaacgctgctggccaaggcggtggagagggtgcgggagctgaagcagcgcatggacggcgtcgttggcgaggcggcggcgccggcgagccacctgttccccacggagcacgacgagatcgtggtgctcgcgtcgggaggcggcgccggcggcgcggcggccgtgtttgaggcctccgtctgctgcgacgaccgctccgacctcctcccgggcctcatcgacacgctgcgcgcgctccgcctccgcacgctccgcgccgagatggccaccctcggcggccgcgtccgcaacgtgctcgtcctcgcgcgcgacgccggaggacacgccgacgacgactactccacatcctccgaggacggcggcgccgacttcctcaaggaggccctgagggccctcgtggagaggcagggggctgccgccggcgaccggcccaagaggagacgcgtcgccgacatgaacatgcaagcggctgcttaatgaatcagctagccggccggcggccatagctcatagtatctggtcgatatgattgcatatggcgatggatctcatgcatgccatggtaatggtactactactactactatacagcgtgttaatttgctttcaaggttaattagttttgtgtgatggttaattagttccaattctccatatataccactatatggctagctaactctccttggtgatgccaatatgccatgtataattagggatatatatattactactcttttaccattagggtttgcttgagctttaatcaaatgttgcttcaaagccatggcaaacccagcccctaaaataacagttaatgtcagaatatatgcacaatgcaaagttccagacttgattgccatatgctacatatacattggataactctggaagcatttctgtttacaagatcccacaagtccatttttgatcatgtcagggcatgcagctagctagctagccttatatgcatgcatgcatgtaagacaagtcttcggatcaaacaaagatgtttgcatgcatacatgtagcaatgcatggcaagtcctaagatcaaaacaaagatggttgttccaacgcattgcatagcaatgtagcagcatgcttcctgtctgtccggtcttgtgaatgaatgaaaaaagaatgaatgtc

SEQ ID NO: 65357 - protein, 250 aa, Triticum aestivum
  peptide (1)..(250): Ceres Seq. ID no. 14303597
  misc_feature (58)..(107): Pfam Name: Helix-loop-helix DNA-binding domain Pfam Description: Helix-loop-helix DNA-binding domain
  misc_feature (53)..(227): Homolog of NCBI NO: 15225658 NR Description: bHLH protein family [Arabidopsis thaliana]
  misc_feature (20)..(201): Homolog of NCBI NO: 34904034 NR Description: P0665D10.15 [Oryza sativa (japonica
  misc_feature (18)..(198): Homolog of NCBI NO: 34896028 NR Description: ESTs C26093(C11622),AU090634(C12429) correspond a region of the predicted gene.~Similar to Arabidopsis thaliana
  misc_feature (39)..(212): Homolog of NCBI NO: 15230869 NR Description: bHLH protein family [Arabidopsis thaliana]
  misc_feature (31)..(243): Homolog of NCBI NO: 15229004 NR Description: bHLH protein family [Arabidopsis thaliana]
  misc_feature (32)..(245): Homolog of NCBI NO: 18409132 NR Description: bHLH protein family [Arabidopsis thaliana]
  misc_feature (31)..(243): Homolog of NCBI NO: 18491261 NR Description: At2g41130/T3K9.10 [Arabidopsis thaliana]
  misc_feature (31)..(243): Homolog of NCBI NO: 15226839 NR Description: bHLH protein family [Arabidopsis thaliana]
  misc_feature (1)..(250): Homolog of NCBI NO: 32129332 NR Description: putative DNA binding protein
MFPAEASFAGAEAAMLPPFFVGSMWQSAPGGGAAALSEEDEVAAAAAAEAAHDRAVAATRNHREAEKRRRERIKSHLDRLRAVLACDPKIDKATLLAKAVERVRELKQRMDGVVGEAAAPASHLFPTEHDEIVVLASGGGAGGAAAVFEASVCCDDRSDLLPGLIDTLRALRLRTLRAEMATLGGRVRNVLVLARDAGGHADDDYSTSSEDGGADFLKEALRALVERQGAAAGDRPKRRRVADMNMQAAA

SEQ ID NO: 65358 - protein, 236 aa, Triticum aestivum
  peptide (1)..(236): Ceres Seq. ID no. 14303598
  misc_feature (44)..(93): Pfam Name: Helix-loop-helix DNA-binding domain Pfam Description: Helix-loop-helix DNA-binding domain
  misc_feature (39)..(213): Homolog of NCBI NO: 15225658 NR Description: bHLH protein family [Arabidopsis thaliana]
  misc_feature (6)..(187): Homolog of NCBI NO: 34904034 NR Description: P0665D10.15 [Oryza sativa (japonica
  misc_feature (4)..(184): Homolog of NCBI NO: 34896028 NR Description: ESTs C26093(C11622),AU090634(C12429) correspond a region of the predicted gene.~Similar to Arabidopsis thaliana
  misc_feature (25)..(198): Homolog of NCBI NO: 15230869 NR Description: bHLH protein family [Arabidopsis thaliana]
  misc_feature (17)..(229): Homolog of NCBI NO: 15229004 NR Description: bHLH protein family [Arabidopsis thaliana]
  misc_feature (18)..(231): Homolog of NCBI NO: 18409132 NR Description: bHLH protein family [Arabidopsis thaliana]
  misc_feature (17)..(229): Homolog of NCBI NO: 18491261 NR Description: At2g41130/T3K9.10 [Arabidopsis thaliana]
  misc_feature (17)..(229): Homolog of NCBI NO: 15226839 NR Description: bHLH protein family [Arabidopsis thaliana]
  misc_feature (1)..(236): Homolog of NCBI NO: 32129332 NR Description: putative DNA binding protein
MLPPFFVGSMWQSAPGGGAAALSEEDEVAAAAAAEAAHDRAVAATRNHREAEKRRRERIKSHLDRLRAVLACDPKIDKATLLAKAVERVRELKQRMDGVVGEAAAPASHLFPTEHDEIVVLASGGGAGGAAAVFEASVCCDDRSDLLPGLIDTLRALRLRTLRAEMATLGGRVRNVLVLARDAGGHADDDYSTSSEDGGADFLKEALRALVERQGAAAGDRPKRRRVADMNMQAAA

SEQ ID NO: 65359 - protein, 227 aa, Triticum aestivum
  peptide (1)..(227): Ceres Seq. ID no. 14303599
  misc_feature (35)..(84): Pfam Name: Helix-loop-helix DNA-binding domain Pfam Description: Helix-loop-helix DNA-binding domain
  misc_feature (30)..(204): Homolog of NCBI NO: 15225658 NR Description: bHLH protein family [Arabidopsis thaliana]
  misc_feature (1)..(178): Homolog of NCBI NO: 34904034 NR Description: P0665D10.15 [Oryza sativa (japonica
  misc_feature (1)..(175): Homolog of NCBI NO: 34896028 NR Description: ESTs C26093(C11622),AU090634(C12429) correspond a region of the predicted gene.~Similar to Arabidopsis thaliana
  misc_feature (16)..(189): Homolog of NCBI NO: 15230869 NR Description: bHLH protein family [Arabidopsis thaliana]
  misc_feature (8)..(220): Homolog of NCBI NO: 15229004 NR Description: bHLH protein family [Arabidopsis thaliana]
  misc_feature (9)..(222): Homolog of NCBI NO: 18409132 NR Description: bHLH protein family [Arabidopsis thaliana]
  misc_feature (8)..(220): Homolog of NCBI NO: 18491261 NR Description: At2g41130/T3K9.10 [Arabidopsis thaliana]
  misc_feature (8)..(220): Homolog of NCBI NO: 15226839 NR Description: bHLH protein family [Arabidopsis thaliana]
  misc_feature (1)..(227): Homolog of NCBI NO: 32129332 NR Description: putative DNA binding protein
MWQSAPGGGAAALSEEDEVAAAAAAEAAHDRAVAATRNHREAEKRRRERIKSHLDRLRAVLACDPKIDKATLLAKAVERVRELKQRMDGVVGEAAAPASHLFPTEHDEIVVLASGGGAGGAAAVFEASVCCDDRSDLLPGLIDTLRALRLRTLRAEMATLGGRVRNVLVLARDAGGHADDDYSTSSEDGGADFLKEALRALVERQGAAAGDRPKRRRVADMNMQAAA

SEQ ID NO: 65360 - DNA, 1353 bp, Triticum aestivum
  misc_feature (1)..(1353): Ceres Seq. ID no. 14303564
attaccagttgccgaagagtgagagtgagtaccgagcagttggtgcgctgctctgtcctgacattgcacgcgcttgccaccgagctctgcattgcgtctactagcagctatcctcgatggggctgccgggatgcatcgccgtcattgtgctccttctgatttcatggagagagggggaggcggcgatgttcacgttcgtcaaccggtgcgccgacacggtgtggccgggcgtcctgtccaacgctggcacggctcggctcggcaccacggggttcgagctcccgccgggcgcgtcgcgcgctgtgccggcgccctcggcctggtccggccgcctctgggcccgcaccggatgcgcgcaggacggcgccacggggcggctcgtctgcgccaccggcgactgcggctccggcacggccgagtgcgccggggccggcgcggcgcccccagcgacgctggccgagttcacgctcgacggcacgggcgggctggacttctacgacgtcagcctggtggacgggtacaacctgccggtgctggtggagccgtcctccggggagcgccccggcggcgcgtcgaccgctgggtcctgcgcttcggcggggtgcgcggcggacctgaacgcgatgtgccccgccgagctccggtccggcggcggcgcggcctgccggagcgcgtgcgacgcgttcgggcggcccgagtactgctgcagcggcgcctacgccaaccccgggacgtgccggccgacgtcctactcgcaggtgttcaagatggcctgcccgcgctcctacagctacgccttcgacgaccccacctccaccttcacctgcgccggcggccccgactacaccgtcaccttctgccccggcgccaccccgagccagaagtcgaccacggtgccggcggccacaacgccgacgcaaacgacccccacgccgacgacggtgcctgtgacggatacgccggcgatgatgccggggatgacgttcacggacgccaaccaggacagcatgccgatgccgatgggcggcgaggccgggactggtggtggcggcagcatccaggggcagggcgtgatcctcgggggcaccagcagcgacgcctggctcgccaacatggccaccggcgacgcgacgggcgcggcagcggcagcggcagcctccgggcggctagtcgccgcgccattggtactgctcgcgctccatctgctgcgatagatggaggtcggcggagcactgattgatcggtgcaatgtgtacgggtgaaaagagagattggttgtagggttagattcggagaaaaccattgtaacattccgtgttgatgggattttgttgtacgtagattgttggttag

SEQ ID NO: 65361 - protein, 369 aa, Triticum aestivum
  peptide (1)..(369): Ceres Seq. ID no. 14303565
MHRRHCAPSDFMERGGGGDVHVRQPVRRHGVAGRPVQRWHGSARHHGVRAPAGRVARCAGALGLVRPPLGPHRMRAGRRHGAARLRHRRLRLRHGRVRRGRRGAPSDAGRVHARRHGRAGLLRRQPGGRVQPAGAGGAVLRGAPRRRVDRWVLRFGGVRGGPERDVPRRAPVRRRRGLPERVRRVRAARVLLQRRLRQPRDVPADVLLAGVQDGLPALLQLRLRRPHLHLHLRRRPRLHRHLLPRRHPEPEVDHGAGGHNADANDPHADDGACDGYAGDDAGDDVHGRQPGQHADADGRRGRDWWWRQHPGAGRDPRGHQQRRLARQHGHRRRDGRGSGSGSLRAASRRAIGTARAPSAAIDGGRRSTD

SEQ ID NO: 65362 - protein, 365 aa, Triticum aestivum
  peptide (1)..(365): Ceres Seq. ID no. 14303566
  misc_feature (29)..(249): Pfam Name: Thaumatin family Pfam Description: Thaumatin family
  misc_feature (21)..(249): Homolog of NCBI NO: 2262099 NR Description: thaumatin isolog [Arabidopsis thaliana]
  misc_feature (25)..(287): Homolog of NCBI NO: 30686652 NR Description: thaumatin family [Arabidopsis thaliana]
  misc_feature (25)..(287): Homolog of NCBI NO: 25296204 NR Description: hypothetical protein T20H2.19 [imported] -
  misc_feature (10)..(249): Homolog of NCBI NO: 15233738 NR Description: thaumatin family [Arabidopsis thaliana]
  misc_feature (7)..(274): Homolog of NCBI NO: 15233437 NR Description: thaumatin family [Arabidopsis thaliana]
  misc_feature (1)..(258): Homolog of NCBI NO: 37531042 NR Description: putative thaumatin-like protein
  misc_feature (25)..(345): Homolog of NCBI NO: 7442168 NR Description: pathogenesis-related protein F20M13.220 -
  misc_feature (7)..(345): Homolog of NCBI NO: 18420282 NR Description: thaumatin-like protein, putative [Arabidopsis
  misc_feature (7)..(345): Homolog of NCBI NO: 21592749 NR Description: putative thaumatin-like protein [Arabidopsis
  misc_feature (1)..(365): Homolog of NCBI NO: 37531036 NR Description: putative thaumatin-like protein
MGLPGCIAVIVLLLISWREGEAAMFTFVNRCADTVWPGVLSNAGTARLGTTGFELPPGASRAVPAPSAWSGRLWARTGCAQDGATGRLVCATGDCGSGTAECAGAGAAPPATLAEFTLDGTGGLDFYDVSLVDGYNLPVLVEPSSGERPGGASTAGSCASAGCAADLNAMCPAELRSGGGAACRSACDAFGRPEYCCSGAYANPGTCRPTSYSQVFKMACPRSYSYAFDDPTSTFTCAGGPDYTVTFCPGATPSQKSTTVPAATTPTQTTPTPTTVPVTDTPAMMPGMTFTDANQDSMPMPMGGEAGTGGGGSIQGQGVILGGTSSDAWLANMATGDATGAAAAAAASGRLVAAPLVLLALHLLR

SEQ ID NO: 65363 - protein, 358 aa, Triticum aestivum
  peptide (1)..(358): Ceres Seq. ID no. 14303567
MERGGGGDVHVRQPVRRHGVAGRPVQRWHGSARHHGVRAPAGRVARCAGALGLVRPPLGPHRMRAGRRHGAARLRHRRLRLRHGRVRRGRRGAPSDAGRVHARRHGRAGLLRRQPGGRVQPAGAGGAVLRGAPRRRVDRWVLRFGGVRGGPERDVPRRAPVRRRRGLPERVRRVRAARVLLQRRLRQPRDVPADVLLAGVQDGLPALLQLRLRRPHLHLHLRRRPRLHRHLLPRRHPEPEVDHGAGGHNADANDPHADDGACDGYAGDDAGDDVHGRQPGQHADADGRRGRDWWWRQHPGAGRDPRGHQQRRLARQHGHRRRDGRGSGSGSLRAASRRAIGTARAPSAAIDGGRRSTD

SEQ ID NO: 65364 - DNA, 1786 bp, Triticum aestivum
  misc_feature (1)..(1786): Ceres Seq. ID no. 14303568
acccgacagtgaacagacagcgcacggcaacgacgcaccatcagtcacgcaccctccacccaagtcgccgactcccgccgtcgcgatcgcggcggccgccggcaatgtcttggctcgcgcgctccatcgccaactccctcctatcccccgacagccccgaggccgacggcgaagacccccgcgcctccgactccacctccccgggctcaccccctcgcggcgtccgcgaggatctctcggagctcactgacgccctcgcccaccggttccagggccttgcctccttcctcgcggcgcccactcccgcaggaagcggcggcgcaccccgcgggctgaacccgtccgagattgcggggcgcttccgcctggggctcgcgcggctcccgggccgccaggccgtggcagatctcgccaagaacgcgtcctctctactgcacccggacgaatactggggcgggtcggaggccgccggggctaccgaggacgtggtcgccttcgcgcgggacgccgccatgcggcccgagctctggctggacttcccccttctccccgacgacgcggactcggacgattttgacattagtgatgcgcagcaagatcacgcgctggccgtcgagagcatggcgccggagctggcagatctgaggatcgaactctgcccaagccacatgagcgagggctgcttctggaagatatactttgtgctactgcaccctaagctcacaaaggaggaagccgagcttctttctactcctcagattttggaagctagagggaagttgtcacaaaattcgcaacatcggacaaagctagagagcaacgaagacacagtggctctgactttcagtaatggagatggtactgtacctatacctgtagaggtggtcagcgtagtaaaagatcaagatgcttccggcaggcccacagctttgggcaatgtagattatggtatacttgaatcgattcctctggaagagctagcaaaagatacagtcagtgatgctggagctgttccttcagataaaatcagcagtggcgtgcctgtacagctattgccggtattaagagatgccactgagttctcagtctcacaatcaaggatgggagaaaccattcacactccctctaaagaacatcccactgggttctcacaatctagcattgaagaaagaacacccgactcaattacagatgatgttgtagcaaatgagcagtgtgtaccatttgtagacagtgctccatcggaagaagatcaacataaatggtcattgagtgacctcagcgagcaatcaagagttgtcactcaaaagtcccataacgatggcactgatgatgatggggatgaatggctggaagaggacacggctggtccaggaagcacgcacattccaatagtaggcgacgatgaggatatatctttcagtgatctggaggaagatgactgatgtagcatgatatcaatggcgagcttggtcatcaccgtcttggtgcttctggttcgaagcgatatgtatatgtgggtttgggttctgtccactgtatggtctcatggatctgctatgatcaatgcccactgcagcaggattgttcaccttctgctcatatctctgtgccgccaagatcagttttgcggtctagttctcccttgtggcaactatgcctgttgtacagtgtgtagagagcacatacttgtgcatgtggttgtttggatcaacactttgattcttggatcaagcgtgtgtcctgacaatgatgatgggaactcgagtattcttatgtttcggtg

SEQ ID NO: 65365 - protein, 480 aa, Triticum aestivum
  peptide (1)..(480): Ceres Seq. ID no. 14303569
  misc_feature (190)..(236): Pfam Name: BSD domain Pfam Description: BSD domain
  misc_feature (155)..(274): Homolog of NCBI NO: 21555533 NR Description: unknown [Arabidopsis thaliana]
  misc_feature (35)..(144): Homolog of NCBI NO: 7486518 NR Description: hypothetical protein F6H11.10 - Arabidopsis
  misc_feature (190)..(445): Homolog of NCBI NO: 7486518 NR Description: hypothetical protein F6H11.10 - Arabidopsis
  misc_feature (35)..(107): Homolog of NCBI NO: 15229611 NR Description: expressed protein [Arabidopsis thaliana]
  misc_feature (115)..(341): Homolog of NCBI NO: 15229611 NR Description: expressed protein [Arabidopsis thaliana]
  misc_feature (44)..(128): Homolog of NCBI NO: 28273391 NR Description: putative BSD domain containing protein
  misc_feature (375)..(480): Homolog of NCBI NO: 28273391 NR Description: putative BSD domain containing protein
  misc_feature (147)..(307): Homolog of NCBI NO: 28273391 NR Description: putative BSD domain containing protein
  misc_feature (35)..(144): Homolog of NCBI NO: 18425006 NR Description: expressed protein [Arabidopsis thaliana]
  misc_feature (114)..(445): Homolog of NCBI NO: 18425006 NR Description: expressed protein [Arabidopsis thaliana]
PTVNRQRTATTHHQSRTLHPSRRLPPSRSRRPPAMSWLARSIANSLLSPDSPEADGEDPRASDSTSPGSPPRGVREDLSELTDALAHRFQGLASFLAAPTPAGSGGAPRGLNPSEIAGRFRLGLARLPGRQAVADLAKNASSLLHPDEYWGGSEAAGATEDVVAFARDAAMRPELWLDFPLLPDDADSDDFDISDAQQDHALAVESMAPELADLRIELCPSHMSEGCFWKIYFVLLHPKLTKEEAELLSTPQILEARGKLSQNSQHRTKLESNEDTVALTFSNGDGTVPIPVEVVSVVKDQDASGRPTALGNVDYGILESIPLEELAKDTVSDAGAVPSDKISSGVPVQLLPVLRDATEFSVSQSRMGETIHTPSKEHPTGFSQSSIEERTPDSITDDVVANEQCVPFVDSAPSEEDQHKWSLSDLSEQSRVVTQKSHNDGTDDDGDEWLEEDTAGPGSTHIPIVGDDEDISFSDLEEDD

SEQ ID NO: 65366 - protein, 446 aa, Triticum aestivum
  peptide (1)..(446): Ceres Seq. ID no. 14303570
  misc_feature (156)..(202): Pfam Name: BSD domain Pfam Description: BSD domain
  misc_feature (121)..(240): Homolog of NCBI NO: 21555533 NR Description: unknown [Arabidopsis thaliana]
  misc_feature (1)..(110): Homolog of NCBI NO: 7486518 NR Description: hypothetical protein F6H11.10 - Arabidopsis
  misc_feature (156)..(411): Homolog of NCBI NO: 7486518 NR Description: hypothetical protein F6H11.10 - Arabidopsis
  misc_feature (1)..(73): Homolog of NCBI NO: 15229611 NR Description: expressed protein [Arabidopsis thaliana]
  misc_feature (81)..(307): Homolog of NCBI NO: 15229611 NR Description: expressed protein [Arabidopsis thaliana]
  misc_feature (10)..(94): Homolog of NCBI NO: 28273391 NR Description: putative BSD domain containing protein
  misc_feature (341)..(446): Homolog of NCBI NO: 28273391 NR Description: putative BSD domain containing protein
  misc_feature (113)..(273): Homolog of NCBI NO: 28273391 NR Description: putative BSD domain containing protein
  misc_feature (1)..(110): Homolog of NCBI NO: 18425006 NR Description: expressed protein [Arabidopsis thaliana]
  misc_feature (80)..(411): Homolog of NCBI NO: 18425006 NR Description: expressed protein [Arabidopsis thaliana]
MSWLARSIANSLLSPDSPEADGEDPRASDSTSPGSPPRGVREDLSELTDALAHRFQGLASFLAAPTPAGSGGAPRGLNPSEIAGRFRLGLARLPGRQAVADLAKNASSLLHPDEYWGGSEAAGATEDVVAFARDAAMRPELWLDFPLLPDDADSDDFDISDAQQDHALAVESMAPELADLRIELCPSHMSEGCFWKIYFVLLHPKLTKEEAELLSTPQILEARGKLSQNSQHRTKLESNEDTVALTFSNGDGTVPIPVEVVSVVKDQDASGRPTALGNVDYGILESIPLEELAKDTVSDAGAVPSDKISSGVPVQLLPVLRDATEFSVSQSRMGETIHTPSKEHPTGFSQSSIEERTPDSITDDVVANEQCVPFVDSAPSEEDQHKWSLSDLSEQSRVVTQKSHNDGTDDDGDEWLEEDTAGPGSTHIPIVGDDEDISFSDLEEDD

SEQ ID NO: 65367 - protein, 310 aa, Triticum aestivum
  peptide (1)..(310): Ceres Seq. ID no. 14303571
  misc_feature (20)..(66): Pfam Name: BSD domain Pfam Description: BSD domain
  misc_feature (20)..(104): Homolog of NCBI NO: 6573740 NR Description: F20B24.15 [Arabidopsis thaliana]
  misc_feature (1)..(83): Homolog of NCBI NO: 34909848 NR Description: OSJNBb0053G03.5 [Oryza sativa (japonica
  misc_feature (1)..(23): Homolog of NCBI NO: 7486518 NR Description: hypothetical protein F6H11.10 - Arabidopsis
  misc_feature (1)..(104): Homolog of NCBI NO: 18391195 NR Description: expressed protein [Arabidopsis thaliana]
  misc_feature (1)..(104): Homolog of NCBI NO: 21555533 NR Description: unknown [Arabidopsis thaliana]
  misc_feature (20)..(275): Homolog of NCBI NO: 7486518 NR Description: hypothetical protein F6H11.10 - Arabidopsis
  misc_feature (1)..(171): Homolog of NCBI NO: 15229611 NR Description: expressed protein [Arabidopsis thaliana]
  misc_feature (205)..(310): Homolog of NCBI NO: 28273391 NR Description: putative BSD domain containing protein
  misc_feature (1)..(137): Homolog of NCBI NO: 28273391 NR Description: putative BSD domain containing protein
  misc_feature (1)..(275): Homolog of NCBI NO: 18425006 NR Description: expressed protein [Arabidopsis thaliana]
MRPELWLDFPLLPDDADSDDFDISDAQQDHALAVESMAPELADLRIELCPSHMSEGCFWKIYFVLLHPKLTKEEAELLSTPQILEARGKLSQNSQHRTKLESNEDTVALTFSNGDGTVPIPVEVVSVVKDQDASGRPTALGNVDYGILESIPLEELAKDTVSDAGAVPSDKISSGVPVQLLPVLRDATEFSVSQSRMGETIHTPSKEHPTGFSQSSIEERTPDSITDDVVANEQCVPFVDSAPSEEDQHKWSLSDLSEQSRVVTQKSHNDGTDDDGDEWLEEDTAGPGSTHIPIVGDDEDISFSDLEEDD

SEQ ID NO: 65368 - DNA, 1346 bp, Triticum aestivum
  misc_feature (1)..(1346): Ceres Seq. ID no. 14302780
cttttccccgtcagacgccagcaagctgcttgctttgcttcggttagctcgctgcgcggcgccgctctcggctcccccgcggccaggctgctcggatggcggggcggccggggtacgtcacgctgccgataatctcggtgttcgccgcgatcgggtacgtctactacaccgcggtgttcctcgcgatccccgcgtggctggggctcgccacggcggcgggggtcgccaacgtcgcggcctacaccgcgctcgcgctcgcctgcgtcgccgcctacggcctcgtcgtcacgcgcgacccgggccgcgtgccgcccgccttcgtgcccgacgtcgaggacacggagacccccctccatgagatcaagcgcaagggtggtgatttgagatactgccagaagtgttttcattataaacctcctcgcgcgcatcattgtcgtgtctgcaagagatgtattctgaaaatggatcaccactgtatttggattaacaattgtgttgggcatgagaattacaaaattttcctcgtctttgtgttgtatgctgcaaccgcaagcttctattctttggctctgatgattggaggcgtagtgcatagtgtgcctacagatgaacaatcaggaattgattctccaagaaaatcgttagttatttgtggcgtctttgtgggtgtaatgactttggcgttgtctatcctcttggtctggcatgtttacctcatcttacataataagactactattgagtaccatgaaggagttagggcaatgtggttggcagaaaaggctggaaatctttaccatcatccatatgatctcggtgtctatcataatattgtttcggtcctaggccccaacatgctatgctggttctgccctgtatcgaggaacataggcgacggcgttcgtttccgcacatcgtatgatattccgctatcgacaccaccatccaaagcagaaaagcatctggcaatgtcttgagctcttgcattgagagcgtatattgtgggatcaaatctgtgaatcatgccgcaagtgtaaggtacatagcgagggctgaggagcttcaagagtagttcctccaggccccagggatgtatctggagttagaaaccctaatctagctagttattccattatactttttggccagcttgatgagaagaatcaccgatgggcctcaatagatctggagtgacctggctcgcctgtactcatacaaaaagtctgaactgaagagtcaaagactgctctgttgtaaagtacgtgcctgtagtgtcgtttaccctgaagtccgtatattgcgtttttgtgtcagagagagttaagggacaaatgtcctatttactc

SEQ ID NO: 65369 - protein, 293 aa, Triticum aestivum
  peptide (1)..(293): Ceres Seq. ID no. 14302781
  misc_feature (88)..(152): Pfam Name: DHHC zinc finger domain Pfam Description: DHHC zinc finger domain
  misc_feature (42)..(275): Homolog of NCBI NO: 23613303 NR Description: cell cycle regulator with zn-finger domain,
  misc_feature (6)..(277): Homolog of NCBI NO: 39645517 NR Description: Unknown (protein for MGC:77880) [Danio rerio]
  misc_feature (9)..(261): Homolog of NCBI NO: 18416000 NR Description: DHHC-type zinc finger domain-containing protein
  misc_feature (9)..(261): Homolog of NCBI NO: 21593364 NR Description: unknown [Arabidopsis thaliana]
  misc_feature (19)..(101): Homolog of NCBI NO: 15237665 NR Description: DHHC-type zinc finger domain-containing protein
  misc_feature (95)..(276): Homolog of NCBI NO: 15237665 NR Description: DHHC-type zinc finger domain-containing protein
  misc_feature (9)..(289): Homolog of NCBI NO: 6478924 NR Description: unknown protein [Arabidopsis thaliana]
  misc_feature (9)..(289): Homolog of NCBI NO: 18398471 NR Description: DHHC-type zinc finger domain-containing protein
  misc_feature (1)..(102): Homolog of NCBI NO: 34908228 NR Description: P0406G08.29 [Oryza sativa (japonica
  misc_feature (120)..(283): Homolog of NCBI NO: 34908228 NR Description: P0406G08.29 [Oryza sativa (japonica
MAGRPGYVTLPIISVFAAIGYVYYTAVFLAIPAWLGLATAAGVANVAAYTALALACVAAYGLVVTRDPGRVPPAFVPDVEDTETPLHEIKRKGGDLRYCQKCFHYKPPRAHHCRVCKRCILKMDHHCIWINNCVGHENYKIFLVFVLYAATASFYSLALMIGGVVHSVPTDEQSGIDSPRKSLVICGVFVGVMTLALSILLVWHVYLILHNKTTIEYHEGVRAMWLAEKAGNLYHHPYDLGVYHNIVSVLGPNMLCWFCPVSRNIGDGVRFRTSYDIPLSTPPSKAEKHLAMS

SEQ ID NO: 65370 - protein, 171 aa, Triticum aestivum
  peptide (1)..(171): Ceres Seq. ID no. 14302782
  misc_feature (1)..(138): Homolog of NCBI NO: 22331887 NR Description: DHHC-type zinc finger domain-containing protein
  misc_feature (1)..(170): Homolog of NCBI NO: 24652286 NR Description: CG1407-PA [Drosophila melanogaster]
  misc_feature (1)..(153): Homolog of NCBI NO: 23613303 NR Description: cell cycle regulator with zn-finger domain,
  misc_feature (1)..(155): Homolog of NCBI NO: 39645517 NR Description: Unknown (protein for MGC:77880) [Danio rerio]
  misc_feature (1)..(139): Homolog of NCBI NO: 18416000 NR Description: DHHC-type zinc finger domain-containing protein
  misc_feature (1)..(139): Homolog of NCBI NO: 21593364 NR Description: unknown [Arabidopsis thaliana]
  misc_feature (1)..(154): Homolog of NCBI NO: 15237665 NR Description: DHHC-type zinc finger domain-containing protein
  misc_feature (1)..(167): Homolog of NCBI NO: 6478924 NR Description: unknown protein [Arabidopsis thaliana]
  misc_feature (1)..(167): Homolog of NCBI NO: 18398471 NR Description: DHHC-type zinc finger domain-containing protein
  misc_feature (1)..(161): Homolog of NCBI NO: 34908228 NR Description: P0406G08.29 [Oryza sativa (japonica
MDHHCIWINNCVGHENYKIFLVFVLYAATASFYSLALMIGGVVHSVPTDEQSGIDSPRKSLVICGVFVGVMTLALSILLVWHVYLILHNKTTIEYHEGVRAMWLAEKAGNLYHHPYDLGVYHNIVSVLGPNMLCWFCPVSRNIGDGVRFRTSYDIPLSTPPSKAEKHLAMS

SEQ ID NO: 65371 - DNA, 1216 bp, Triticum aestivum
  misc_feature (1)..(1216): Ceres Seq. ID no. 13589061
atcgaaaagttgctcttatcttatcccatttcttcctctttcctctccctctctctctctcttacacaagttgctgctgagttggtgctgtccttgttcctggacggacacatcctacatgtcgacggcggtggcgcggccctacggcggcggcttccccggatcggggagggccaagggggacgagctgctcggcaagaagatgagcgacgggttcttcatcgaggaggaggaggaggaggaggaggaggaggcggaggaggtgctcacggagagctcctccatcggcgcgccgtcgccgtcgagctcctccatcggcgaggactcctcgtcggaggttggcggcgacggggaggacgaggaggtggagagcaagctcaaggaggagcccgggctcgggtgcctggacgccctggaggactccttgcccatcaagaacgggctgtcgagcttctacgccggaaagtcgaagtcattcaccagcctcgcggaggcggcggcgcgggacgccgtgaaggagctcgccaagccggagaaccccttcaacaagcgccgccgcatcctggccacctggtcccgccgcgcctcctgcagctcgctggccaccgccacctacctgcccccgctcctcgcccccgaccacgccctccccgagggggaggaaggcgaggaggacgacgactccgactccggctccgacgagcagcaccgcggcaagaacgggtgggaggcaccggcattgccgcccccgaggctgagcgtgaacacccagatgggcgcggcggcggcgaggaagggcggcagcttcagatcgccgaggtcctactcgctctcagatcttcgaaatggcggcgatgcgagatacaaccagtagctgcgaattcgcagccattgatctgtcttgtgtcccgtagatctgttactactacttactccttaattatatataagcaagtaatcgcaagagcatgtgtaagtgtctaagctaaattcgtcgtgctcttgtatccgtcagttggatcccgttgacctcgctcacccgacccgatgtacgcagacatgtatgaactgctccggcgaactgagttcaccgaactgatccaacaccccggccatcattaactaatgatgaaccgtcctcaagataagattagttagtttaatggcattgctcccgatccctttgtgtacaaacatatatacaatttgttgatcc

SEQ ID NO: 65372 - protein, 327 aa, Triticum aestivum
  peptide (1)..(327): Ceres Seq. ID no. 13589062
IEKLLLSYPISSSFLSLSLSLTQVAAELVLSLFLDGHILHVDGGGAALRRRLPRIGEGQGGRAARQEDERRVLHRGGGGGGGGGGGGGAHGELLHRRAVAVELLHRRGLLVGGWRRRGGRGGGEQAQGGARARVPGRPGGLLAHQERAVELLRRKVEVIHQPRGGGGAGRREGARQAGEPLQQAPPHPGHLVPPRLLQLAGHRHLPAPAPRPRPRPPRGGGRRGGRRLRLRLRRAAPRQERVGGTGIAAPEAEREHPDGRGGGEEGRQLQIAEVLLALRSSKWRRCEIQPVAANSQPLICLVSRRSVTTTYSLIIYKQVIARACVSV

SEQ ID NO: 65373 - protein, 290 aa, Triticum aestivum
  peptide (1)..(290): Ceres Seq. ID no. 13589063
  misc_feature (99)..(237): Homolog of NCBI NO: 15229793 NR Description: hypothetical protein [Arabidopsis thaliana]
  misc_feature (92)..(188): Homolog of NCBI NO: 22326936 NR Description: expressed protein [Arabidopsis thaliana]
  misc_feature (101)..(282): Homolog of NCBI NO: 9294810 NR Description: MTD1 [Medicago truncatula]
  misc_feature (40)..(205): Homolog of NCBI NO: 18400574 NR Description: expressed protein [Arabidopsis thaliana]
  misc_feature (44)..(237): Homolog of NCBI NO: 25412223 NR Description: hypothetical protein At2g24550 [imported] -
  misc_feature (98)..(235): Homolog of NCBI NO: 15235970 NR Description: expressed protein [Arabidopsis thaliana]
  misc_feature (69)..(280): Homolog of NCBI NO: 28393161 NR Description: unknown protein [Arabidopsis thaliana]
  misc_feature (40)..(237): Homolog of NCBI NO: 15724184 NR Description: At2g24550/F25P17.15 [Arabidopsis thaliana]
  misc_feature (69)..(280): Homolog of NCBI NO: 15238642 NR Description: expressed protein [Arabidopsis thaliana]
  misc_feature (40)..(289): Homolog of NCBI NO: 34905120 NR Description: P0686C03.43 [Oryza sativa (japonica
SKSCSYLIPFLPLSSPSLSLLHKLLLSWCCPCSWTDTSYMSTAVARPYGGGFPGSGRAKGDELLGKKMSDGFFIEEEEEEEEEEAEEVLTESSSIGAPSPSSSSIGEDSSSEVGGDGEDEEVESKLKEEPGLGCLDALEDSLPIKNGLSSFYAGKSKSFTSLAEAAARDAVKELAKPENPFNKRRRILATWSRRASCSSLATATYLPPLLAPDHALPEGEEGEEDDDSDSGSDEQHRGKNGWEAPALPPPRLSVNTQMGAAAARKGGSFRSPRSYSLSDLRNGGDARYNQ

SEQ ID NO: 65374 - protein, 251 aa, Triticum aestivum
  peptide (1)..(251): Ceres Seq. ID no. 13589064
  misc_feature (60)..(198): Homolog of NCBI NO: 15229793 NR Description: hypothetical protein [Arabidopsis thaliana]
  misc_feature (53)..(149): Homolog of NCBI NO: 22326936 NR Description: expressed protein [Arabidopsis thaliana]
  misc_feature (62)..(243): Homolog of NCBI NO: 9294810 NR Description: MTD1 [Medicago truncatula]
  misc_feature (1)..(166): Homolog of NCBI NO: 18400574 NR Description: expressed protein [Arabidopsis thaliana]
  misc_feature (5)..(198): Homolog of NCBI NO: 25412223 NR Description: hypothetical protein At2g24550 [imported] -
  misc_feature (59)..(196): Homolog of NCBI NO: 15235970 NR Description: expressed protein [Arabidopsis thaliana]
  misc_feature (30)..(241): Homolog of NCBI NO: 28393161 NR Description: unknown protein [Arabidopsis thaliana]
  misc_feature (1)..(198): Homolog of NCBI NO: 15724184 NR Description: At2g24550/F25P17.15 [Arabidopsis thaliana]
  misc_feature (30)..(241): Homolog of NCBI NO: 15238642 NR Description: expressed protein [Arabidopsis thaliana]
  misc_feature (1)..(250): Homolog of NCBI NO: 34905120 NR Description: P0686C03.43 [Oryza sativa (japonica
MSTAVARPYGGGFPGSGRAKGDELLGKKMSDGFFIEEEEEEEEEEAEEVLTESSSIGAPSPSSSSIGEDSSSEVGGDGEDEEVESKLKEEPGLGCLDALEDSLPIKNGLSSFYAGKSKSFTSLAEAAARDAVKELAKPENPFNKRRRILATWSRRASCSSLATATYLPPLLAPDHALPEGEEGEEDDDSDSGSDEQHRGKNGWEAPALPPPRLSVNTQMGAAAARKGGSFRSPRSYSLSDLRNGGDARYNQ

SEQ ID NO: 65375 - DNA, 2073 bp, Triticum aestivum
  misc_feature (1)..(2073): Ceres Seq. ID no. 13597678
gannntgatctccatccacactccaaaacagagcaggcaccacaccacagtcgagagcagaggaggcaccattctccggcacagcagagcaggcacacaccgctcgtcgtcggccggatggacggtgccgcagccgcctggacgccccggaagcaggtggtgctgtacccttcgcccggcatgggccacctggtgtccatgatcgagctcggcaaggtcctcgcggctcgtggcctcgccatcaccatcgtcatcgtgagcctgccgttcgtggacaccggggccagggggccgttcctggccggcgtcaccgcggccaacccctccatctccttccactgcctcccgcaggtcgacgtcccgccgctcgactccgaccaccccgaggcggtcacctacgaggtcgccggcctctccatcccacacctccgcggcttcctcgccagggcctcaccgaccgtcctcgtcgtcgactttttttgcagcatcgcgctcgacgtggccgcggagctcggcgtccccgggtactgtttcttcacgtctcccgcggaggtcctggctttttccctgtatttgccggtcctgcatgctaggagcgcggccagctttkgggagatgggggaggagctcgtgcacgtgccggggatccccgcgctgscggcgacgcacttccccaagccgctcatggaccgtgacgacccggcatacatatggtcgctgagagtgtcccccgacctctgccgctcccagggaatcatcgtcaacaccttccgctcgctcgagccacgcgcggtggacaccatcgccgccgggctctgcacgcctcccggcctcccgacgccgccggtctactgcatcgggccgctgataaagtcggaggaggtgggcgtgaagcgcggccacgagtgcctggcgtggctggacacgcagccgacggccagcgtggtgttcctctgcttcggcagcctcggcgtgttcaacgcagagcagatcaggcaggtggccatcggcctggaggccagcggcaagaggttcctgtgggtcgtgcggagcccgccgagcgacgacccgacaaagaagttcgaggagccgccggagccggacctcgatgctctcctcccggagggcttcctggaccggaccaagggcacgggtctcgtcgtcaagtcatgggcgccgcagcggsacgtgctggtgcatggcgcggtgggcggtttcgtgacgcactgcgggtggaactccgtgctcgaggtgatcatggccggcgtgcccatgctggcctggccgctgtaggcggagcagcggatgaacagagtgttcctggaaaaggagctgggtctggctgtggcggtggatgaatatgacaaggaggtggtggacgccgacgaagtggcggcaaaggtgaggtggctgatggactccgacggcggcagggtgctccgggagtggacgcaggcggctatgcgacgggccaagcaggcgctgggcgagggtggggagtcgaatttgacgttgacgcgactggtccagggctggatgcttgacgtgggcaatgacgtgagttcggctgagaaaagatagtgcaactcatggtcacgggagaaaagcaattctcccattcatggctcaaccgttgaatttagatggagatnnngatgcatgcacacctcttctaattgtatttcacccattaatgaacccacactctcccatgcagcacactacacccatgctttttcatgtgatttcaaagtttgaaataattttatcktttaaacwcaatraasykggaamwrraggggggaaagraaaaaaaaaaaaaaaaaaaaaaaaaaaaaaaaaaaaaaaaaaaaaaaaaarraaaaaaaaaaaaaaaaaaaaaargaaaaaaaaaaaaaaaaaggtttaycgatcccsccaaccccaagggggggcccggaacccaattccccccaaaagggagccraawaacscscscccmmgggccgccgtttaaaaacgscggracgggaaaamcccgggggtamcccaaytaaaycgcctggaaraaaaccccccttyccccagtggggg

SEQ ID NO: 65376 - protein, 430 aa, Triticum aestivum
  peptide (1)..(430): Ceres Seq. ID no. 15222165
  misc_feature (53)..(430): Pfam Name: UDP-glucoronosyl and UDP-glucosyl transferase Pfam Description: UDP-glucoronosyl and UDP-glucosyl transferase
  misc_feature (52)..(430): Homolog of NCBI NO: 11994646 NR Description: UTP-glucose glucosyltransferase [Arabidopsis
  misc_feature (53)..(430): Homolog of NCBI NO: 18401155 NR Description: glycosyltransferase family [Arabidopsis thaliana]
  misc_feature (53)..(430): Homolog of NCBI NO: 21593785 NR Description: putative glucosyltransferase [Arabidopsis
  misc_feature (53)..(430): Homolog of NCBI NO: 18401158 NR Description: glycosyltransferase family [Arabidopsis thaliana]
  misc_feature (50)..(430): Homolog of NCBI NO: 34910206 NR Description: putative flavonol glucosyltransferase
  misc_feature (50)..(430): Homolog of NCBI NO: 34910218 NR Description: putative flavonol glucosyltransferase
  misc_feature (51)..(430): Homolog of NCBI NO: 34910204 NR Description: putative flavonol glucosyltransferase
  misc_feature (49)..(430): Homolog of NCBI NO: 34910228 NR Description: putative flavonol glucosyltransferase
  misc_feature (48)..(430): Homolog of NCBI NO: 34910208 NR Description: putative flavonol glucosyltransferase
  misc_feature (40)..(430): Homolog of NCBI NO: 22535568 NR Description: putative glucosyltransferase
  misc_feature (1)..(1): Xaa is any aa, unknown or other
  misc_feature (2)..(2): Xaa is any aa, unknown or other
  misc_feature (204)..(204): Xaa is any aa, unknown or other
  misc_feature (220)..(220): Xaa is any aa, unknown or other
  misc_feature (396)..(396): Xaa is any aa, unknown or other
XXDLHPHSKTEQAPHHSREQRRHHSPAQQSRHTPLVVGRMDGAAAAWTPRKQVVLYPSPGMGHLVSMIELGKVLAARGLAITIVIVSLPFVDTGARGPFLAGVTAANPSISFHCLPQVDVPPLDSDHPEAVTYEVAGLSIPHLRGFLARASPTVLVVDFFCSIALDVAAELGVPGYCFFTSPAEVLAFSLYLPVLHARSAASFXEMGEELVHVPGIPALXATHFPKPLMDRDDPAYIWSLRVSPDLCRSQGIIVNTFRSLEPRAVDTIAAGLCTPPGLPTPPVYCIGPLIKSEEVGVKRGHECLAWLDTQPTASVVFLCFGSLGVFNAEQIRQVAIGLEASGKRFLWVVRSPPSDDPTKKFEEPPEPDLDALLPEGFLDRTKGTGLVVKSWAPQRXVLVHGAVGGFVTHCGWNSVLEVIMAGVPMLAWPL

SEQ ID NO: 65377 - protein, 391 aa, Triticum aestivum
  peptide (1)..(391): Ceres Seq. ID no. 15222166
  misc_feature (14)..(391): Pfam Name: UDP-glucoronosyl and UDP-glucosyl transferase Pfam Description: UDP-glucoronosyl and UDP-glucosyl transferase
  misc_feature (13)..(391): Homolog of NCBI NO: 11994646 NR Description: UTP-glucose glucosyltransferase [Arabidopsis
  misc_feature (14)..(391): Homolog of NCBI NO: 18401155 NR Description: glycosyltransferase family [Arabidopsis thaliana]
  misc_feature (14)..(391): Homolog of NCBI NO: 21593785 NR Description: putative glucosyltransferase [Arabidopsis
  misc_feature (14)..(391): Homolog of NCBI NO: 18401158 NR Description: glycosyltransferase family [Arabidopsis thaliana]
  misc_feature (11)..(391): Homolog of NCBI NO: 34910206 NR Description: putative flavonol glucosyltransferase
  misc_feature (11)..(391): Homolog of NCBI NO: 34910218 NR Description: putative flavonol glucosyltransferase
  misc_feature (12)..(391): Homolog of NCBI NO: 34910204 NR Description: putative flavonol glucosyltransferase
  misc_feature (10)..(391): Homolog of NCBI NO: 34910228 NR Description: putative flavonol glucosyltransferase
  misc_feature (9)..(391): Homolog of NCBI NO: 34910208 NR Description: putative flavonol glucosyltransferase
  misc_feature (1)..(391): Homolog of NCBI NO: 22535568 NR Description: putative glucosyltransferase
  misc_feature (165)..(165): Xaa is any aa, unknown or other
  misc_feature (181)..(181): Xaa is any aa, unknown or other
  misc_feature (357)..(357): Xaa is any aa, unknown or other
MDGAAAAWTPRKQVVLYPSPGMGHLVSMIELGKVLAARGLAITIVIVSLPFVDTGARGPFLAGVTAANPSISFHCLPQVDVPPLDSDHPEAVTYEVAGLSIPHLRGFLARASPTVLVVDFFCSIALDVAAELGVPGYCFFTSPAEVLAFSLYLPVLHARSAASFXEMGEELVHVPGIPALXATHFPKPLMDRDDPAYIWSLRVSPDLCRSQGIIVNTFRSLEPRAVDTIAAGLCTPPGLPTPPVYCIGPLIKSEEVGVKRGHECLAWLDTQPTASVVFLCFGSLGVFNAEQIRQVAIGLEASGKRFLWVVRSPPSDDPTKKFEEPPEPDLDALLPEGFLDRTKGTGLVVKSWAPQRXVLVHGAVGGFVTHCGWNSVLEVIMAGVPMLAWPL

SEQ ID NO: 65378 - protein, 370 aa, Triticum aestivum
  peptide (1)..(370): Ceres Seq. ID no. 15222167
  misc_feature (1)..(370): Pfam Name: UDP-glucoronosyl and UDP-glucosyl transferase Pfam Description: UDP-glucoronosyl and UDP-glucosyl transferase
  misc_feature (1)..(370): Homolog of NCBI NO: 11994646 NR Description: UTP-glucose glucosyltransferase [Arabidopsis
  misc_feature (1)..(370): Homolog of NCBI NO: 18401155 NR Description: glycosyltransferase family [Arabidopsis thaliana]
  misc_feature (1)..(370): Homolog of NCBI NO: 21593785 NR Description: putative glucosyltransferase [Arabidopsis
  misc_feature (1)..(370): Homolog of NCBI NO: 18401158 NR Description: glycosyltransferase family [Arabidopsis thaliana]
  misc_feature (1)..(370): Homolog of NCBI NO: 34910206 NR Description: putative flavonol glucosyltransferase
  misc_feature (1)..(370): Homolog of NCBI NO: 34910218 NR Description: putative flavonol glucosyltransferase
  misc_feature (1)..(370): Homolog of NCBI NO: 34910204 NR Description: putative flavonol glucosyltransferase
  misc_feature (1)..(370): Homolog of NCBI NO: 34910228 NR Description: putative flavonol glucosyltransferase
  misc_feature (1)..(370): Homolog of NCBI NO: 34910208 NR Description: putative flavonol glucosyltransferase
  misc_feature (1)..(370): Homolog of NCBI NO: 22535568 NR Description: putative glucosyltransferase
  misc_feature (144)..(144): Xaa is any aa, unknown or other
  misc_feature (160)..(160): Xaa is any aa, unknown or other
  misc_feature (336)..(336): Xaa is any aa, unknown or other
MGHLVSMIELGKVLAARGLAITIVIVSLPFVDTGARGPFLAGVTAANPSISFHCLPQVDVPPLDSDHPEAVTYEVAGLSIPHLRGFLARASPTVLVVDFFCSIALDVAAELGVPGYCFFTSPAEVLAFSLYLPVLHARSAASFXEMGEELVHVPGIPALXATHFPKPLMDRDDPAYIWSLRVSPDLCRSQGIIVNTFRSLEPRAVDTIAAGLCTPPGLPTPPVYCIGPLIKSEEVGVKRGHECLAWLDTQPTASVVFLCFGSLGVFNAEQIRQVAIGLEASGKRFLWVVRSPPSDDPTKKFEEPPEPDLDALLPEGFLDRTKGTGLVVKSWAPQRXVLVHGAVGGFVTHCGWNSVLEVIMAGVPMLAWPL

SEQ ID NO: 65379 - DNA, 1477 bp, Triticum aestivum
  misc_feature (1)..(1477): Ceres Seq. ID no. 14302844
acactccaactcagtggcaacagcatctcccctgttccgcccgcccgctcgcctctgtttcttttctttctttccacagcggctctgctccgctcctcacctccctcgatcgcacataccatatttggtagctcagcacagccatggtggttcttgccagcacgcccgccgtcgatcacatcccgctcctcaggtcccccgaccccggggactacttctccggcatgccggttgtcgacctctccagccctggcgcgccgcgggccatcgccgacgcctgcgagcgcttcgggttcttcaagctcgtcaaccacggggtgccagcggacacgatggacaggctcgagtcagaggccgtcaggttcttctcgctgccgcaggccgacaaggaccgctccggcccggcctacccgttcggctacggcagcaagcgcatcgggctcaatggcgacatgggctggctcgagtacctcctcctcgccgtcgagtccgcgtcgctctccggcgcctgcaccgtcccgtcctgcgcgctcttccgggcggcgctgaacgagtacatcgcggcggtgcggaaggtggcggtgcgggtgatggaggcgatggcggaggggctgggcattgcgcccgttgacgcgctgagcgcgatggtgacggcgggggggagcgaccaggtgttccgggtgaaccactacccgccgtgccacgcgctgcaagggctgggctgcagcgccacaggcttcggcgagcacaccgacccgcagctcatctccgtgctgcgctccaacggcacgtccggcctgcagatcgcgctccagaacgggcagtgggtgtccgtgccctcggaccgcgacgccttcttcgtcaacgtcggcgactcgttgcaggtgctgaccaacgggaggttcaagagcgtgaagcacagggtggtggccaacagcctaaagtctagggtttccatgatctactttggagggccagcgatgacacagaggattgcaccattgccgcagctgctgggcgcgggagagcagagcctgtacaaggacttcacatggggcgagtacaagaaggctgcctacaactcgaggctcggggacaacaggctggctcagttccacaggtagcctcgcctgccgcctgggcctgctcaaggagcagcttttaccaagccagctagctctagcttagctagctctgccgtggcttgtatttcccacacgatcgatgaagatcaagagggggggaagctactactagaaaagaaaaagaaacagggctaaaagaagatgatttcaagattcacatgcagtagtagagctgcggaggtagctagatcctttttgcgtgtgcgcgtgcgtgtgtgttcatagttgctaaaactcgcctttcctattcgggaatgccggacgaacgatgaacagataagttaacttgatgaatagttagtgtgaaccagatacagcagaggattggcatc

SEQ ID NO: 65380 - protein, 326 aa, Triticum aestivum
  peptide (1)..(326): Ceres Seq. ID no. 14302845
  misc_feature (174)..(278): Pfam Name: 2OG-Fe(II) oxygenase superfamily Pfam Description: 2OG-Fe(II) oxygenase superfamily
  misc_feature (26)..(326): Homolog of NCBI NO: 1666096 NR Description: dioxygenase [Marah macrocarpus]
  misc_feature (1)..(326): Homolog of NCBI NO: 4678586 NR Description: GA 2-oxidase [Phaseolus coccineus]
  misc_feature (1)..(326): Homolog of NCBI NO: 34909676 NR Description: putative GA 2-oxidase [Oryza sativa (japonica
MVVLASTPAVDHIPLLRSPDPGDYFSGMPVVDLSSPGAPRAIADACERFGFFKLVNHGVPADTMDRLESEAVRFFSLPQADKDRSGPAYPFGYGSKRIGLNGDMGWLEYLLLAVESASLSGACTVPSCALFRAALNEYIAAVRKVAVRVMEAMAEGLGIAPVDALSAMVTAGGSDQVFRVNHYPPCHALQGLGCSATGFGEHTDPQLISVLRSNGTSGLQIALQNGQWVSVPSDRDAFFVNVGDSLQVLTNGRFKSVKHRVVANSLKSRVSMIYFGGPAMTQRIAPLPQLLGAGEQSLYKDFTWGEYKKAAYNSRLGDNRLAQFHR

SEQ ID NO: 65381 - protein, 299 aa, Triticum aestivum
  peptide (1)..(299): Ceres Seq. ID no. 14302846
  misc_feature (147)..(251): Pfam Name: 2OG-Fe(II) oxygenase superfamily Pfam Description: 2OG-Fe(II) oxygenase superfamily
  misc_feature (1)..(299): Homolog of NCBI NO: 1666096 NR Description: dioxygenase [Marah macrocarpus]
  misc_feature (1)..(299): Homolog of NCBI NO: 4678586 NR Description: GA 2-oxidase [Phaseolus coccineus]
  misc_feature (1)..(299): Homolog of NCBI NO: 34909676 NR Description: putative GA 2-oxidase [Oryza sativa (japonica
MPVVDLSSPGAPRAIADACERFGFFKLVNHGVPADTMDRLESEAVRFFSLPQADKDRSGPAYPFGYGSKRIGLNGDMGWLEYLLLAVESASLSGACTVPSCALFRAALNEYIAAVRKVAVRVMEAMAEGLGIAPVDALSAMVTAGGSDQVFRVNHYPPCHALQGLGCSATGFGEHTDPQLISVLRSNGTSGLQIALQNGQWVSVPSDRDAFFVNVGDSLQVLTNGRFKSVKHRVVANSLKSRVSMIYFGGPAMTQRIAPLPQLLGAGEQSLYKDFTWGEYKKAAYNSRLGDNRLAQFHR

SEQ ID NO: 65382 - protein, 263 aa, Triticum aestivum
  peptide (1)..(263): Ceres Seq. ID no. 14302847
  misc_feature (111)..(215): Pfam Name: 2OG-Fe(II) oxygenase superfamily Pfam Description: 2OG-Fe(II) oxygenase superfamily
  misc_feature (1)..(263): Homolog of NCBI NO: 1666096 NR Description: dioxygenase [Marah macrocarpus]
  misc_feature (1)..(263): Homolog of NCBI NO: 4678586 NR Description: GA 2-oxidase [Phaseolus coccineus]
  misc_feature (1)..(263): Homolog of NCBI NO: 34909676 NR Description: putative GA 2-oxidase [Oryza sativa (japonica
MDRLESEAVRFFSLPQADKDRSGPAYPFGYGSKRIGLNGDMGWLEYLLLAVESASLSGACTVPSCALFRAALNEYIAAVRKVAVRVMEAMAEGLGIAPVDALSAMVTAGGSDQVFRVNHYPPCHALQGLGCSATGFGEHTDPQLISVLRSNGTSGLQIALQNGQWVSVPSDRDAFFVNVGDSLQVLTNGRFKSVKHRVVANSLKSRVSMIYFGGPAMTQRIAPLPQLLGAGEQSLYKDFTWGEYKKAAYNSRLGDNRLAQFHR

SEQ ID NO: 65383 - DNA, 961 bp, Triticum aestivum
  misc_feature (1)..(961): Ceres Seq. ID no. 13597620
ccacgcagcacctcctctcctcgccccccgagatcggaatcggcgcccccctccctccgccgccgccgccgccgccgccatgtcgccgtctctgctcggggggctcaccaagtcgctggccatgaccgtgctctccgaggtcggcgacaagaccttcttcgccgccgcgattctggccatgcgccatccccggaagctcgtccttgctggctgtctatcggcgttaacagtgatgaccgctttatctgcttctctcggctgggctgcaccaaatctgatatcacgtaaatggactcatcatatcaccactctgctgttctttgtgtttggcatctggtcattgtgggaaggcttcaaagaagaaggagagtcagaagatctggctgaattggaagcaaagctggatgcggactttaagactaacaaaggggaatcgaaaaataaatcaaaggcaactgaagatacaaagaaaaagcaaaggccatttctcatgcagttcttctcgccaatttttataaaggcattttccatcactttctttggtgagtggggtgacaagagccagattgctacaattggcttggctgctgatgaaaacccattcggtgtcgtcatcgggggagtcatagctcaagcactctgcactaccgctgccgtgatgggagggaagagcctggcctctcagatatccgagaagatggttgaattgtcgagcggggtgctattcctgttgtttggcataatgtccttgttgtcagggccagaagggcaattgtaatttccccaggaacttcggcaggactctgccagactcctggagtagttaccaagcttaccttatttgatgggtgatggcgacgaaagccggccgtccttcaccaactggatggcgattcattagtttagtcaacacatcattgtaacacttggcttgccactcataaataacttgatgttactg

SEQ ID NO: 65384 - protein, 258 aa, Triticum aestivum
  peptide (1)..(258): Ceres Seq. ID no. 13597621
  misc_feature (36)..(110): Pfam Name: Uncharacterized protein family UPF0016 Pfam Description: Uncharacterized protein family UPF0016
  misc_feature (30)..(250): Homolog of NCBI NO: 17556152 NR Description: Uncharacterized protein family UPF0016 (32.1 kD)
  misc_feature (18)..(255): Homolog of NCBI NO: 21357589 NR Description: CG4196-PC [Drosophila melanogaster]
  misc_feature (38)..(255): Homolog of NCBI NO: 20385488 NR Description: transmembrane protein HTP-1 [Danio rerio]
  misc_feature (26)..(254): Homolog of NCBI NO: 18421551 NR Description: transmembrane protein FT27/PFT27-related
  misc_feature (28)..(250): Homolog of NCBI NO: 15420543 NR Description: putative membrane protein [Crithidia fasciculata]
  misc_feature (23)..(255): Homolog of NCBI NO: 7684611 NR Description: TPARDL [Mus musculus]
  misc_feature (23)..(255): Homolog of NCBI NO: 6755853 NR Description: TPA regulated locus [Mus musculus]
  misc_feature (30)..(255): Homolog of NCBI NO: 21593636 NR Description: transmembrane protein, putative [Arabidopsis
  misc_feature (30)..(255): Homolog of NCBI NO: 15222613 NR Description: transmembrane protein -related [Arabidopsis
  misc_feature (30)..(252): Homolog of NCBI NO: 15221462 NR Description: transmembrane protein -related [Arabidopsis
HAAPPLLAPRDRNRRPPPSAAAAAAAMSPSLLGGLTKSLAMTVLSEVGDKTFFAAAILAMRHPRKLVLAGCLSALTVMTALSASLGWAAPNLISRKWTHHITTLLFFVFGIWSLWEGFKEEGESEDLAELEAKLDADFKTNKGESKNKSKATEDTKKKQRPFLMQFFSPIFIKAFSITFFGEWGDKSQIATIGLAADENPFGVVIGGVIAQALCTTAAVMGGKSLASQISEKMVELSSGVLFLLFGIMSLLSGPEGQL

SEQ ID NO: 65385 - protein, 232 aa, Triticum aestivum
  peptide (1)..(232): Ceres Seq. ID no. 13597622
  misc_feature (10)..(84): Pfam Name: Uncharacterized protein family UPF0016 Pfam Description: Uncharacterized protein family UPF0016
  misc_feature (4)..(224): Homolog of NCBI NO: 17556152 NR Description: Uncharacterized protein family UPF0016 (32.1 kD)
  misc_feature (1)..(229): Homolog of NCBI NO: 21357589 NR Description: CG4196-PC [Drosophila melanogaster]
  misc_feature (12)..(229): Homolog of NCBI NO: 20385488 NR Description: transmembrane protein HTP-1 [Danio rerio]
  misc_feature (1)..(228): Homolog of NCBI NO: 18421551 NR Description: transmembrane protein FT27/PFT27-related
  misc_feature (2)..(224): Homolog of NCBI NO: 15420543 NR Description: putative membrane protein [Crithidia fasciculata]
  misc_feature (1)..(229): Homolog of NCBI NO: 7684611 NR Description: TPARDL [Mus musculus]
  misc_feature (1)..(229): Homolog of NCBI NO: 6755853 NR Description: TPA regulated locus [Mus musculus]
  misc_feature (4)..(229): Homolog of NCBI NO: 21593636 NR Description: transmembrane protein, putative [Arabidopsis
  misc_feature (4)..(229): Homolog of NCBI NO: 15222613 NR Description: transmembrane protein -related [Arabidopsis
  misc_feature (4)..(226): Homolog of NCBI NO: 15221462 NR Description: transmembrane protein -related [Arabidopsis
MSPSLLGGLTKSLAMTVLSEVGDKTFFAAAILAMRHPRKLVLAGCLSALTVMTALSASLGWAAPNLISRKWTHHITTLLFFVFGIWSLWEGFKEEGESEDLAELEAKLDADFKTNKGESKNKSKATEDTKKKQRPFLMQFFSPIFIKAFSITFFGEWGDKSQIATIGLAADENPFGVVIGGVIAQALCTTAAVMGGKSLASQISEKMVELSSGVLFLLFGIMSLLSGPEGQL

SEQ ID NO: 65386 - protein, 218 aa, Triticum aestivum
  peptide (1)..(218): Ceres Seq. ID no. 13597623
  misc_feature (1)..(70): Pfam Name: Uncharacterized protein family UPF0016 Pfam Description: Uncharacterized protein family UPF0016
  misc_feature (1)..(210): Homolog of NCBI NO: 17556152 NR Description: Uncharacterized protein family UPF0016 (32.1 kD)
  misc_feature (1)..(215): Homolog of NCBI NO: 21357589 NR Description: CG4196-PC [Drosophila melanogaster]
  misc_feature (1)..(215): Homolog of NCBI NO: 20385488 NR Description: transmembrane protein HTP-1 [Danio rerio]
  misc_feature (1)..(214): Homolog of NCBI NO: 18421551 NR Description: transmembrane protein FT27/PFT27-related
  misc_feature (1)..(210): Homolog of NCBI NO: 15420543 NR Description: putative membrane protein [Crithidia fasciculata]
  misc_feature (1)..(215): Homolog of NCBI NO: 7684611 NR Description: TPARDL [Mus musculus]
  misc_feature (1)..(215): Homolog of NCBI NO: 6755853 NR Description: TPA regulated locus [Mus musculus]
  misc_feature (1)..(215): Homolog of NCBI NO: 21593636 NR Description: transmembrane protein, putative [Arabidopsis
  misc_feature (1)..(215): Homolog of NCBI NO: 15222613 NR Description: transmembrane protein -related [Arabidopsis
  misc_feature (1)..(212): Homolog of NCBI NO: 15221462 NR Description: transmembrane protein -related [Arabidopsis
MTVLSEVGDKTFFAAAILAMRHPRKLVLAGCLSALTVMTALSASLGWAAPNLISRKWTHHITTLLFFVFGIWSLWEGFKEEGESEDLAELEAKLDADFKTNKGESKNKSKATEDTKKKQRPFLMQFFSPIFIKAFSITFFGEWGDKSQIATIGLAADENPFGVVIGGVIAQALCTTAAVMGGKSLASQISEKMVELSSGVLFLLFGIMSLLSGPEGQL

SEQ ID NO: 65387 - DNA, 1133 bp, Triticum aestivum
  misc_feature (1)..(1133): Ceres Seq. ID no. 12618069
agatcacgcgccgctcctcccggtcgccctagcgccgccaccgaacgatcccccgaccccccagaccacgagaccacccgcggcggttggccggcgcagggatgggcgacgaggcgaagtacctggagactgcgcgggcggaccgctccgtgtggctcatgaagtgcccccccgtcgtctcccaggcctggcagggcgcctcctcctcctccggcgatgctaaccctaacccggtcgtcgccaaggtcgtgctgtccctcgaccccctcagctccgccgagccctccctccagttcaagatggagatgtctcaaactagtgtagccagcacttgcaatctaccaaagagttactccttgaatatgttcaaggattttgtacccatgtgtgttttctctgagactaatcagggaaaactctcatgtgaaggaaaagtcgagcataaattcgacatggaacctcacaaggataacttattaaactacgcgaagttatgccgtgaaagaacacaaaagtcgatggttaaaactagaaaagtgcaggtacttgataatgaccatggaatgagcatgagacccatgcctggcatggttggtctgatatcttctagttccaaggagaagaggaagccaacgccaaccaaaccatccgatgtcaaaaggacacgtagggaccgtcgggaactggaaaacattatcttcaagcttttcgaaaagcagcctaactgggcactgaaggctctagtgcaagagactgaccagccagagcaattcctcaaggagatattgaacgacctctgtatgtacaacaaacgaggtccgaaccagggcacgcacgagctcaagcccgagtacaagaagtcgtcggaggacgccgccggtgctgctccgtgaagacgatttgcgtatccgactgctgttgtataaccgagtacctgttggctttgatgtgcggaacgatgagttgtctatctgaagcctccgatcatgcctgggctgcatttgtttgctttttattaagaaggcactgttgtaactgtatgggtataagatgatacatatactgatatacaacacatgtcacagaagggaacgaatctactgataaaccacatgaaaagatcgtttgatttc

SEQ ID NO: 65388 - protein, 263 aa, Triticum aestivum
  peptide (1)..(263): Ceres Seq. ID no. 12618070
  misc_feature (8)..(260): Pfam Name: Transcription initiation factor IIF, beta subunit Pfam Description: Transcription initiation factor IIF, beta
  misc_feature (8)..(257): Homolog of NCBI NO: 38174399 NR Description: Unknown (protein for MGC:75790) [Silurana
  misc_feature (8)..(252): Homolog of NCBI NO: 4758488 NR Description: general transcription factor IIF, polypeptide 2
  misc_feature (8)..(252): Homolog of NCBI NO: 39930425 NR Description: general transcription factor IIF, polypeptide 2
  misc_feature (6)..(252): Homolog of NCBI NO: 24645751 NR Description: Transcription factor TFIIFbeta CG6538-PA
  misc_feature (6)..(252): Homolog of NCBI NO: 450771 NR Description: dTFIIF30
  misc_feature (3)..(259): Homolog of NCBI NO: 19111874 NR Description: transcription initiation factor iif, beta subunit
  misc_feature (38)..(257): Homolog of NCBI NO: 11285686 NR Description: hypothetical protein T25B15.40 - Arabidopsis
  misc_feature (62)..(257): Homolog of NCBI NO: 15231173 NR Description: transcription initiation factor IIF, beta
  misc_feature (8)..(260): Homolog of NCBI NO: 15222264 NR Description: transcription initiation factor, putative
  misc_feature (1)..(262): Homolog of NCBI NO: 34909946 NR Description: putative transcription initiation factor
MGDEAKYLETARADRSVWLMKCPPVVSQAWQGASSSSGDANPNPVVAKVVLSLDPLSSAEPSLQFKMEMSQTSVASTCNLPKSYSLNMFKDFVPMCVFSETNQGKLSCEGKVEHKFDMEPHKDNLLNYAKLCRERTQKSMVKTRKVQVLDNDHGMSMRPMPGMVGLISSSSKEKRKPTPTKPSDVKRTRRDRRELENIIFKLFEKQPNWALKALVQETDQPEQFLKEILNDLCMYNKRGPNQGTHELKPEYKKSSEDAAGAAP

SEQ ID NO: 65389 - protein, 244 aa, Triticum aestivum
  peptide (1)..(244): Ceres Seq. ID no. 12618071
  misc_feature (1)..(241): Pfam Name: Transcription initiation factor IIF, beta subunit Pfam Description: Transcription initiation factor IIF, beta
  misc_feature (1)..(238): Homolog of NCBI NO: 38174399 NR Description: Unknown (protein for MGC:75790) [Silurana
  misc_feature (1)..(233): Homolog of NCBI NO: 4758488 NR Description: general transcription factor IIF, polypeptide 2
  misc_feature (1)..(233): Homolog of NCBI NO: 39930425 NR Description: general transcription factor IIF, polypeptide 2
  misc_feature (1)..(233): Homolog of NCBI NO: 24645751 NR Description: Transcription factor TFIIFbeta CG6538-PA
  misc_feature (1)..(233): Homolog of NCBI NO: 450771 NR Description: dTFIIF30
  misc_feature (1)..(240): Homolog of NCBI NO: 19111874 NR Description: transcription initiation factor iif, beta subunit
  misc_feature (19)..(238): Homolog of NCBI NO: 11285686 NR Description: hypothetical protein T25B15.40 - Arabidopsis
  misc_feature (43)..(238): Homolog of NCBI NO: 15231173 NR Description: transcription initiation factor IIF, beta
  misc_feature (1)..(241): Homolog of NCBI NO: 15222264 NR Description: transcription initiation factor, putative
  misc_feature (1)..(243): Homolog of NCBI NO: 34909946 NR Description: putative transcription initiation factor
MKCPPVVSQAWQGASSSSGDANPNPVVAKVVLSLDPLSSAEPSLQFKMEMSQTSVASTCNLPKSYSLNMFKDFVPMCVFSETNQGKLSCEGKVEHKFDMEPHKDNLLNYAKLCRERTQKSMVKTRKVQVLDNDHGMSMRPMPGMVGLISSSSKEKRKPTPTKPSDVKRTRRDRRELENIIFKLFEKQPNWALKALVQETDQPEQFLKEILNDLCMYNKRGPNQGTHELKPEYKKSSEDAAGAAP

SEQ ID NO: 65390 - protein, 197 aa, Triticum aestivum
  peptide (1)..(197): Ceres Seq. ID no. 12618072
  misc_feature (1)..(194): Pfam Name: Transcription initiation factor IIF, beta subunit Pfam Description: Transcription initiation factor IIF, beta
  misc_feature (1)..(191): Homolog of NCBI NO: 38174399 NR Description: Unknown (protein for MGC:75790) [Silurana
  misc_feature (1)..(186): Homolog of NCBI NO: 4758488 NR Description: general transcription factor IIF, polypeptide 2
  misc_feature (1)..(186): Homolog of NCBI NO: 39930425 NR Description: general transcription factor IIF, polypeptide 2
  misc_feature (1)..(186): Homolog of NCBI NO: 24645751 NR Description: Transcription factor TFIIFbeta CG6538-PA
  misc_feature (1)..(186): Homolog of NCBI NO: 450771 NR Description: dTFIIF30
  misc_feature (1)..(193): Homolog of NCBI NO: 19111874 NR Description: transcription initiation factor iif, beta subunit
  misc_feature (1)..(191): Homolog of NCBI NO: 11285686 NR Description: hypothetical protein T25B15.40 - Arabidopsis
  misc_feature (1)..(191): Homolog of NCBI NO: 15231173 NR Description: transcription initiation factor IIF, beta
  misc_feature (1)..(194): Homolog of NCBI NO: 15222264 NR Description: transcription initiation factor, putative
  misc_feature (1)..(196): Homolog of NCBI NO: 34909946 NR Description: putative transcription initiation factor
MEMSQTSVASTCNLPKSYSLNMFKDFVPMCVFSETNQGKLSCEGKVEHKFDMEPHKDNLLNYAKLCRERTQKSMVKTRKVQVLDNDHGMSMRPMPGMVGLISSSSKEKRKPTPTKPSDVKRTRRDRRELENIIFKLFEKQPNWALKALVQETDQPEQFLKEILNDLCMYNKRGPNQGTHELKPEYKKSSEDAAGAAP

SEQ ID NO: 65391 - DNA, 1004 bp, Triticum aestivum
  misc_feature (1)..(1004): Ceres Seq. ID no. 13598617
ctgtttttccccgtcgtcaacaatatcttctatcccgaaaatcaagctggttttccccttctctcgccaccccttcttctccaccgtccctcccctggagcgagcgagccctcgtctcactccccgcgatggcttcctccactgctctctccccggtggccttcaagtcctccttctcgccgctcccctccagaccagctcgtactaggataaatgtacaaggcgcattctgtttgccatgttccacttggaaaagagctaataatagatcgttccgggtatacagtttatttggaggaaagaaggagaaagatgagaatggtgacgaggcaccatcaaagggaggaatctttggaaacattggaaatatgcaaaacctttatgaaactgtgaagaaggcccaaatggttgtccaagtggaggctgtgcgggtgcaaaaggagcttgcagcgactgagattgagggttattgtgaaggcgaactaatcaaggttacactatctgggaaccaacaacctataaatgttgaaatcacggaagctgcaatggagttgggtgctgaaaaagtctccgagctggtcaatgaagcctacaaggatgcacaccagaggagcgtccaggcaatgaaggaaaggatggctgatctagcgcagagcataggaatgcctgcagggctcggcgacggtctcaagtgataaaaggcctggtacttgaatgctttccaataatgaaagaagcgtctctcaattttgtattctagctgtgtcgggtcatggttaaacccctccgcagcatcggttagctgtgcatgaactgtaactgtggacacctgtttccttgctcatttgcacatcatagttacagcattagttctaatgtgttgttttacaccaaacagatgttgcttttgtgctagtagaccggcagcctggagaacatttgtaaactaataactgcagagtgaaatatgtttacgttgcgaatagagtactctttggttatgg

SEQ ID NO: 65392 - protein, 230 aa, Triticum aestivum
  peptide (1)..(230): Ceres Seq. ID no. 15222384
  misc_feature (130)..(222): Pfam Name: Uncharacterised BCR, YbaB family COG0718 Pfam Description: Uncharacterised BCR, YbaB family COG0718
  misc_feature (113)..(222): Homolog of NCBI NO: 23124992 NR Description: hypothetical protein [Nostoc punctiforme]
  misc_feature (110)..(226): Homolog of NCBI NO: 22298265 NR Description: ORF_ID:tlr0723~hypothetical protein
  misc_feature (105)..(222): Homolog of NCBI NO: 23040346 NR Description: hypothetical protein [Trichodesmium erythraeum
  misc_feature (113)..(222): Homolog of NCBI NO: 17232559 NR Description: hypothetical protein [Nostoc sp. PCC 7120]
  misc_feature (117)..(225): Homolog of NCBI NO: 24414799 NR Description: hypothetical protein [Synechococcus sp. PCC 7942]
  misc_feature (114)..(222): Homolog of NCBI NO: 28207763 NR Description: CR084 protein [Chlamydomonas reinhardtii]
  misc_feature (83)..(230): Homolog of NCBI NO: 25412184 NR Description: hypothetical protein At2g24020 [imported] -
  misc_feature (45)..(230): Homolog of NCBI NO: 21553866 NR Description: unknown [Arabidopsis thaliana]
  misc_feature (43)..(230): Homolog of NCBI NO: 18400436 NR Description: expressed protein [Arabidopsis thaliana]
  misc_feature (45)..(230): Homolog of NCBI NO: 15234797 NR Description: expressed protein [Arabidopsis thaliana]
VFPRRQQYLLSRKSSWFSPSLATPSSPPSLPWSERALVSLPAMASSTALSPVAFKSSFSPLPSRPARTRINVQGAFCLPCSTWKRANNRSFRVYSLFGGKKEKDENGDEAPSKGGIFGNIGNMQNLYETVKKAQMVVQVEAVRVQKELAATEIEGYCEGELIKVTLSGNQQPINVEITEAAMELGAEKVSELVNEAYKDAHQRSVQAMKERMADLAQSIGMPAGLGDGLK

SEQ ID NO: 65393 - protein, 188 aa, Triticum aestivum
  peptide (1)..(188): Ceres Seq. ID no. 15222385
  misc_feature (88)..(180): Pfam Name: Uncharacterised BCR, YbaB family COG0718 Pfam Description: Uncharacterised BCR, YbaB family COG0718
  misc_feature (71)..(180): Homolog of NCBI NO: 23124992 NR Description: hypothetical protein [Nostoc punctiforme]
  misc_feature (68)..(184): Homolog of NCBI NO: 22298265 NR Description: ORF_ID:tlr0723~hypothetical protein
  misc_feature (63)..(180): Homolog of NCBI NO: 23040346 NR Description: hypothetical protein [Trichodesmium erythraeum
  misc_feature (71)..(180): Homolog of NCBI NO: 17232559 NR Description: hypothetical protein [Nostoc sp. PCC 7120]
  misc_feature (75)..(183): Homolog of NCBI NO: 24414799 NR Description: hypothetical protein [Synechococcus sp. PCC 7942]
  misc_feature (72)..(180): Homolog of NCBI NO: 28207763 NR Description: CR084 protein [Chlamydomonas reinhardtii]
  misc_feature (41)..(188): Homolog of NCBI NO: 25412184 NR Description: hypothetical protein At2g24020 [imported] -
  misc_feature (3)..(188): Homolog of NCBI NO: 21553866 NR Description: unknown [Arabidopsis thaliana]
  misc_feature (1)..(188): Homolog of NCBI NO: 18400436 NR Description: expressed protein [Arabidopsis thaliana]
  misc_feature (3)..(188): Homolog of NCBI NO: 15234797 NR Description: expressed protein [Arabidopsis thaliana]
MASSTALSPVAFKSSFSPLPSRPARTRINVQGAFCLPCSTWKRANNRSFRVYSLFGGKKEKDENGDEAPSKGGIFGNIGNMQNLYETVKKAQMVVQVEAVRVQKELAATEIEGYCEGELIKVTLSGNQQPINVEITEAAMELGAEKVSELVNEAYKDAHQRSVQAMKERMADLAQSIGMPAGLGDGLK

SEQ ID NO: 65394 - DNA, 1457 bp, Triticum aestivum
  misc_feature (1)..(1457): Ceres Seq. ID no. 13662804
atccgtccatatatcgcttcttccgccgctccgcttcccttccacgcgcaccaaccgccgcctgctcttcgattcccccgaggccccagcaggagcagcaaccccttcttctgcttcttgttcttggtgcggtgcgcgggcatggccatcgaccacgagtcgcccttcaaggagctccgcctcaagaacaggaggatcatgggaggcggcgcccctgagccggacgaagaggaggcggaggcgcaggtggcggcggcggcgggggaggaggagcagtggccgcagtggctgcgcccgctgctgtccgcgcgcttcttcgcgcaatgcaagacgcacaccgagtcgcaccggagcggcgagtgcaacatgttctgcctcgactgcgccgccggggcggccgccggcgcggcggcgctctgctcgctgtgcctcgcgcacgcgcaccgcggccaccacaccatccagatccgccgctcctcctaccacgacgtcatccgggtgtcggacatccagcgcttcatggacatcgccggcgtgcagacctacgtcatcaacagcgcgcgcgtcgtcttcctcaacgagcgcccccagcagaagcagcccggcaaggccggcggcggcgccggcggcgccaacctctgcgaggtctgcagccgcagcctcctcgacaacttccgcttctgctccctcggctgcaaggtcgccggctgctcctccgacgggggcggcaacgacaaggcgaggatgatgcgggccagcaggcccggccgcgccaagggctcgtcggactccgaggcggcctcctcctcctctcctctgcgcaatgccgccaggcagagcttcacgccgtccacgccgccgccgcctccgcctccagcggccaagcggcgcaagggcatcccgcaccgcgcgccgttcggcaacctcatcatcgactgctaggcgcgcaccaccccgccattgacaaagctgcgacccacacgcccagttgcagagtgaatggagcgagaaagcggccaccacttcggtgcccgccattgccttcggttgtgcttctcgatgtggattccaccattagcttttcagggagaaagcaggcaggcaagaaagggaggtggatggatggaaacacagctgaaaaagcaccagccttttcttactgcttataatcatcatcatcatcactaggacagaaaccaaaaattaccacaccacagagagattactgtatatgattatggccctgctctactatttctaccacactagacttgagttttgtgataaatgttttgaggtaataccaggcaatgcgccagtggtcagctagctagagtaataagcaattgccacttgttaatcaggttttgtgatagcttgtgctttcttcatctgtaaatatggagtgctgggagaggatgactgcttgttagaaaatatggtgttgctcaaccttc

SEQ ID NO: 65395 - protein, 313 aa, Triticum aestivum
  peptide (1)..(313): Ceres Seq. ID no. 13662805
  misc_feature (91)..(300): Pfam Name: Protein of unknown function, DUF597 Pfam Description: Protein of unknown function, DUF597
  misc_feature (260)..(306): Homolog of NCBI NO: 18394936 NR Description: expressed protein [Arabidopsis thaliana]
  misc_feature (89)..(274): Homolog of NCBI NO: 25337907 NR Description: hypothetical protein F9H16.1 - Arabidopsis
  misc_feature (89)..(274): Homolog of NCBI NO: 18394936 NR Description: expressed protein [Arabidopsis thaliana]
  misc_feature (90)..(306): Homolog of NCBI NO: 15237491 NR Description: expressed protein [Arabidopsis thaliana]
  misc_feature (89)..(307): Homolog of NCBI NO: 15236696 NR Description: expressed protein [Arabidopsis thaliana]
  misc_feature (88)..(312): Homolog of NCBI NO: 21554139 NR Description: unknown [Arabidopsis thaliana]
  misc_feature (89)..(312): Homolog of NCBI NO: 6714272 NR Description: F6N18.8 [Arabidopsis thaliana]
  misc_feature (88)..(312): Homolog of NCBI NO: 18398555 NR Description: expressed protein [Arabidopsis thaliana]
  misc_feature (89)..(312): Homolog of NCBI NO: 38346725 NR Description: OSJNBa0086O06.23 [Oryza sativa (japonica
  misc_feature (48)..(312): Homolog of NCBI NO: 37537092 NR Description: unknown protein [Oryza sativa (japonica
IRPYIASSAAPLPFHAHQPPPALRFPRGPSRSSNPFFCFLFLVRCAGMAIDHESPFKELRLKNRRIMGGGAPEPDEEEAEAQVAAAAGEEEQWPQWLRPLLSARFFAQCKTHTESHRSGECNMFCLDCAAGAAAGAAALCSLCLAHAHRGHHTIQIRRSSYHDVIRVSDIQRFMDIAGVQTYVINSARVVFLNERPQQKQPGKAGGGAGGANLCEVCSRSLLDNFRFCSLGCKVAGCSSDGGGNDKARMMRASRPGRAKGSSDSEAASSSSPLRNAARQSFTPSTPPPPPPPAAKRRKGIPHRAPFGNLIIDC

SEQ ID NO: 65396 - protein, 281 aa, Triticum aestivum
  peptide (1)..(281): Ceres Seq. ID no. 13662806
MQDAHRVAPERRVQHVLPRLRRRGGRRRGGALLAVPRARAPRPPHHPDPPLLLPRRHPGVGHPALHGHRRRADLRHQQRARRLPQRAPPAEAARQGRRRRRRRQPLRGLQPQPPRQLPLLLPRLQGRRLLLRRGRQRQGEDDAGQQARPRQGLVGLRGGLLLLSSAQCRQAELHAVHAAAASASSGQAAQGHPAPRAVRQPHHRLLGAHHPAIDKAATHTPSCRVNGARKRPPLRCPPLPSVVLLDVDSTISFSGRKQAGKKGRWMDGNTAEKAPAFSYCL

SEQ ID NO: 65397 - protein, 266 aa, Triticum aestivum
  peptide (1)..(266): Ceres Seq. ID no. 13662807
  misc_feature (44)..(253): Pfam Name: Protein of unknown function, DUF597 Pfam Description: Protein of unknown function, DUF597
  misc_feature (213)..(259): Homolog of NCBI NO: 18394936 NR Description: expressed protein [Arabidopsis thaliana]
  misc_feature (42)..(227): Homolog of NCBI NO: 25337907 NR Description: hypothetical protein F9H16.1 - Arabidopsis
  misc_feature (42)..(227): Homolog of NCBI NO: 18394936 NR Description: expressed protein [Arabidopsis thaliana]
  misc_feature (43)..(259): Homolog of NCBI NO: 15237491 NR Description: expressed protein [Arabidopsis thaliana]
  misc_feature (42)..(260): Homolog of NCBI NO: 15236696 NR Description: expressed protein [Arabidopsis thaliana]
  misc_feature (41)..(265): Homolog of NCBI NO: 21554139 NR Description: unknown [Arabidopsis thaliana]
  misc_feature (42)..(265): Homolog of NCBI NO: 6714272 NR Description: F6N18.8 [Arabidopsis thaliana]
  misc_feature (41)..(265): Homolog of NCBI NO: 18398555 NR Description: expressed protein [Arabidopsis thaliana]
  misc_feature (42)..(265): Homolog of NCBI NO: 38346725 NR Description: OSJNBa0086O06.23 [Oryza sativa (japonica
  misc_feature (1)..(265): Homolog of NCBI NO: 37537092 NR Description: unknown protein [Oryza sativa (japonica
MAIDHESPFKELRLKNRRIMGGGAPEPDEEEAEAQVAAAAGEEEQWPQWLRPLLSARFFAQCKTHTESHRSGECNMFCLDCAAGAAAGAAALCSLCLAHAHRGHHTIQIRRSSYHDVIRVSDIQRFMDIAGVQTYVINSARVVFLNERPQQKQPGKAGGGAGGANLCEVCSRSLLDNFRFCSLGCKVAGCSSDGGGNDKARMMRASRPGRAKGSSDSEAASSSSPLRNAARQSFTPSTPPPPPPPAAKRRKGIPHRAPFGNLIIDC

SEQ ID NO: 65398 - DNA, 1489 bp, Triticum aestivum
  misc_feature (1)..(1489): Ceres Seq. ID no. 14302787
aaccaatcacccccatcccccctccatctcgcgtggattaatggatctccgccccgccccgccctgctctctcgcttgctaggaaccgtagctgccgccagcccagcccaccccgcccgattcggagccgcgccgagggagagggagcgacatggggctccgcaggagaggccctctgctgctgctcctcctcctcggcctcgtggtggccacggccgcggcggcggcggacgacgcctccgcctccgagggcgacgccgatccgctctacagagcttgcttcgaagaatgtcaaaggactggcaccctgaaagaggattctattaaacactgtgttgtgccgaccgatgaccagcctgctgacaaggcatggtacgcgcacgagccattgtacctgcagtggaaggagtggaactgcaacagcgaatgccgataccattgtatgatggaaagagagcaggaaagggaagagcttgggctagggcccgtcaagtatcatggcaaatggcctctcaaacgtgcttctgtatttcaggaacctctttctgcagctctgtctgccctgactcttctcgtgcaatttaacggatggctatcgtttttcctcttgctttcttacaagctgcctcttaggccagaaactcatgccacatactacgaatacaccgggttatggcacattaacgcgctcttggccttgaattcatggttctggtgtgccatatatcacagttgtgatactgcttggacagaaaagctgtacctgtcatcagctgctgcttttcttggctactccctcatcttggccatactgcgaacttcgaatctgagggatgaagcttcaagagtgatggttgcagctccaattctggcttttgtgacaacccacattttgtacctcaacttctatgaactcgacaaaggcctgaacatgaaggtttgcactgttattagcgttgctcagctccttctgtggacagtgtgggctgctatcacaaggcatccttcacgcctgaaggtcgtctttgttgccatcggcggtgtcctctcactatacctggaagcccatgatgtccctccgcgatggggatatgttgatggacacgcaatctgcctcgccatggctatccccctgtcatacctctggtggagcttcgccaaggaagacgctgagatgcgcacggcggcaattatgaagaagaaacgataacgggcttcgccagaccaaatacttccatctttggtggcgaatctgtgaaaacttgtctccactcatccaatgtaaagatgagtttttcattgtaaatttaggagatctcgtatgtgaattactgttttttccatgctactttttgcctcagctcaggaggtttacatggtttgaaacttgtgatagccctttgtatttctctcatttacaagccaattgagtgtgtgctaggtttgttttcatctcttttagatgcacttactggaagcagttctgatc

SEQ ID NO: 65399 - protein, 352 aa, Triticum aestivum
  peptide (1)..(352): Ceres Seq. ID no. 14302788
  misc_feature (77)..(348): Pfam Name: Per1-like Pfam Description: Per1-like
  misc_feature (86)..(339): Homolog of NCBI NO: 19921698 NR Description: CG3271-PB [Drosophila melanogaster]
  misc_feature (21)..(335): Homolog of NCBI NO: 19114746 NR Description: similar to yeast protein involved in Mn2+
  misc_feature (12)..(341): Homolog of NCBI NO: 32418510 NR Description: hypothetical protein [Neurospora crassa]
  misc_feature (17)..(340): Homolog of NCBI NO: 28372501 NR Description: CAB2 [Homo sapiens]
  misc_feature (54)..(340): Homolog of NCBI NO: 32949296 NR Description: CAB2 protein [Homo sapiens]
  misc_feature (46)..(194): Homolog of NCBI NO: 20260110 NR Description: unknown protein [Arabidopsis thaliana]
  misc_feature (78)..(352): Homolog of NCBI NO: 10176931 NR Description: gene_id:MTG10.16~unknown protein [Arabidopsis
  misc_feature (17)..(352): Homolog of NCBI NO: 18424554 NR Description: expressed protein [Arabidopsis thaliana]
  misc_feature (29)..(352): Homolog of NCBI NO: 15219283 NR Description: expressed protein [Arabidopsis thaliana]
  misc_feature (13)..(352): Homolog of NCBI NO: 37536224 NR Description: unknown protein [Oryza sativa (japonica
MGLRRRGPLLLLLLLGLVVATAAAAADDASASEGDADPLYRACFEECQRTGTLKEDSIKHCVVPTDDQPADKAWYAHEPLYLQWKEWNCNSECRYHCMMEREQEREELGLGPVKYHGKWPLKRASVFQEPLSAALSALTLLVQFNGWLSFFLLLSYKLPLRPETHATYYEYTGLWHINALLALNSWFWCAIYHSCDTAWTEKLYLSSAAAFLGYSLILAILRTSNLRDEASRVMVAAPILAFVTTHILYLNFYELDKGLNMKVCTVISVAQLLLWTVWAAITRHPSRLKVVFVAIGGVLSLYLEAHDVPPRWGYVDGHAICLAMAIPLSYLWWSFAKEDAEMRTAAIMKKKR

SEQ ID NO: 65400 - protein, 255 aa, Triticum aestivum
  peptide (1)..(255): Ceres Seq. ID no. 14302789
  misc_feature (1)..(251): Pfam Name: Per1-like Pfam Description: Per1-like
  misc_feature (1)..(242): Homolog of NCBI NO: 19921698 NR Description: CG3271-PB [Drosophila melanogaster]
  misc_feature (1)..(238): Homolog of NCBI NO: 19114746 NR Description: similar to yeast protein involved in Mn2+
  misc_feature (1)..(244): Homolog of NCBI NO: 32418510 NR Description: hypothetical protein [Neurospora crassa]
  misc_feature (1)..(243): Homolog of NCBI NO: 28372501 NR Description: CAB2 [Homo sapiens]
  misc_feature (1)..(243): Homolog of NCBI NO: 32949296 NR Description: CAB2 protein [Homo sapiens]
  misc_feature (1)..(97): Homolog of NCBI NO: 20260110 NR Description: unknown protein [Arabidopsis thaliana]
  misc_feature (1)..(255): Homolog of NCBI NO: 10176931 NR Description: gene_id:MTG10.16~unknown protein [Arabidopsis
  misc_feature (1)..(255): Homolog of NCBI NO: 18424554 NR Description: expressed protein [Arabidopsis thaliana]
  misc_feature (1)..(255): Homolog of NCBI NO: 15219283 NR Description: expressed protein [Arabidopsis thaliana]
  misc_feature (1)..(255): Homolog of NCBI NO: 37536224 NR Description: unknown protein [Oryza sativa (japonica
MMEREQEREELGLGPVKYHGKWPLKRASVFQEPLSAALSALTLLVQFNGWLSFFLLLSYKLPLRPETHATYYEYTGLWHINALLALNSWFWCAIYHSCDTAWTEKLYLSSAAAFLGYSLILAILRTSNLRDEASRVMVAAPILAFVTTHILYLNFYELDKGLNMKVCTVISVAQLLLWTVWAAITRHPSRLKVVFVAIGGVLSLYLEAHDVPPRWGYVDGHAICLAMAIPLSYLWWSFAKEDAEMRTAAIMKKKR

SEQ ID NO: 65401 - protein, 254 aa, Triticum aestivum
  peptide (1)..(254): Ceres Seq. ID no. 14302790
  misc_feature (1)..(250): Pfam Name: Per1-like Pfam Description: Per1-like
  misc_feature (1)..(241): Homolog of NCBI NO: 19921698 NR Description: CG3271-PB [Drosophila melanogaster]
  misc_feature (1)..(237): Homolog of NCBI NO: 19114746 NR Description: similar to yeast protein involved in Mn2+
  misc_feature (1)..(243): Homolog of NCBI NO: 32418510 NR Description: hypothetical protein [Neurospora crassa]
  misc_feature (1)..(242): Homolog of NCBI NO: 28372501 NR Description: CAB2 [Homo sapiens]
  misc_feature (1)..(242): Homolog of NCBI NO: 32949296 NR Description: CAB2 protein [Homo sapiens]
  misc_feature (1)..(96): Homolog of NCBI NO: 20260110 NR Description: unknown protein [Arabidopsis thaliana]
  misc_feature (1)..(254): Homolog of NCBI NO: 10176931 NR Description: gene_id:MTG10.16~unknown protein [Arabidopsis
  misc_feature (1)..(254): Homolog of NCBI NO: 18424554 NR Description: expressed protein [Arabidopsis thaliana]
  misc_feature (1)..(254): Homolog of NCBI NO: 15219283 NR Description: expressed protein [Arabidopsis thaliana]
  misc_feature (1)..(254): Homolog of NCBI NO: 37536224 NR Description: unknown protein [Oryza sativa (japonica
MEREQEREELGLGPVKYHGKWPLKRASVFQEPLSAALSALTLLVQFNGWLSFFLLLSYKLPLRPETHATYYEYTGLWHINALLALNSWFWCAIYHSCDTAWTEKLYLSSAAAFLGYSLILAILRTSNLRDEASRVMVAAPILAFVTTHILYLNFYELDKGLNMKVCTVISVAQLLLWTVWAAITRHPSRLKVVFVAIGGVLSLYLEAHDVPPRWGYVDGHAICLAMAIPLSYLWWSFAKEDAEMRTAAIMKKKR

SEQ ID NO: 65402 - DNA, 1465 bp, Triticum aestivum
  misc_feature (1)..(1465): Ceres Seq. ID no. 13503573
aatacatacgggagcgcaaaatccccaacgaaacagggctgacagcgcgagatcgggcagagagagcgcgacagatggcgatcggcggcgttggcgctgggggcggggctgggggcgccgaggcgcaggggaggagcgtgctggtgacgggcggcgcggggttcatcggcacccacaccgtgctgcagctgctggagaagggctacgccgtcaccgtggtggataacttccacaactccgtccccgaggcgctcgaccgcgtccgccacatcgtcggccccgccctctccgcccgcctccaattcatcttcggggacctgacgatcaaggatgacctcgagaaggtgttcgccgccaagaggtacgacgccgtgatacacttcgccgggctgaaggcggtggcggagagcgtggcgcacccggagatgtacaaccgcaacaacatcgtcggcaccgtcaacctatacgacgtcatgaagaagcacggatgcaacaagttggtgttctcgtcgtcggcgaccgtgtacggccagccggagaaggtgccctgcttcgaggactcccccctcaaggccctcaacccgtacggcaggaccaagctgtacctggaggagatgctgcgcgactaccagcacgcgaacccggagtggaggacgatcctgctgcgctacttcaaccccatcggcgcccacgagagcggcgacatcggggaggaccccaagggcgtccccaacaacctgctcccctacatccagcaggtggccgtcggccgccgccccgagctcaacgtctacggccacgactaccgcacccgggacggcaccgccgtcagggactacatccacgtggtcgacctcgccgacggccacatcgcggcgctcgagaagctcttcgccacccctgacatcggctgtgtggcgtacaacctggggacggggcgcgggacgacggtgctggagatggtgagcgcgttcgagaaggcatacggcaagaaaatcccggtgaagatgtgccccaggaggccgggcgattcggagcaggtgtacgcgtccaccgccaaggccgaagaggagctcggctggagggccaagtacgggatcgaggagatgtgcagggaccagtggaactgggccaagaagaacccctatggctactgcggaaacgctgaaaacaaagactgattcggtggcccatcgggagccttgtagcgtgaaagaaagatgttgtcaataagcccagggcgttaaagtgtgcccagaaaatgtttcctgttgtagtattattcgtaagatggaacttgagttgggtgggttagactggactctcactcggccgggctggtgcttgccacagaattttggtctggtttcaaacatgggtcgtcatctgcttccttcttttttccttccaattatagagcgagaccgatgaagcgaatcattacaaactttttactgcttgcggg

SEQ ID NO: 65403 - protein, 392 aa, Triticum aestivum
  peptide (1)..(392): Ceres Seq. ID no. 15223239
  misc_feature (46)..(381): Pfam Name: NAD dependent epimerase/dehydratase family Pfam Description: NAD dependent epimerase/dehydratase family
  misc_feature (44)..(390): Homolog of NCBI NO: 15236988 NR Description: UDP-glucose 4-epimerase (UDP-galactose
  misc_feature (44)..(390): Homolog of NCBI NO: 12643850 NR Description: Probable UDP-glucose 4-epimerase At4g10960
  misc_feature (44)..(392): Homolog of NCBI NO: 11386775 NR Description: UDP-glucose 4-epimerase GEPI48 (Galactowaldenase)
  misc_feature (41)..(386): Homolog of NCBI NO: 11386774 NR Description: UDP-glucose 4-epimerase GEPI42 (Galactowaldenase)
  misc_feature (44)..(384): Homolog of NCBI NO: 25292327 NR Description: hypothetical protein F16M19.8 [imported] -
  misc_feature (44)..(384): Homolog of NCBI NO: 18407751 NR Description: UDP-glucose 4-epimerase (UDP-galactose
  misc_feature (44)..(384): Homolog of NCBI NO: 2129759 NR Description: UDPglucose 4-epimerase (EC 5.1.3.2) - Arabidopsis
  misc_feature (44)..(384): Homolog of NCBI NO: 15222072 NR Description: UDP-glucose 4-epimerase (UDP-galactose
  misc_feature (41)..(386): Homolog of NCBI NO: 11386762 NR Description: UDP-glucose 4-epimerase (Galactowaldenase)
  misc_feature (30)..(389): Homolog of NCBI NO: 26106014 NR Description: putative UDP-glucose 4-epimerase
YIRERKIPNETGLTARDRAERARQMAIGGVGAGGGAGGAEAQGRSVLVTGGAGFIGTHTVLQLLEKGYAVTVVDNFHNSVPEALDRVRHIVGPALSARLQFIFGDLTIKDDLEKVFAAKRYDAVIHFAGLKAVAESVAHPEMYNRNNIVGTVNLYDVMKKHGCNKLVFSSSATVYGQPEKVPCFEDSPLKALNPYGRTKLYLEEMLRDYQHANPEWRTILLRYFNPIGAHESGDIGEDPKGVPNNLLPYIQQVAVGRRPELNVYGHDYRTRDGTAVRDYIHVVDLADGHIAALEKLFATPDIGCVAYNLGTGRGTTVLEMVSAFEKAYGKKIPVKMCPRRPGDSEQVYASTAKAEEELGWRAKYGIEEMCRDQWNWAKKNPYGYCGNAENKD

SEQ ID NO: 65404 - protein, 368 aa, Triticum aestivum
  peptide (1)..(368): Ceres Seq. ID no. 15223240
  misc_feature (22)..(357): Pfam Name: NAD dependent epimerase/dehydratase family Pfam Description: NAD dependent epimerase/dehydratase family
  misc_feature (20)..(366): Homolog of NCBI NO: 15236988 NR Description: UDP-glucose 4-epimerase (UDP-galactose
  misc_feature (20)..(366): Homolog of NCBI NO: 12643850 NR Description: Probable UDP-glucose 4-epimerase At4g10960
  misc_feature (20)..(368): Homolog of NCBI NO: 11386775 NR Description: UDP-glucose 4-epimerase GEPI48 (Galactowaldenase)
  misc_feature (17)..(362): Homolog of NCBI NO: 11386774 NR Description: UDP-glucose 4-epimerase GEPI42 (Galactowaldenase)
  misc_feature (20)..(360): Homolog of NCBI NO: 25292327 NR Description: hypothetical protein F16M19.8 [imported] -
  misc_feature (20)..(360): Homolog of NCBI NO: 18407751 NR Description: UDP-glucose 4-epimerase (UDP-galactose
  misc_feature (20)..(360): Homolog of NCBI NO: 2129759 NR Description: UDPglucose 4-epimerase (EC 5.1.3.2) - Arabidopsis
  misc_feature (20)..(360): Homolog of NCBI NO: 15222072 NR Description: UDP-glucose 4-epimerase (UDP-galactose
  misc_feature (17)..(362): Homolog of NCBI NO: 11386762 NR Description: UDP-glucose 4-epimerase (Galactowaldenase)
  misc_feature (6)..(365): Homolog of NCBI NO: 26106014 NR Description: putative UDP-glucose 4-epimerase
MAIGGVGAGGGAGGAEAQGRSVLVTGGAGFIGTHTVLQLLEKGYAVTVVDNFHNSVPEALDRVRHIVGPALSARLQFIFGDLTIKDDLEKVFAAKRYDAVIHFAGLKAVAESVAHPEMYNRNNIVGTVNLYDVMKKHGCNKLVFSSSATVYGQPEKVPCFEDSPLKALNPYGRTKLYLEEMLRDYQHANPEWRTILLRYFNPIGAHESGDIGEDPKGVPNNLLPYIQQVAVGRRPELNVYGHDYRTRDGTAVRDYIHVVDLADGHIAALEKLFATPDIGCVAYNLGTGRGTTVLEMVSAFEKAYGKKIPVKMCPRRPGDSEQVYASTAKAEEELGWRAKYGIEEMCRDQWNWAKKNPYGYCGNAENKD

SEQ ID NO: 65405 - protein, 251 aa, Triticum aestivum
  peptide (1)..(251): Ceres Seq. ID no. 15223241
  misc_feature (1)..(240): Pfam Name: NAD dependent epimerase/dehydratase family Pfam Description: NAD dependent epimerase/dehydratase family
  misc_feature (1)..(249): Homolog of NCBI NO: 15236988 NR Description: UDP-glucose 4-epimerase (UDP-galactose
  misc_feature (1)..(249): Homolog of NCBI NO: 12643850 NR Description: Probable UDP-glucose 4-epimerase At4g10960
  misc_feature (1)..(251): Homolog of NCBI NO: 11386775 NR Description: UDP-glucose 4-epimerase GEPI48 (Galactowaldenase)
  misc_feature (1)..(245): Homolog of NCBI NO: 11386774 NR Description: UDP-glucose 4-epimerase GEPI42 (Galactowaldenase)
  misc_feature (1)..(243): Homolog of NCBI NO: 25292327 NR Description: hypothetical protein F16M19.8 [imported] -
  misc_feature (1)..(243): Homolog of NCBI NO: 18407751 NR Description: UDP-glucose 4-epimerase (UDP-galactose
  misc_feature (1)..(243): Homolog of NCBI NO: 2129759 NR Description: UDPglucose 4-epimerase (EC 5.1.3.2) - Arabidopsis
  misc_feature (1)..(243): Homolog of NCBI NO: 15222072 NR Description: UDP-glucose 4-epimerase (UDP-galactose
  misc_feature (1)..(245): Homolog of NCBI NO: 11386762 NR Description: UDP-glucose 4-epimerase (Galactowaldenase)
  misc_feature (1)..(248): Homolog of NCBI NO: 26106014 NR Description: putative UDP-glucose 4-epimerase
MYNRNNIVGTVNLYDVMKKHGCNKLVFSSSATVYGQPEKVPCFEDSPLKALNPYGRTKLYLEEMLRDYQHANPEWRTILLRYFNPIGAHESGDIGEDPKGVPNNLLPYIQQVAVGRRPELNVYGHDYRTRDGTAVRDYIHVVDLADGHIAALEKLFATPDIGCVAYNLGTGRGTTVLEMVSAFEKAYGKKIPVKMCPRRPGDSEQVYASTAKAEEELGWRAKYGIEEMCRDQWNWAKKNPYGYCGNAENKD

SEQ ID NO: 65406 - DNA, 1454 bp, Triticum aestivum
  misc_feature (1)..(1454): Ceres Seq. ID no. 13598618
aaaaaccgtgcctttccaatcccccggatccagtctcgctcccagcacaagtcctcccacccagccgctgcccggggcggcaatccgtcgagcaccagccgcgcgcgcgctccactccgctgcgcctgcggccgccgccgtccatggcgtccgccgcgcgggctctgggcgcgctcctccacagggcctcgtcgctttcgtcctccgcctctgctctcaggagcgcctcccttgtacacaggaatagcccaactggtggcgccagcttgttccaggggcacgtggctaggcggaggatttggacgttccagccgctctgtatggggcggcgctcctgcaagatcgccgggaggaagggtgctcagaatttgaaaaagatgaagcgcaacagcaaaatcggaaaagaaatcgttgctgccatcaagaagggtggtccaagtccttcgtccaacacagctttagcagcgatactagagaaagtaagagagcttgatgtccccaaggaagttgttgagcgtaacatcaaaagagcttcagaaaagggtcaagatacttacacagaaaagatttatgaggtctatggttttggtggagtaggtatggtcgttgaggtccttacagacaaaattacaagatctattgcggatattagaaatgttgtaaaagactgtggagcaaaattggctgatcctggatctgttacattcagattcagacaagctcgagtggttaacataaaagttacagatgccgataaggaccaactactctctgttgctttggatgctggcgccgatgatgttattgaaccaaattttgatgatgaagatgactctgaagaggttctagagaggttttacaagatagttactacatctgaaaactatcctgttgtgctatcaaagctacaagaggaagggctgaaatttgaaacggataacggttatgaactgctgcctctcaatccgattgaggtggatgacgaggccatggaacttaacaaggaccttgtattgaagttgcttgaattggatgatgttgatgctgtctacacagaccagaagtgagccaatttggaacccacaggctctctcagctctcaagacgctgctcgatgactccatttgggtagggcttgttttcaacttcgtgtccattaaggatttcttatcagcactgtttgcgccgattacgaagcctgcactcgtaacatcagcttcaagtgtccaaaatgaaaattggtgaacgcagcagtttccttttgggggtacttttccccacattctgccgtctcatagttttttaccttacgtttgttgtccctgatctcttcaccttgtccgtgtctcagtgagctgctagacgctgctcatataacgaatgttgtagctgcatcttttcatgtgattgtaagcaatacaagtaaaactgacctatgcatggactttggagtc

SEQ ID NO: 65407 - protein, 354 aa, Triticum aestivum
  peptide (1)..(354): Ceres Seq. ID no. 13598619
  misc_feature (109)..(354): Pfam Name: Domain of unknown function DUF28 Pfam Description: Domain of unknown function DUF28
  misc_feature (114)..(350): Homolog of NCBI NO: 28378848 NR Description: unknown [Lactobacillus plantarum WCFS1]
  misc_feature (114)..(351): Homolog of NCBI NO: 23024593 NR Description: hypothetical protein
  misc_feature (114)..(351): Homolog of NCBI NO: 23002536 NR Description: hypothetical protein [Lactobacillus gasseri]
  misc_feature (117)..(350): Homolog of NCBI NO: 15605184 NR Description: YebC family [Chlamydia trachomatis]
  misc_feature (117)..(350): Homolog of NCBI NO: 29839936 NR Description: conserved hypothetical protein TIGR01033
  misc_feature (117)..(350): Homolog of NCBI NO: 15618484 NR Description: YebC family hypothetical protein
  misc_feature (117)..(350): Homolog of NCBI NO: 15835357 NR Description: conserved hypothetical protein [Chlamydia
  misc_feature (63)..(354): Homolog of NCBI NO: 25407817 NR Description: hypothetical protein At2g25830 [imported] -
  misc_feature (63)..(354): Homolog of NCBI NO: 15810383 NR Description: unknown protein [Arabidopsis thaliana]
  misc_feature (63)..(354): Homolog of NCBI NO: 18400953 NR Description: expressed protein [Arabidopsis thaliana]
KPCLSNPPDPVSLPAQVLPPSRCPGRQSVEHQPRARSTPLRLRPPPSMASAARALGALLHRASSLSSSASALRSASLVHRNSPTGGASLFQGHVARRRIWTFQPLCMGRRSCKIAGRKGAQNLKKMKRNSKIGKEIVAAIKKGGPSPSSNTALAAILEKVRELDVPKEVVERNIKRASEKGQDTYTEKIYEVYGFGGVGMVVEVLTDKITRSIADIRNVVKDCGAKLADPGSVTFRFRQARVVNIKVTDADKDQLLSVALDAGADDVIEPNFDDEDDSEEVLERFYKIVTTSENYPVVLSKLQEEGLKFETDNGYELLPLNPIEVDDEAMELNKDLVLKLLELDDVDAVYTDQK

SEQ ID NO: 65408 - protein, 307 aa, Triticum aestivum
  peptide (1)..(307): Ceres Seq. ID no. 13598620
  misc_feature (62)..(307): Pfam Name: Domain of unknown function DUF28 Pfam Description: Domain of unknown function DUF28
  misc_feature (67)..(303): Homolog of NCBI NO: 28378848 NR Description: unknown [Lactobacillus plantarum WCFS1]
  misc_feature (67)..(304): Homolog of NCBI NO: 23024593 NR Description: hypothetical protein
  misc_feature (67)..(304): Homolog of NCBI NO: 23002536 NR Description: hypothetical protein [Lactobacillus gasseri]
  misc_feature (70)..(303): Homolog of NCBI NO: 15605184 NR Description: YebC family [Chlamydia trachomatis]
  misc_feature (70)..(303): Homolog of NCBI NO: 29839936 NR Description: conserved hypothetical protein TIGR01033
  misc_feature (70)..(303): Homolog of NCBI NO: 15618484 NR Description: YebC family hypothetical protein
  misc_feature (70)..(303): Homolog of NCBI NO: 15835357 NR Description: conserved hypothetical protein [Chlamydia
  misc_feature (16)..(307): Homolog of NCBI NO: 25407817 NR Description: hypothetical protein At2g25830 [imported] -
  misc_feature (16)..(307): Homolog of NCBI NO: 15810383 NR Description: unknown protein [Arabidopsis thaliana]
  misc_feature (16)..(307): Homolog of NCBI NO: 18400953 NR Description: expressed protein [Arabidopsis thaliana]
MASAARALGALLHRASSLSSSASALRSASLVHRNSPTGGASLFQGHVARRRIWTFQPLCMGRRSCKIAGRKGAQNLKKMKRNSKIGKEIVAAIKKGGPSPSSNTALAAILEKVRELDVPKEVVERNIKRASEKGQDTYTEKIYEVYGFGGVGMVVEVLTDKITRSIADIRNVVKDCGAKLADPGSVTFRFRQARVVNIKVTDADKDQLLSVALDAGADDVIEPNFDDEDDSEEVLERFYKIVTTSENYPVVLSKLQEEGLKFETDNGYELLPLNPIEVDDEAMELNKDLVLKLLELDDVDAVYTDQK

SEQ ID NO: 65409 - protein, 248 aa, Triticum aestivum
  peptide (1)..(248): Ceres Seq. ID no. 13598621
  misc_feature (3)..(248): Pfam Name: Domain of unknown function DUF28 Pfam Description: Domain of unknown function DUF28
  misc_feature (8)..(244): Homolog of NCBI NO: 28378848 NR Description: unknown [Lactobacillus plantarum WCFS1]
  misc_feature (8)..(245): Homolog of NCBI NO: 23024593 NR Description: hypothetical protein
  misc_feature (8)..(245): Homolog of NCBI NO: 23002536 NR Description: hypothetical protein [Lactobacillus gasseri]
  misc_feature (11)..(244): Homolog of NCBI NO: 15605184 NR Description: YebC family [Chlamydia trachomatis]
  misc_feature (11)..(244): Homolog of NCBI NO: 29839936 NR Description: conserved hypothetical protein TIGR01033
  misc_feature (11)..(244): Homolog of NCBI NO: 15618484 NR Description: YebC family hypothetical protein
  misc_feature (11)..(244): Homolog of NCBI NO: 15835357 NR Description: conserved hypothetical protein [Chlamydia
  misc_feature (1)..(248): Homolog of NCBI NO: 25407817 NR Description: hypothetical protein At2g25830 [imported] -
  misc_feature (1)..(248): Homolog of NCBI NO: 15810383 NR Description: unknown protein [Arabidopsis thaliana]
  misc_feature (1)..(248): Homolog of NCBI NO: 18400953 NR Description: expressed protein [Arabidopsis thaliana]
MGRRSCKIAGRKGAQNLKKMKRNSKIGKEIVAAIKKGGPSPSSNTALAAILEKVRELDVPKEVVERNIKRASEKGQDTYTEKIYEVYGFGGVGMVVEVLTDKITRSIADIRNVVKDCGAKLADPGSVTFRFRQARVVNIKVTDADKDQLLSVALDAGADDVIEPNFDDEDDSEEVLERFYKIVTTSENYPVVLSKLQEEGLKFETDNGYELLPLNPIEVDDEAMELNKDLVLKLLELDDVDAVYTDQK

SEQ ID NO: 65410 - DNA, 934 bp, Triticum aestivum
  misc_feature (1)..(934): Ceres Seq. ID no. 15178542
gaaactcgaagctcttccgcgcccccgctcgccccccgaaccttccagaagcttccagcgcgcagttgccccgagagccgagcggcatggcgtcggccatctccgcggggcccacgccgccggccgcggcgccgtcgtcggtggagtggcaccagcggccgccgaaccccaagaacccggtggtgttcttcgacgtgaccatcgggtccatcccggccgggcgcatcaagatggagctcttcgccgacatcgtccccaagaccgccgagaacttcaggcagttctgcactggcgagtacaggaaatcagctattccacaggggtataagggttgtcagttccatcgagtgatcaaagatttcatgattcagggaggtgacttcgtaaagggtgatggcagtggatgcatatcaatctatggcaccaaatttgatgatgaaaatttcattgcgaagcatactgggcctggcctgctctccatggcgaacagtggagctaactctaatgggtctcagttctttttaacttgtgcaaagtgtgagtggctggacaacaagcatgtggtttttgggagggtgctgggagatggtctgctcgtgctgcggaagattgagaacgtcgctactggaccaaacaaccggccgaagcttgcctgcgtgataagtgagtgcggtgagatgtagcttgctttttgagcgcggcatgtcctagcgctgccttgacatggatgaaagtactgaatcactggaaacagattggagtctagagcattgctgtattaatctacttattgtgacttgtgggcatgcggaatttggactctgacaaactggcaacatgtatctgtatcagccaatgctgtagagcctttaaaaaaacgtgtatggtgttgaataatattcaaagcaggagatgtggtttcatgaaaaaaaaa

SEQ ID NO: 65411 - protein, 226 aa, Triticum aestivum
  peptide (1)..(226): Ceres Seq. ID no. 15178543
  misc_feature (58)..(226): Homolog of NCBI NO: 24586038 NR Description: CG17266-PA [Drosophila melanogaster]
  misc_feature (55)..(226): Homolog of NCBI NO: 39597495 NR Description: Hypothetical protein CBG03161 [Caenorhabditis
  misc_feature (40)..(226): Homolog of NCBI NO: 31198985 NR Description: ENSANGP00000018327 [Anopheles gambiae]
  misc_feature (55)..(226): Homolog of NCBI NO: 39849992 NR Description: Unknown (protein for MGC:76244) [Silurana
  misc_feature (55)..(226): Homolog of NCBI NO: 5454154 NR Description: peptidyl prolyl isomerase H; cyclophilin H [Homo
  misc_feature (51)..(226): Homolog of NCBI NO: 11602709 NR Description: putative U-snRNP-associated cyclophilin
  misc_feature (52)..(226): Homolog of NCBI NO: 37595420 NR Description: peptidyl prolyl isomerase H [Danio rerio]
  misc_feature (34)..(226): Homolog of NCBI NO: 15224944 NR Description: peptidyl-prolyl cis-trans isomerase -related
  misc_feature (42)..(226): Homolog of NCBI NO: 4454307 NR Description: cyclophilin [Pseudotsuga menziesii]
  misc_feature (27)..(226): Homolog of NCBI NO: 32129321 NR Description: putative cyclophilin [Oryza sativa (japonica
NSKLFRAPARPPNLPEASSAQLPREPSGMASAISAGPTPPAAAPSSVEWHQRPPNPKNPVVFFDVTIGSIPAGRIKMELFADIVPKTAENFRQFCTGEYRKSAIPQGYKGCQFHRVIKDFMIQGGDFVKGDGSGCISIYGTKFDDENFIAKHTGPGLLSMANSGANSNGSQFFLTCAKCEWLDNKHVVFGRVLGDGLLVLRKIENVATGPNNRPKLACVISECGEM

SEQ ID NO: 65412 - protein, 198 aa, Triticum aestivum
  peptide (1)..(198): Ceres Seq. ID no. 15178544
  misc_feature (30)..(198): Homolog of NCBI NO: 24586038 NR Description: CG17266-PA [Drosophila melanogaster]
  misc_feature (27)..(198): Homolog of NCBI NO: 39597495 NR Description: Hypothetical protein CBG03161 [Caenorhabditis
  misc_feature (12)..(198): Homolog of NCBI NO: 31198985 NR Description: ENSANGP00000018327 [Anopheles gambiae]
  misc_feature (27)..(198): Homolog of NCBI NO: 39849992 NR Description: Unknown (protein for MGC:76244) [Silurana
  misc_feature (27)..(198): Homolog of NCBI NO: 5454154 NR Description: peptidyl prolyl isomerase H; cyclophilin H [Homo
  misc_feature (23)..(198): Homolog of NCBI NO: 11602709 NR Description: putative U-snRNP-associated cyclophilin
  misc_feature (24)..(198): Homolog of NCBI NO: 37595420 NR Description: peptidyl prolyl isomerase H [Danio rerio]
  misc_feature (6)..(198): Homolog of NCBI NO: 15224944 NR Description: peptidyl-prolyl cis-trans isomerase -related
  misc_feature (14)..(198): Homolog of NCBI NO: 4454307 NR Description: cyclophilin [Pseudotsuga menziesii]
  misc_feature (1)..(198): Homolog of NCBI NO: 32129321 NR Description: putative cyclophilin [Oryza sativa (japonica
MASAISAGPTPPAAAPSSVEWHQRPPNPKNPVVFFDVTIGSIPAGRIKMELFADIVPKTAENFRQFCTGEYRKSAIPQGYKGCQFHRVIKDFMIQGGDFVKGDGSGCISIYGTKFDDENFIAKHTGPGLLSMANSGANSNGSQFFLTCAKCEWLDNKHVVFGRVLGDGLLVLRKIENVATGPNNRPKLACVISECGEM

SEQ ID NO: 65413 - protein, 150 aa, Triticum aestivum
  peptide (1)..(150): Ceres Seq. ID no. 15178545
  misc_feature (1)..(150): Homolog of NCBI NO: 24586038 NR Description: CG17266-PA [Drosophila melanogaster]
  misc_feature (1)..(150): Homolog of NCBI NO: 39597495 NR Description: Hypothetical protein CBG03161 [Caenorhabditis
  misc_feature (1)..(150): Homolog of NCBI NO: 31198985 NR Description: ENSANGP00000018327 [Anopheles gambiae]
  misc_feature (1)..(150): Homolog of NCBI NO: 39849992 NR Description: Unknown (protein for MGC:76244) [Silurana
  misc_feature (1)..(150): Homolog of NCBI NO: 5454154 NR Description: peptidyl prolyl isomerase H; cyclophilin H [Homo
  misc_feature (1)..(150): Homolog of NCBI NO: 11602709 NR Description: putative U-snRNP-associated cyclophilin
  misc_feature (1)..(150): Homolog of NCBI NO: 37595420 NR Description: peptidyl prolyl isomerase H [Danio rerio]
  misc_feature (1)..(150): Homolog of NCBI NO: 15224944 NR Description: peptidyl-prolyl cis-trans isomerase -related
  misc_feature (1)..(150): Homolog of NCBI NO: 4454307 NR Description: cyclophilin [Pseudotsuga menziesii]
  misc_feature (1)..(150): Homolog of NCBI NO: 32129321 NR Description: putative cyclophilin [Oryza sativa (japonica
MELFADIVPKTAENFRQFCTGEYRKSAIPQGYKGCQFHRVIKDFMIQGGDFVKGDGSGCISIYGTKFDDENFIAKHTGPGLLSMANSGANSNGSQFFLTCAKCEWLDNKHVVFGRVLGDGLLVLRKIENVATGPNNRPKLACVISECGEM

SEQ ID NO: 65414 - DNA, 1361 bp, Triticum aestivum
  misc_feature (1)..(1361): Ceres Seq. ID no. 13503549
acaggggaaaaacctcttcctagcgagatttccccacccgtcttcttcctccgaaaccctaatccccaaatcggagaatcggacccagcccggcgccgcggagagcatccccccgtcgaccggcatggcaattgctcgcactggcgtgtacgtggacgactacttggagtattcgagcaccctggccggcgacctgcagaggatcctctccaccatgcacgagctcgacgagagggcccatggcattttgggtcagacaaaagggcagatcaaatatctcctgggggtgccatcccatgggttcgacaggccaaacgtggtgcatgatgaaaatgcctcggagaagatgacgagggatattgaaaatagccaggacaacgcgcttagtctctgcacggagaaagtgttgctcgcacgccaagcttatgacctgatagagagccatatcaaacgtcttgatgaagacctaggccagtttgcagaagatttaaagcaagaaggaaaaatacctccagatgaaccgcatatccttcctccaatgccggtgggtggcagggatgaaagacggaggtccagttttagtacaccccaagcagcaaggaagtttgtcagagagaaggaatgggatagggatagggagagaggtatggacttcgacttaatgccccctccaggtagcagcaacaagaaggccgttgcatctatggatgtggatcaaatgattgatccaaatgaaccaacatattgtatatgccaccaggtttcatatggtgatatgattgcttgtgacaatgagaattgtgaaggaggcgaatggttccattactcgtgcgttggtctgacaccagaaacaagattcaaagggaaatggttttgcccaacttgcaggaatcttcaatgagaggttctcctaaattgtgttgacgaggcgagcggttccggtcggcccagactttccgcaacatgcaggactcttcaacacgaggctctcagaagcttttcttggacaggaggataccaaatggtacatgtttcaatttgtaaggaggcgtttgcttacagtgtggtcttattttggtaataatgtatatgctggagaggacgcgactgttctagagaaggataaaaaagcttggcgtgttctgttgttgtatcttgtcgccgcaaacaatctatcatagtttcaggtgttggtaacctggtaactattttactttggtcgtgatgtctattaagcgtcatcgcaacctttgctcgcatgattctgcccctgagcaccattatctgctgcatcttggttgagctggaggtgcagcatatgcacttctacagcacacattgtattaaattattgtgtaact

SEQ ID NO: 65415 - protein, 299 aa, Triticum aestivum
  peptide (1)..(299): Ceres Seq. ID no. 13503550
  misc_feature (248)..(298): Pfam Name: PHD-finger Pfam Description: PHD-finger
  misc_feature (226)..(295): Homolog of NCBI NO: 19921252 NR Description: CG9293-PA [Drosophila melanogaster]
  misc_feature (47)..(166): Homolog of NCBI NO: 19921252 NR Description: CG9293-PA [Drosophila melanogaster]
  misc_feature (48)..(295): Homolog of NCBI NO: 34858458 NR Description: similar to ING1-like protein
  misc_feature (47)..(295): Homolog of NCBI NO: 18644730 NR Description: p28 ING5 [Homo sapiens]
  misc_feature (48)..(295): Homolog of NCBI NO: 19111152 NR Description: ING1-like protein
  misc_feature (48)..(295): Homolog of NCBI NO: 26327491 NR Description: unnamed protein product [Mus musculus]
  misc_feature (116)..(298): Homolog of NCBI NO: 21553698 NR Description: putative growth inhibitory protein [Arabidopsis
  misc_feature (42)..(266): Homolog of NCBI NO: 30695729 NR Description: expressed protein [Arabidopsis thaliana]
  misc_feature (82)..(298): Homolog of NCBI NO: 25405727 NR Description: hypothetical protein F20D21.22 [imported] -
  misc_feature (42)..(266): Homolog of NCBI NO: 18087670 NR Description: putative growth inhibitory protein [Oryza sativa]
QGKNLFLARFPHPSSSSETLIPKSENRTQPGAAESIPPSTGMAIARTGVYVDDYLEYSSTLAGDLQRILSTMHELDERAHGILGQTKGQIKYLLGVPSHGFDRPNVVHDENASEKMTRDIENSQDNALSLCTEKVLLARQAYDLIESHIKRLDEDLGQFAEDLKQEGKIPPDEPHILPPMPVGGRDERRRSSFSTPQAARKFVREKEWDRDRERGMDFDLMPPPGSSNKKAVASMDVDQMIDPNEPTYCICHQVSYGDMIACDNENCEGGEWFHYSCVGLTPETRFKGKWFCPTCRNLQ

SEQ ID NO: 65416 - protein, 258 aa, Triticum aestivum
  peptide (1)..(258): Ceres Seq. ID no. 13503551
  misc_feature (207)..(257): Pfam Name: PHD-finger Pfam Description: PHD-finger
  misc_feature (185)..(254): Homolog of NCBI NO: 19921252 NR Description: CG9293-PA [Drosophila melanogaster]
  misc_feature (6)..(125): Homolog of NCBI NO: 19921252 NR Description: CG9293-PA [Drosophila melanogaster]
  misc_feature (7)..(254): Homolog of NCBI NO: 34858458 NR Description: similar to ING1-like protein
  misc_feature (6)..(254): Homolog of NCBI NO: 18644730 NR Description: p28 ING5 [Homo sapiens]
  misc_feature (7)..(254): Homolog of NCBI NO: 19111152 NR Description: ING1-like protein
  misc_feature (7)..(254): Homolog of NCBI NO: 26327491 NR Description: unnamed protein product [Mus musculus]
  misc_feature (75)..(257): Homolog of NCBI NO: 21553698 NR Description: putative growth inhibitory protein [Arabidopsis
  misc_feature (1)..(225): Homolog of NCBI NO: 30695729 NR Description: expressed protein [Arabidopsis thaliana]
  misc_feature (41)..(257): Homolog of NCBI NO: 25405727 NR Description: hypothetical protein F20D21.22 [imported] -
  misc_feature (1)..(225): Homolog of NCBI NO: 18087670 NR Description: putative growth inhibitory protein [Oryza sativa]
MAIARTGVYVDDYLEYSSTLAGDLQRILSTMHELDERAHGILGQTKGQIKYLLGVPSHGFDRPNVVHDENASEKMTRDIENSQDNALSLCTEKVLLARQAYDLIESHIKRLDEDLGQFAEDLKQEGKIPPDEPHILPPMPVGGRDERRRSSFSTPQAARKFVREKEWDRDRERGMDFDLMPPPGSSNKKAVASMDVDQMIDPNEPTYCICHQVSYGDMIACDNENCEGGEWFHYSCVGLTPETRFKGKWFCPTCRNLQ

SEQ ID NO: 65417 - protein, 228 aa, Triticum aestivum
  peptide (1)..(228): Ceres Seq. ID no. 13503552
  misc_feature (177)..(227): Pfam Name: PHD-finger Pfam Description: PHD-finger
  misc_feature (155)..(224): Homolog of NCBI NO: 19921252 NR Description: CG9293-PA [Drosophila melanogaster]
  misc_feature (1)..(95): Homolog of NCBI NO: 19921252 NR Description: CG9293-PA [Drosophila melanogaster]
  misc_feature (1)..(224): Homolog of NCBI NO: 34858458 NR Description: similar to ING1-like protein
  misc_feature (1)..(224): Homolog of NCBI NO: 18644730 NR Description: p28 ING5 [Homo sapiens]
  misc_feature (1)..(224): Homolog of NCBI NO: 19111152 NR Description: ING1-like protein
  misc_feature (1)..(224): Homolog of NCBI NO: 26327491 NR Description: unnamed protein product [Mus musculus]
  misc_feature (45)..(227): Homolog of NCBI NO: 21553698 NR Description: putative growth inhibitory protein [Arabidopsis
  misc_feature (1)..(195): Homolog of NCBI NO: 30695729 NR Description: expressed protein [Arabidopsis thaliana]
  misc_feature (11)..(227): Homolog of NCBI NO: 25405727 NR Description: hypothetical protein F20D21.22 [imported] -
  misc_feature (1)..(195): Homolog of NCBI NO: 18087670 NR Description: putative growth inhibitory protein [Oryza sativa]
MHELDERAHGILGQTKGQIKYLLGVPSHGFDRPNVVHDENASEKMTRDIENSQDNALSLCTEKVLLARQAYDLIESHIKRLDEDLGQFAEDLKQEGKIPPDEPHILPPMPVGGRDERRRSSFSTPQAARKFVREKEWDRDRERGMDFDLMPPPGSSNKKAVASMDVDQMIDPNEPTYCICHQVSYGDMIACDNENCEGGEWFHYSCVGLTPETRFKGKWFCPTCRNLQ

SEQ ID NO: 65418 - DNA, 1386 bp, Triticum aestivum
  misc_feature (1)..(1386): Ceres Seq. ID no. 15224695
cggaagcaaacggcagcccagcacaaattcctagcggcagccagcagccgggcgccggaagcgagcaagatggcggcggcggctgtggcggcgcgggcgtacgaggcagcggcgcggtccgcgctggcggcgctggagcgcaacctgctgccggacgcggtcacccggcggctcacgcgcctcctgctcgcgcagcgcctccgcctcggctacctcccctccgcgccgctccagctgcaggacctcatcctcttcgcccactcacttgaaggcatgcccattgccatcgaaacggacacagctaaaacccagcactacgagctgccgaccacattcttcaagctagtgctcggaaaaaacctcaaatacagctcatgttacttccctgatgattcaagcaccctagaagatgccgaggttgcaatgttggagttgtactgtgagagggcgcagctgcaagatggccaaagcgttctcgatgttggatgtggatggggatccctctctgtatacatagcaaagaaatataggaactgcaatatcacggggatatgcaactcaacaactcaaaaggcttttatagaagagcagtgtagggagaatgagctatccaatgttgagatcattgtagcagacatcagcaagtttgagatggagcgttcttttgacaggatcatatcgatagagatgtttgagcacatgaaaaactacaaggcacttcttaagaagatatccagatggatgaaagaggattccttattgtttgttcactacttctgccacaagacatttgcgtatcacttcgaggacaagaatgacgatgattggatcacaaggtatttctttactggaggaacaatgccatcagcaaacctccttctgtactttcaggaagatgtatctgtggtcaatcattggcttgtcagtggcacacattatgctagaactagcgaggagtggctgaaacgcatggacaagaacatcgctgccataaggccaatctttgagaagacttatgggagggaatcagctaccaaatggatagcttattggaggacattcttcatctcagtagctgaactttttggatataacaatggtgatgaatggatggttgcacatcacctgttccgaaagaagtagaagtgccgctggacatttctggagcaaagtagaattgtatgttgagaatcatccatcacacaggctatgcctagttatataattatttttgtgtgtgttgagctgttatcctcctttttttttttgaagagaggcaaaagatttgcctcattcattaaataagaggaatagagtttatgttcgtgttacaacagtgacagcgccgcaacacccgaaataaaggtgaccaactactctcgcgtc

SEQ ID NO: 65419 - protein, 380 aa, Triticum aestivum
  peptide (1)..(380): Ceres Seq. ID no. 15224696
  misc_feature (209)..(379): Pfam Name: Cyclopropane-fatty-acyl-phospholipid synthase Pfam Description: Cyclopropane-fatty-acyl-phospholipid synthase
  misc_feature (24)..(380): Homolog of NCBI NO: 21242125 NR Description: conserved hypothetical protein
  misc_feature (24)..(380): Homolog of NCBI NO: 21230783 NR Description: conserved hypothetical protein
  misc_feature (46)..(380): Homolog of NCBI NO: 22988437 NR Description: COG2230: Cyclopropane fatty acid synthase and
  misc_feature (37)..(380): Homolog of NCBI NO: 33413898 NR Description: S-adenosyl-L-methionine:coclaurine
  misc_feature (27)..(380): Homolog of NCBI NO: 16754879 NR Description: coclaurine N-methyltransferase [Coptis japonica]
  misc_feature (92)..(380): Homolog of NCBI NO: 7486450 NR Description: hypothetical protein F4I10.50 - Arabidopsis
  misc_feature (33)..(380): Homolog of NCBI NO: 30689611 NR Description: expressed protein [Arabidopsis thaliana]
  misc_feature (33)..(380): Homolog of NCBI NO: 26451688 NR Description: unknown protein [Arabidopsis thaliana]
  misc_feature (33)..(380): Homolog of NCBI NO: 21593795 NR Description: coclaurine N-methyltransferase [Arabidopsis
  misc_feature (33)..(380): Homolog of NCBI NO: 18418151 NR Description: expressed protein [Arabidopsis thaliana]
RKQTAAQHKFLAAASSRAPEASKMAAAAVAARAYEAAARSALAALERNLLPDAVTRRLTRLLLAQRLRLGYLPSAPLQLQDLILFAHSLEGMPIAIETDTAKTQHYELPTTFFKLVLGKNLKYSSCYFPDDSSTLEDAEVAMLELYCERAQLQDGQSVLDVGCGWGSLSVYIAKKYRNCNITGICNSTTQKAFIEEQCRENELSNVEIIVADISKFEMERSFDRIISIEMFEHMKNYKALLKKISRWMKEDSLLFVHYFCHKTFAYHFEDKNDDDWITRYFFTGGTMPSANLLLYFQEDVSVVNHWLVSGTHYARTSEEWLKRMDKNIAAIRPIFEKTYGRESATKWIAYWRTFFISVAELFGYNNGDEWMVAHHLFRKK

SEQ ID NO: 65420 - protein, 357 aa, Triticum aestivum
  peptide (1)..(357): Ceres Seq. ID no. 15224697
  misc_feature (186)..(356): Pfam Name: Cyclopropane-fatty-acyl-phospholipid synthase Pfam Description: Cyclopropane-fatty-acyl-phospholipid synthase
  misc_feature (1)..(357): Homolog of NCBI NO: 21242125 NR Description: conserved hypothetical protein
  misc_feature (1)..(357): Homolog of NCBI NO: 21230783 NR Description: conserved hypothetical protein
  misc_feature (23)..(357): Homolog of NCBI NO: 22988437 NR Description: COG2230: Cyclopropane fatty acid synthase and
  misc_feature (14)..(357): Homolog of NCBI NO: 33413898 NR Description: S-adenosyl-L-methionine:coclaurine
  misc_feature (4)..(357): Homolog of NCBI NO: 16754879 NR Description: coclaurine N-methyltransferase [Coptis japonica]
  misc_feature (69)..(357): Homolog of NCBI NO: 7486450 NR Description: hypothetical protein F4I10.50 - Arabidopsis
  misc_feature (10)..(357): Homolog of NCBI NO: 30689611 NR Description: expressed protein [Arabidopsis thaliana]
  misc_feature (10)..(357): Homolog of NCBI NO: 26451688 NR Description: unknown protein [Arabidopsis thaliana]
  misc_feature (10)..(357): Homolog of NCBI NO: 21593795 NR Description: coclaurine N-methyltransferase [Arabidopsis
  misc_feature (10)..(357): Homolog of NCBI NO: 18418151 NR Description: expressed protein [Arabidopsis thaliana]
MAAAAVAARAYEAAARSALAALERNLLPDAVTRRLTRLLLAQRLRLGYLPSAPLQLQDLILFAHSLEGMPIAIETDTAKTQHYELPTTFFKLVLGKNLKYSSCYFPDDSSTLEDAEVAMLELYCERAQLQDGQSVLDVGCGWGSLSVYIAKKYRNCNITGICNSTTQKAFIEEQCRENELSNVEIIVADISKFEMERSFDRIISIEMFEHMKNYKALLKKISRWMKEDSLLFVHYFCHKTFAYHFEDKNDDDWITRYFFTGGTMPSANLLLYFQEDVSVVNHWLVSGTHYARTSEEWLKRMDKNIAAIRPIFEKTYGRESATKWIAYWRTFFISVAELFGYNNGDEWMVAHHLFRKK

SEQ ID NO: 65421 - protein, 289 aa, Triticum aestivum
  peptide (1)..(289): Ceres Seq. ID no. 15224698
  misc_feature (118)..(288): Pfam Name: Cyclopropane-fatty-acyl-phospholipid synthase Pfam Description: Cyclopropane-fatty-acyl-phospholipid synthase
  misc_feature (1)..(289): Homolog of NCBI NO: 21242125 NR Description: conserved hypothetical protein
  misc_feature (1)..(289): Homolog of NCBI NO: 21230783 NR Description: conserved hypothetical protein
  misc_feature (1)..(289): Homolog of NCBI NO: 22988437 NR Description: COG2230: Cyclopropane fatty acid synthase and
  misc_feature (1)..(289): Homolog of NCBI NO: 33413898 NR Description: S-adenosyl-L-methionine:coclaurine
  misc_feature (1)..(289): Homolog of NCBI NO: 16754879 NR Description: coclaurine N-methyltransferase [Coptis japonica]
  misc_feature (1)..(289): Homolog of NCBI NO: 7486450 NR Description: hypothetical protein F4I10.50 - Arabidopsis
  misc_feature (1)..(289): Homolog of NCBI NO: 30689611 NR Description: expressed protein [Arabidopsis thaliana]
  misc_feature (1)..(289): Homolog of NCBI NO: 21593795 NR Description: coclaurine N-methyltransferase [Arabidopsis
  misc_feature (1)..(289): Homolog of NCBI NO: 26451688 NR Description: unknown protein [Arabidopsis thaliana]
  misc_feature (1)..(289): Homolog of NCBI NO: 18418151 NR Description: expressed protein [Arabidopsis thaliana]
MPIAIETDTAKTQHYELPTTFFKLVLGKNLKYSSCYFPDDSSTLEDAEVAMLELYCERAQLQDGQSVLDVGCGWGSLSVYIAKKYRNCNITGICNSTTQKAFIEEQCRENELSNVEIIVADISKFEMERSFDRIISIEMFEHMKNYKALLKKISRWMKEDSLLFVHYFCHKTFAYHFEDKNDDDWITRYFFTGGTMPSANLLLYFQEDVSVVNHWLVSGTHYARTSEEWLKRMDKNIAAIRPIFEKTYGRESATKWIAYWRTFFISVAELFGYNNGDEWMVAHHLFRKK

SEQ ID NO: 65422 - DNA, 1617 bp, Triticum aestivum
  misc_feature (1)..(1617): Ceres Seq. ID no. 13662880
cccacatcgtatcagtcccagctatcgcacacacctgcaacggccagctcaggagcgggcaagaagagaagacatttattttcttccctcgcgggagatcgatcacagccgggcagccatgggcgaggaggccccggccgcggtcaccgcggcggcgacgtcgccggcgccccacttgctcctcatatgcttcccggggcagggccacgtcaaccccatgctccgcctcgccaagcgcttcgcggccaagggcctcctggtcaccttctcctcgacctcctacgttggaggcaagatcacggcctcctccggggtggaggctggcggcgacggcgtgccgctcggccgcggccgcatccggttcgagttcttggacgacgatttcgacgggaatgacctcgacgacctgatgaggcacctggagacgactggccccgtggtgttcgcggagctgctgaggcgccaggaggaggcggggcggcctgtgacgtgcgtcgtcgggaacccgttcctcccgtgggcgatcgacgtcgcccacgacgccggcatccccacggcagtgctgtgggtgcagtcgtgcgcggtgttctcgctctactaccaccacgtgcacgggctcgtggagttcccgcccgaggacgacctcgacgcccgggtcaacctcccgggcctcccggcgctgtccgtcgccgacgtgccgtcgttcctgctgccgtccaacccctacaagctcctcaccgatgcgatactgaagcagttccgcaccatccacaaggcgtcgtgggtgttcgtcaactccttctacgagctggagcccgacgtggtggacgcgctcccgggcatctcgccgccgccgccgccgctcatccccgtgggcccgctcgtcgagctggaggaggagggcgccgtgcgcggcgacatgatcaaggcggcggacgactgcgtggggtggctggacgcgcaggcgccgcgctccgtcgtgtacgcgtcgctcggcagcgtcgtggtgctgtccgccgaggagctggccgagatggcgcacgggctcgcgtccaccggccgccccttcctgtgggtggttcggccggactgcagcgcgatgctcccggaggggtacctggactccgtcgccgggcgcggcatggtggtgccgtggagcccgcaggacctggtgctcgcgcacccgtccacggcgtgcttcctcacgcactgcggctggaactccacgctggagacgctcgcggcggggcttcccgtggtggcgttcccgcagtggggcgaccagtgcacggacgccaagtacctcgtggaggagttcaagatgggggtgcgcatcggcacgccgctgcggagggactccgtgcgcgacgccgtggaggacgtcgtggccgggccggacgccggcgcgatgctcgagaaggccagagcgtggtgcgcggcggcgaggacggcggtggcggccggcgggtcgtcggaccgccacgtacaggcgtttgttgaccaggttgtggcgggaaccattggcgcacgagcagataaggacattgtggctgcggagcagcaaggtttcgattcatcttctctacgtggaaactaaggattatttcggccatctcc

SEQ ID NO: 65423 - protein, 531 aa, Triticum aestivum
  peptide (1)..(531): Ceres Seq. ID no. 13662881
  misc_feature (57)..(508): Homolog of NCBI NO: 15233091 NR Description: UDP-glucosyltransferase, putative [Arabidopsis
  misc_feature (52)..(502): Homolog of NCBI NO: 9794913 NR Description: UDP-glucose:sinapate glucosyltransferase
  misc_feature (58)..(503): Homolog of NCBI NO: 21593030 NR Description: indole-3-acetate beta-glucosyltransferase like
  misc_feature (52)..(505): Homolog of NCBI NO: 34911272 NR Description: limonoid UDP-glucosyltransferase-like protein
  misc_feature (58)..(503): Homolog of NCBI NO: 15234616 NR Description: UDP-glycosyltransferase, putative [Arabidopsis
  misc_feature (54)..(505): Homolog of NCBI NO: 25082972 NR Description: indole-3-acetate beta-glucosyltransferase like
  misc_feature (54)..(505): Homolog of NCBI NO: 30683281 NR Description: UDP-glycosyltransferase family [Arabidopsis
  misc_feature (54)..(505): Homolog of NCBI NO: 7433899 NR Description: probable indole-3-acetate
  misc_feature (58)..(502): Homolog of NCBI NO: 28628183 NR Description: UDP-glucosyl transferase [Fragaria x ananassa]
  misc_feature (53)..(502): Homolog of NCBI NO: 13431605 NR Description: Limonoid UDP-glucosyltransferase (Limonoid
PHRISPSYRTHLQRPAQERARREDIYFLPSREIDHSRAAMGEEAPAAVTAAATSPAPHLLLICFPGQGHVNPMLRLAKRFAAKGLLVTFSSTSYVGGKITASSGVEAGGDGVPLGRGRIRFEFLDDDFDGNDLDDLMRHLETTGPVVFAELLRRQEEAGRPVTCVVGNPFLPWAIDVAHDAGIPTAVLWVQSCAVFSLYYHHVHGLVEFPPEDDLDARVNLPGLPALSVADVPSFLLPSNPYKLLTDAILKQFRTIHKASWVFVNSFYELEPDVVDALPGISPPPPPLIPVGPLVELEEEGAVRGDMIKAADDCVGWLDAQAPRSVVYASLGSVVVLSAEELAEMAHGLASTGRPFLWVVRPDCSAMLPEGYLDSVAGRGMVVPWSPQDLVLAHPSTACFLTHCGWNSTLETLAAGLPVVAFPQWGDQCTDAKYLVEEFKMGVRIGTPLRRDSVRDAVEDVVAGPDAGAMLEKARAWCAAARTAVAAGGSSDRHVQAFVDQVVAGTIGARADKDIVAAEQQGFDSSSLRGN

SEQ ID NO: 65424 - protein, 492 aa, Triticum aestivum
  peptide (1)..(492): Ceres Seq. ID no. 13662882
  misc_feature (18)..(469): Homolog of NCBI NO: 15233091 NR Description: UDP-glucosyltransferase, putative [Arabidopsis
  misc_feature (13)..(463): Homolog of NCBI NO: 9794913 NR Description: UDP-glucose:sinapate glucosyltransferase
  misc_feature (19)..(464): Homolog of NCBI NO: 21593030 NR Description: indole-3-acetate beta-glucosyltransferase like
  misc_feature (13)..(466): Homolog of NCBI NO: 34911272 NR Description: limonoid UDP-glucosyltransferase-like protein
  misc_feature (19)..(464): Homolog of NCBI NO: 15234616 NR Description: UDP-glycosyltransferase, putative [Arabidopsis
  misc_feature (15)..(466): Homolog of NCBI NO: 25082972 NR Description: indole-3-acetate beta-glucosyltransferase like
  misc_feature (15)..(466): Homolog of NCBI NO: 30683281 NR Description: UDP-glycosyltransferase family [Arabidopsis
  misc_feature (15)..(466): Homolog of NCBI NO: 7433899 NR Description: probable indole-3-acetate
  misc_feature (19)..(463): Homolog of NCBI NO: 28628183 NR Description: UDP-glucosyl transferase [Fragaria x ananassa]
  misc_feature (14)..(463): Homolog of NCBI NO: 13431605 NR Description: Limonoid UDP-glucosyltransferase (Limonoid
MGEEAPAAVTAAATSPAPHLLLICFPGQGHVNPMLRLAKRFAAKGLLVTFSSTSYVGGKITASSGVEAGGDGVPLGRGRIRFEFLDDDFDGNDLDDLMRHLETTGPVVFAELLRRQEEAGRPVTCVVGNPFLPWAIDVAHDAGIPTAVLWVQSCAVFSLYYHHVHGLVEFPPEDDLDARVNLPGLPALSVADVPSFLLPSNPYKLLTDAILKQFRTIHKASWVFVNSFYELEPDVVDALPGISPPPPPLIPVGPLVELEEEGAVRGDMIKAADDCVGWLDAQAPRSVVYASLGSVVVLSAEELAEMAHGLASTGRPFLWVVRPDCSAMLPEGYLDSVAGRGMVVPWSPQDLVLAHPSTACFLTHCGWNSTLETLAAGLPVVAFPQWGDQCTDAKYLVEEFKMGVRIGTPLRRDSVRDAVEDVVAGPDAGAMLEKARAWCAAARTAVAAGGSSDRHVQAFVDQVVAGTIGARADKDIVAAEQQGFDSSSLRGN

SEQ ID NO: 65425 - protein, 459 aa, Triticum aestivum
  peptide (1)..(459): Ceres Seq. ID no. 13662883
  misc_feature (1)..(436): Homolog of NCBI NO: 15233091 NR Description: UDP-glucosyltransferase, putative [Arabidopsis
  misc_feature (1)..(430): Homolog of NCBI NO: 9794913 NR Description: UDP-glucose:sinapate glucosyltransferase
  misc_feature (1)..(431): Homolog of NCBI NO: 21593030 NR Description: indole-3-acetate beta-glucosyltransferase like
  misc_feature (1)..(433): Homolog of NCBI NO: 34911272 NR Description: limonoid UDP-glucosyltransferase-like protein
  misc_feature (1)..(431): Homolog of NCBI NO: 15234616 NR Description: UDP-glycosyltransferase, putative [Arabidopsis
  misc_feature (1)..(433): Homolog of NCBI NO: 25082972 NR Description: indole-3-acetate beta-glucosyltransferase like
  misc_feature (1)..(433): Homolog of NCBI NO: 30683281 NR Description: UDP-glycosyltransferase family [Arabidopsis
  misc_feature (1)..(433): Homolog of NCBI NO: 7433899 NR Description: probable indole-3-acetate
  misc_feature (1)..(430): Homolog of NCBI NO: 28628183 NR Description: UDP-glucosyl transferase [Fragaria x ananassa]
  misc_feature (1)..(430): Homolog of NCBI NO: 13431605 NR Description: Limonoid UDP-glucosyltransferase (Limonoid
MLRLAKRFAAKGLLVTFSSTSYVGGKITASSGVEAGGDGVPLGRGRIRFEFLDDDFDGNDLDDLMRHLETTGPVVFAELLRRQEEAGRPVTCVVGNPFLPWAIDVAHDAGIPTAVLWVQSCAVFSLYYHHVHGLVEFPPEDDLDARVNLPGLPALSVADVPSFLLPSNPYKLLTDAILKQFRTIHKASWVFVNSFYELEPDVVDALPGISPPPPPLIPVGPLVELEEEGAVRGDMIKAADDCVGWLDAQAPRSVVYASLGSVVVLSAEELAEMAHGLASTGRPFLWVVRPDCSAMLPEGYLDSVAGRGMVVPWSPQDLVLAHPSTACFLTHCGWNSTLETLAAGLPVVAFPQWGDQCTDAKYLVEEFKMGVRIGTPLRRDSVRDAVEDVVAGPDAGAMLEKARAWCAAARTAVAAGGSSDRHVQAFVDQVVAGTIGARADKDIVAAEQQGFDSSSLRGN

SEQ ID NO: 65426 - DNA, 1619 bp, Triticum aestivum
  misc_feature (1)..(1619): Ceres Seq. ID no. 13597624
agcgaaaagccgggctccaaaatccccaatctgctccaggtggtcaaaccattccaccattccccggcgcaccaccatggcagcatccccgccggcgatcctggacgagctcttcgaagagatcctcctccgcctcccgcccgacgacccagcctgcctcctccgcgcctccctcgtctgcaaggcctggggttgcgccgtctcccgcccccacttccgccgccgcctccacgagctccaccgggcgcccccggtgctcggcctcctgcacgacctggaagacgagcgcatcccacgattcatccccaccaccgcgtcgtccttctccctcaccgctccgcacaaccggtactggcggaccctcgactgccgccacggccgcgccctcttcctctccaacccccagtccccggaaacccaggagcttctcgtgtgggagccaatcacgggtgcccagcagcgcataccggtgcccgcggcgctcgagagcaacttccccatggcggccgtgttctgcgcagcggacgggtgcgaccaccgcgcctgcctcgggggccctttccgcgtgctcttcatcctctcggtcgtggtaggccaagtcactgacgacgactgctatctcacgtcggcgtgcgcatattcgtcggagactggcacctggggcgagccgacctcgttgccccgccgctcgcccatgcccatgtgctttacattttattccagtgtgctcgttggaaagtctctgctctatttcatgtctgatgatgcgttcattctcgagtgtgacttggcaaggcacagactggctgtgttcaacccaccaaaccatgagccggtctgcggccaatataccatcatgctggcggaggacggtggactgggagtttgccaaaggatggatcagcagctcaaattgtggtcaagggaggtgagtgacagtgttgaagcacgatgggtgctgagccgggtcgtctacctggaaaatttgctcccggttggtgctctcgtggatgcagagactagagtgcaagtgctgggctttgccgagggagcaaataccattttcctaaccacggttgatggcatcttcatgatcaaactgcaatcggagcgggcgaggagggtgtgcgatgaatccgatgatcatctcttttgttatttgattccggttgtcagcttctacactcctgtgcctcgaggtgagcacagggatccgtcgttgaagcatagtgaggatgcaggtggtgaggagaaaacagtatatcaggcacaacaattgatcaacaaaatgagtcaaatgttaccaggggggactttgtcaacgctttcgattgcatcaaccacgccatagagaacagggttccaccctattatgaagttgctcctgagtgtaccagcatggtttacggacattgatgcagcttgctataggaagaatccatgaagacttcagccagcaaagaagatgctaggaactcaaaagacctcaggtagcaatgttaatgatgctccaccttcagagaaaaggtgattctgaataatgtgttgtatataccactgatccttttgccccagaggcccagacctgtgtggctaaatactcaaaattttcattatcc

SEQ ID NO: 65427 - protein, 449 aa, Triticum aestivum
  peptide (1)..(449): Ceres Seq. ID no. 15222150
  misc_feature (30)..(75): Pfam Name: F-box domain Pfam Description: F-box domain
  misc_feature (26)..(130): Homolog of NCBI NO: 34394502 NR Description: hypothetical protein [Oryza sativa (japonica
  misc_feature (168)..(396): Homolog of NCBI NO: 34394502 NR Description: hypothetical protein [Oryza sativa (japonica
  misc_feature (28)..(129): Homolog of NCBI NO: 35215058 NR Description: hypothetical protein [Oryza sativa (japonica
  misc_feature (92)..(396): Homolog of NCBI NO: 35215058 NR Description: hypothetical protein [Oryza sativa (japonica
  misc_feature (29)..(396): Homolog of NCBI NO: 34394503 NR Description: unknown protein [Oryza sativa (japonica
  misc_feature (26)..(395): Homolog of NCBI NO: 33146558 NR Description: unknown protein [Oryza sativa (japonica
  misc_feature (29)..(416): Homolog of NCBI NO: 34914028 NR Description: OJ1014_G12.29 [Oryza sativa (japonica
  misc_feature (26)..(406): Homolog of NCBI NO: 34915424 NR Description: hypothetical protein~similar to Oryza sativa
  misc_feature (26)..(400): Homolog of NCBI NO: 34395380 NR Description: unknown protein [Oryza sativa (japonica
  misc_feature (28)..(406): Homolog of NCBI NO: 34915420 NR Description: contains EST C98814(E3124)~similar to Oryza
AKSRAPKSPICSRWSNHSTIPRRTTMAASPPAILDELFEEILLRLPPDDPACLLRASLVCKAWGCAVSRPHFRRRLHELHRAPPVLGLLHDLEDERIPRFIPTTASSFSLTAPHNRYWRTLDCRHGRALFLSNPQSPETQELLVWEPITGAQQRIPVPAALESNFPMAAVFCAADGCDHRACLGGPFRVLFILSVVVGQVTDDDCYLTSACAYSSETGTWGEPTSLPRRSPMPMCFTFYSSVLVGKSLLYFMSDDAFILECDLARHRLAVFNPPNHEPVCGQYTIMLAEDGGLGVCQRMDQQLKLWSREVSDSVEARWVLSRVVYLENLLPVGALVDAETRVQVLGFAEGANTIFLTTVDGIFMIKLQSERARRVCDESDDHLFCYLIPVVSFYTPVPRGEHRDPSLKHSEDAGGEEKTVYQAQQLINKMSQMLPGGTLSTLSIASTTP

SEQ ID NO: 65428 - protein, 424 aa, Triticum aestivum
  peptide (1)..(424): Ceres Seq. ID no. 15222151
  misc_feature (5)..(50): Pfam Name: F-box domain Pfam Description: F-box domain
  misc_feature (1)..(105): Homolog of NCBI NO: 34394502 NR Description: hypothetical protein [Oryza sativa (japonica
  misc_feature (143)..(371): Homolog of NCBI NO: 34394502 NR Description: hypothetical protein [Oryza sativa (japonica
  misc_feature (3)..(104): Homolog of NCBI NO: 35215058 NR Description: hypothetical protein [Oryza sativa (japonica
  misc_feature (67)..(371): Homolog of NCBI NO: 35215058 NR Description: hypothetical protein [Oryza sativa (japonica
  misc_feature (4)..(371): Homolog of NCBI NO: 34394503 NR Description: unknown protein [Oryza sativa (japonica
  misc_feature (1)..(370): Homolog of NCBI NO: 33146558 NR Description: unknown protein [Oryza sativa (japonica
  misc_feature (4)..(391): Homolog of NCBI NO: 34914028 NR Description: OJ1014_G12.29 [Oryza sativa (japonica
  misc_feature (1)..(381): Homolog of NCBI NO: 34915424 NR Description: hypothetical protein~similar to Oryza sativa
  misc_feature (1)..(375): Homolog of NCBI NO: 34395380 NR Description: unknown protein [Oryza sativa (japonica
  misc_feature (3)..(381): Homolog of NCBI NO: 34915420 NR Description: contains EST C98814(E3124)~similar to Oryza
MAASPPAILDELFEEILLRLPPDDPACLLRASLVCKAWGCAVSRPHFRRRLHELHRAPPVLGLLHDLEDERIPRFIPTTASSFSLTAPHNRYWRTLDCRHGRALFLSNPQSPETQELLVWEPITGAQQRIPVPAALESNFPMAAVFCAADGCDHRACLGGPFRVLFILSVVVGQVTDDDCYLTSACAYSSETGTWGEPTSLPRRSPMPMCFTFYSSVLVGKSLLYFMSDDAFILECDLARHRLAVFNPPNHEPVCGQYTIMLAEDGGLGVCQRMDQQLKLWSREVSDSVEARWVLSRVVYLENLLPVGALVDAETRVQVLGFAEGANTIFLTTVDGIFMIKLQSERARRVCDESDDHLFCYLIPVVSFYTPVPRGEHRDPSLKHSEDAGGEEKTVYQAQQLINKMSQMLPGGTLSTLSIASTTP

SEQ ID NO: 65429 - protein, 283 aa, Triticum aestivum
  peptide (1)..(283): Ceres Seq. ID no. 15222152
  misc_feature (1)..(230): Homolog of NCBI NO: 34394504 NR Description: unknown protein [Oryza sativa (japonica
  misc_feature (1)..(230): Homolog of NCBI NO: 37531026 NR Description: hypothetical protein [Oryza sativa (japonica
  misc_feature (2)..(230): Homolog of NCBI NO: 34394502 NR Description: hypothetical protein [Oryza sativa (japonica
  misc_feature (1)..(230): Homolog of NCBI NO: 35215058 NR Description: hypothetical protein [Oryza sativa (japonica
  misc_feature (1)..(230): Homolog of NCBI NO: 34394503 NR Description: unknown protein [Oryza sativa (japonica
  misc_feature (1)..(229): Homolog of NCBI NO: 33146558 NR Description: unknown protein [Oryza sativa (japonica
  misc_feature (1)..(250): Homolog of NCBI NO: 34914028 NR Description: OJ1014_G12.29 [Oryza sativa (japonica
  misc_feature (1)..(240): Homolog of NCBI NO: 34915424 NR Description: hypothetical protein~similar to Oryza sativa
  misc_feature (1)..(234): Homolog of NCBI NO: 34395380 NR Description: unknown protein [Oryza sativa (japonica
  misc_feature (1)..(240): Homolog of NCBI NO: 34915420 NR Description: contains EST C98814(E3124)~similar to Oryza
MAAVFCAADGCDHRACLGGPFRVLFILSVVVGQVTDDDCYLTSACAYSSETGTWGEPTSLPRRSPMPMCFTFYSSVLVGKSLLYFMSDDAFILECDLARHRLAVFNPPNHEPVCGQYTIMLAEDGGLGVCQRMDQQLKLWSREVSDSVEARWVLSRVVYLENLLPVGALVDAETRVQVLGFAEGANTIFLTTVDGIFMIKLQSERARRVCDESDDHLFCYLIPVVSFYTPVPRGEHRDPSLKHSEDAGGEEKTVYQAQQLINKMSQMLPGGTLSTLSIASTTP

SEQ ID NO: 65430 - DNA, 1335 bp, Triticum aestivum
  misc_feature (1)..(1335): Ceres Seq. ID no. 13597721
ctaaaaccctagctccaccaccacccacctaaaacccgccgccgccaccgccaccgccgttccccttcttccccgccaccgggagatcctggccatcgggtctccttccttcctccgaggatcaaagttcaggttggcgccaacatgtcgtcgaagaagatagagctagaccacaaggacatggttcatgattctgccattgactattatgggaagcgccttgccacagcctcctctgactccactgtgaagatcaccaacattgggagtgcatctgccccgtcccagctcgttgcgaccctcactggccactatggtcctgtgtggcgtgttggatgggcccatcccaagtatggttccattctcgcatcctgcggctatgatggccgtgtgatagtctggaaggaggctgccactgggcaatggtctcagctccatgtgtttgacaaccacaaggcctcagttaactccattgcttgggctccatatgaacttggcctttgccttgcctgtgggtcttctgacggcaccatctctgtcatctccatgcggcttgatacaggaggatgtgacgctgcaaccattgagcgggcacaccctgttggcgtgacagcagtctcctgggctccggcagcagcacttgggtccatggttggctcagatcagctcgtccacaagatcgtgtctggtggctttgactgtgtcgtcaaggtgtgggagtttgtcaatggtggctggaagctggagagtgctttggtctctgacatgcacaaagagtgcgtgagagacgtctcatgggcaccggtcctgggcctggcaaagtcaaccatcgccagtgcttcccaagacggcaaggttgtcatctggaccagtggcaaaggaggaggcaagtgggaaggaaagctcatgcgtgactttgaggctccggtgtggagggtgtcctggtccctgacgggaaacatactgtctgtggctgccggcgagggcgacattactctgtggaaggaatcgtcggacgggcagtgggagtcgctgtggaccaaggcctcagaggagccgccgcaggaggagcaggcgatcgaggaggccatgcagtaggggagtcgacgccacatctcccgtgttgattttggaccatgattcgtgtttctagcgccaacgccatgacttgctttcacctgctgccctgatactcttagagatactcgttgccatcttttttgccgtttgtttctatatggacaatgtctgattgcactgtttaagttttatactggtcatgtactcttatgcacaccgtcagaatgtatcgcctgtttgaactgtttatatcct

SEQ ID NO: 65431 - protein, 317 aa, Triticum aestivum
  peptide (1)..(317): Ceres Seq. ID no. 13597722
  misc_feature (6)..(294): Homolog of NCBI NO: 12805321 NR Description: SEC13 related gene [Mus musculus]
  misc_feature (6)..(294): Homolog of NCBI NO: 27696242 NR Description: Similar to RIKEN cDNA 1110003H02 gene [Xenopus
  misc_feature (6)..(294): Homolog of NCBI NO: 38174439 NR Description: Unknown (protein for MGC:76017) [Silurana
  misc_feature (1)..(299): Homolog of NCBI NO: 18147582 NR Description: Sec13p [Oryza sativa]
  misc_feature (1)..(297): Homolog of NCBI NO: 21593236 NR Description: transport protein SEC13, putative [Arabidopsis
  misc_feature (1)..(297): Homolog of NCBI NO: 21593146 NR Description: putative protein transport protein SEC13
  misc_feature (1)..(297): Homolog of NCBI NO: 15232095 NR Description: protein transport protein SEC13 family / WD-40
  misc_feature (1)..(297): Homolog of NCBI NO: 15227692 NR Description: transducin / WD-40 repeat protein family
  misc_feature (1)..(317): Homolog of NCBI NO: 34393220 NR Description: putative Sec13p [Oryza sativa (japonica
  misc_feature (1)..(305): Homolog of NCBI NO: 34897242 NR Description: putative coat protein complex II (COPII)
MSSKKIELDHKDMVHDSAIDYYGKRLATASSDSTVKITNIGSASAPSQLVATLTGHYGPVWRVGWAHPKYGSILASCGYDGRVIVWKEAATGQWSQLHVFDNHKASVNSIAWAPYELGLCLACGSSDGTISVISMRLDTGGCDAATIERAHPVGVTAVSWAPAAALGSMVGSDQLVHKIVSGGFDCVVKVWEFVNGGWKLESALVSDMHKECVRDVSWAPVLGLAKSTIASASQDGKVVIWTSGKGGGKWEGKLMRDFEAPVWRVSWSLTGNILSVAAGEGDITLWKESSDGQWESLWTKASEEPPQEEQAIEEAMQ

SEQ ID NO: 65432 - protein, 305 aa, Triticum aestivum
  peptide (1)..(305): Ceres Seq. ID no. 13597723
  misc_feature (1)..(282): Homolog of NCBI NO: 12805321 NR Description: SEC13 related gene [Mus musculus]
  misc_feature (1)..(282): Homolog of NCBI NO: 27696242 NR Description: Similar to RIKEN cDNA 1110003H02 gene [Xenopus
  misc_feature (1)..(282): Homolog of NCBI NO: 38174439 NR Description: Unknown (protein for MGC:76017) [Silurana
  misc_feature (1)..(287): Homolog of NCBI NO: 18147582 NR Description: Sec13p [Oryza sativa]
  misc_feature (1)..(285): Homolog of NCBI NO: 21593236 NR Description: transport protein SEC13, putative [Arabidopsis
  misc_feature (1)..(285): Homolog of NCBI NO: 21593146 NR Description: putative protein transport protein SEC13
  misc_feature (1)..(285): Homolog of NCBI NO: 15232095 NR Description: protein transport protein SEC13 family / WD-40
  misc_feature (1)..(285): Homolog of NCBI NO: 15227692 NR Description: transducin / WD-40 repeat protein family
  misc_feature (1)..(305): Homolog of NCBI NO: 34393220 NR Description: putative Sec13p [Oryza sativa (japonica
  misc_feature (1)..(293): Homolog of NCBI NO: 34897242 NR Description: putative coat protein complex II (COPII)
MVHDSAIDYYGKRLATASSDSTVKITNIGSASAPSQLVATLTGHYGPVWRVGWAHPKYGSILASCGYDGRVIVWKEAATGQWSQLHVFDNHKASVNSIAWAPYELGLCLACGSSDGTISVISMRLDTGGCDAATIERAHPVGVTAVSWAPAAALGSMVGSDQLVHKIVSGGFDCVVKVWEFVNGGWKLESALVSDMHKECVRDVSWAPVLGLAKSTIASASQDGKVVIWTSGKGGGKWEGKLMRDFEAPVWRVSWSLTGNILSVAAGEGDITLWKESSDGQWESLWTKASEEPPQEEQAIEEAMQ

SEQ ID NO: 65433 - protein, 183 aa, Triticum aestivum
  peptide (1)..(183): Ceres Seq. ID no. 13597724
  misc_feature (1)..(160): Homolog of NCBI NO: 12805321 NR Description: SEC13 related gene [Mus musculus]
  misc_feature (1)..(160): Homolog of NCBI NO: 27696242 NR Description: Similar to RIKEN cDNA 1110003H02 gene [Xenopus
  misc_feature (1)..(160): Homolog of NCBI NO: 38174439 NR Description: Unknown (protein for MGC:76017) [Silurana
  misc_feature (1)..(165): Homolog of NCBI NO: 18147582 NR Description: Sec13p [Oryza sativa]
  misc_feature (1)..(163): Homolog of NCBI NO: 21593236 NR Description: transport protein SEC13, putative [Arabidopsis
  misc_feature (1)..(163): Homolog of NCBI NO: 21593146 NR Description: putative protein transport protein SEC13
  misc_feature (1)..(163): Homolog of NCBI NO: 15232095 NR Description: protein transport protein SEC13 family / WD-40
  misc_feature (1)..(163): Homolog of NCBI NO: 15227692 NR Description: transducin / WD-40 repeat protein family
  misc_feature (1)..(183): Homolog of NCBI NO: 34393220 NR Description: putative Sec13p [Oryza sativa (japonica
  misc_feature (1)..(171): Homolog of NCBI NO: 34897242 NR Description: putative coat protein complex II (COPII)
MRLDTGGCDAATIERAHPVGVTAVSWAPAAALGSMVGSDQLVHKIVSGGFDCVVKVWEFVNGGWKLESALVSDMHKECVRDVSWAPVLGLAKSTIASASQDGKVVIWTSGKGGGKWEGKLMRDFEAPVWRVSWSLTGNILSVAAGEGDITLWKESSDGQWESLWTKASEEPPQEEQAIEEAMQ

SEQ ID NO: 65434 - DNA, 1226 bp, Triticum aestivum
  misc_feature (1)..(1226): Ceres Seq. ID no. 13598570
atcaggcaccacccaagatcgatcatgaagccatacatgcccacggtactgagaccccctagggtggtggccatcctggccgtggtcctggcggcggcgctcgccacagccgtgaacgctcagcagtgcggctcccaggctggtggcgcgacgtgcgcaaactgtctctgctgcagcaaattcgggtactgcggcagcggcgacgcctactgcggtgccggctgtcagagccagtgcagcggctgcggccccacccctcccggccccagccccggcgggggcgtgtcgtccatcatctccagggacctcttcgagcggctccttcttcaccgcaatgactgccaagaggcccgcgggttctacacgtacgacgccttcctcgccgccgccgccgcgttcccgtcattcggcaccacggggagcacggagacgcggaagcgggaggtggcggccttcctggggcaaacttcccacgagaccactggcgggtggcccgcggcgcccgacggaccgtacgcctggggctactgcttcaagcaggagcagggctcgccgggaagctactgcgagccaaagccggagtggccgtgcgcgtcgggcaagaaatactacggtcgcggccccatccagctctcatggaactacaactatggccccgcggggcgtgccatcggggtggacctgctcaacaacccggacctggtcgccgcggacgcgacggtgtcgtttaagacggcgttatggttttggatgacggctcaggcgaacaagccgtcgtcccatgccgtgatcacaggccaatggaccccgtcgggcacggacaacgctgctggtcgggtgcctgggtacggtgtcatcaccaacataatcaacggcgggctcgagtgcggtagggggcaagatgaccgtgttgctaaccggatcgggttctacaagcgctactgcgatgtcctcggcgttggctatggtaacaacctcgactgctacaaccagaggccgtttaacagtgggctctcgatggggcttgccactgagtgacaacatactaagactgtgagcgagtcctccatgcatggatgtatgaatgtgatcacccataaataagcttgagaagtactgtttgggtaaatttcccattgttgtgtgagtatctctcgactcggtgtagaggttgagaatgttgcatctttattaaaaggactttgctacacctacgtaatttagct

SEQ ID NO: 65435 - protein, 345 aa, Triticum aestivum
  peptide (1)..(345): Ceres Seq. ID no. 13598571
  misc_feature (40)..(79): Pfam Name: Chitin recognition protein Pfam Description: Chitin recognition protein
  misc_feature (21)..(334): Homolog of NCBI NO: 12407647 NR Description: 31.7 kDa class I endochitinase-antifreeze protein
  misc_feature (41)..(334): Homolog of NCBI NO: 741317 NR Description: chitinase a
  misc_feature (41)..(334): Homolog of NCBI NO: 542173 NR Description: chitinase (EC 3.2.1.14) a - rye
  misc_feature (25)..(334): Homolog of NCBI NO: 2506281 NR Description: 26 kDa endochitinase 1 precursor
  misc_feature (15)..(339): Homolog of NCBI NO: 18146827 NR Description: chitinase 2 [Triticum aestivum]
  misc_feature (26)..(334): Homolog of NCBI NO: 11344587 NR Description: seed chitinase-a [Secale cereale]
  misc_feature (25)..(336): Homolog of NCBI NO: 6164588 NR Description: chitinase [Poa pratensis]
  misc_feature (24)..(345): Homolog of NCBI NO: 1076740 NR Description: chitinase (EC 3.2.1.14) - rice
  misc_feature (21)..(345): Homolog of NCBI NO: 481896 NR Description: chitinase (EC 3.2.1.14) - rice
  misc_feature (19)..(345): Homolog of NCBI NO: 7435361 NR Description: probable chitinase (EC 3.2.1.14) - barley
IRHHPRSIMKPYMPTVLRPPRVVAILAVVLAAALATAVNAQQCGSQAGGATCANCLCCSKFGYCGSGDAYCGAGCQSQCSGCGPTPPGPSPGGGVSSIISRDLFERLLLHRNDCQEARGFYTYDAFLAAAAAFPSFGTTGSTETRKREVAAFLGQTSHETTGGWPAAPDGPYAWGYCFKQEQGSPGSYCEPKPEWPCASGKKYYGRGPIQLSWNYNYGPAGRAIGVDLLNNPDLVAADATVSFKTALWFWMTAQANKPSSHAVITGQWTPSGTDNAAGRVPGYGVITNIINGGLECGRGQDDRVANRIGFYKRYCDVLGVGYGNNLDCYNQRPFNSGLSMGLATE

SEQ ID NO: 65436 - protein, 337 aa, Triticum aestivum
  peptide (1)..(337): Ceres Seq. ID no. 13598572
  misc_feature (32)..(71): Pfam Name: Chitin recognition protein Pfam Description: Chitin recognition protein
  misc_feature (13)..(326): Homolog of NCBI NO: 12407647 NR Description: 31.7 kDa class I endochitinase-antifreeze protein
  misc_feature (33)..(326): Homolog of NCBI NO: 741317 NR Description: chitinase a
  misc_feature (33)..(326): Homolog of NCBI NO: 542173 NR Description: chitinase (EC 3.2.1.14) a - rye
  misc_feature (17)..(326): Homolog of NCBI NO: 2506281 NR Description: 26 kDa endochitinase 1 precursor
  misc_feature (7)..(331): Homolog of NCBI NO: 18146827 NR Description: chitinase 2 [Triticum aestivum]
  misc_feature (18)..(326): Homolog of NCBI NO: 11344587 NR Description: seed chitinase-a [Secale cereale]
  misc_feature (17)..(328): Homolog of NCBI NO: 6164588 NR Description: chitinase [Poa pratensis]
  misc_feature (16)..(337): Homolog of NCBI NO: 1076740 NR Description: chitinase (EC 3.2.1.14) - rice
  misc_feature (13)..(337): Homolog of NCBI NO: 481896 NR Description: chitinase (EC 3.2.1.14) - rice
  misc_feature (11)..(337): Homolog of NCBI NO: 7435361 NR Description: probable chitinase (EC 3.2.1.14) - barley
MKPYMPTVLRPPRVVAILAVVLAAALATAVNAQQCGSQAGGATCANCLCCSKFGYCGSGDAYCGAGCQSQCSGCGPTPPGPSPGGGVSSIISRDLFERLLLHRNDCQEARGFYTYDAFLAAAAAFPSFGTTGSTETRKREVAAFLGQTSHETTGGWPAAPDGPYAWGYCFKQEQGSPGSYCEPKPEWPCASGKKYYGRGPIQLSWNYNYGPAGRAIGVDLLNNPDLVAADATVSFKTALWFWMTAQANKPSSHAVITGQWTPSGTDNAAGRVPGYGVITNIINGGLECGRGQDDRVANRIGFYKRYCDVLGVGYGNNLDCYNQRPFNSGLSMGLATE

SEQ ID NO: 65437 - protein, 333 aa, Triticum aestivum
  peptide (1)..(333): Ceres Seq. ID no. 13598573
  misc_feature (28)..(67): Pfam Name: Chitin recognition protein Pfam Description: Chitin recognition protein
  misc_feature (9)..(322): Homolog of NCBI NO: 12407647 NR Description: 31.7 kDa class I endochitinase-antifreeze protein
  misc_feature (29)..(322): Homolog of NCBI NO: 741317 NR Description: chitinase a
  misc_feature (29)..(322): Homolog of NCBI NO: 542173 NR Description: chitinase (EC 3.2.1.14) a - rye
  misc_feature (13)..(322): Homolog of NCBI NO: 2506281 NR Description: 26 kDa endochitinase 1 precursor
  misc_feature (3)..(327): Homolog of NCBI NO: 18146827 NR Description: chitinase 2 [Triticum aestivum]
  misc_feature (14)..(322): Homolog of NCBI NO: 11344587 NR Description: seed chitinase-a [Secale cereale]
  misc_feature (13)..(324): Homolog of NCBI NO: 6164588 NR Description: chitinase [Poa pratensis]
  misc_feature (12)..(333): Homolog of NCBI NO: 1076740 NR Description: chitinase (EC 3.2.1.14) - rice
  misc_feature (9)..(333): Homolog of NCBI NO: 481896 NR Description: chitinase (EC 3.2.1.14) - rice
  misc_feature (7)..(333): Homolog of NCBI NO: 7435361 NR Description: probable chitinase (EC 3.2.1.14) - barley
MPTVLRPPRVVAILAVVLAAALATAVNAQQCGSQAGGATCANCLCCSKFGYCGSGDAYCGAGCQSQCSGCGPTPPGPSPGGGVSSIISRDLFERLLLHRNDCQEARGFYTYDAFLAAAAAFPSFGTTGSTETRKREVAAFLGQTSHETTGGWPAAPDGPYAWGYCFKQEQGSPGSYCEPKPEWPCASGKKYYGRGPIQLSWNYNYGPAGRAIGVDLLNNPDLVAADATVSFKTALWFWMTAQANKPSSHAVITGQWTPSGTDNAAGRVPGYGVITNIINGGLECGRGQDDRVANRIGFYKRYCDVLGVGYGNNLDCYNQRPFNSGLSMGLATE

SEQ ID NO: 65438 - DNA, 1517 bp, Triticum aestivum
  misc_feature (1)..(1517): Ceres Seq. ID no. 15225493
gataaaaaaaggaagaagaggatgatacgtaacggcgtgacggaaagaaaaagcgggagcgaatagacagagagggggcccggccgtcacgtcgtcttcctcctcgctccattagagccgagctctcgggtctccgcctctgctcgcctcccactgttatcggaggcgctgcggacgaagcagcggcactatgcgtccgtccctctgtcatgttccttttcttcttctgctactattacatgtggtcattgctagaccattctttccactgccaagtaagaccagtaatgaagagaagaagcccatacagacatttcgaccgtataacattgctcaccgtggctcaaacggggaaatcccagaggaaacaagtgctgcttacctgagggctattgaagaaggtgcagattttatagagactgacatccttgctagcaaagatggtgcattgatctgctttcatgatgtaacacttgatgatacaactgatatttccggccgtaaggaattcgccaatcgaaggagaacctatgaggtggaatgggccaacgttactggctggtttgtagtggatttcacgcttgaggaacttaaaacacttaaagtgaagcagcgatactcattcagagatcaacaatataatgatgcaagcagaaccgttggaatatatccagagataaaagatccagtttttatcaacaagcatgtaaagtgggcagatggaaagaagtttgaggacaaatttgtggataccttactaaagtatggatacaggggtcaatatatgtccgaaaattggctaaaacagccattgtttatacaatcatttgctccctcttcccttgtacatgtatcaaatttgacagactctccgaagatctttctgattgatgataccacagtgagaactcaagacacaaaccagtcatactgggaaatcacttcagatgactaccttgcatatattagtaactatgttgtcggcctcggtccatggaaagatactattgttccagttgcaaaaaactatttgctggaaccaactgatcttgttgcaagagcgcatgctcataatctccaggtacacccttacacatacaggaacgagaaccagtttctgcacttcgactttcatcaggatccctatgccgagttcgatttctggataaatacgatgggggttgacggattattcacagatttcgctggaagcgtacacaagtaccaagaactgaaatctccacacccgaaggacgcaaccgcgaacagcctcctagtaaaaattgctcagttgatcgcggcatacgaaggccactgaataagtctgttccagcaaaatcactgccattttcagtgatgatgcgcaagacccaaatgagttgacatttgacgacccgcagtgacctggaaaggtcactaatagatgttggtttacgctgttatatagtgttaacacgagttcatgtatacctcttcattgaacccctgaatctcaagggggagatctttattatcgc

SEQ ID NO: 65439 - protein, 375 aa, Triticum aestivum
  peptide (1)..(375): Ceres Seq. ID no. 15225494
  misc_feature (44)..(314): Homolog of NCBI NO: 15595544 NR Description: glycerophosphoryl diester phosphodiesterase,
  misc_feature (13)..(310): Homolog of NCBI NO: 23105793 NR Description: COG0584: Glycerophosphoryl diester
  misc_feature (39)..(338): Homolog of NCBI NO: 23126501 NR Description: COG0584: Glycerophosphoryl diester
  misc_feature (44)..(142): Homolog of NCBI NO: 32997080 NR Description: glycerophosphoryl diester phosphodiesterase
  misc_feature (155)..(337): Homolog of NCBI NO: 32997080 NR Description: glycerophosphoryl diester phosphodiesterase
  misc_feature (36)..(157): Homolog of NCBI NO: 34394918 NR Description: putative glycerophosphoryl diester
  misc_feature (145)..(347): Homolog of NCBI NO: 34394918 NR Description: putative glycerophosphoryl diester
  misc_feature (12)..(372): Homolog of NCBI NO: 15221164 NR Description: glycerophosphodiester phosphodiesterase -related
  misc_feature (11)..(354): Homolog of NCBI NO: 15241502 NR Description: glycerophosphodiester phosphodiesterase - like
  misc_feature (1)..(374): Homolog of NCBI NO: 34909788 NR Description: putative glycerophosphoryl diester
MRPSLCHVPFLLLLLLHVVIARPFFPLPSKTSNEEKKPIQTFRPYNIAHRGSNGEIPEETSAAYLRAIEEGADFIETDILASKDGALICFHDVTLDDTTDISGRKEFANRRRTYEVEWANVTGWFVVDFTLEELKTLKVKQRYSFRDQQYNDASRTVGIYPEIKDPVFINKHVKWADGKKFEDKFVDTLLKYGYRGQYMSENWLKQPLFIQSFAPSSLVHVSNLTDSPKIFLIDDTTVRTQDTNQSYWEITSDDYLAYISNYVVGLGPWKDTIVPVAKNYLLEPTDLVARAHAHNLQVHPYTYRNENQFLHFDFHQDPYAEFDFWINTMGVDGLFTDFAGSVHKYQELKSPHPKDATANSLLVKIAQLIAAYEGH

SEQ ID NO: 65440 - DNA, 1253 bp, Triticum aestivum
  misc_feature (1)..(1253): Ceres Seq. ID no. 13598630
aatccaaccgcggctttggcacctcctcgcccgccgccgccgccgccgtcgccgaccagatcccgcgccgccgcagccgcagccgcctccggccatggcgccgccatcctccgaagagccggccgccgcctccggggccggcgccatctccaaggtcctcgtcgtcatagcgatgcagacggaggcgctcccgctcgtcacccggttccagctcgtcgaggcggccgccgatgattccatatttcctaaaggtgccccttggactcggtaccatggcgactacaaaggcctccacatcgatctcgtctggcctggaaaagaccctgtgcttggggttgacagtgttggtacagtatccgcagctcttgtgacttatgcttcthtacaattgttgaagccagaccttattgtgywtmacatcamcgctggtactgctggtggttttaaggccagaggagcaggtattggggatgtcttcttagcttcagatgttgctttccatgacaggagaatacccattcctgtctttgacagttatggaattggagcacgaaaaacatttgaaaccccgaatatagtgaaggaactcaatttgaaggttgggaaactgtcaactggtgattctctggatatgtccccccatgatgagacagcaatactgagcaatgaagctacagtcaaggatatggagggagcagcggtggcatatgttgctgacttgttctcgacacctgctatctttgtcaaagctgtgactgacattgttgatggggagaagccaacagccgaggagtttctgcaaaacctgatctccgtgacgatggcgcttgaccaggcagtcatgcaagtggtagacttcatcagcggcaaatgtatctctgatctctgaacgccgaacactccgccatgctgttctggggtccacaaactgagggagcctgaatatatattgttggatgtataatgtttcctggggggtttcacacacgattttacattatcgtaacccctatgtaaaaaattcttggcgattactcggagccattgtatgggattttgtagaattttacaaactgtgcagcttagtgaagctcggcttaataaggtggtgtattgttacactggaataaatgatgggcactggaactcccatggattcagtacaatggttgatggacgcaccttggcagcttcatcacatggcagctgaatactttccaaatggagtaagaagtaaaggctctcatgtttgc

SEQ ID NO: 65441 - protein, 295 aa, Triticum aestivum
  peptide (1)..(295): Ceres Seq. ID no. 15222386
  misc_feature (51)..(279): Pfam Name: Phosphorylase family Pfam Description: Phosphorylase family
  misc_feature (105)..(266): Homolog of NCBI NO: 16123533 NR Description: MTA/SAH nucleosidase [Yersinia pestis]
  misc_feature (105)..(287): Homolog of NCBI NO: 15642376 NR Description: MTA/SAH nucleosidase [Vibrio cholerae]
  misc_feature (107)..(266): Homolog of NCBI NO: 28897253 NR Description: MTA/SAH nucleosidase [Vibrio parahaemolyticus
  misc_feature (106)..(266): Homolog of NCBI NO: 23467396 NR Description: hypothetical protein [Haemophilus somnus 129PT]
  misc_feature (94)..(295): Homolog of NCBI NO: 7486865 NR Description: hypothetical protein T11I11.80 - Arabidopsis
  misc_feature (49)..(295): Homolog of NCBI NO: 30690140 NR Description: expressed protein [Arabidopsis thaliana]
  misc_feature (49)..(295): Homolog of NCBI NO: 15234791 NR Description: expressed protein [Arabidopsis thaliana]
  misc_feature (36)..(295): Homolog of NCBI NO: 7406708 NR Description: putative ripening-related protein [Vitis vinifera]
  misc_feature (32)..(295): Homolog of NCBI NO: 18087497 NR Description: methylthioadenosine/S-adenosyl homocysteine
  misc_feature (32)..(295): Homolog of NCBI NO: 34897892 NR Description: ESTs C28489(C61317),AU031689(R0560) correspond to region of the predicted gene.~Similar to Arabidopsis thaliana DNA
  misc_feature (128)..(128): Xaa is any aa, unknown or other
  misc_feature (138)..(138): Xaa is any aa, unknown or other
  misc_feature (139)..(139): Xaa is any aa, unknown or other
  misc_feature (141)..(141): Xaa is any aa, unknown or other
IQPRLWHLLARRRRRRRRPDPAPPQPQPPPAMAPPSSEEPAAASGAGAISKVLVVIAMQTEALPLVTRFQLVEAAADDSIFPKGAPWTRYHGDYKGLHIDLVWPGKDPVLGVDSVGTVSAALVTYASXQLLKPDLIVXXIXAGTAGGFKARGAGIGDVFLASDVAFHDRRIPIPVFDSYGIGARKTFETPNIVKELNLKVGKLSTGDSLDMSPHDETAILSNEATVKDMEGAAVAYVADLFSTPAIFVKAVTDIVDGEKPTAEEFLQNLISVTMALDQAVMQVVDFISGKCISDL

SEQ ID NO: 65442 - protein, 264 aa, Triticum aestivum
  peptide (1)..(264): Ceres Seq. ID no. 15222387
  misc_feature (20)..(248): Pfam Name: Phosphorylase family Pfam Description: Phosphorylase family
  misc_feature (74)..(235): Homolog of NCBI NO: 16123533 NR Description: MTA/SAH nucleosidase [Yersinia pestis]
  misc_feature (74)..(256): Homolog of NCBI NO: 15642376 NR Description: MTA/SAH nucleosidase [Vibrio cholerae]
  misc_feature (76)..(235): Homolog of NCBI NO: 28897253 NR Description: MTA/SAH nucleosidase [Vibrio parahaemolyticus
  misc_feature (75)..(235): Homolog of NCBI NO: 23467396 NR Description: hypothetical protein [Haemophilus somnus 129PT]
  misc_feature (63)..(264): Homolog of NCBI NO: 7486865 NR Description: hypothetical protein T11I11.80 - Arabidopsis
  misc_feature (18)..(264): Homolog of NCBI NO: 30690140 NR Description: expressed protein [Arabidopsis thaliana]
  misc_feature (18)..(264): Homolog of NCBI NO: 15234791 NR Description: expressed protein [Arabidopsis thaliana]
  misc_feature (5)..(264): Homolog of NCBI NO: 7406708 NR Description: putative ripening-related protein [Vitis vinifera]
  misc_feature (1)..(264): Homolog of NCBI NO: 18087497 NR Description: methylthioadenosine/S-adenosyl homocysteine
  misc_feature (1)..(264): Homolog of NCBI NO: 34897892 NR Description: ESTs C28489(C61317),AU031689(R0560) correspond to region of the predicted gene.~Similar to Arabidopsis thaliana DNA
  misc_feature (97)..(97): Xaa is any aa, unknown or other
  misc_feature (107)..(107): Xaa is any aa, unknown or other
  misc_feature (108)..(108): Xaa is any aa, unknown or other
  misc_feature (110)..(110): Xaa is any aa, unknown or other
MAPPSSEEPAAASGAGAISKVLVVIAMQTEALPLVTRFQLVEAAADDSIFPKGAPWTRYHGDYKGLHIDLVWPGKDPVLGVDSVGTVSAALVTYASXQLLKPDLIVXXIXAGTAGGFKARGAGIGDVFLASDVAFHDRRIPIPVFDSYGIGARKTFETPNIVKELNLKVGKLSTGDSLDMSPHDETAILSNEATVKDMEGAAVAYVADLFSTPAIFVKAVTDIVDGEKPTAEEFLQNLISVTMALDQAVMQVVDFISGKCISDL

SEQ ID NO: 65443 - protein, 238 aa, Triticum aestivum
  peptide (1)..(238): Ceres Seq. ID no. 15222388
  misc_feature (1)..(222): Pfam Name: Phosphorylase family Pfam Description: Phosphorylase family
  misc_feature (48)..(209): Homolog of NCBI NO: 16123533 NR Description: MTA/SAH nucleosidase [Yersinia pestis]
  misc_feature (48)..(230): Homolog of NCBI NO: 15642376 NR Description: MTA/SAH nucleosidase [Vibrio cholerae]
  misc_feature (50)..(209): Homolog of NCBI NO: 28897253 NR Description: MTA/SAH nucleosidase [Vibrio parahaemolyticus
  misc_feature (49)..(209): Homolog of NCBI NO: 23467396 NR Description: hypothetical protein [Haemophilus somnus 129PT]
  misc_feature (37)..(238): Homolog of NCBI NO: 7486865 NR Description: hypothetical protein T11I11.80 - Arabidopsis
  misc_feature (1)..(238): Homolog of NCBI NO: 30690140 NR Description: expressed protein [Arabidopsis thaliana]
  misc_feature (1)..(238): Homolog of NCBI NO: 15234791 NR Description: expressed protein [Arabidopsis thaliana]
  misc_feature (1)..(238): Homolog of NCBI NO: 7406708 NR Description: putative ripening-related protein [Vitis vinifera]
  misc_feature (1)..(238): Homolog of NCBI NO: 18087497 NR Description: methylthioadenosine/S-adenosyl homocysteine
  misc_feature (1)..(238): Homolog of NCBI NO: 34897892 NR Description: ESTs C28489(C61317),AU031689(R0560) correspond to region of the predicted gene.~Similar to Arabidopsis thaliana DNA
  misc_feature (71)..(71): Xaa is any aa, unknown or other
  misc_feature (81)..(81): Xaa is any aa, unknown or other
  misc_feature (82)..(82): Xaa is any aa, unknown or other
  misc_feature (84)..(84): Xaa is any aa, unknown or other
MQTEALPLVTRFQLVEAAADDSIFPKGAPWTRYHGDYKGLHIDLVWPGKDPVLGVDSVGTVSAALVTYASXQLLKPDLIVXXIXAGTAGGFKARGAGIGDVFLASDVAFHDRRIPIPVFDSYGIGARKTFETPNIVKELNLKVGKLSTGDSLDMSPHDETAILSNEATVKDMEGAAVAYVADLFSTPAIFVKAVTDIVDGEKPTAEEFLQNLISVTMALDQAVMQVVDFISGKCISDL

SEQ ID NO: 65444 - DNA, 1326 bp, Triticum aestivum
  misc_feature (1)..(1326): Ceres Seq. ID no. 13597633
acatcctaatcgaaaaaaaaaaccccaagcaaaagaagcccctttcctcctccgccgccgccgccgcttctgccgccatggccgacgagctggacgagctcatcgagttcctctccaacggctcccctcaggtgcgcggcgccgcggcggacatcgtgcgggggctcacgggggacagcgacgggctgcggtccctcgcggcgcgcgccgaccgcgcgctgccggcgctgctccggctgctcgcatccgtgggggccggctgcgcgggcgaggcggcggctgactcgctcgtcaacctcagccaggacggcgaccttgccgcgcgcctcgtggtgctcggagccgtcgcggccgccatggacgtgatggtcaagcgcggcggcgagcagcccaagctcgcgcgcagccttgtcatgctgctcgtcaacctcacccaggtcgagtccggcatctcggccctcctccaggttggtgatgaaaaggtgcaagggttgtatgttgcaaagcttgtgcgctcattctgcaggtcatcctgtgactctgaagatgaagatatatttgaacacattgcctctatacttgtgaatatctcaaaggtcgaagctggacggagaatactgatggaacctaagagaggtcttctaaagcagattataggacaatttgattcaacaaatcaacttagaaagaaaggggttgctggcaccatccgtaactgttgctttgaagctgatacccagatacaaaatttgctttctatagcagaatatctttggccagctctacttttgccagtagctggaaagaagatctatagcgaagaagatagatcgaaaatgcctcccgagcttgcaaatgcactttctcatgaacgggaagctgttgatgattccgagattcgtgaacgggcactagaggctatttatatgatcgtgatgcaggatgatggacgaaaggccttttggtcagtcaatgggccacggatactgcaggttggttatgaagacgaagaggacttgaaagtgatgggcgcatatgagttgattggttctttgcttgtcggcaagggtgaaattgaacaagatcaagagcaaggagaagataagcctcaatgatgggctcaactatgtacaatttgtaatctgtcttatctacttgctgcaagaaaatagggctgcatcgcttccaatcttaagaatgtcctgtcgtattgatccaaatttcttgcaataactggcttgttctacctcctggtttcagtttgttgtccacagtatttaatacaactatgtaagagcattaagaacatcgtccagtttttgcctc

SEQ ID NO: 65445 - protein, 370 aa, Triticum aestivum
  peptide (1)..(370): Ceres Seq. ID no. 13597634
  misc_feature (154)..(302): Pfam Name: Domain of unknown function (DUF383) Pfam Description: Domain of unknown function (DUF383)
  misc_feature (29)..(369): Homolog of NCBI NO: 19115795 NR Description: hypothetical protein [Schizosaccharomyces pombe]
  misc_feature (96)..(368): Homolog of NCBI NO: 40745990 NR Description: hypothetical protein AN9409.2 [Aspergillus
  misc_feature (28)..(348): Homolog of NCBI NO: 19569883 NR Description: SIMILAR TO HYPOTHETICAL PROTEIN [Dictyostelium
  misc_feature (25)..(354): Homolog of NCBI NO: 10946998 NR Description: brain protein 16; DNA segment, Chr 15, ERATO Doi
  misc_feature (25)..(354): Homolog of NCBI NO: 26351805 NR Description: unnamed protein product [Mus musculus]
  misc_feature (6)..(354): Homolog of NCBI NO: 27662250 NR Description: similar to brain protein 16 [Mus musculus]
  misc_feature (26)..(363): Homolog of NCBI NO: 26449855 NR Description: unknown protein [Arabidopsis thaliana]
  misc_feature (26)..(363): Homolog of NCBI NO: 15223707 NR Description: expressed protein [Arabidopsis thaliana]
  misc_feature (26)..(156): Homolog of NCBI NO: 37534210 NR Description: unknown protein [Oryza sativa (japonica
  misc_feature (154)..(352): Homolog of NCBI NO: 37534210 NR Description: unknown protein [Oryza sativa (japonica
ILIEKKNPKQKKPLSSSAAAAASAAMADELDELIEFLSNGSPQVRGAAADIVRGLTGDSDGLRSLAARADRALPALLRLLASVGAGCAGEAAADSLVNLSQDGDLAARLVVLGAVAAAMDVMVKRGGEQPKLARSLVMLLVNLTQVESGISALLQVGDEKVQGLYVAKLVRSFCRSSCDSEDEDIFEHIASILVNISKVEAGRRILMEPKRGLLKQIIGQFDSTNQLRKKGVAGTIRNCCFEADTQIQNLLSIAEYLWPALLLPVAGKKIYSEEDRSKMPPELANALSHEREAVDDSEIRERALEAIYMIVMQDDGRKAFWSVNGPRILQVGYEDEEDLKVMGAYELIGSLLVGKGEIEQDQEQGEDKPQ

SEQ ID NO: 65446 - protein, 345 aa, Triticum aestivum
  peptide (1)..(345): Ceres Seq. ID no. 13597635
  misc_feature (129)..(277): Pfam Name: Domain of unknown function (DUF383) Pfam Description: Domain of unknown function (DUF383)
  misc_feature (4)..(344): Homolog of NCBI NO: 19115795 NR Description: hypothetical protein [Schizosaccharomyces pombe]
  misc_feature (71)..(343): Homolog of NCBI NO: 40745990 NR Description: hypothetical protein AN9409.2 [Aspergillus
  misc_feature (3)..(323): Homolog of NCBI NO: 19569883 NR Description: SIMILAR TO HYPOTHETICAL PROTEIN [Dictyostelium
  misc_feature (1)..(329): Homolog of NCBI NO: 10946998 NR Description: brain protein 16; DNA segment, Chr 15, ERATO Doi
  misc_feature (1)..(329): Homolog of NCBI NO: 26351805 NR Description: unnamed protein product [Mus musculus]
  misc_feature (1)..(329): Homolog of NCBI NO: 27662250 NR Description: similar to brain protein 16 [Mus musculus]
  misc_feature (1)..(338): Homolog of NCBI NO: 26449855 NR Description: unknown protein [Arabidopsis thaliana]
  misc_feature (1)..(338): Homolog of NCBI NO: 15223707 NR Description: expressed protein [Arabidopsis thaliana]
  misc_feature (1)..(131): Homolog of NCBI NO: 37534210 NR Description: unknown protein [Oryza sativa (japonica
  misc_feature (129)..(327): Homolog of NCBI NO: 37534210 NR Description: unknown protein [Oryza sativa (japonica
MADELDELIEFLSNGSPQVRGAAADIVRGLTGDSDGLRSLAARADRALPALLRLLASVGAGCAGEAAADSLVNLSQDGDLAARLVVLGAVAAAMDVMVKRGGEQPKLARSLVMLLVNLTQVESGISALLQVGDEKVQGLYVAKLVRSFCRSSCDSEDEDIFEHIASILVNISKVEAGRRILMEPKRGLLKQIIGQFDSTNQLRKKGVAGTIRNCCFEADTQIQNLLSIAEYLWPALLLPVAGKKIYSEEDRSKMPPELANALSHEREAVDDSEIRERALEAIYMIVMQDDGRKAFWSVNGPRILQVGYEDEEDLKVMGAYELIGSLLVGKGEIEQDQEQGEDKPQ

SEQ ID NO: 65447 - protein, 252 aa, Triticum aestivum
  peptide (1)..(252): Ceres Seq. ID no. 13597636
  misc_feature (36)..(184): Pfam Name: Domain of unknown function (DUF383) Pfam Description: Domain of unknown function (DUF383)
  misc_feature (1)..(251): Homolog of NCBI NO: 19115795 NR Description: hypothetical protein [Schizosaccharomyces pombe]
  misc_feature (1)..(250): Homolog of NCBI NO: 40745990 NR Description: hypothetical protein AN9409.2 [Aspergillus
  misc_feature (1)..(230): Homolog of NCBI NO: 19569883 NR Description: SIMILAR TO HYPOTHETICAL PROTEIN [Dictyostelium
  misc_feature (1)..(236): Homolog of NCBI NO: 10946998 NR Description: brain protein 16; DNA segment, Chr 15, ERATO Doi
  misc_feature (1)..(236): Homolog of NCBI NO: 26351805 NR Description: unnamed protein product [Mus musculus]
  misc_feature (1)..(236): Homolog of NCBI NO: 27662250 NR Description: similar to brain protein 16 [Mus musculus]
  misc_feature (1)..(245): Homolog of NCBI NO: 26449855 NR Description: unknown protein [Arabidopsis thaliana]
  misc_feature (1)..(245): Homolog of NCBI NO: 15223707 NR Description: expressed protein [Arabidopsis thaliana]
  misc_feature (1)..(38): Homolog of NCBI NO: 37534210 NR Description: unknown protein [Oryza sativa (japonica
  misc_feature (36)..(234): Homolog of NCBI NO: 37534210 NR Description: unknown protein [Oryza sativa (japonica
MDVMVKRGGEQPKLARSLVMLLVNLTQVESGISALLQVGDEKVQGLYVAKLVRSFCRSSCDSEDEDIFEHIASILVNISKVEAGRRILMEPKRGLLKQIIGQFDSTNQLRKKGVAGTIRNCCFEADTQIQNLLSIAEYLWPALLLPVAGKKIYSEEDRSKMPPELANALSHEREAVDDSEIRERALEAIYMIVMQDDGRKAFWSVNGPRILQVGYEDEEDLKVMGAYELIGSLLVGKGEIEQDQEQGEDKPQ

SEQ ID NO: 65448 - DNA, 1436 bp, Triticum aestivum
  misc_feature (1)..(1436): Ceres Seq. ID no. 13597638
acacaagcacacagacacacactccagagaacaccaggccaagaaaccacagaaaagcaaccagccatgggggtggagatcctgagctccacgggggaaccctcctcccagtactcttccggggccgtgtccacagccacgacggagtcaggcatcggcggacggccgccgactgcgccgagcctgccagtggccatcgccgacgagtccgtgacctcgcggtcggcaccggcgcagtcggcgtcgtcgcggttcaagggggttgtgtcgcagcccaacgggcggtggggcgcccagatctacgagcgccacgctcgcgtctggctcggcacgttcccggacgaggactctgcggcgcgcgcctacgacgtggcagcgctccggtaccggggccgcgaggccgccaccaacttcccctgcgcggscgcagagggcggagctcgctttcctgggggcacactccaaggccgagatcgtcgacatgctccggaagcacacctacgccgacgagctccgccagggcttgcggcgcggccgcggcatgggggcccgcgcgcagccgacgccgtcgtgggcgcgggagcccctcttcgagaaggccgtgaccccgagcgacgtcggcaagctcaaccgcctcgtggtgccgaagcagcacgccgagaagcacttccccctgaagcgcacgccggaaacgacgaccaccaccggcaagggggtgctgctcaactttcgaggacggcgaggggaaagtgtggaggttccggtactcgtactggaacagcagccagagctacgtcctcaccaagggtkggagccgcttcgtccgggagaagggcctcggtgccggcgattccatcgtgttctcgtgctcggcgtacggtcaagagaagcagttcttcatcgactgcaagaagaacaagacgatggcgagctgccccgctgacggcggcgctgcaacggcgtcgccgcctgtggcggaggcagctaatggagaacaagtccgtgtcgtgaggctgtttggcgtcgacatcgccggagagaagagggggagagctgcgccggcggagcaggagttgttcaagaggcaatgcgtggcacacagccagcactctcctgccctaggtgccatcgtcttatagcatctgcacatacagctctatattcctctccggttctcctccctcttgcttctggttgttacatgcatgatatatgttgatctgtttgtggattagaataattttattcctgaattttgcgtagaactcgtccttaagtccgattgcagaatgagttgtatgtaattatgtgtgtgtacaccactagaaattctagctagacagatcataataatcctacgatgttgttgcatatatatatatatctatatatgtactatcatcttgacacatcaataaattccattctgccatctg

SEQ ID NO: 65449 - protein, 336 aa, Triticum aestivum
  peptide (1)..(336): Ceres Seq. ID no. 15222153
  misc_feature (82)..(143): Pfam Name: AP2 domain Pfam Description: AP2 domain
  misc_feature (82)..(149): Homolog of NCBI NO: 2281641 NR Description: AP2 domain containing protein RAP2.8 [Arabidopsis
  misc_feature (26)..(149): Homolog of NCBI NO: 21554039 NR Description: putative RAV2-like DNA-binding protein
  misc_feature (26)..(149): Homolog of NCBI NO: 18409138 NR Description: AP2 domain protein RAP2.8 (RAV2) [Arabidopsis
  misc_feature (75)..(147): Homolog of NCBI NO: 34895676 NR Description: putative DNA binding protein RAV2
  misc_feature (25)..(149): Homolog of NCBI NO: 21593532 NR Description: AP2 domain transcription factor [Arabidopsis
  misc_feature (25)..(149): Homolog of NCBI NO: 15230871 NR Description: AP2 domain transcription factor, putative
  misc_feature (30)..(138): Homolog of NCBI NO: 15222217 NR Description: AP2 domain transcription factor, putative  (RAV1)
  misc_feature (29)..(138): Homolog of NCBI NO: 15222622 NR Description: AP2 domain transcription factor, putative
  misc_feature (23)..(199): Homolog of NCBI NO: 34895690 NR Description: putative DNA binding protein RAV2
  misc_feature (13)..(147): Homolog of NCBI NO: 34911404 NR Description: DNA-binding protein RAV2-like
  misc_feature (142)..(142): Xaa is any aa, unknown or other
  misc_feature (270)..(270): Xaa is any aa, unknown or other
TQAHRHTLQRTPGQETTEKQPAMGVEILSSTGEPSSQYSSGAVSTATTESGIGGRPPTAPSLPVAIADESVTSRSAPAQSASSRFKGVVSQPNGRWGAQIYERHARVWLGTFPDEDSAARAYDVAALRYRGREAATNFPCAXAEGGARFPGGTLQGRDRRHAPEAHLRRRAPPGLAARPRHGGPRAADAVVGAGAPLREGRDPERRRQAQPPRGAEAARREALPPEAHAGNDDHHRQGGAAQLSRTARGKCGGSGTRTGTAARATSSPRXGAASSGRRASVPAIPSCSRARRTVKRSSSSSTARRTRRWRAAPLTAALQRRRRLWRRQLMENKSVS

SEQ ID NO: 65450 - protein, 314 aa, Triticum aestivum
  peptide (1)..(314): Ceres Seq. ID no. 15222154
  misc_feature (60)..(121): Pfam Name: AP2 domain Pfam Description: AP2 domain
  misc_feature (60)..(127): Homolog of NCBI NO: 2281641 NR Description: AP2 domain containing protein RAP2.8 [Arabidopsis
  misc_feature (4)..(127): Homolog of NCBI NO: 21554039 NR Description: putative RAV2-like DNA-binding protein
  misc_feature (4)..(127): Homolog of NCBI NO: 18409138 NR Description: AP2 domain protein RAP2.8 (RAV2) [Arabidopsis
  misc_feature (53)..(125): Homolog of NCBI NO: 34895676 NR Description: putative DNA binding protein RAV2
  misc_feature (3)..(127): Homolog of NCBI NO: 21593532 NR Description: AP2 domain transcription factor [Arabidopsis
  misc_feature (3)..(127): Homolog of NCBI NO: 15230871 NR Description: AP2 domain transcription factor, putative
  misc_feature (8)..(116): Homolog of NCBI NO: 15222217 NR Description: AP2 domain transcription factor, putative  (RAV1)
  misc_feature (7)..(116): Homolog of NCBI NO: 15222622 NR Description: AP2 domain transcription factor, putative
  misc_feature (1)..(177): Homolog of NCBI NO: 34895690 NR Description: putative DNA binding protein RAV2
  misc_feature (1)..(125): Homolog of NCBI NO: 34911404 NR Description: DNA-binding protein RAV2-like
  misc_feature (120)..(120): Xaa is any aa, unknown or other
  misc_feature (248)..(248): Xaa is any aa, unknown or other
MGVEILSSTGEPSSQYSSGAVSTATTESGIGGRPPTAPSLPVAIADESVTSRSAPAQSASSRFKGVVSQPNGRWGAQIYERHARVWLGTFPDEDSAARAYDVAALRYRGREAATNFPCAXAEGGARFPGGTLQGRDRRHAPEAHLRRRAPPGLAARPRHGGPRAADAVVGAGAPLREGRDPERRRQAQPPRGAEAARREALPPEAHAGNDDHHRQGGAAQLSRTARGKCGGSGTRTGTAARATSSPRXGAASSGRRASVPAIPSCSRARRTVKRSSSSSTARRTRRWRAAPLTAALQRRRRLWRRQLMENKSVS

SEQ ID NO: 65451 - protein, 200 aa, Triticum aestivum
  peptide (1)..(200): Ceres Seq. ID no. 15222155
  misc_feature (188)..(200): Homolog of NCBI NO: 34895676 NR Description: putative DNA binding protein RAV2
  misc_feature (141)..(141): Xaa is any aa, unknown or other
TSTQTHTPENTRPRNHRKATSHGGGDPELHGGTLLPVLFRGRVHSHDGVRHRRTAADCAEPASGHRRRVRDLAVGTGAVGVVAVQGGCVAAQRAVGRPDLRAPRSRLARHVPGRGLCGARLRRGSAPVPGPRGRHQLPLRXRRGRSSLSWGHTPRPRSSTCSGSTPTPTSSARACGAAAAWGPARSRRRRGRGSPSSRRP

SEQ ID NO: 65452 - DNA, 1128 bp, Triticum aestivum
  misc_feature (1)..(1128): Ceres Seq. ID no. 13597743
aaaaccgcagacctcaccatccccctcccccctcccctccccagcagccagcctcccccgcgaacgaaccctagccaggcacggcggcggatccctcgggcggcccggagccacaggccgccgcgatgatggacggcggcggcggcgtcggagacccggtcgaggagttcctcatcgggggcgccggcgacggcggggaggactccctcgccgccttctgcgacggaggacttgggattgaggatgtgcgcggaggtgactctggtctcgggcactctaatttggggaaaaggggcagagatgaaccatctccatctggtccaaagtcaaaggcttgccgcgagaaaatgcggagggataaactgaatgacaggtttcttgaattatgctcggttatgaattctggcaagcacactggtgttgaagaatgttcggctagcaatcctgggaagaacgctaagttggataaagcaagtatcttgagtgatgcaactcgtatgttgacacaactcagaggcgagaccgaaaagctgaaggaatcaaatgtgaatcttcgagagacaatcaaggaccttaaggcggagaagaatgagctccgagatgagaagttgagcctgaaggcagaaaaggaaaggctggaacaacaactcaaagcagcaagtgctgctcctacaggatttgctcctcatatgccttatccagctgcgttccaccccgcagtattccctccatttgcaccaccttatcaagtcccagccaacaaaggcgctccggtccccgctgcattccctggaatggcgatgtggcactggttgcccccaactgccatggacacaactcaagacccaaagctttggccgccgaatgcttaggcgtgccgaccccgggatgctgacttgcgctgccattcgcccattggcaagtcagaacgtttgtcaggtccctgagatgaaaggaagctcgcgattgcagttattgtgtttagcctgttgttttggggtcacttgtcccatagagaggtgatacctgtaattaatctggatcttaaccctcttgcttggaaaatatattcagtgctaccatacctcttgtatgagtgttatgtatggaattgcactggtttgtttc

SEQ ID NO: 65453 - protein, 248 aa, Triticum aestivum
  peptide (1)..(248): Ceres Seq. ID no. 13597744
  misc_feature (68)..(130): Pfam Name: Helix-loop-helix DNA-binding domain Pfam Description: Helix-loop-helix DNA-binding domain
  misc_feature (64)..(216): Homolog of NCBI NO: 15230975 NR Description: bHLH protein family [Arabidopsis thaliana]
  misc_feature (55)..(203): Homolog of NCBI NO: 30682847 NR Description: bHLH protein [Arabidopsis thaliana]
  misc_feature (55)..(203): Homolog of NCBI NO: 18414212 NR Description: bHLH protein [Arabidopsis thaliana]
  misc_feature (54)..(248): Homolog of NCBI NO: 22331274 NR Description: bHLH protein [Arabidopsis thaliana]
  misc_feature (54)..(248): Homolog of NCBI NO: 20127030 NR Description: putative bHLH transcription factor [Arabidopsis
  misc_feature (55)..(248): Homolog of NCBI NO: 15223710 NR Description: bHLH protein [Arabidopsis thaliana]
  misc_feature (66)..(248): Homolog of NCBI NO: 29367409 NR Description: helix-loop-helix-like protein
  misc_feature (1)..(248): Homolog of NCBI NO: 38636768 NR Description: helix-loop-helix-like protein
  misc_feature (15)..(248): Homolog of NCBI NO: 21592325 NR Description: bHLH transcription factor, putative [Arabidopsis
  misc_feature (15)..(248): Homolog of NCBI NO: 15239706 NR Description: bHLH protein [Arabidopsis thaliana]
MMDGGGGVGDPVEEFLIGGAGDGGEDSLAAFCDGGLGIEDVRGGDSGLGHSNLGKRGRDEPSPSGPKSKACREKMRRDKLNDRFLELCSVMNSGKHTGVEECSASNPGKNAKLDKASILSDATRMLTQLRGETEKLKESNVNLRETIKDLKAEKNELRDEKLSLKAEKERLEQQLKAASAAPTGFAPHMPYPAAFHPAVFPPFAPPYQVPANKGAPVPAAFPGMAMWHWLPPTAMDTTQDPKLWPPNA

SEQ ID NO: 65454 - protein, 247 aa, Triticum aestivum
  peptide (1)..(247): Ceres Seq. ID no. 13597745
  misc_feature (67)..(129): Pfam Name: Helix-loop-helix DNA-binding domain Pfam Description: Helix-loop-helix DNA-binding domain
  misc_feature (63)..(215): Homolog of NCBI NO: 15230975 NR Description: bHLH protein family [Arabidopsis thaliana]
  misc_feature (54)..(202): Homolog of NCBI NO: 30682847 NR Description: bHLH protein [Arabidopsis thaliana]
  misc_feature (54)..(202): Homolog of NCBI NO: 18414212 NR Description: bHLH protein [Arabidopsis thaliana]
  misc_feature (53)..(247): Homolog of NCBI NO: 22331274 NR Description: bHLH protein [Arabidopsis thaliana]
  misc_feature (53)..(247): Homolog of NCBI NO: 20127030 NR Description: putative bHLH transcription factor [Arabidopsis
  misc_feature (54)..(247): Homolog of NCBI NO: 15223710 NR Description: bHLH protein [Arabidopsis thaliana]
  misc_feature (65)..(247): Homolog of NCBI NO: 29367409 NR Description: helix-loop-helix-like protein
  misc_feature (1)..(247): Homolog of NCBI NO: 38636768 NR Description: helix-loop-helix-like protein
  misc_feature (14)..(247): Homolog of NCBI NO: 21592325 NR Description: bHLH transcription factor, putative [Arabidopsis
  misc_feature (14)..(247): Homolog of NCBI NO: 15239706 NR Description: bHLH protein [Arabidopsis thaliana]
MDGGGGVGDPVEEFLIGGAGDGGEDSLAAFCDGGLGIEDVRGGDSGLGHSNLGKRGRDEPSPSGPKSKACREKMRRDKLNDRFLELCSVMNSGKHTGVEECSASNPGKNAKLDKASILSDATRMLTQLRGETEKLKESNVNLRETIKDLKAEKNELRDEKLSLKAEKERLEQQLKAASAAPTGFAPHMPYPAAFHPAVFPPFAPPYQVPANKGAPVPAAFPGMAMWHWLPPTAMDTTQDPKLWPPNA

SEQ ID NO: 65455 - protein, 174 aa, Triticum aestivum
  peptide (1)..(174): Ceres Seq. ID no. 13597746
  misc_feature (1)..(56): Pfam Name: Helix-loop-helix DNA-binding domain Pfam Description: Helix-loop-helix DNA-binding domain
  misc_feature (1)..(142): Homolog of NCBI NO: 15230975 NR Description: bHLH protein family [Arabidopsis thaliana]
  misc_feature (1)..(129): Homolog of NCBI NO: 30682847 NR Description: bHLH protein [Arabidopsis thaliana]
  misc_feature (1)..(129): Homolog of NCBI NO: 18414212 NR Description: bHLH protein [Arabidopsis thaliana]
  misc_feature (1)..(174): Homolog of NCBI NO: 22331274 NR Description: bHLH protein [Arabidopsis thaliana]
  misc_feature (1)..(174): Homolog of NCBI NO: 20127030 NR Description: putative bHLH transcription factor [Arabidopsis
  misc_feature (1)..(174): Homolog of NCBI NO: 15223710 NR Description: bHLH protein [Arabidopsis thaliana]
  misc_feature (1)..(174): Homolog of NCBI NO: 29367409 NR Description: helix-loop-helix-like protein
  misc_feature (1)..(174): Homolog of NCBI NO: 38636768 NR Description: helix-loop-helix-like protein
  misc_feature (1)..(174): Homolog of NCBI NO: 21592325 NR Description: bHLH transcription factor, putative [Arabidopsis
  misc_feature (1)..(174): Homolog of NCBI NO: 15239706 NR Description: bHLH protein [Arabidopsis thaliana]
MRRDKLNDRFLELCSVMNSGKHTGVEECSASNPGKNAKLDKASILSDATRMLTQLRGETEKLKESNVNLRETIKDLKAEKNELRDEKLSLKAEKERLEQQLKAASAAPTGFAPHMPYPAAFHPAVFPPFAPPYQVPANKGAPVPAAFPGMAMWHWLPPTAMDTTQDPKLWPPNA

SEQ ID NO: 65456 - DNA, 1196 bp, Triticum aestivum
  misc_feature (1)..(1196): Ceres Seq. ID no. 13655958
agaacatcctaatcgaaaactcgatcacatcacatcctcgtgggtgcacgcagcctctgtcggcaggcacagcgggggaacccgcgagcgagctctccaccggccatctgccatgtcagagcccggcgcgaacggcgcccgtcggcggcagcgcaggaggtggcgcctgtactggtgctacgtgtgccgccgcgcgctgcgcacggtgtcgtccccgacctccgacgtcttctgcccgcgctgcctcggccgcttcctccacgagatcgaactccccgtgccgcgcgagcccgtgcacgcgccgaccgagcggctcttccagccgccgccgttgttcccgtacgagggcgccccccgccactgggtcatatacaggggcgaggacgacgacgacgcggccgacacgccaggcccacgtctccgccgcgtcccgtccccgccgccggccccgggaacgcacggcggcttgggcggtgccgatgccggtccaccggcaaccggcatcgacccggcggggttcttcaccggccccaacctgaacgcgctcatcgatggtctgacgcagaacgaccgccccggcccgccgcccgcgccggcgtcggcgatcgactcgctccccacggtgcacgtctcgccggagcacatggcggacggctcgcagtgccccgtgtgcaaggatgagttcgagctcggcgagaccgcgcgcgagctgccgtgcaagcacgcctaccactccgactgcatcgtgccgtggctccggctccacaactcctgccctgtctgccggcaggagctgccaatgccggccggtgatgaatctcccgatggcgcgggcgcaggcgacggaggcgaggagacggttccgccgtggcagctgcttgccggctgggggccactggcttggctgctaacgctgggggaaccggacgtgggcggctgggataatggatctcggcagcgtgggacggaagccgacgccgatgacaccggcggcaatgtcagtcgtggcgccacgattcttcagtcgtttgttctcgtcgctgcgtgctttttctttgtctcctttctcgtttgagaaatggcacattggagactgtcacgtgtgcatatcatttattcggaaaagaaaacccaggtttcacgtgcaccacgcatgatcagacaaaaaaaaaaaaaaaaaagcttatcgataccgt

SEQ ID NO: 65457 - protein, 357 aa, Triticum aestivum
  peptide (1)..(357): Ceres Seq. ID no. 13655959
  misc_feature (221)..(261): Pfam Name: Zinc finger, C3HC4 type (RING finger) Pfam Description: Zinc finger, C3HC4 type (RING finger)
  misc_feature (149)..(278): Homolog of NCBI NO: 37535546 NR Description: putative zinc finger protein
  misc_feature (165)..(273): Homolog of NCBI NO: 18410530 NR Description: expressed protein [Arabidopsis thaliana]
  misc_feature (173)..(266): Homolog of NCBI NO: 34908968 NR Description: P0003D09.21 [Oryza sativa (japonica
  misc_feature (160)..(273): Homolog of NCBI NO: 18405518 NR Description: RING-H2 finger protein (RHC1a) [Arabidopsis
  misc_feature (55)..(99): Homolog of NCBI NO: 15231003 NR Description: expressed protein [Arabidopsis thaliana]
  misc_feature (55)..(99): Homolog of NCBI NO: 11994207 NR Description: gene_id:MPN9.20~unknown protein [Arabidopsis
  misc_feature (173)..(296): Homolog of NCBI NO: 15231003 NR Description: expressed protein [Arabidopsis thaliana]
  misc_feature (173)..(296): Homolog of NCBI NO: 11994207 NR Description: gene_id:MPN9.20~unknown protein [Arabidopsis
  misc_feature (31)..(90): Homolog of NCBI NO: 15219060 NR Description: hypothetical protein [Arabidopsis thaliana]
  misc_feature (128)..(267): Homolog of NCBI NO: 15219060 NR Description: hypothetical protein [Arabidopsis thaliana]
EHPNRKLDHITSSWVHAASVGRHSGGTRERALHRPSAMSEPGANGARRRQRRRWRLYWCYVCRRALRTVSSPTSDVFCPRCLGRFLHEIELPVPREPVHAPTERLFQPPPLFPYEGAPRHWVIYRGEDDDDAADTPGPRLRRVPSPPPAPGTHGGLGGADAGPPATGIDPAGFFTGPNLNALIDGLTQNDRPGPPPAPASAIDSLPTVHVSPEHMADGSQCPVCKDEFELGETARELPCKHAYHSDCIVPWLRLHNSCPVCRQELPMPAGDESPDGAGAGDGGEETVPPWQLLAGWGPLAWLLTLGEPDVGGWDNGSRQRGTEADADDTGGNVSRGATILQSFVLVAACFFFVSFLV

SEQ ID NO: 65458 - protein, 320 aa, Triticum aestivum
  peptide (1)..(320): Ceres Seq. ID no. 13655960
  misc_feature (184)..(224): Pfam Name: Zinc finger, C3HC4 type (RING finger) Pfam Description: Zinc finger, C3HC4 type (RING finger)
  misc_feature (112)..(241): Homolog of NCBI NO: 37535546 NR Description: putative zinc finger protein
  misc_feature (128)..(236): Homolog of NCBI NO: 18410530 NR Description: expressed protein [Arabidopsis thaliana]
  misc_feature (136)..(229): Homolog of NCBI NO: 34908968 NR Description: P0003D09.21 [Oryza sativa (japonica
  misc_feature (123)..(236): Homolog of NCBI NO: 18405518 NR Description: RING-H2 finger protein (RHC1a) [Arabidopsis
  misc_feature (18)..(62): Homolog of NCBI NO: 15231003 NR Description: expressed protein [Arabidopsis thaliana]
  misc_feature (18)..(62): Homolog of NCBI NO: 11994207 NR Description: gene_id:MPN9.20~unknown protein [Arabidopsis
  misc_feature (136)..(259): Homolog of NCBI NO: 15231003 NR Description: expressed protein [Arabidopsis thaliana]
  misc_feature (136)..(259): Homolog of NCBI NO: 11994207 NR Description: gene_id:MPN9.20~unknown protein [Arabidopsis
  misc_feature (1)..(53): Homolog of NCBI NO: 15219060 NR Description: hypothetical protein [Arabidopsis thaliana]
  misc_feature (91)..(230): Homolog of NCBI NO: 15219060 NR Description: hypothetical protein [Arabidopsis thaliana]
MSEPGANGARRRQRRRWRLYWCYVCRRALRTVSSPTSDVFCPRCLGRFLHEIELPVPREPVHAPTERLFQPPPLFPYEGAPRHWVIYRGEDDDDAADTPGPRLRRVPSPPPAPGTHGGLGGADAGPPATGIDPAGFFTGPNLNALIDGLTQNDRPGPPPAPASAIDSLPTVHVSPEHMADGSQCPVCKDEFELGETARELPCKHAYHSDCIVPWLRLHNSCPVCRQELPMPAGDESPDGAGAGDGGEETVPPWQLLAGWGPLAWLLTLGEPDVGGWDNGSRQRGTEADADDTGGNVSRGATILQSFVLVAACFFFVSFLV

SEQ ID NO: 65459 - protein, 178 aa, Triticum aestivum
  peptide (1)..(178): Ceres Seq. ID no. 13655961
  misc_feature (40)..(178): Pfam Name: Equine herpesvirus glycoprotein gp2 Pfam Description: Equine herpesvirus glycoprotein gp2
  misc_feature (9)..(178): Homolog of NCBI NO: 28574039 NR Description: Salivary gland secretion 1 CG3047-PA [Drosophila
  misc_feature (9)..(178): Homolog of NCBI NO: 28574039 NR Description: Salivary gland secretion 1 CG3047-PA [Drosophila
  misc_feature (9)..(178): Homolog of NCBI NO: 28574039 NR Description: Salivary gland secretion 1 CG3047-PA [Drosophila
  misc_feature (9)..(178): Homolog of NCBI NO: 28574039 NR Description: Salivary gland secretion 1 CG3047-PA [Drosophila
  misc_feature (9)..(178): Homolog of NCBI NO: 28574039 NR Description: Salivary gland secretion 1 CG3047-PA [Drosophila
  misc_feature (9)..(178): Homolog of NCBI NO: 28574039 NR Description: Salivary gland secretion 1 CG3047-PA [Drosophila
  misc_feature (12)..(178): Homolog of NCBI NO: 28574039 NR Description: Salivary gland secretion 1 CG3047-PA [Drosophila
  misc_feature (9)..(178): Homolog of NCBI NO: 28574039 NR Description: Salivary gland secretion 1 CG3047-PA [Drosophila
  misc_feature (9)..(178): Homolog of NCBI NO: 28574039 NR Description: Salivary gland secretion 1 CG3047-PA [Drosophila
  misc_feature (9)..(178): Homolog of NCBI NO: 28574039 NR Description: Salivary gland secretion 1 CG3047-PA [Drosophila
NILIENSITSHPRGCTQPLSAGTAGEPASELSTGHLPCQSPARTAPVGGSAGGGACTGATCAAARCARCRPRPPTSSARAASAASSTRSNSPCRASPCTRRPSGSSSRRRCSRTRAPPATGSYTGARTTTTRPTRQAHVSAASRPRRRPRERTAAWAVPMPVHRQPASTRRGSSPAPT

SEQ ID NO: 65460 - DNA, 1517 bp, Triticum aestivum
  misc_feature (1)..(1517): Ceres Seq. ID no. 13597753
gaccactgactgaccgccggccgctttctcctctacggcgacgcccggccgcccagctgctcaccgccggcgctctcgccgacggcgatgtcgtcttcggagccgcggccgcgccccgccgcctccttctccggcgacctgcccgaggacgcgctgtacgaggtcctcctccgcatcccggccaaggagctctgccgcctccgcgccgtctgcccggcctggcacgccctcacctccgatccgcccttcgtcgcggctcacaagtccacccaccgcacggcgcccccgctcctcgccattgcctaccgcgacgacagtgaggtcaacggcgttgcgatttcggatctgtcgggcaacgtcgtgaggcggattccagtcaccgggtatgagattgttatggtgaacgagtcgggcgatgccgttcaccggagctcaagcaaggaggagcatgatagcatctgtgttgtgcgcagccggctagacctcgtgtgcttccactggaatgtgtactctaggaccttctgcgtgctgaacccggtcactggagctactctcgacttaccgatgggccactcaaaggaattggagcatgagctggaggtacagggaagaaaatggggctgccatgtcgagtggtgcgcttttgggaaggtctcctctaccagagagtacaaggcgctccgcatctgtagcattcgtgaccggcaggtatgtgaggttatcacctttgatgacaccaaccatggaagctggaggaggaagcaggaccctccgccccgtatctgtaccggtcgtcagatgagatgcgtggtcgtcgatggggtggtgtacttcttgatggattttcactacacatactttgaaaccggggttataaccattgagcctggtagcatagcttcattcaacctcgaggcggaggagtggggtgttctacctggtcccggacaggtcaagaggtttgtgcaagagaacaagaaatacagttactcacagcttgagctccagttatcattggctgagttgaacggctgcttagttctggttcataatattcataaggtatctatggacttgtggtttttgacagattttgagaaaggtatctgggtcaagaaatacagcttgccttcacatgttgctaggcttttttggtatccttttctcatgttagatgatgggagaattttcttcagtgggatggattgtctggaaggtatattaagtggtggagagcaaggagagggattcctgcaaagttatgatccaagaaatgacacttatgctgatgcactagaactgagagatcccagatcaatttgcatttacacaggaagcgtgctgagtttatagcatagctgtcactgatgaggtcaggaatgatacatcgtactggctgttcaccttatgttctaaatgtgaacaattagtgagataatgttctgatgcatgcatctttgaaaaagtacctttgtgccttcaaagtatattatgttaatctccaatacattttgcgc

SEQ ID NO: 65461 - protein, 421 aa, Triticum aestivum
  peptide (1)..(421): Ceres Seq. ID no. 13597754
  misc_feature (16)..(58): Pfam Name: F-box domain Pfam Description: F-box domain
  misc_feature (193)..(421): Homolog of NCBI NO: 25553615 NR Description: OJ1046_F10.9 [Oryza sativa (japonica
  misc_feature (1)..(369): Homolog of NCBI NO: 34394081 NR Description: hypothetical protein [Oryza sativa (japonica
  misc_feature (1)..(112): Homolog of NCBI NO: 34900696 NR Description: hypothetical protein~predicted by FGENESH etc.
  misc_feature (147)..(367): Homolog of NCBI NO: 34900696 NR Description: hypothetical protein~predicted by FGENESH etc.
  misc_feature (1)..(112): Homolog of NCBI NO: 33146635 NR Description: unknown protein [Oryza sativa (japonica
  misc_feature (147)..(419): Homolog of NCBI NO: 33146635 NR Description: unknown protein [Oryza sativa (japonica
  misc_feature (147)..(337): Homolog of NCBI NO: 34394075 NR Description: hypothetical protein [Oryza sativa (japonica
  misc_feature (7)..(103): Homolog of NCBI NO: 34900700 NR Description: hypothetical protein~predicted by GeneMark.hmm
  misc_feature (102)..(421): Homolog of NCBI NO: 34900700 NR Description: hypothetical protein~predicted by GeneMark.hmm
  misc_feature (7)..(421): Homolog of NCBI NO: 34393890 NR Description: unknown protein [Oryza sativa (japonica
MSSSEPRPRPAASFSGDLPEDALYEVLLRIPAKELCRLRAVCPAWHALTSDPPFVAAHKSTHRTAPPLLAIAYRDDSEVNGVAISDLSGNVVRRIPVTGYEIVMVNESGDAVHRSSSKEEHDSICVVRSRLDLVCFHWNVYSRTFCVLNPVTGATLDLPMGHSKELEHELEVQGRKWGCHVEWCAFGKVSSTREYKALRICSIRDRQVCEVITFDDTNHGSWRRKQDPPPRICTGRQMRCVVVDGVVYFLMDFHYTYFETGVITIEPGSIASFNLEAEEWGVLPGPGQVKRFVQENKKYSYSQLELQLSLAELNGCLVLVHNIHKVSMDLWFLTDFEKGIWVKKYSLPSHVARLFWYPFLMLDDGRIFFSGMDCLEGILSGGEQGEGFLQSYDPRNDTYADALELRDPRSICIYTGSVLSL

SEQ ID NO: 65462 - protein, 318 aa, Triticum aestivum
  peptide (1)..(318): Ceres Seq. ID no. 13597755
  misc_feature (1)..(147): Homolog of NCBI NO: 37535496 NR Description: hypothetical protein [Oryza sativa (japonica
  misc_feature (1)..(152): Homolog of NCBI NO: 37536946 NR Description: unknown protein [Oryza sativa (japonica
  misc_feature (104)..(298): Homolog of NCBI NO: 34393887 NR Description: hypothetical protein [Oryza sativa (japonica
  misc_feature (90)..(318): Homolog of NCBI NO: 25553615 NR Description: OJ1046_F10.9 [Oryza sativa (japonica
  misc_feature (1)..(266): Homolog of NCBI NO: 34394081 NR Description: hypothetical protein [Oryza sativa (japonica
  misc_feature (44)..(264): Homolog of NCBI NO: 34900696 NR Description: hypothetical protein~predicted by FGENESH etc.
  misc_feature (44)..(316): Homolog of NCBI NO: 33146635 NR Description: unknown protein [Oryza sativa (japonica
  misc_feature (44)..(234): Homolog of NCBI NO: 34394075 NR Description: hypothetical protein [Oryza sativa (japonica
  misc_feature (1)..(318): Homolog of NCBI NO: 34900700 NR Description: hypothetical protein~predicted by GeneMark.hmm
  misc_feature (1)..(318): Homolog of NCBI NO: 34393890 NR Description: unknown protein [Oryza sativa (japonica
MVNESGDAVHRSSSKEEHDSICVVRSRLDLVCFHWNVYSRTFCVLNPVTGATLDLPMGHSKELEHELEVQGRKWGCHVEWCAFGKVSSTREYKALRICSIRDRQVCEVITFDDTNHGSWRRKQDPPPRICTGRQMRCVVVDGVVYFLMDFHYTYFETGVITIEPGSIASFNLEAEEWGVLPGPGQVKRFVQENKKYSYSQLELQLSLAELNGCLVLVHNIHKVSMDLWFLTDFEKGIWVKKYSLPSHVARLFWYPFLMLDDGRIFFSGMDCLEGILSGGEQGEGFLQSYDPRNDTYADALELRDPRSICIYTGSVLSL

SEQ ID NO: 65463 - protein, 262 aa, Triticum aestivum
  peptide (1)..(262): Ceres Seq. ID no. 13597756
  misc_feature (1)..(91): Homolog of NCBI NO: 37535496 NR Description: hypothetical protein [Oryza sativa (japonica
  misc_feature (1)..(96): Homolog of NCBI NO: 37536946 NR Description: unknown protein [Oryza sativa (japonica
  misc_feature (48)..(242): Homolog of NCBI NO: 34393887 NR Description: hypothetical protein [Oryza sativa (japonica
  misc_feature (34)..(262): Homolog of NCBI NO: 25553615 NR Description: OJ1046_F10.9 [Oryza sativa (japonica
  misc_feature (1)..(210): Homolog of NCBI NO: 34394081 NR Description: hypothetical protein [Oryza sativa (japonica
  misc_feature (1)..(208): Homolog of NCBI NO: 34900696 NR Description: hypothetical protein~predicted by FGENESH etc.
  misc_feature (1)..(260): Homolog of NCBI NO: 33146635 NR Description: unknown protein [Oryza sativa (japonica
  misc_feature (1)..(178): Homolog of NCBI NO: 34394075 NR Description: hypothetical protein [Oryza sativa (japonica
  misc_feature (1)..(262): Homolog of NCBI NO: 34900700 NR Description: hypothetical protein~predicted by GeneMark.hmm
  misc_feature (1)..(262): Homolog of NCBI NO: 34393890 NR Description: unknown protein [Oryza sativa (japonica
MGHSKELEHELEVQGRKWGCHVEWCAFGKVSSTREYKALRICSIRDRQVCEVITFDDTNHGSWRRKQDPPPRICTGRQMRCVVVDGVVYFLMDFHYTYFETGVITIEPGSIASFNLEAEEWGVLPGPGQVKRFVQENKKYSYSQLELQLSLAELNGCLVLVHNIHKVSMDLWFLTDFEKGIWVKKYSLPSHVARLFWYPFLMLDDGRIFFSGMDCLEGILSGGEQGEGFLQSYDPRNDTYADALELRDPRSICIYTGSVLSL

SEQ ID NO: 65464 - DNA, 1368 bp, Triticum aestivum
  misc_feature (1)..(1368): Ceres Seq. ID no. 12617911
cccccgagcgcgccccgcctcgccgaccggtcgccggagatgtcccgcacgctggtgcagccggtggggcagaagcggctgaccaacgtggccgtggtgcggctgcgcaagggcggccagcggttcgagatcgcctgcttccccaacaaggtggtcaactggcgcgaccgcgtcgagaaggacctcgacgaggtgctccagtcccacaacgtctactccaacgtctccaagggcgtcctcgccaagtccaaggacctcatcaggatcttcggcaccgacgacctcgtcgaaatctgcgtcgagattttggagaaaggggagctccaggtttctggcaaggagagggaggcgcagctgtccgcgcagttcagggacatcgccaccatcgtgatggagaagactatcagtactgagacccggcgcccctacaccatgaacatgatcgagcgcatcatgcacgagatacactttgccgtcgatccaaaccttacctccaaggaacaggcactgagagttattaagaagctaatcgagaaccctaaatacaagataaagcgtgcaccattgacagtgcggttcattgcacctaagtccaatcttgctggccttatggagaagcttgatgggtggaatgcaattgttctttcaaaggatgagtctgccgatcagtcttccgttgtatgtgagattgagccatctattctgcactcgtgtgaagagaaactgaaggacgtgcaagggagggtggaagtactctcggtgtcggcacacacagaaggtggctcttctacagaccaatatgacaatgtcgaggacaatgtggagaaggcacagcccgtgcctgcgaaggagtctggtgctgttgctcagctaagtgaaaccatgcagaaacagagcctttcaagtgaagtggaaagccagggtcaggcaccaggcaagccgcagaaaagatgcagagaatgtgacgtattcatggaggacaagctgtacagagaccactgcaagtccgggtggcacaagcacaactacacacgccacaagaatgggcttcccccactcagccaagaggagtgcttgatggaaatggagatggcagattcccagaggggtctgaaggactacgatttctgaggtgggttttgtctagcactccctctcaccacgccttcaaggccgagagatggtatgcacaaggcatgaattttgcagtcttgttgtttccgtggacatagtcatcatttggtaaatgctggtatgaagtggggaactagttttgcggtacgctagcaagtttataaaatgtaatcaggttacgttgtgtgaatgtgaactgtgtgtagttggctgagtaaacttgtggcagtactc

SEQ ID NO: 65465 - protein, 376 aa, Triticum aestivum
  peptide (1)..(376): Ceres Seq. ID no. 12617912
  misc_feature (19)..(259): Pfam Name: Uncharacterized protein family UPF0023 Pfam Description: Uncharacterized protein family UPF0023
  misc_feature (14)..(260): Homolog of NCBI NO: 25144459 NR Description: Protein III (28.5 kD) [Caenorhabditis elegans]
  misc_feature (17)..(266): Homolog of NCBI NO: 28828466 NR Description: similar to Homo sapiens (Human). Hypothetical
  misc_feature (14)..(260): Homolog of NCBI NO: 39586134 NR Description: Hypothetical protein CBG15250 [Caenorhabditis
  misc_feature (35)..(260): Homolog of NCBI NO: 29476858 NR Description: Unknown (protein for MGC:56700) [Danio rerio]
  misc_feature (17)..(260): Homolog of NCBI NO: 4929663 NR Description: CGI-97 protein [Homo sapiens]
  misc_feature (17)..(260): Homolog of NCBI NO: 28416940 NR Description: Shwachman-Bodian-Diamond syndrome protein [Homo
  misc_feature (17)..(260): Homolog of NCBI NO: 27664348 NR Description: similar to RIKEN cDNA 4733401P19
  misc_feature (17)..(260): Homolog of NCBI NO: 23956138 NR Description: RIKEN cDNA 4733401P19 [Mus musculus]
  misc_feature (14)..(376): Homolog of NCBI NO: 18401084 NR Description: expressed protein
  misc_feature (14)..(376): Homolog of NCBI NO: 21554225 NR Description: unknown [Arabidopsis thaliana]
PPSAPRLADRSPEMSRTLVQPVGQKRLTNVAVVRLRKGGQRFEIACFPNKVVNWRDRVEKDLDEVLQSHNVYSNVSKGVLAKSKDLIRIFGTDDLVEICVEILEKGELQVSGKEREAQLSAQFRDIATIVMEKTISTETRRPYTMNMIERIMHEIHFAVDPNLTSKEQALRVIKKLIENPKYKIKRAPLTVRFIAPKSNLAGLMEKLDGWNAIVLSKDESADQSSVVCEIEPSILHSCEEKLKDVQGRVEVLSVSAHTEGGSSTDQYDNVEDNVEKAQPVPAKESGAVAQLSETMQKQSLSSEVESQGQAPGKPQKRCRECDVFMEDKLYRDHCKSGWHKHNYTRHKNGLPPLSQEECLMEMEMADSQRGLKDYDF

SEQ ID NO: 65466 - protein, 363 aa, Triticum aestivum
  peptide (1)..(363): Ceres Seq. ID no. 12617913
  misc_feature (6)..(246): Pfam Name: Uncharacterized protein family UPF0023 Pfam Description: Uncharacterized protein family UPF0023
  misc_feature (1)..(247): Homolog of NCBI NO: 25144459 NR Description: Protein III (28.5 kD) [Caenorhabditis elegans]
  misc_feature (4)..(253): Homolog of NCBI NO: 28828466 NR Description: similar to Homo sapiens (Human). Hypothetical
  misc_feature (1)..(247): Homolog of NCBI NO: 39586134 NR Description: Hypothetical protein CBG15250 [Caenorhabditis
  misc_feature (22)..(247): Homolog of NCBI NO: 29476858 NR Description: Unknown (protein for MGC:56700) [Danio rerio]
  misc_feature (4)..(247): Homolog of NCBI NO: 4929663 NR Description: CGI-97 protein [Homo sapiens]
  misc_feature (4)..(247): Homolog of NCBI NO: 28416940 NR Description: Shwachman-Bodian-Diamond syndrome protein [Homo
  misc_feature (4)..(247): Homolog of NCBI NO: 27664348 NR Description: similar to RIKEN cDNA 4733401P19
  misc_feature (4)..(247): Homolog of NCBI NO: 23956138 NR Description: RIKEN cDNA 4733401P19 [Mus musculus]
  misc_feature (1)..(363): Homolog of NCBI NO: 18401084 NR Description: expressed protein
  misc_feature (1)..(363): Homolog of NCBI NO: 21554225 NR Description: unknown [Arabidopsis thaliana]
MSRTLVQPVGQKRLTNVAVVRLRKGGQRFEIACFPNKVVNWRDRVEKDLDEVLQSHNVYSNVSKGVLAKSKDLIRIFGTDDLVEICVEILEKGELQVSGKEREAQLSAQFRDIATIVMEKTISTETRRPYTMNMIERIMHEIHFAVDPNLTSKEQALRVIKKLIENPKYKIKRAPLTVRFIAPKSNLAGLMEKLDGWNAIVLSKDESADQSSVVCEIEPSILHSCEEKLKDVQGRVEVLSVSAHTEGGSSTDQYDNVEDNVEKAQPVPAKESGAVAQLSETMQKQSLSSEVESQGQAPGKPQKRCRECDVFMEDKLYRDHCKSGWHKHNYTRHKNGLPPLSQEECLMEMEMADSQRGLKDYDF

SEQ ID NO: 65467 - protein, 246 aa, Triticum aestivum
  peptide (1)..(246): Ceres Seq. ID no. 12617914
  misc_feature (1)..(129): Pfam Name: Uncharacterized protein family UPF0023 Pfam Description: Uncharacterized protein family UPF0023
  misc_feature (1)..(130): Homolog of NCBI NO: 25144459 NR Description: Protein III (28.5 kD) [Caenorhabditis elegans]
  misc_feature (1)..(136): Homolog of NCBI NO: 28828466 NR Description: similar to Homo sapiens (Human). Hypothetical
  misc_feature (1)..(130): Homolog of NCBI NO: 39586134 NR Description: Hypothetical protein CBG15250 [Caenorhabditis
  misc_feature (1)..(130): Homolog of NCBI NO: 29476858 NR Description: Unknown (protein for MGC:56700) [Danio rerio]
  misc_feature (1)..(130): Homolog of NCBI NO: 4929663 NR Description: CGI-97 protein [Homo sapiens]
  misc_feature (1)..(130): Homolog of NCBI NO: 28416940 NR Description: Shwachman-Bodian-Diamond syndrome protein [Homo
  misc_feature (1)..(130): Homolog of NCBI NO: 27664348 NR Description: similar to RIKEN cDNA 4733401P19
  misc_feature (1)..(130): Homolog of NCBI NO: 23956138 NR Description: RIKEN cDNA 4733401P19 [Mus musculus]
  misc_feature (1)..(246): Homolog of NCBI NO: 18401084 NR Description: expressed protein
  misc_feature (1)..(246): Homolog of NCBI NO: 21554225 NR Description: unknown [Arabidopsis thaliana]
MEKTISTETRRPYTMNMIERIMHEIHFAVDPNLTSKEQALRVIKKLIENPKYKIKRAPLTVRFIAPKSNLAGLMEKLDGWNAIVLSKDESADQSSVVCEIEPSILHSCEEKLKDVQGRVEVLSVSAHTEGGSSTDQYDNVEDNVEKAQPVPAKESGAVAQLSETMQKQSLSSEVESQGQAPGKPQKRCRECDVFMEDKLYRDHCKSGWHKHNYTRHKNGLPPLSQEECLMEMEMADSQRGLKDYDF

SEQ ID NO: 65468 - DNA, 1257 bp, Triticum aestivum
  misc_feature (1)..(1257): Ceres Seq. ID no. 13597668
accgcaaagaaccacgcgaaccgaacccacgcaccatcagcgaagaggagagggggcggccaaagacaagagaaaacgcagccgccgccgggaggagagcgcagcgtgggagcaaggagcggcagccggcaggcaatgggcaacagcatcggcggccggcgcaagggcgccaaggtgatgcagctggacggcaccgccttcagggtgaagccgccggcgtacgcgggcgccgtgctgcgcgaccacccgggcttccagctgctcgagtcggagcaggtcaagctgctcggcgtccgcgcgcgcccgctcgagcaggacgcgctgctccgcccgggccagctctacttcctcgtcgcgctgccccgccccaccgtgcccccgcgccgcgcctggtccggcgcgctccacgtcggcgcgcgcgagaggctcgagtcgctcatgctcacgcgccgctccacctccgacctcaccttcccgacctcgggcaccgcgccggcctccccgatgtccaccgcctccgagggcgggccggtccagctcaggatgcgcctgcccaaggcgcaggtcgccaagcttatgggcgagagccgggacgccgccgaggcggccgctaagatcatgcagctctgcgccgccaacggcgctgtgacgccggagcggagcccgcggttcctgccgacggcggactggggcactggtgggttcgcgcagacgccagagcggagcccgcggttcgtgccgacgccggactggggcgccggcaggttcgcgcaaaccccagagcggagtcccaggttcgccgtcacgcccgagtggggtgccaggttcatgatgccgacgacgccggagaggggcgtagagacggcgaagacgccggataggtggcccgctttaccccgcacgccggagtatgcatcagcggacgtcaaggccagccggaaggagaagcgaacgcggttcctggccttgccggatgagatcatagcatgatggcttctcgtccacctgaagtgatagatcgatcgaccacagattgccggagctggggacgagaggccgccgacggtttcctgcctcgcgcctcgcccgcttcttcttcttctccttctccttcttcttcttcatacggcatggagcgtcgttttcctctcttgtttacctttttagcctcggcctgcgataacattgctgcgagctgtggtgctctcagtagttagcttaggggagatgtatatggacctctatgtataaacttac

SEQ ID NO: 65469 - protein, 329 aa, Triticum aestivum
  peptide (1)..(329): Ceres Seq. ID no. 13597669
  misc_feature (46)..(226): Homolog of NCBI NO: 25553695 NR Description: P0479C08.15 [Oryza sativa (japonica
TAKNHANRTHAPSAKRRGGGQRQEKTQPPPGGERSVGARSGSRQAMGNSIGGRRKGAKVMQLDGTAFRVKPPAYAGAVLRDHPGFQLLESEQVKLLGVRARPLEQDALLRPGQLYFLVALPRPTVPPRRAWSGALHVGARERLESLMLTRRSTSDLTFPTSGTAPASPMSTASEGGPVQLRMRLPKAQVAKLMGESRDAAEAAAKIMQLCAANGAVTPERSPRFLPTADWGTGGFAQTPERSPRFVPTPDWGAGRFAQTPERSPRFAVTPEWGARFMMPTTPERGVETAKTPDRWPALPRTPEYASADVKASRKEKRTRFLALPDEIIA

SEQ ID NO: 65470 - protein, 284 aa, Triticum aestivum
  peptide (1)..(284): Ceres Seq. ID no. 13597670
  misc_feature (1)..(181): Homolog of NCBI NO: 25553695 NR Description: P0479C08.15 [Oryza sativa (japonica
MGNSIGGRRKGAKVMQLDGTAFRVKPPAYAGAVLRDHPGFQLLESEQVKLLGVRARPLEQDALLRPGQLYFLVALPRPTVPPRRAWSGALHVGARERLESLMLTRRSTSDLTFPTSGTAPASPMSTASEGGPVQLRMRLPKAQVAKLMGESRDAAEAAAKIMQLCAANGAVTPERSPRFLPTADWGTGGFAQTPERSPRFVPTPDWGAGRFAQTPERSPRFAVTPEWGARFMMPTTPERGVETAKTPDRWPALPRTPEYASADVKASRKEKRTRFLALPDEIIA

SEQ ID NO: 65471 - protein, 270 aa, Triticum aestivum
  peptide (1)..(270): Ceres Seq. ID no. 13597671
  misc_feature (1)..(167): Homolog of NCBI NO: 25553695 NR Description: P0479C08.15 [Oryza sativa (japonica
MQLDGTAFRVKPPAYAGAVLRDHPGFQLLESEQVKLLGVRARPLEQDALLRPGQLYFLVALPRPTVPPRRAWSGALHVGARERLESLMLTRRSTSDLTFPTSGTAPASPMSTASEGGPVQLRMRLPKAQVAKLMGESRDAAEAAAKIMQLCAANGAVTPERSPRFLPTADWGTGGFAQTPERSPRFVPTPDWGAGRFAQTPERSPRFAVTPEWGARFMMPTTPERGVETAKTPDRWPALPRTPEYASADVKASRKEKRTRFLALPDEIIA

SEQ ID NO: 65472 - DNA, 1220 bp, Triticum aestivum
  misc_feature (1)..(1220): Ceres Seq. ID no. 13597757
atcgaaaacccttcgacccaacccatacaaactcaaacccccacgaaaacccctctctcctctccgcttctccctggccgccgaaaccctaacctagccgcgcgtcgccgccgccgccggcgcaccagtcaccatgtcgaaccccaaggggtcgaagatgctccagttcgtcaactaccggatgcgcgtgacgatccaggacggccgccaactcgtggggaagttcatggccttcgatcgccacatgaacctcgtcctcggcgactgcgaggagttccgcaagctcccgccctcaaaatcttccaagaccacaggcgagcgcgaggagcggaggacgctcggcctgctgcttcttcgtggcgaggaagtcgtctccatgaccgtcgagggcccgcccccgcccgacgagtcccgggccaaggcctccgctggtgttgccgcgctttccggcactggcgtcggtcgcgctgccggccgtggggtggccaccggcccgctgctccaggcgcagcccggcctctccggccctgttcggggcgtgggcggtccggcccccggcatgatgcagccccagatctcgcgtcccccaatgccgaacctctcagcgccgccggtggcgtacccacaggtcgtccgcccgccaccgatgggtatgccgcccatgcgacctggtggcccgccaccgatgcagatgcagtttcagcgcccgccgggtcccccgcctgcgccataccctggggccccgccgcagcagttcatgaggggaccgccaccgatggggcctccaccagggaggccggggatgccaagcatgccaccaccgccagggatgaggccgatgccaccaacgcagtttggacaaccacccaggcatggaatgccgccaccaccgcctggtccacagcagcctggacagaacccccagcagtagaaaaacctttctggtttggtccttgcagtcccacctgtggaagattcatcttcggaagagagaaaagtcttgtcggtgcagcactcttgcttttgatgggaggagacggactgttttccaacgcaatgtacgtaaaagaggctgaagcttgtttaactgttggttgttaagctagggacatggatagactgtttcgttgtgtcagtaccttgttgctggatgtgcttgcacttgtattgagatattatttcgcactattaacttcagatcataaattgctttgcttgcg

SEQ ID NO: 65473 - protein, 366 aa, Triticum aestivum
  peptide (1)..(366): Ceres Seq. ID no. 13597758
IENPSTQPIQTQTPTKTPLSSPLLPGRRNPNLAARRRRRRRTSHHVEPQGVEDAPVRQLPDARDDPGRPPTRGEVHGLRSPHEPRPRRLRGVPQAPALKIFQDHRRARGAEDARPAASSWRGSRLHDRRGPAPARRVPGQGLRWCCRAFRHWRRSRCRPWGGHRPAAPGAARPLRPCSGRGRSGPRHDAAPDLASPNAEPLSAAGGVPTGRPPATDGYAAHATWWPATDADAVSAPAGSPACAIPWGPAAAVHEGTATDGASTREAGDAKHATTARDEADATNAVWTTTQAWNAATTAWSTAAWTEPPAVEKPFWFGPCSPTCGRFIFGREKSLVGAALLLLMGGDGLFSNAMYVKEAEACLTVGC

SEQ ID NO: 65474 - protein, 265 aa, Triticum aestivum
  peptide (1)..(265): Ceres Seq. ID no. 13597759
  misc_feature (7)..(84): Pfam Name: LSM domain Pfam Description: LSM domain
  misc_feature (1)..(254): Homolog of NCBI NO: 7208221 NR Description: small nuclear ribonucleoprotein B' [Macropus
  misc_feature (1)..(254): Homolog of NCBI NO: 12643865 NR Description: Small nuclear ribonucleoprotein associated
  misc_feature (1)..(254): Homolog of NCBI NO: 10720263 NR Description: Small nuclear ribonucleoprotein associated
  misc_feature (1)..(254): Homolog of NCBI NO: 8099650 NR Description: snRNP-associated protein; SmB [Danio rerio]
  misc_feature (1)..(254): Homolog of NCBI NO: 38150007 NR Description: small nuclear ribonucleoprotein polypeptide B/B'
  misc_feature (1)..(254): Homolog of NCBI NO: 21536707 NR Description: putative snRNP protein [Arabidopsis thaliana]
  misc_feature (1)..(254): Homolog of NCBI NO: 15241519 NR Description: small nuclear ribonucleoprotein, putative (snRNP)
  misc_feature (1)..(265): Homolog of NCBI NO: 15237095 NR Description: small nuclear ribonucleoprotein, putative (snRNP)
  misc_feature (1)..(265): Homolog of NCBI NO: 33146808 NR Description: putative snRNP(small nuclear ribonucleoprotein
  misc_feature (1)..(265): Homolog of NCBI NO: 34900024 NR Description: putative snRNP protein [Oryza sativa (japonica
MSNPKGSKMLQFVNYRMRVTIQDGRQLVGKFMAFDRHMNLVLGDCEEFRKLPPSKSSKTTGEREERRTLGLLLLRGEEVVSMTVEGPPPPDESRAKASAGVAALSGTGVGRAAGRGVATGPLLQAQPGLSGPVRGVGGPAPGMMQPQISRPPMPNLSAPPVAYPQVVRPPPMGMPPMRPGGPPPMQMQFQRPPGPPPAPYPGAPPQQFMRGPPPMGPPPGRPGMPSMPPPPGMRPMPPTQFGQPPRHGMPPPPPGPQQPGQNPQQ

SEQ ID NO: 65475 - protein, 257 aa, Triticum aestivum
  peptide (1)..(257): Ceres Seq. ID no. 13597760
  misc_feature (1)..(76): Pfam Name: LSM domain Pfam Description: LSM domain
  misc_feature (1)..(246): Homolog of NCBI NO: 7208221 NR Description: small nuclear ribonucleoprotein B' [Macropus
  misc_feature (1)..(246): Homolog of NCBI NO: 12643865 NR Description: Small nuclear ribonucleoprotein associated
  misc_feature (1)..(246): Homolog of NCBI NO: 10720263 NR Description: Small nuclear ribonucleoprotein associated
  misc_feature (1)..(246): Homolog of NCBI NO: 8099650 NR Description: snRNP-associated protein; SmB [Danio rerio]
  misc_feature (1)..(246): Homolog of NCBI NO: 38150007 NR Description: small nuclear ribonucleoprotein polypeptide B/B'
  misc_feature (1)..(246): Homolog of NCBI NO: 21536707 NR Description: putative snRNP protein [Arabidopsis thaliana]
  misc_feature (1)..(246): Homolog of NCBI NO: 15241519 NR Description: small nuclear ribonucleoprotein, putative (snRNP)
  misc_feature (1)..(257): Homolog of NCBI NO: 15237095 NR Description: small nuclear ribonucleoprotein, putative (snRNP)
  misc_feature (1)..(257): Homolog of NCBI NO: 33146808 NR Description: putative snRNP(small nuclear ribonucleoprotein
  misc_feature (1)..(257): Homolog of NCBI NO: 34900024 NR Description: putative snRNP protein [Oryza sativa (japonica
MLQFVNYRMRVTIQDGRQLVGKFMAFDRHMNLVLGDCEEFRKLPPSKSSKTTGEREERRTLGLLLLRGEEVVSMTVEGPPPPDESRAKASAGVAALSGTGVGRAAGRGVATGPLLQAQPGLSGPVRGVGGPAPGMMQPQISRPPMPNLSAPPVAYPQVVRPPPMGMPPMRPGGPPPMQMQFQRPPGPPPAPYPGAPPQQFMRGPPPMGPPPGRPGMPSMPPPPGMRPMPPTQFGQPPRHGMPPPPPGPQQPGQNPQQ

SEQ ID NO: 65476 - DNA, 1760 bp, Triticum aestivum
  misc_feature (1)..(1760): Ceres Seq. ID no. 13597661
atcctaattgaaaaaacacccaaattccagttactcttttggtctttccatcgtcttccttagccggcgacttgcgcgcaggttttcctcccttcctcggcgacttgaggagtgtccagatctagcaattttactccggtgatgaaaacaagtgcccccgtggtttgtgggcagggaccaaggattgatcgtcgttccataaaaccttttaagatgacaagatccaaggatattcagcttcaccatctacctacagatgtactgcgtcgtatactatcacaattgacaatgaaagaagccatgcgaatgagcatactatctaagaagtggagaaggctttggaaatgctacccaaagttagtattcaccagagccatgatgtgtcgcagtaacgccacgacaggccctgcaaaacccttgcggacaaggtttatcaggggggtcaacagcatccagcgacagctcaagtcatccaacctgaataagtttgtggtcaagtttgcgcttcgcaaaaggcacacacctcacattgatagatgggtcaatttctgtgcctcgtcgatggcgaagcatgttgttctcgatttatgtccagggccgaaaggcagtaccgacacagatgacaagtacagtttcccgctgcatcttctcggcgcctcgggtggttcttgcgtgaagtctcttagtctggggttcgtctatttagcactgcctcctgatcaccgtggatttgcaaaccttaagaagctctctctggaaatagttcatgtcacaggggatctcgggcgcctgctcccaaaatgcgctgttcttgagtggctaagcctcaccaggtgtagactggacgagctaagcataggtgaggaactgagcaggctccgttgtttgcaggtcaagtactgtatgctgcagaagctgcatgtccgagctccaaacctcgccatgtttgtgttcgctggtcgtgtgatacctatattgcttggtgaatctgtgaagatttcagaggcgacggtcgacttggtcacatcctcggactgcttcaattacgtcttcactgatcttgtcgatgctctttcgcatgttccgtccctctccataggcttccgaattgaaaccaaggtgataaattttgtgaaaaatcggaccatgctcacaaatctgagacgtctggtcctgaaaatcgatattgttgggtcgccggaagtcactggtgggattcttcgtttggcctatctgttggagttagcccctgctttggaagagttagtactccatatgcattgttttgactcggcaatctatggtgaaccaagagaagatgcctaccagccacatcctcaccgtcatctcaagactatcaaaatgacggggttctatggattacttggtcaggttgagctagcactctaccttcttcggaatgcgacttctctcgagcgtatgatcatagatccggtggtgaggaataattggcctattccacccatgggtggagcaaagcaagatatagaccggggcacgtcgattgccctcaataaactttcgaggcaagagttcagaaaggtccttgacattctgtattaaggggatatgaaactatgttgcaggtgtattctagattatttgttttaaggaaggagagatgccaatagatgttttttttaaaggagatgccaatagatgtttgtttgaaggaaggagctcaggaaatgccgtccttaccatctgtcagagaaataggaaactgaatcacagctgtc

SEQ ID NO: 65477 - protein, 480 aa, Triticum aestivum
  peptide (1)..(480): Ceres Seq. ID no. 15222162
  misc_feature (5)..(205): Homolog of NCBI NO: 13324796 NR Description: hypothetical protein [Oryza sativa]
  misc_feature (24)..(379): Homolog of NCBI NO: 38344931 NR Description: OSJNBa0018M05.22 [Oryza sativa (japonica
  misc_feature (25)..(478): Homolog of NCBI NO: 34899940 NR Description: P0428D12.10 [Oryza sativa (japonica
  misc_feature (31)..(382): Homolog of NCBI NO: 34902734 NR Description: hypothetical protein~similar to Oryza sativa
  misc_feature (31)..(478): Homolog of NCBI NO: 34394889 NR Description: unknown protein [Oryza sativa (japonica
  misc_feature (44)..(440): Homolog of NCBI NO: 18481703 NR Description: hypothetical protein [Sorghum bicolor]
  misc_feature (27)..(479): Homolog of NCBI NO: 34899896 NR Description: OJ1714_H10.31 [Oryza sativa (japonica
  misc_feature (379)..(438): Homolog of NCBI NO: 34913938 NR Description: OSJNBa0066C06.21 [Oryza sativa (japonica
  misc_feature (58)..(388): Homolog of NCBI NO: 34913938 NR Description: OSJNBa0066C06.21 [Oryza sativa (japonica
  misc_feature (24)..(438): Homolog of NCBI NO: 34394100 NR Description: unknown protein [Oryza sativa (japonica
MKTSAPVVCGQGPRIDRRSIKPFKMTRSKDIQLHHLPTDVLRRILSQLTMKEAMRMSILSKKWRRLWKCYPKLVFTRAMMCRSNATTGPAKPLRTRFIRGVNSIQRQLKSSNLNKFVVKFALRKRHTPHIDRWVNFCASSMAKHVVLDLCPGPKGSTDTDDKYSFPLHLLGASGGSCVKSLSLGFVYLALPPDHRGFANLKKLSLEIVHVTGDLGRLLPKCAVLEWLSLTRCRLDELSIGEELSRLRCLQVKYCMLQKLHVRAPNLAMFVFAGRVIPILLGESVKISEATVDLVTSSDCFNYVFTDLVDALSHVPSLSIGFRIETKVINFVKNRTMLTNLRRLVLKIDIVGSPEVTGGILRLAYLLELAPALEELVLHMHCFDSAIYGEPREDAYQPHPHRHLKTIKMTGFYGLLGQVELALYLLRNATSLERMIIDPVVRNNWPIPPMGGAKQDIDRGTSIALNKLSRQEFRKVLDILY

SEQ ID NO: 65478 - protein, 456 aa, Triticum aestivum
  peptide (1)..(456): Ceres Seq. ID no. 15222163
  misc_feature (1)..(181): Homolog of NCBI NO: 13324796 NR Description: hypothetical protein [Oryza sativa]
  misc_feature (1)..(355): Homolog of NCBI NO: 38344931 NR Description: OSJNBa0018M05.22 [Oryza sativa (japonica
  misc_feature (1)..(454): Homolog of NCBI NO: 34899940 NR Description: P0428D12.10 [Oryza sativa (japonica
  misc_feature (7)..(358): Homolog of NCBI NO: 34902734 NR Description: hypothetical protein~similar to Oryza sativa
  misc_feature (7)..(454): Homolog of NCBI NO: 34394889 NR Description: unknown protein [Oryza sativa (japonica
  misc_feature (20)..(416): Homolog of NCBI NO: 18481703 NR Description: hypothetical protein [Sorghum bicolor]
  misc_feature (3)..(455): Homolog of NCBI NO: 34899896 NR Description: OJ1714_H10.31 [Oryza sativa (japonica
  misc_feature (355)..(414): Homolog of NCBI NO: 34913938 NR Description: OSJNBa0066C06.21 [Oryza sativa (japonica
  misc_feature (34)..(364): Homolog of NCBI NO: 34913938 NR Description: OSJNBa0066C06.21 [Oryza sativa (japonica
  misc_feature (1)..(414): Homolog of NCBI NO: 34394100 NR Description: unknown protein [Oryza sativa (japonica
MTRSKDIQLHHLPTDVLRRILSQLTMKEAMRMSILSKKWRRLWKCYPKLVFTRAMMCRSNATTGPAKPLRTRFIRGVNSIQRQLKSSNLNKFVVKFALRKRHTPHIDRWVNFCASSMAKHVVLDLCPGPKGSTDTDDKYSFPLHLLGASGGSCVKSLSLGFVYLALPPDHRGFANLKKLSLEIVHVTGDLGRLLPKCAVLEWLSLTRCRLDELSIGEELSRLRCLQVKYCMLQKLHVRAPNLAMFVFAGRVIPILLGESVKISEATVDLVTSSDCFNYVFTDLVDALSHVPSLSIGFRIETKVINFVKNRTMLTNLRRLVLKIDIVGSPEVTGGILRLAYLLELAPALEELVLHMHCFDSAIYGEPREDAYQPHPHRHLKTIKMTGFYGLLGQVELALYLLRNATSLERMIIDPVVRNNWPIPPMGGAKQDIDRGTSIALNKLSRQEFRKVLDILY

SEQ ID NO: 65479 - protein, 431 aa, Triticum aestivum
  peptide (1)..(431): Ceres Seq. ID no. 15222164
  misc_feature (1)..(156): Homolog of NCBI NO: 13324796 NR Description: hypothetical protein [Oryza sativa]
  misc_feature (1)..(330): Homolog of NCBI NO: 38344931 NR Description: OSJNBa0018M05.22 [Oryza sativa (japonica
  misc_feature (1)..(429): Homolog of NCBI NO: 34899940 NR Description: P0428D12.10 [Oryza sativa (japonica
  misc_feature (1)..(333): Homolog of NCBI NO: 34902734 NR Description: hypothetical protein~similar to Oryza sativa
  misc_feature (1)..(429): Homolog of NCBI NO: 34394889 NR Description: unknown protein [Oryza sativa (japonica
  misc_feature (1)..(391): Homolog of NCBI NO: 18481703 NR Description: hypothetical protein [Sorghum bicolor]
  misc_feature (1)..(430): Homolog of NCBI NO: 34899896 NR Description: OJ1714_H10.31 [Oryza sativa (japonica
  misc_feature (330)..(389): Homolog of NCBI NO: 34913938 NR Description: OSJNBa0066C06.21 [Oryza sativa (japonica
  misc_feature (9)..(339): Homolog of NCBI NO: 34913938 NR Description: OSJNBa0066C06.21 [Oryza sativa (japonica
  misc_feature (1)..(389): Homolog of NCBI NO: 34394100 NR Description: unknown protein [Oryza sativa (japonica
MKEAMRMSILSKKWRRLWKCYPKLVFTRAMMCRSNATTGPAKPLRTRFIRGVNSIQRQLKSSNLNKFVVKFALRKRHTPHIDRWVNFCASSMAKHVVLDLCPGPKGSTDTDDKYSFPLHLLGASGGSCVKSLSLGFVYLALPPDHRGFANLKKLSLEIVHVTGDLGRLLPKCAVLEWLSLTRCRLDELSIGEELSRLRCLQVKYCMLQKLHVRAPNLAMFVFAGRVIPILLGESVKISEATVDLVTSSDCFNYVFTDLVDALSHVPSLSIGFRIETKVINFVKNRTMLTNLRRLVLKIDIVGSPEVTGGILRLAYLLELAPALEELVLHMHCFDSAIYGEPREDAYQPHPHRHLKTIKMTGFYGLLGQVELALYLLRNATSLERMIIDPVVRNNWPIPPMGGAKQDIDRGTSIALNKLSRQEFRKVLDILY

SEQ ID NO: 65480 - DNA, 1408 bp, Triticum aestivum
  misc_feature (1)..(1408): Ceres Seq. ID no. 12617920
agaacatcctaatcgaaaactcccgccgctggcccggcaatttccccacttttccctccctccctccgctcaaccccaccccagcgctatggccgcctcctcctccgccgccgcccccgccgacacgtacgacatcccgtgggtggagaagtaccgccccagccgcgtcgccgatgtcgtcggcaacgccgacgccgtcagccgcctcgaggtcatcgcccgcgacggcaacatgcccaacctcatcctctccgggcctccggggaccgggaagacgacgagcatcctggcgctggcccacgagatgctcgggcccagctaccgcgagggagtgctcgagctcaacgcctcggacgacagggggcttgatgtggtgaggaacaagatcaagatgttcgcgcagaagaaggtcacactgccgcccggacggcacaagatcgtcatactggacgaggctgacagcatgacaacaggggcacagcaagcactgagaagaaccatggagatttattccaacaccacaagatttgctcttgcctgcaatacttcatctaaaatcattgaacccatccaaagtcgctgcgctattgtccggttctcgaggctttcagatcaggagatccttggccgccttatgatcgtggttgctgctgagaaggtcccttatgtgccagaaggtcttgaagccatcatttttactgctgatggtgacatgagacaagctttgaacaatttgcaagctacagtcagtgggttccgttttgttaatcaagaaaatgtgttcaaggtttgcgatcaaccacatcccttgcatgtcaagagtatggtgaaaaatgtactagatgggaagtttgatgaggcctgctctggcctaaagcaactctatgatttgggctactctcctactgacataatcactactctcttccgtgtcatcaagaactatgacatggctgaatttctgaagctggagttgctgaaggaaaccggatttgcgcacatgaggatctgtgacggcgtcgggtcattccttcagctttctggccttctggccaagtttgctctggtgagagaaacagcaaaggcctaacgctgtgcagctgctctgacatcagttaacagtgttgtcatgcatagcctgttttatcgctactctgtcgtggtatctcagtgtgtaagatagttcttcgctgaagtgaactatttatgcttgtttagcatcggagatatagttgtagcctgtagtgactagtgaggagactgagtcctcttagttcgagtgcttttagcccagccatccgtggttcacgcgctgctgtatttcggaactaatctgggtatttttcgggtcattttgtagtctattgagctgtcgtgccagcatcatgaaggaaccgtcagttatccg

SEQ ID NO: 65481 - protein, 362 aa, Triticum aestivum
  peptide (1)..(362): Ceres Seq. ID no. 12617921
  misc_feature (80)..(251): Pfam Name: ATPase family associated with various cellular Pfam Description: ATPase family associated with various cellular
  misc_feature (20)..(351): Homolog of NCBI NO: 4506491 NR Description: replication factor C (activator 1) 4, 37kDa
  misc_feature (31)..(352): Homolog of NCBI NO: 28950096 NR Description: probable REPLICATION FACTOR C (40 KDA SUBUNIT)
  misc_feature (32)..(352): Homolog of NCBI NO: 539678 NR Description: replication factor C - human
  misc_feature (27)..(352): Homolog of NCBI NO: 12847419 NR Description: unnamed protein product [Mus musculus]
  misc_feature (43)..(352): Homolog of NCBI NO: 34871892 NR Description: replication factor C 2 (40kD) [Rattus norvegicus]
  misc_feature (21)..(360): Homolog of NCBI NO: 1703053 NR Description: ACTIVATOR 1 40 KD SUBUNIT (REPLICATION FACTOR C
  misc_feature (27)..(352): Homolog of NCBI NO: 11177922 NR Description: replication factor C (activator 1) 2
  misc_feature (32)..(362): Homolog of NCBI NO: 15221697 NR Description: replication factor, putative; protein id:
  misc_feature (31)..(362): Homolog of NCBI NO: 38344372 NR Description: OSJNBb0032E06.6 [Oryza sativa (japonica
  misc_feature (30)..(362): Homolog of NCBI NO: 15991286 NR Description: replication factor C 40kDa subunit
EHPNRKLPPLARQFPHFSLPPSAQPHPSAMAASSSAAAPADTYDIPWVEKYRPSRVADVVGNADAVSRLEVIARDGNMPNLILSGPPGTGKTTSILALAHEMLGPSYREGVLELNASDDRGLDVVRNKIKMFAQKKVTLPPGRHKIVILDEADSMTTGAQQALRRTMEIYSNTTRFALACNTSSKIIEPIQSRCAIVRFSRLSDQEILGRLMIVVAAEKVPYVPEGLEAIIFTADGDMRQALNNLQATVSGFRFVNQENVFKVCDQPHPLHVKSMVKNVLDGKFDEACSGLKQLYDLGYSPTDIITTLFRVIKNYDMAEFLKLELLKETGFAHMRICDGVGSFLQLSGLLAKFALVRETAKA

SEQ ID NO: 65482 - protein, 333 aa, Triticum aestivum
  peptide (1)..(333): Ceres Seq. ID no. 12617922
  misc_feature (51)..(222): Pfam Name: ATPase family associated with various cellular Pfam Description: ATPase family associated with various cellular
  misc_feature (1)..(322): Homolog of NCBI NO: 4506491 NR Description: replication factor C (activator 1) 4, 37kDa
  misc_feature (2)..(323): Homolog of NCBI NO: 28950096 NR Description: probable REPLICATION FACTOR C (40 KDA SUBUNIT)
  misc_feature (3)..(323): Homolog of NCBI NO: 539678 NR Description: replication factor C - human
  misc_feature (1)..(323): Homolog of NCBI NO: 12847419 NR Description: unnamed protein product [Mus musculus]
  misc_feature (14)..(323): Homolog of NCBI NO: 34871892 NR Description: replication factor C 2 (40kD) [Rattus norvegicus]
  misc_feature (1)..(331): Homolog of NCBI NO: 1703053 NR Description: ACTIVATOR 1 40 KD SUBUNIT (REPLICATION FACTOR C
  misc_feature (1)..(323): Homolog of NCBI NO: 11177922 NR Description: replication factor C (activator 1) 2
  misc_feature (3)..(333): Homolog of NCBI NO: 15221697 NR Description: replication factor, putative; protein id:
  misc_feature (2)..(333): Homolog of NCBI NO: 38344372 NR Description: OSJNBb0032E06.6 [Oryza sativa (japonica
  misc_feature (1)..(333): Homolog of NCBI NO: 15991286 NR Description: replication factor C 40kDa subunit
MAASSSAAAPADTYDIPWVEKYRPSRVADVVGNADAVSRLEVIARDGNMPNLILSGPPGTGKTTSILALAHEMLGPSYREGVLELNASDDRGLDVVRNKIKMFAQKKVTLPPGRHKIVILDEADSMTTGAQQALRRTMEIYSNTTRFALACNTSSKIIEPIQSRCAIVRFSRLSDQEILGRLMIVVAAEKVPYVPEGLEAIIFTADGDMRQALNNLQATVSGFRFVNQENVFKVCDQPHPLHVKSMVKNVLDGKFDEACSGLKQLYDLGYSPTDIITTLFRVIKNYDMAEFLKLELLKETGFAHMRICDGVGSFLQLSGLLAKFALVRETAKA

SEQ ID NO: 65483 - protein, 285 aa, Triticum aestivum
  peptide (1)..(285): Ceres Seq. ID no. 12617923
  misc_feature (3)..(174): Pfam Name: ATPase family associated with various cellular Pfam Description: ATPase family associated with various cellular
  misc_feature (1)..(274): Homolog of NCBI NO: 4506491 NR Description: replication factor C (activator 1) 4, 37kDa
  misc_feature (1)..(275): Homolog of NCBI NO: 28950096 NR Description: probable REPLICATION FACTOR C (40 KDA SUBUNIT)
  misc_feature (1)..(275): Homolog of NCBI NO: 539678 NR Description: replication factor C - human
  misc_feature (1)..(275): Homolog of NCBI NO: 12847419 NR Description: unnamed protein product [Mus musculus]
  misc_feature (1)..(275): Homolog of NCBI NO: 34871892 NR Description: replication factor C 2 (40kD) [Rattus norvegicus]
  misc_feature (1)..(283): Homolog of NCBI NO: 1703053 NR Description: ACTIVATOR 1 40 KD SUBUNIT (REPLICATION FACTOR C
  misc_feature (1)..(275): Homolog of NCBI NO: 11177922 NR Description: replication factor C (activator 1) 2
  misc_feature (1)..(285): Homolog of NCBI NO: 15221697 NR Description: replication factor, putative; protein id:
  misc_feature (1)..(285): Homolog of NCBI NO: 38344372 NR Description: OSJNBb0032E06.6 [Oryza sativa (japonica
  misc_feature (1)..(285): Homolog of NCBI NO: 15991286 NR Description: replication factor C 40kDa subunit
MPNLILSGPPGTGKTTSILALAHEMLGPSYREGVLELNASDDRGLDVVRNKIKMFAQKKVTLPPGRHKIVILDEADSMTTGAQQALRRTMEIYSNTTRFALACNTSSKIIEPIQSRCAIVRFSRLSDQEILGRLMIVVAAEKVPYVPEGLEAIIFTADGDMRQALNNLQATVSGFRFVNQENVFKVCDQPHPLHVKSMVKNVLDGKFDEACSGLKQLYDLGYSPTDIITTLFRVIKNYDMAEFLKLELLKETGFAHMRICDGVGSFLQLSGLLAKFALVRETAKA

SEQ ID NO: 65484 - DNA, 1339 bp, Triticum aestivum
  misc_feature (1)..(1339): Ceres Seq. ID no. 13584722
agtccagatcgccgtgtccgccgaccaccacttcaacccctccactgcagcctgtaggaagctaaagctagaactagaacaatctgcctacacctagccatggtgaagctagccacggcgcgggactgccgcgcgtacagcctcggcgccacgggcggcgagacgtcgcgcaaccggcggtgggagtacatcaacgccggggtgtacgtcttcgccgccgtcctcctcctcgccggcttcctggcgcagctgtggccgtgggcggtgtccaccaaggccggcctcgccgtggccgtcgtcgggctgctgggcgtgctggcagtgaacgcgcacgacctgctggcgcacgtcgccggcgtcgattacaaccttggcctggccgggctcgacacccagttcgtgctcgtcgagctcgccgcccccgccgtgcagctcgccggcgccgcgctcaccttggtcgcgctcatcttgttcgaaatccaggtatgaagttggagttcatccatccgagctagtagtactagtatcagtaataagttcagagttcagactggagttgcatgctgttcttttttttatctgaatccatggaacaaacgtcgcagatggagagagggcaccggcgtggcctggagaagcacggcctgaacctgctcatcgccgggccagcgctgtggtgcctcgggtccatacacaacatgtgccaagtctacgagcgagccaacgggcacgtccagatcctccagaagagcgtgcacatcccgtttctgctcggcagcaccctcttcttcatcggcggcgtcgtcaaccggaacgacgtccacggccactcctcccacagcttcaccctactggggaggagctgggcgtggtactgcctgttcgggagcttgctgttcttggcgggagggctgctgaacctgctcaaggtgttcaagatgcagcagatgggcgggcgggggctcgagaagctgcgcggcggcgcgcaggagcggcttagcagggagagggagggcaaggtgcctctcatcctggaggagggccggagggggaagcacggaggcaatgtaggggatacctgggcgccgccggcgccgcggtacgagccgagggctccgcccgttccgccgccgccggagggttcttacaaggacgctgtcgtgagcggcggcaactagtgtgattttgcagtgcaccgcggtaacgaataataagagaggacgtgccatggcagctggtagaggagaagcattggcttagggcgacgccatcctgtatttccgtatctgtacacgatgtcatgtactgtaaattatatggacttgctgcctacgattct

SEQ ID NO: 65485 - protein, 205 aa, Triticum aestivum
  peptide (1)..(205): Ceres Seq. ID no. 13584723
  misc_feature (14)..(202): Homolog of NCBI NO: 15237898 NR Description: expressed protein [Arabidopsis thaliana]
MLFFFLSESMEQTSQMERGHRRGLEKHGLNLLIAGPALWCLGSIHNMCQVYERANGHVQILQKSVHIPFLLGSTLFFIGGVVNRNDVHGHSSHSFTLLGRSWAWYCLFGSLLFLAGGLLNLLKVFKMQQMGGRGLEKLRGGAQERLSREREGKVPLILEEGRRGKHGGNVGDTWAPPAPRYEPRAPPVPPPPEGSYKDAVVSGGN

SEQ ID NO: 65486 - protein, 196 aa, Triticum aestivum
  peptide (1)..(196): Ceres Seq. ID no. 13584724
  misc_feature (5)..(193): Homolog of NCBI NO: 15237898 NR Description: expressed protein [Arabidopsis thaliana]
MEQTSQMERGHRRGLEKHGLNLLIAGPALWCLGSIHNMCQVYERANGHVQILQKSVHIPFLLGSTLFFIGGVVNRNDVHGHSSHSFTLLGRSWAWYCLFGSLLFLAGGLLNLLKVFKMQQMGGRGLEKLRGGAQERLSREREGKVPLILEEGRRGKHGGNVGDTWAPPAPRYEPRAPPVPPPPEGSYKDAVVSGGN

SEQ ID NO: 65487 - protein, 190 aa, Triticum aestivum
  peptide (1)..(190): Ceres Seq. ID no. 13584725
  misc_feature (1)..(187): Homolog of NCBI NO: 15237898 NR Description: expressed protein [Arabidopsis thaliana]
MERGHRRGLEKHGLNLLIAGPALWCLGSIHNMCQVYERANGHVQILQKSVHIPFLLGSTLFFIGGVVNRNDVHGHSSHSFTLLGRSWAWYCLFGSLLFLAGGLLNLLKVFKMQQMGGRGLEKLRGGAQERLSREREGKVPLILEEGRRGKHGGNVGDTWAPPAPRYEPRAPPVPPPPEGSYKDAVVSGGN

SEQ ID NO: 65488 - DNA, 1448 bp, Triticum aestivum
  misc_feature (1)..(1448): Ceres Seq. ID no. 13584805
gtggactcctagccagccccttcacctcttcgggcttctgtggcgagccgagttttccggcggaggcgagccatggccgcagcggaggaaacggccgtgggaaccgctgcggaggggagcgacctgcgctccttcttctcgacgcgcggcgtcgccgccgatcttgctgcgttggacgaccagaccctcaaggcgctggacgagaagtacattatcgccagggacctcgacgccgccacggtgctctccaagatccaccacttggtggggcacagcgaagccagcatcgtcccctacgaagggctgtcctaccagcttccgtgccgtgacccggggcagcacgagtacgaccccacactccggcagctttgcctgcgccgcggcaaggtcgaaacttgcacggtcggcgaccccaggacctcgcgcaaggccgagatcatcacggccacgctatccttggtcaagaagaccgtcctgagtggccatcgctcgtttagcgacggtctgcgctacggcgatgaagtcttcaagcaggacaagaagaccgtggatgatgccctgctggacatctgctgcctactcgagtgcccaagggcatctctcaaaatgcttgaacttggtccgggcacggtcgttgggccactgatattcacaatggaagatggggcagagaaccattgcaggtcattcggtccgagtggagcccgggtacatgaggggatctctaatattactgtcgaacaaggcgcaacggtcaatttcatcctactagtccagagggatgatgttttttgggattttgctcggtcgcaactccgccacgaattgaattgtgtggtcatgacaggcggcgatggggaaccaaatgtcatgacacgggctttcttgcgcaaactcaaggattgtctgtctgtccctgtgtatgctctcaccgattcagatccagagggaatttcgatcttttgtacctacaagtttggatcagcagagatgccatttgacaatgtgggtcttaccattcctgatatcaagttgattgcgtatataggtgatgatgcccttcatttgagtcaccttcaaccgctggccaagcgcgacagatcgattcttaagggattgtgtgcccaaaagcatgtaataggtgatgaacaattgagggagaacatacatttcatgatgaacaggggcttaaaatgcaaaatcgaagctttatattatcttcagtaccctcctactgactacatccgcaaagcagtaggcaatctggaggacatctaagtagctcgttgtgtttaactttggtagagagacatctatgtagtttgccatgttgactttagaggataatcttctaagttagttcatgttgggtgtgcaaactatggttactactagattgtgcatgcacttatgttgtcacaatctaggttattaatgctccagattcc

SEQ ID NO: 65489 - protein, 401 aa, Triticum aestivum
  peptide (1)..(401): Ceres Seq. ID no. 13584806
  misc_feature (229)..(317): Pfam Name: Toprim domain Pfam Description: Toprim domain
  misc_feature (113)..(380): Homolog of NCBI NO: 13383478 NR Description: AtSPO11-1 [Arabidopsis thaliana]
  misc_feature (147)..(393): Homolog of NCBI NO: 5733397 NR Description: SPO11 protein [Mus musculus]
  misc_feature (114)..(393): Homolog of NCBI NO: 5453472 NR Description: meiotic DNA transesterase/topoisomerase homolog
  misc_feature (114)..(393): Homolog of NCBI NO: 5453474 NR Description: meiotic DNA transesterase/topoisomerase homolog
  misc_feature (50)..(393): Homolog of NCBI NO: 6755624 NR Description: sporulation protein, meiosis-specific, SPO11
  misc_feature (114)..(393): Homolog of NCBI NO: 9501146 NR Description: dJ481F12.2.2 (meiotic protein covalently bound to (S.cerevisiae)-like (meiotic DNA transesterase/topoisomerase
  misc_feature (49)..(393): Homolog of NCBI NO: 6912680 NR Description: SPO11 meiotic protein covalently bound to
  misc_feature (52)..(393): Homolog of NCBI NO: 9501147 NR Description: dJ481F12.2.1 (meiotic protein covalently bound to (S. cerevisiae)-like (a DNA transesterase/topoisomerase homolog
  misc_feature (51)..(391): Homolog of NCBI NO: 15241959 NR Description: meiosis specific - like protein [Arabidopsis
  misc_feature (1)..(391): Homolog of NCBI NO: 27476077 NR Description: Hypothetical protein [Oryza sativa (japonica
MAAAEETAVGTAAEGSDLRSFFSTRGVAADLAALDDQTLKALDEKYIIARDLDAATVLSKIHHLVGHSEASIVPYEGLSYQLPCRDPGQHEYDPTLRQLCLRRGKVETCTVGDPRTSRKAEIITATLSLVKKTVLSGHRSFSDGLRYGDEVFKQDKKTVDDALLDICCLLECPRASLKMLELGPGTVVGPLIFTMEDGAENHCRSFGPSGARVHEGISNITVEQGATVNFILLVQRDDVFWDFARSQLRHELNCVVMTGGDGEPNVMTRAFLRKLKDCLSVPVYALTDSDPEGISIFCTYKFGSAEMPFDNVGLTIPDIKLIAYIGDDALHLSHLQPLAKRDRSILKGLCAQKHVIGDEQLRENIHFMMNRGLKCKIEALYYLQYPPTDYIRKAVGNLEDI

SEQ ID NO: 65490 - protein, 223 aa, Triticum aestivum
  peptide (1)..(223): Ceres Seq. ID no. 13584807
  misc_feature (51)..(139): Pfam Name: Toprim domain Pfam Description: Toprim domain
  misc_feature (1)..(202): Homolog of NCBI NO: 13383478 NR Description: AtSPO11-1 [Arabidopsis thaliana]
  misc_feature (1)..(215): Homolog of NCBI NO: 5733397 NR Description: SPO11 protein [Mus musculus]
  misc_feature (1)..(215): Homolog of NCBI NO: 5453472 NR Description: meiotic DNA transesterase/topoisomerase homolog
  misc_feature (1)..(215): Homolog of NCBI NO: 5453474 NR Description: meiotic DNA transesterase/topoisomerase homolog
  misc_feature (1)..(215): Homolog of NCBI NO: 6755624 NR Description: sporulation protein, meiosis-specific, SPO11
  misc_feature (1)..(215): Homolog of NCBI NO: 9501146 NR Description: dJ481F12.2.2 (meiotic protein covalently bound to (S.cerevisiae)-like (meiotic DNA transesterase/topoisomerase
  misc_feature (1)..(215): Homolog of NCBI NO: 6912680 NR Description: SPO11 meiotic protein covalently bound to
  misc_feature (1)..(215): Homolog of NCBI NO: 9501147 NR Description: dJ481F12.2.1 (meiotic protein covalently bound to (S. cerevisiae)-like (a DNA transesterase/topoisomerase homolog
  misc_feature (1)..(213): Homolog of NCBI NO: 15241959 NR Description: meiosis specific - like protein [Arabidopsis
  misc_feature (1)..(213): Homolog of NCBI NO: 27476077 NR Description: Hypothetical protein [Oryza sativa (japonica
MLELGPGTVVGPLIFTMEDGAENHCRSFGPSGARVHEGISNITVEQGATVNFILLVQRDDVFWDFARSQLRHELNCVVMTGGDGEPNVMTRAFLRKLKDCLSVPVYALTDSDPEGISIFCTYKFGSAEMPFDNVGLTIPDIKLIAYIGDDALHLSHLQPLAKRDRSILKGLCAQKHVIGDEQLRENIHFMMNRGLKCKIEALYYLQYPPTDYIRKAVGNLEDI

SEQ ID NO: 65491 - protein, 207 aa, Triticum aestivum
  peptide (1)..(207): Ceres Seq. ID no. 13584808
  misc_feature (35)..(123): Pfam Name: Toprim domain Pfam Description: Toprim domain
  misc_feature (1)..(186): Homolog of NCBI NO: 13383478 NR Description: AtSPO11-1 [Arabidopsis thaliana]
  misc_feature (1)..(199): Homolog of NCBI NO: 5733397 NR Description: SPO11 protein [Mus musculus]
  misc_feature (1)..(199): Homolog of NCBI NO: 5453472 NR Description: meiotic DNA transesterase/topoisomerase homolog
  misc_feature (1)..(199): Homolog of NCBI NO: 5453474 NR Description: meiotic DNA transesterase/topoisomerase homolog
  misc_feature (1)..(199): Homolog of NCBI NO: 6755624 NR Description: sporulation protein, meiosis-specific, SPO11
  misc_feature (1)..(199): Homolog of NCBI NO: 9501146 NR Description: dJ481F12.2.2 (meiotic protein covalently bound to (S.cerevisiae)-like (meiotic DNA transesterase/topoisomerase
  misc_feature (1)..(199): Homolog of NCBI NO: 6912680 NR Description: SPO11 meiotic protein covalently bound to
  misc_feature (1)..(199): Homolog of NCBI NO: 9501147 NR Description: dJ481F12.2.1 (meiotic protein covalently bound to (S. cerevisiae)-like (a DNA transesterase/topoisomerase homolog
  misc_feature (1)..(197): Homolog of NCBI NO: 15241959 NR Description: meiosis specific - like protein [Arabidopsis
  misc_feature (1)..(197): Homolog of NCBI NO: 27476077 NR Description: Hypothetical protein [Oryza sativa (japonica
MEDGAENHCRSFGPSGARVHEGISNITVEQGATVNFILLVQRDDVFWDFARSQLRHELNCVVMTGGDGEPNVMTRAFLRKLKDCLSVPVYALTDSDPEGISIFCTYKFGSAEMPFDNVGLTIPDIKLIAYIGDDALHLSHLQPLAKRDRSILKGLCAQKHVIGDEQLRENIHFMMNRGLKCKIEALYYLQYPPTDYIRKAVGNLEDI

SEQ ID NO: 65492 - DNA, 2135 bp, Triticum aestivum
  misc_feature (1)..(2135): Ceres Seq. ID no. 13656138
aaaccctaaagccccctcgtcccgtcctcctcctccgcatctcaaccctaaccaaacccactcaaccctcgcgccgccgcctccggatccatccgcatcgccgccgccgccgccgccgccgcgagcatgggcttcgacgtgggcgtcgtccccttcaacccggacggctggggccctcccgacttgccgggcgcggcgccgctgctgggcggggccgtcgcgacggcctcgatccccttcgcgcccttctcccgctccgacaagctgggccgcatcgccgactggacgcgcaacccgggccacccgggcgcgcacggccaccacggcgcggccgccgcctcccgcgactcggtcttcgacttctcctcggccgacgactcgctcgccgccgccgccgaggactcgtccttcagcctcgtcgacgccaagccgccgcccaagcacccgcgcttcgggcccaagtggcgcttcaaccagcggccccagctcccccagcgccgcgacgaggaggtcgaggccaagcgccgcgaggccgagaaggagcgcgcccgccgcgagcgccactaccagaaccaccgctcccaccaccaccagggcttccgcggcaaccagcagaacaccgccaagccctcggtcgacatccagcccgactggaccatcctcgagcagatccccttcgccaacttcaccaagctctccttcgccgtcgccgaccagcccgaggacctgctcgtctgcggcgccgtcgactcgtacgaccgcgcctacgaccgcgtcaaccccaagacggcccgccgcctcgagcgcttcaagaaccgccagttcttcaagatcaccaccaccgacgaccccatcatccgccgcctcgccgaggaggacaaggccaccgtcttcgccaccgacgccatcctcgccgccctcatgtgcacgccccgcagcatcctctcctgggacattgtcgtgcagcgcgtcggcaacaagctcttcttcgacaagcgcgagggctcccagctcgatctgctcactgtcaacgagactgcgcaggagcagctccctgagaacaaggatgacatcaattccgcgccggcccttgctgtcgaggccacctacatcaaccagaacttctcgcagcaggtgctggtgcgtgatggcgagaaggttacctttgatgagcctaacccgtttgcctctgagaatgaggaggcggcgcctgtttgctaccgttatcgccgctggaagctggatgatgatattagcatcattgcccgctgtgaagtgcatgctgctggtgttgatcccagtggtgctcgccagttcctcacgcttaatgcactcaatgagtttgatcctaagattactggtgttgactggaagcagaagctcgagtcccagcgtggtgctgtgcttgctacagagctcaagaacaatgccaacaagctcgctcgctggactgcccaggctttactttctggtgctgacatgatgaagttgggttatgtgtcacgtgtgcacccccgcgaccacttcaaccactccatactcactgtgatgggctacaagccaagggattttgctacccagatcaacctcaacactgcaaacatgtggggcattgtcaagtcgattgtggacatctgcatgaagtttgaagagggaaagtatgtgcttgtgaaagatcctgccaagccacagatgaggatttatcaggttcctaatgatgcatttgagaatgattatgttgaagagccacttccagaggaggagcagattcgtccggctacagatgatgtcgatgctactgcacaggagatggatgctgctgccgaggcagaggctaataaagcaactactcagggtggtgagggtgagaagagtgcagatgctgctgctgcttgaagggtataatgggccatctttgctttatctagataatgtgtcttttctgttttatgacctgtttttgtggattaaagagttgaactgccttgtcttgatacagtggtcttgttttggtccatgagaaaacttggtactcttaaatttcatgcttagatgtgctaagcttagcacctaccgttttggattaatgactattctggtagttgaatattgattatatgtgattgatctgctgt

SEQ ID NO: 65493 - protein, 589 aa, Triticum aestivum
  peptide (1)..(589): Ceres Seq. ID no. 15219799
  misc_feature (3)..(546): Pfam Name: Eukaryotic translation initiation factor 3 Pfam Description: Eukaryotic translation initiation factor 3
  misc_feature (3)..(547): Homolog of NCBI NO: 26337171 NR Description: unnamed protein product [Mus musculus]
  misc_feature (3)..(547): Homolog of NCBI NO: 38174024 NR Description: Unknown (protein for MGC:75703) [Silurana
  misc_feature (3)..(547): Homolog of NCBI NO: 34866902 NR Description: similar to eukaryotic translation initiation
  misc_feature (3)..(554): Homolog of NCBI NO: 31418925 NR Description: Unknown (protein for MGC:64097) [Danio rerio]
  misc_feature (3)..(547): Homolog of NCBI NO: 4503523 NR Description: eukaryotic translation initiation factor 3
  misc_feature (3)..(584): Homolog of NCBI NO: 31207329 NR Description: ENSANGP00000015368 [Anopheles gambiae]
  misc_feature (167)..(573): Homolog of NCBI NO: 12407755 NR Description: initiation factor 3d [Arabidopsis thaliana]
  misc_feature (3)..(560): Homolog of NCBI NO: 15241470 NR Description: eukaryotic translation initiation factor 3
  misc_feature (3)..(573): Homolog of NCBI NO: 17528988 NR Description: putative translation initiation factor eIF3
  misc_feature (3)..(573): Homolog of NCBI NO: 15233469 NR Description: translation initiation factor eIF3 - like protein
MGFDVGVVPFNPDGWGPPDLPGAAPLLGGAVATASIPFAPFSRSDKLGRIADWTRNPGHPGAHGHHGAAAASRDSVFDFSSADDSLAAAAEDSSFSLVDAKPPPKHPRFGPKWRFNQRPQLPQRRDEEVEAKRREAEKERARRERHYQNHRSHHHQGFRGNQQNTAKPSVDIQPDWTILEQIPFANFTKLSFAVADQPEDLLVCGAVDSYDRAYDRVNPKTARRLERFKNRQFFKITTTDDPIIRRLAEEDKATVFATDAILAALMCTPRSILSWDIVVQRVGNKLFFDKREGSQLDLLTVNETAQEQLPENKDDINSAPALAVEATYINQNFSQQVLVRDGEKVTFDEPNPFASENEEAAPVCYRYRRWKLDDDISIIARCEVHAAGVDPSGARQFLTLNALNEFDPKITGVDWKQKLESQRGAVLATELKNNANKLARWTAQALLSGADMMKLGYVSRVHPRDHFNHSILTVMGYKPRDFATQINLNTANMWGIVKSIVDICMKFEEGKYVLVKDPAKPQMRIYQVPNDAFENDYVEEPLPEEEQIRPATDDVDATAQEMDAAAEAEANKATTQGGEGEKSADAAAA

SEQ ID NO: 65494 - protein, 493 aa, Triticum aestivum
  peptide (1)..(493): Ceres Seq. ID no. 15219800
  misc_feature (12)..(374): Pfam Name: Equine herpesvirus glycoprotein gp2 Pfam Description: Equine herpesvirus glycoprotein gp2
  misc_feature (2)..(372): Homolog of NCBI NO: 2135765 NR Description: mucin 2 precursor, intestinal - human (fragments)
  misc_feature (2)..(338): Homolog of NCBI NO: 13592175 NR Description: ppg3 [Leishmania major]
  misc_feature (2)..(372): Homolog of NCBI NO: 186396 NR Description: mucin
  misc_feature (16)..(377): Homolog of NCBI NO: 13592175 NR Description: ppg3 [Leishmania major]
  misc_feature (2)..(379): Homolog of NCBI NO: 188864 NR Description: mucin
  misc_feature (1)..(339): Homolog of NCBI NO: 188864 NR Description: mucin
  misc_feature (2)..(372): Homolog of NCBI NO: 13592175 NR Description: ppg3 [Leishmania major]
  misc_feature (4)..(372): Homolog of NCBI NO: 13592175 NR Description: ppg3 [Leishmania major]
  misc_feature (2)..(372): Homolog of NCBI NO: 13592175 NR Description: ppg3 [Leishmania major]
  misc_feature (2)..(377): Homolog of NCBI NO: 13592175 NR Description: ppg3 [Leishmania major]
NPKAPSSRPPPPHLNPNQTHSTLAPPPPDPSASPPPPPPPRAWASTWASSPSTRTAGALPTCRARRRCWAGPSRRPRSPSRPSPAPTSWAASPTGRATRATRARTATTARPPPPATRSSTSPRPTTRSPPPPRTRPSASSTPSRRPSTRASGPSGASTSGPSSPSAATRRSRPSAARPRRSAPAASATTRTTAPTTTRASAATSRTPPSPRSTSSPTGPSSSRSPSPTSPSSPSPSPTSPRTCSSAAPSTRTTAPTTASTPRRPAASSASRTASSSRSPPPTTPSSAASPRRTRPPSSPPTPSSPPSCARPAASSPGTLSCSASATSSSSTSARAPSSICSLSTRLRRSSSLRTRMTSIPRRPLLSRPPTSTRTSRSRCWCVMARRLPLMSLTRLPLRMRRRRLFATVIAAGSWMMILASLPAVKCMLLVLIPVVLASSSRLMHSMSLILRLLVLTGSRSSSPSVVLCLLQSSRTMPTSSLAGLPRLYFLVLT

SEQ ID NO: 65495 - protein, 351 aa, Triticum aestivum
  peptide (1)..(351): Ceres Seq. ID no. 15219801
TLKPPRPVLLLRISTLTKPTQPSRRRLRIHPHRRRRRRRREHGLRRGRRPLQPGRLGPSRLAGRGAAAGRGRRDGLDPLRALLPLRQAGPHRRLDAQPGPPGRARPPRRGRRLPRLGLRLLLGRRLARRRRRGLVLQPRRRQAAAQAPALRAQVALQPAAPAPPAPRRGGRGQAPRGREGARPPRAPLPEPPLPPPPGLPRQPAEHRQALGRHPARLDHPRADPLRQLHQALLRRRRPARGPARLRRRRLVRPRLRPRQPQDGPPPRALQEPPVLQDHHHRRPHHPPPRRGGQGHRLRHRRHPRRPHVHAPQHPLLGHCRAARRQQALLRQARGLPARSAHCQRDCAGAAP

SEQ ID NO: 65496 - DNA, 1420 bp, Triticum aestivum
  misc_feature (1)..(1420): Ceres Seq. ID no. 13598597
agtacacacctcggtttggaacttggaagtcgagacacatacacacacacatactagatacatatccatacttctgttgctcattgcatctcctagttcagcaaattgccaaactgagacatgggaattgatcgtgtcaacacggcagccactggccgcggacgcaccgtctgtgtgaccggcgccggcggtttcatcgcgtcctggctagtgaagctcctcctggagaagggctacgccgtccacggcaccgtccggaaccctgatgacgtggcaaggaatgcgcacctgagagccttggaaggggcgacggagcgactgaccctcttccaggtggacctgcttgacaaggagagcctcgtcgctgctttccaaggatgcgaaggcgtattccacaccgcatgccccgtcaccgatgacccggaaaaaatgatcgagccggcagtgaacggaacgagaaacgtgttcaacgccgcggcagaggtgggcggcatccggcgtgtggtaatgacgtcgtcgatcggctccgtgtacatggatcctcgtcgtagcatcgatggggaggccgatgagacatgttggagcgacctcgagttctgcaagaacacaaagaattggtactgctatgcgaagacggtggcggagcaggccgcatgggagctcgccaaggagaggaagcttgaccttgtggtgatcaacccgtctctagtgttgggccctctgctacagatggcggtgaacgccagtacgtggcatattgccaagtatctggacggctcggtgcagacgtatgccaacgcggcacaggcgtacgtgcacgtccaggacgtcgcggacgcgcacgcgcgtgcgtacgagacgcccgatgcgcatggccggtacctctgcgcggggcgcacgctgcaccgtgccgaggtgtgtcgcatccttgccaagttcttcccggagtaccccgtgcccacgaggtgcaaggaaggggcgggcgagatgaagaagggttgtcggttcagcagtcggaggatcatggatctcggcgtcggcatcacgccggcgagccagtgtctctacgacacggtcaccagccttcaggacaagggcatcttaccacgtcgcgacgctgatatgtcctgacaactccatggtcaccttggtcaagttagcagcatgcatgcccgcttgatgattacaaagtcatggcatttaattctttatttacttcttagttgttcaaatataaggccctgtccagagcacctccaccccacaactccactccccaagttgatggagttacagttgaaaactgtggagcagctatttcctggctccacagctcccagaatttcgtggagctggtggatttccgaacaggccctaagtgtccattgtaaaagaatatgttatgatatgatgtttatcc

SEQ ID NO: 65497 - protein, 336 aa, Triticum aestivum
  peptide (1)..(336): Ceres Seq. ID no. 13598598
  misc_feature (15)..(270): Pfam Name: 3-beta hydroxysteroid dehydrogenase/isomerase family Pfam Description: 3-beta hydroxysteroid dehydrogenase/isomerase
  misc_feature (12)..(329): Homolog of NCBI NO: 7431410 NR Description: cinnamoyl CoA reductase - maize
  misc_feature (8)..(329): Homolog of NCBI NO: 7239228 NR Description: cinnamoyl CoA reductase; CCR [Populus tremuloides]
  misc_feature (12)..(329): Homolog of NCBI NO: 3242328 NR Description: cinnamoyl-CoA reductase [Zea mays]
  misc_feature (12)..(329): Homolog of NCBI NO: 3341511 NR Description: cinnamoyl-CoA reductase [Saccharum officinarum]
  misc_feature (8)..(329): Homolog of NCBI NO: 40233135 NR Description: cinnamoyl CoA reductase [Populus tomentosa]
  misc_feature (8)..(329): Homolog of NCBI NO: 2960364 NR Description: cinnamoyl CoA reductase [Populus balsamifera
  misc_feature (8)..(329): Homolog of NCBI NO: 9998901 NR Description: cinnamoyl-CoA reductase [Populus balsamifera
  misc_feature (10)..(329): Homolog of NCBI NO: 28544959 NR Description: cinnamoyl-CoA reductase [Zea mays]
  misc_feature (10)..(329): Homolog of NCBI NO: 3668115 NR Description: cinnamoyl-CoA reductase [Zea mays]
  misc_feature (10)..(329): Homolog of NCBI NO: 28544965 NR Description: cinnamoyl-CoA reductase [Zea mays]
MGIDRVNTAATGRGRTVCVTGAGGFIASWLVKLLLEKGYAVHGTVRNPDDVARNAHLRALEGATERLTLFQVDLLDKESLVAAFQGCEGVFHTACPVTDDPEKMIEPAVNGTRNVFNAAAEVGGIRRVVMTSSIGSVYMDPRRSIDGEADETCWSDLEFCKNTKNWYCYAKTVAEQAAWELAKERKLDLVVINPSLVLGPLLQMAVNASTWHIAKYLDGSVQTYANAAQAYVHVQDVADAHARAYETPDAHGRYLCAGRTLHRAEVCRILAKFFPEYPVPTRCKEGAGEMKKGCRFSSRRIMDLGVGITPASQCLYDTVTSLQDKGILPRRDADMS

SEQ ID NO: 65498 - protein, 233 aa, Triticum aestivum
  peptide (1)..(233): Ceres Seq. ID no. 13598599
  misc_feature (1)..(167): Pfam Name: 3-beta hydroxysteroid dehydrogenase/isomerase family Pfam Description: 3-beta hydroxysteroid dehydrogenase/isomerase
  misc_feature (1)..(226): Homolog of NCBI NO: 7431410 NR Description: cinnamoyl CoA reductase - maize
  misc_feature (1)..(226): Homolog of NCBI NO: 7239228 NR Description: cinnamoyl CoA reductase; CCR [Populus tremuloides]
  misc_feature (1)..(226): Homolog of NCBI NO: 3242328 NR Description: cinnamoyl-CoA reductase [Zea mays]
  misc_feature (1)..(226): Homolog of NCBI NO: 3341511 NR Description: cinnamoyl-CoA reductase [Saccharum officinarum]
  misc_feature (1)..(226): Homolog of NCBI NO: 40233135 NR Description: cinnamoyl CoA reductase [Populus tomentosa]
  misc_feature (1)..(226): Homolog of NCBI NO: 2960364 NR Description: cinnamoyl CoA reductase [Populus balsamifera
  misc_feature (1)..(226): Homolog of NCBI NO: 9998901 NR Description: cinnamoyl-CoA reductase [Populus balsamifera
  misc_feature (1)..(226): Homolog of NCBI NO: 28544959 NR Description: cinnamoyl-CoA reductase [Zea mays]
  misc_feature (1)..(226): Homolog of NCBI NO: 3668115 NR Description: cinnamoyl-CoA reductase [Zea mays]
  misc_feature (1)..(226): Homolog of NCBI NO: 28544965 NR Description: cinnamoyl-CoA reductase [Zea mays]
MIEPAVNGTRNVFNAAAEVGGIRRVVMTSSIGSVYMDPRRSIDGEADETCWSDLEFCKNTKNWYCYAKTVAEQAAWELAKERKLDLVVINPSLVLGPLLQMAVNASTWHIAKYLDGSVQTYANAAQAYVHVQDVADAHARAYETPDAHGRYLCAGRTLHRAEVCRILAKFFPEYPVPTRCKEGAGEMKKGCRFSSRRIMDLGVGITPASQCLYDTVTSLQDKGILPRRDADMS

SEQ ID NO: 65499 - protein, 207 aa, Triticum aestivum
  peptide (1)..(207): Ceres Seq. ID no. 13598600
  misc_feature (1)..(141): Pfam Name: 3-beta hydroxysteroid dehydrogenase/isomerase family Pfam Description: 3-beta hydroxysteroid dehydrogenase/isomerase
  misc_feature (1)..(200): Homolog of NCBI NO: 7431410 NR Description: cinnamoyl CoA reductase - maize
  misc_feature (1)..(200): Homolog of NCBI NO: 7239228 NR Description: cinnamoyl CoA reductase; CCR [Populus tremuloides]
  misc_feature (1)..(200): Homolog of NCBI NO: 3242328 NR Description: cinnamoyl-CoA reductase [Zea mays]
  misc_feature (1)..(200): Homolog of NCBI NO: 3341511 NR Description: cinnamoyl-CoA reductase [Saccharum officinarum]
  misc_feature (1)..(200): Homolog of NCBI NO: 40233135 NR Description: cinnamoyl CoA reductase [Populus tomentosa]
  misc_feature (1)..(200): Homolog of NCBI NO: 2960364 NR Description: cinnamoyl CoA reductase [Populus balsamifera
  misc_feature (1)..(200): Homolog of NCBI NO: 9998901 NR Description: cinnamoyl-CoA reductase [Populus balsamifera
  misc_feature (1)..(200): Homolog of NCBI NO: 28544959 NR Description: cinnamoyl-CoA reductase [Zea mays]
  misc_feature (1)..(200): Homolog of NCBI NO: 3668115 NR Description: cinnamoyl-CoA reductase [Zea mays]
  misc_feature (1)..(200): Homolog of NCBI NO: 28544965 NR Description: cinnamoyl-CoA reductase [Zea mays]
MTSSIGSVYMDPRRSIDGEADETCWSDLEFCKNTKNWYCYAKTVAEQAAWELAKERKLDLVVINPSLVLGPLLQMAVNASTWHIAKYLDGSVQTYANAAQAYVHVQDVADAHARAYETPDAHGRYLCAGRTLHRAEVCRILAKFFPEYPVPTRCKEGAGEMKKGCRFSSRRIMDLGVGITPASQCLYDTVTSLQDKGILPRRDADMS

SEQ ID NO: 65500 - DNA, 1493 bp, Triticum aestivum
  misc_feature (1)..(1493): Ceres Seq. ID no. 15226223
tccgatgcatgccatggcggagcccggcggcgcgctcgacccccctcctcccccctctccggctgcgccgaccccgccggtccagtggcccaaggacggctcgctcgacccgcctccttccccctctccggtcgcgcagcccccgccggtcgagtggcccgaggacggcgtgctgacgcgggactgggtggccagcttcaccgcggcgctggactggtgctcgcggagcatcccgccggaccagctcccctcggtgctctccgcggatttcgtgcggcggctcgtcgtcgccgcggccgtcatcctccaccgcgagcccaacatcgtccgcgtcgacccgcggcccgaccagtccgtcgtcgtcgtgggggacgtccacggccagctccacgatgtcatgttcctgctccgggacgccgggttcccctcggaggagcgaatctttgtctttaacggggattacgtggatcgcggcgcttggggcctcgagaccttgctcctcctcctggcttggaaggtattccttccaaattgtgtgtttcttctccgaggaaatcatgaatccaagtactgcacgtcagtatatggtttcgaacaggaggtaatggttaaatataaaggtcaaggcactcaagtttatcggaagtttttaagatgttttgaagatctccctctagcatcaataatagcaggatgtgtgtatactgctcatggagggatttttcgtggggcggttgtactaccgttgaaaaggtcgaaaagggcaaagaaaggtcacaaatataaggcgggtcctactgatgactctactactttgaagcttggatccctggacgaattgttaaaagcaaggagaactgttcttgacaccccgtatgagggttcaaacttgattcctggagatgtgctttggtctgatccttccttagataagggtctttccctgaataatgaaaggggcattggtttgctttggggtctagatatcactcaacagtttctatatacaaataatctgaagttaatcatcagatcacatgaaggcccagatgcaagagataagcggcatgatctattagcaatggacagtggatatacaatcgaccatcatgtcgcatgcggaaagttaataactctcttcagtgccccagactatccacaatttcaggcctcagtggaccgttacaacaattctggagcatatattgtcctcagtccccctgattttgctacccctgatttccatacttttcaagctgtaaagcctcggcctaaggcgcatccctactatgattttgaagacgtaattgattctgatgaagagttaaatctaggcgccatggacactggcacgtcgagcagttgatcacaacctgtattgtaattgtacttagcatgcgaattgtcaccgcgaactggagaagtggtaacgagtagttcttttgattggtactaacattgcagacttcgtaactaatattttgtcacgtcct

SEQ ID NO: 65501 - protein, 454 aa, Triticum aestivum
  peptide (1)..(454): Ceres Seq. ID no. 15226224
  misc_feature (118)..(350): Pfam Name: Calcineurin-like phosphoesterase Pfam Description: Calcineurin-like phosphoesterase
  misc_feature (90)..(264): Homolog of NCBI NO: 32414785 NR Description: hypothetical protein ( serine/threonine protein
  misc_feature (289)..(385): Homolog of NCBI NO: 19347799 NR Description: putative phosphoprotein phosphatase [Arabidopsis
  misc_feature (70)..(241): Homolog of NCBI NO: 19347799 NR Description: putative phosphoprotein phosphatase [Arabidopsis
  misc_feature (271)..(423): Homolog of NCBI NO: 15238894 NR Description: serine/threonine protein phosphatase [Arabidopsis
  misc_feature (49)..(246): Homolog of NCBI NO: 15238894 NR Description: serine/threonine protein phosphatase [Arabidopsis
  misc_feature (47)..(341): Homolog of NCBI NO: 18424758 NR Description: ser/thr protein phosphatase catalytic subunit
  misc_feature (20)..(442): Homolog of NCBI NO: 25405918 NR Description: protein F21D18.16 [imported] - Arabidopsis
  misc_feature (20)..(442): Homolog of NCBI NO: 15221080 NR Description: calcineurin-like phosphoesterase family
  misc_feature (47)..(449): Homolog of NCBI NO: 30697908 NR Description: ser/thr protein phosphatase catalytic subunit
  misc_feature (47)..(449): Homolog of NCBI NO: 11358619 NR Description: phosphoprotein phosphatase (EC 3.1.3.16) PP7
PMHAMAEPGGALDPPPPPSPAAPTPPVQWPKDGSLDPPPSPSPVAQPPPVEWPEDGVLTRDWVASFTAALDWCSRSIPPDQLPSVLSADFVRRLVVAAAVILHREPNIVRVDPRPDQSVVVVGDVHGQLHDVMFLLRDAGFPSEERIFVFNGDYVDRGAWGLETLLLLLAWKVFLPNCVFLLRGNHESKYCTSVYGFEQEVMVKYKGQGTQVYRKFLRCFEDLPLASIIAGCVYTAHGGIFRGAVVLPLKRSKRAKKGHKYKAGPTDDSTTLKLGSLDELLKARRTVLDTPYEGSNLIPGDVLWSDPSLDKGLSLNNERGIGLLWGLDITQQFLYTNNLKLIIRSHEGPDARDKRHDLLAMDSGYTIDHHVACGKLITLFSAPDYPQFQASVDRYNNSGAYIVLSPPDFATPDFHTFQAVKPRPKAHPYYDFEDVIDSDEELNLGAMDTGTSSS

SEQ ID NO: 65502 - protein, 453 aa, Triticum aestivum
  peptide (1)..(453): Ceres Seq. ID no. 15226225
  misc_feature (117)..(349): Pfam Name: Calcineurin-like phosphoesterase Pfam Description: Calcineurin-like phosphoesterase
  misc_feature (89)..(263): Homolog of NCBI NO: 32414785 NR Description: hypothetical protein ( serine/threonine protein
  misc_feature (288)..(384): Homolog of NCBI NO: 19347799 NR Description: putative phosphoprotein phosphatase [Arabidopsis
  misc_feature (69)..(240): Homolog of NCBI NO: 19347799 NR Description: putative phosphoprotein phosphatase [Arabidopsis
  misc_feature (270)..(422): Homolog of NCBI NO: 15238894 NR Description: serine/threonine protein phosphatase [Arabidopsis
  misc_feature (48)..(245): Homolog of NCBI NO: 15238894 NR Description: serine/threonine protein phosphatase [Arabidopsis
  misc_feature (46)..(340): Homolog of NCBI NO: 18424758 NR Description: ser/thr protein phosphatase catalytic subunit
  misc_feature (19)..(441): Homolog of NCBI NO: 25405918 NR Description: protein F21D18.16 [imported] - Arabidopsis
  misc_feature (19)..(441): Homolog of NCBI NO: 15221080 NR Description: calcineurin-like phosphoesterase family
  misc_feature (46)..(448): Homolog of NCBI NO: 30697908 NR Description: ser/thr protein phosphatase catalytic subunit
  misc_feature (46)..(448): Homolog of NCBI NO: 11358619 NR Description: phosphoprotein phosphatase (EC 3.1.3.16) PP7
MHAMAEPGGALDPPPPPSPAAPTPPVQWPKDGSLDPPPSPSPVAQPPPVEWPEDGVLTRDWVASFTAALDWCSRSIPPDQLPSVLSADFVRRLVVAAAVILHREPNIVRVDPRPDQSVVVVGDVHGQLHDVMFLLRDAGFPSEERIFVFNGDYVDRGAWGLETLLLLLAWKVFLPNCVFLLRGNHESKYCTSVYGFEQEVMVKYKGQGTQVYRKFLRCFEDLPLASIIAGCVYTAHGGIFRGAVVLPLKRSKRAKKGHKYKAGPTDDSTTLKLGSLDELLKARRTVLDTPYEGSNLIPGDVLWSDPSLDKGLSLNNERGIGLLWGLDITQQFLYTNNLKLIIRSHEGPDARDKRHDLLAMDSGYTIDHHVACGKLITLFSAPDYPQFQASVDRYNNSGAYIVLSPPDFATPDFHTFQAVKPRPKAHPYYDFEDVIDSDEELNLGAMDTGTSSS

SEQ ID NO: 65503 - protein, 450 aa, Triticum aestivum
  peptide (1)..(450): Ceres Seq. ID no. 15226226
  misc_feature (114)..(346): Pfam Name: Calcineurin-like phosphoesterase Pfam Description: Calcineurin-like phosphoesterase
  misc_feature (86)..(260): Homolog of NCBI NO: 32414785 NR Description: hypothetical protein ( serine/threonine protein
  misc_feature (285)..(381): Homolog of NCBI NO: 19347799 NR Description: putative phosphoprotein phosphatase [Arabidopsis
  misc_feature (66)..(237): Homolog of NCBI NO: 19347799 NR Description: putative phosphoprotein phosphatase [Arabidopsis
  misc_feature (267)..(419): Homolog of NCBI NO: 15238894 NR Description: serine/threonine protein phosphatase [Arabidopsis
  misc_feature (45)..(242): Homolog of NCBI NO: 15238894 NR Description: serine/threonine protein phosphatase [Arabidopsis
  misc_feature (43)..(337): Homolog of NCBI NO: 18424758 NR Description: ser/thr protein phosphatase catalytic subunit
  misc_feature (16)..(438): Homolog of NCBI NO: 25405918 NR Description: protein F21D18.16 [imported] - Arabidopsis
  misc_feature (16)..(438): Homolog of NCBI NO: 15221080 NR Description: calcineurin-like phosphoesterase family
  misc_feature (43)..(445): Homolog of NCBI NO: 30697908 NR Description: ser/thr protein phosphatase catalytic subunit
  misc_feature (43)..(445): Homolog of NCBI NO: 11358619 NR Description: phosphoprotein phosphatase (EC 3.1.3.16) PP7
MAEPGGALDPPPPPSPAAPTPPVQWPKDGSLDPPPSPSPVAQPPPVEWPEDGVLTRDWVASFTAALDWCSRSIPPDQLPSVLSADFVRRLVVAAAVILHREPNIVRVDPRPDQSVVVVGDVHGQLHDVMFLLRDAGFPSEERIFVFNGDYVDRGAWGLETLLLLLAWKVFLPNCVFLLRGNHESKYCTSVYGFEQEVMVKYKGQGTQVYRKFLRCFEDLPLASIIAGCVYTAHGGIFRGAVVLPLKRSKRAKKGHKYKAGPTDDSTTLKLGSLDELLKARRTVLDTPYEGSNLIPGDVLWSDPSLDKGLSLNNERGIGLLWGLDITQQFLYTNNLKLIIRSHEGPDARDKRHDLLAMDSGYTIDHHVACGKLITLFSAPDYPQFQASVDRYNNSGAYIVLSPPDFATPDFHTFQAVKPRPKAHPYYDFEDVIDSDEELNLGAMDTGTSSS

SEQ ID NO: 65504 - DNA, 1358 bp, Triticum aestivum
  misc_feature (1)..(1358): Ceres Seq. ID no. 13655992
atcctaatcaaaaacccatcaaacagccctcgcgaactcaacgggaagcgactcacgcccccctccgccccccgcagatcgcccgctccgccacgcgccgccgacgccgccgccaatggccgccgccgccgacgccgggcccgagctgcggcggagctccagcatcgaccgcatcccggcggaggcgcgccgcatcctgcaccgcctcgccggcgagctctggggcgccgacgtcgaccccgccgcgctcgtcgtgtcccagctcaagggcgccctcaccaacgaggtcttccgcatcacctggcccggcggcgagggcgacccgcgcaaggtgctcgtgcgcatctacggccagggcgtcgaggtcttcttcgaccgcgccgacgaggtccgcaccttcgagtgcatgtcccgccacggccagggcccccgcctcctcggccgcttcccccagggccgcgtcgaggagttcatcaacgccaggacgctctcggcgccggatctgcgcgacccggagatttccggcctgattgccaggaagctgcgggagtttcacgagctcgacatgcctggacccaaggacatctcactctggcagaggctgaggcgttggcttgaggaagctcgcagcaggtgctcgactgaggaggccagggaattgcggttggagacgctcggcgatgagattgcggagctggagaatgtattgtccggggtcgatcagagagtagtattttgccataatgatttgcagtatggcaacattatgatatacgaagagaccagacaagtgaccttaatcgactatgaatacgccagttttaaccctgttgcgttcgacattgcgaatcacttctgtgagatggctgctgattatcatagtgatacaccgcacgtgatggactttacaaaatatcctgacgtggatgaacagcggagatttcttgaggcttaccttagttcttcaggagaaaacacatccgatgtagaagtcgaaacattgcttggcttgattgcaaagtacagtctcacaagccatctcttctggggtctctggggaatagtctcggcgcatgtgaacaagaacatcgactttgagtacaaggagtacgcgaggcatcggttcgaccagtactgggacacgaagcctagaatactgcaagcctgcaacccaaccagctgatcacgcgcatggctcattctttttcttattatagcacccatcgcctctcgagtagctctgtagagtcctgtgactgaatcttgttcatcagccaatttggttgcaaatcgtttaggctagtagttgaccgtgtcgtgtaattaaacctgcgcagaatagtcgattctacggtttt

SEQ ID NO: 65505 - protein, 355 aa, Triticum aestivum
  peptide (1)..(355): Ceres Seq. ID no. 13655993
  misc_feature (69)..(341): Pfam Name: Choline/ethanolamine kinase Pfam Description: Choline/ethanolamine kinase
  misc_feature (21)..(348): Homolog of NCBI NO: 15234032 NR Description: choline kinase GmCK2p -related protein
  misc_feature (8)..(348): Homolog of NCBI NO: 33149685 NR Description: choline kinase [Oryza sativa (indica
  misc_feature (21)..(349): Homolog of NCBI NO: 15217543 NR Description: choline kinase -related [Arabidopsis thaliana]
  misc_feature (23)..(350): Homolog of NCBI NO: 7488653 NR Description: choline kinase (EC 2.7.1.32) CK2 - soybean
  misc_feature (23)..(350): Homolog of NCBI NO: 7488652 NR Description: choline kinase (EC 2.7.1.32) CK1 - soybean
  misc_feature (23)..(348): Homolog of NCBI NO: 12311795 NR Description: choline kinase [Pisum sativum]
  misc_feature (19)..(350): Homolog of NCBI NO: 25348157 NR Description: protein choline kinase F1O17.1 [imported] -
  misc_feature (19)..(350): Homolog of NCBI NO: 22330627 NR Description: choline kinase -related [Arabidopsis thaliana]
  misc_feature (8)..(348): Homolog of NCBI NO: 7488654 NR Description: choline kinase (EC 2.7.1.32) CK3 - soybean
  misc_feature (1)..(348): Homolog of NCBI NO: 34906246 NR Description: P0489A01.8 [Oryza sativa (japonica
MAAAADAGPELRRSSSIDRIPAEARRILHRLAGELWGADVDPAALVVSQLKGALTNEVFRITWPGGEGDPRKVLVRIYGQGVEVFFDRADEVRTFECMSRHGQGPRLLGRFPQGRVEEFINARTLSAPDLRDPEISGLIARKLREFHELDMPGPKDISLWQRLRRWLEEARSRCSTEEARELRLETLGDEIAELENVLSGVDQRVVFCHNDLQYGNIMIYEETRQVTLIDYEYASFNPVAFDIANHFCEMAADYHSDTPHVMDFTKYPDVDEQRRFLEAYLSSSGENTSDVEVETLLGLIAKYSLTSHLFWGLWGIVSAHVNKNIDFEYKEYARHRFDQYWDTKPRILQACNPTS

SEQ ID NO: 65506 - protein, 258 aa, Triticum aestivum
  peptide (1)..(258): Ceres Seq. ID no. 13655994
  misc_feature (1)..(244): Pfam Name: Choline/ethanolamine kinase Pfam Description: Choline/ethanolamine kinase
  misc_feature (1)..(251): Homolog of NCBI NO: 15234032 NR Description: choline kinase GmCK2p -related protein
  misc_feature (1)..(251): Homolog of NCBI NO: 33149685 NR Description: choline kinase [Oryza sativa (indica
  misc_feature (1)..(252): Homolog of NCBI NO: 15217543 NR Description: choline kinase -related [Arabidopsis thaliana]
  misc_feature (1)..(253): Homolog of NCBI NO: 7488653 NR Description: choline kinase (EC 2.7.1.32) CK2 - soybean
  misc_feature (1)..(253): Homolog of NCBI NO: 7488652 NR Description: choline kinase (EC 2.7.1.32) CK1 - soybean
  misc_feature (1)..(251): Homolog of NCBI NO: 12311795 NR Description: choline kinase [Pisum sativum]
  misc_feature (1)..(253): Homolog of NCBI NO: 25348157 NR Description: protein choline kinase F1O17.1 [imported] -
  misc_feature (1)..(253): Homolog of NCBI NO: 22330627 NR Description: choline kinase -related [Arabidopsis thaliana]
  misc_feature (1)..(251): Homolog of NCBI NO: 7488654 NR Description: choline kinase (EC 2.7.1.32) CK3 - soybean
  misc_feature (1)..(251): Homolog of NCBI NO: 34906246 NR Description: P0489A01.8 [Oryza sativa (japonica
MSRHGQGPRLLGRFPQGRVEEFINARTLSAPDLRDPEISGLIARKLREFHELDMPGPKDISLWQRLRRWLEEARSRCSTEEARELRLETLGDEIAELENVLSGVDQRVVFCHNDLQYGNIMIYEETRQVTLIDYEYASFNPVAFDIANHFCEMAADYHSDTPHVMDFTKYPDVDEQRRFLEAYLSSSGENTSDVEVETLLGLIAKYSLTSHLFWGLWGIVSAHVNKNIDFEYKEYARHRFDQYWDTKPRILQACNPTS

SEQ ID NO: 65507 - protein, 205 aa, Triticum aestivum
  peptide (1)..(205): Ceres Seq. ID no. 13655995
  misc_feature (1)..(191): Pfam Name: Choline/ethanolamine kinase Pfam Description: Choline/ethanolamine kinase
  misc_feature (1)..(198): Homolog of NCBI NO: 15234032 NR Description: choline kinase GmCK2p -related protein
  misc_feature (1)..(198): Homolog of NCBI NO: 33149685 NR Description: choline kinase [Oryza sativa (indica
  misc_feature (1)..(199): Homolog of NCBI NO: 15217543 NR Description: choline kinase -related [Arabidopsis thaliana]
  misc_feature (1)..(200): Homolog of NCBI NO: 7488653 NR Description: choline kinase (EC 2.7.1.32) CK2 - soybean
  misc_feature (1)..(200): Homolog of NCBI NO: 7488652 NR Description: choline kinase (EC 2.7.1.32) CK1 - soybean
  misc_feature (1)..(198): Homolog of NCBI NO: 12311795 NR Description: choline kinase [Pisum sativum]
  misc_feature (1)..(200): Homolog of NCBI NO: 25348157 NR Description: protein choline kinase F1O17.1 [imported] -
  misc_feature (1)..(200): Homolog of NCBI NO: 22330627 NR Description: choline kinase -related [Arabidopsis thaliana]
  misc_feature (1)..(198): Homolog of NCBI NO: 7488654 NR Description: choline kinase (EC 2.7.1.32) CK3 - soybean
  misc_feature (1)..(198): Homolog of NCBI NO: 34906246 NR Description: P0489A01.8 [Oryza sativa (japonica
MPGPKDISLWQRLRRWLEEARSRCSTEEARELRLETLGDEIAELENVLSGVDQRVVFCHNDLQYGNIMIYEETRQVTLIDYEYASFNPVAFDIANHFCEMAADYHSDTPHVMDFTKYPDVDEQRRFLEAYLSSSGENTSDVEVETLLGLIAKYSLTSHLFWGLWGIVSAHVNKNIDFEYKEYARHRFDQYWDTKPRILQACNPTS

SEQ ID NO: 65508 - DNA, 1289 bp, Triticum aestivum
  misc_feature (1)..(1289): Ceres Seq. ID no. 13597662
gaactgaacccggaagtccaaagccaacccgtcgcgcagaataacctctcgactctcgagcgcctcctccccgaaccccgaccgtccgctccgcccaccctgcgccaaaatcaaacccccgctcgtccgctccggtgatccgccgctccgggaggcgaagccccacgacccgaccgcgcggagcctctgcccgccatgaccgagtattgggtgagccaaggaaacaaatggtgcgacttgtgcaaaatcttcatatccaacaatcccttcagcatcagaacacatgaactcggcaaacgccacaaggacaatgtcacccaaagattgtctacgatgcaaaaggatggtgctgctaaggaaaaggagcagcaacaagcagcaaaagctctccaactgatagaggctaaagctaaaaagagttaccagaaagatttagagaataaccagagaaacactgatggtgacagttctgcagcacctggagaaggatgggtatttgactcaacttcaggatattattatgataaagccactggactttattacgactcgaactctggtttctattattccgacggattaggcaaatgggtaacccaggaagaggcatacaagtgggcggaaacctcaaaaaccaatgttgcgcaatcctcgacctcgcaaccaaaaccggctggtggaggcgggcctgtcgccggtattaaaggagggccagccccaggtgtggttgtcacgaaaccactgaatccgatgagagctgtgaagggtgctccttcagctcttgctgctaataagagaaaaagagaggacaccaagaagcccaaggtggtctcgaaggaggaggaggcagcactcagagcacgggaagcagctcggaaaagagtggaggacagggagaagcctctcatgggattgtacaagacgtactgagttgtcaatgttcccaagctcaaggggcgcgcccatcagttgcgctaaaacagtggagatgctaatggatggaattgttctgaaagaaaagacggggagaccagcactgagtcccgagctcttgagcgtcagtggcacatgtatgcattgtacaatacctcgtcaaaagttcctaaatcagccacaggttccctttgtgcgaaacatgtaaatgatcagctcatcgattatcatctctcgtgttgtgttttcccaatggattgcatgcatgatataatgccgtcaactgtggccgatgtgagcgctgctggagatagattgtactgccatctctacatcatcagttcatttaagttgtg

SEQ ID NO: 65509 - protein, 244 aa, Triticum aestivum
  peptide (1)..(244): Ceres Seq. ID no. 13597663
  misc_feature (1)..(54): Homolog of NCBI NO: 26385554 NR Description: unnamed protein product [Mus musculus]
  misc_feature (92)..(214): Homolog of NCBI NO: 17979131 NR Description: unknown protein [Arabidopsis thaliana]
  misc_feature (1)..(82): Homolog of NCBI NO: 40882429 NR Description: SD18110p [Drosophila melanogaster]
  misc_feature (1)..(82): Homolog of NCBI NO: 24580725 NR Description: CG4291-PA [Drosophila melanogaster]
  misc_feature (1)..(81): Homolog of NCBI NO: 9055380 NR Description: WW domain binding protein 4; formin binding
  misc_feature (1)..(81): Homolog of NCBI NO: 22028154 NR Description: WW domain binding protein 4 [Mus musculus]
  misc_feature (1)..(81): Homolog of NCBI NO: 6005948 NR Description: WW domain-containing binding protein 4; formin
  misc_feature (1)..(81): Homolog of NCBI NO: 34874540 NR Description: WW domain binding protein 4 (formin binding
  misc_feature (132)..(241): Homolog of NCBI NO: 15010772 NR Description: At1g49590/F14J22_9 [Arabidopsis thaliana]
  misc_feature (1)..(241): Homolog of NCBI NO: 15222782 NR Description: expressed protein [Arabidopsis thaliana]
MTEYWVSQGNKWCDLCKIFISNNPFSIRTHELGKRHKDNVTQRLSTMQKDGAAKEKEQQQAAKALQLIEAKAKKSYQKDLENNQRNTDGDSSAAPGEGWVFDSTSGYYYDKATGLYYDSNSGFYYSDGLGKWVTQEEAYKWAETSKTNVAQSSTSQPKPAGGGGPVAGIKGGPAPGVVVTKPLNPMRAVKGAPSALAANKRKREDTKKPKVVSKEEEAALRAREAARKRVEDREKPLMGLYKTY

SEQ ID NO: 65510 - protein, 198 aa, Triticum aestivum
  peptide (1)..(198): Ceres Seq. ID no. 13597664
  misc_feature (46)..(168): Homolog of NCBI NO: 17979131 NR Description: unknown protein [Arabidopsis thaliana]
  misc_feature (1)..(36): Homolog of NCBI NO: 40882429 NR Description: SD18110p [Drosophila melanogaster]
  misc_feature (1)..(36): Homolog of NCBI NO: 24580725 NR Description: CG4291-PA [Drosophila melanogaster]
  misc_feature (1)..(35): Homolog of NCBI NO: 9055380 NR Description: WW domain binding protein 4; formin binding
  misc_feature (1)..(35): Homolog of NCBI NO: 22028154 NR Description: WW domain binding protein 4 [Mus musculus]
  misc_feature (1)..(35): Homolog of NCBI NO: 6005948 NR Description: WW domain-containing binding protein 4; formin
  misc_feature (1)..(35): Homolog of NCBI NO: 34874540 NR Description: WW domain binding protein 4 (formin binding
  misc_feature (86)..(195): Homolog of NCBI NO: 15010772 NR Description: At1g49590/F14J22_9 [Arabidopsis thaliana]
  misc_feature (1)..(195): Homolog of NCBI NO: 15222782 NR Description: expressed protein [Arabidopsis thaliana]
MQKDGAAKEKEQQQAAKALQLIEAKAKKSYQKDLENNQRNTDGDSSAAPGEGWVFDSTSGYYYDKATGLYYDSNSGFYYSDGLGKWVTQEEAYKWAETSKTNVAQSSTSQPKPAGGGGPVAGIKGGPAPGVVVTKPLNPMRAVKGAPSALAANKRKREDTKKPKVVSKEEEAALRAREAARKRVEDREKPLMGLYKTY

SEQ ID NO: 65511 - DNA, 550 bp, Triticum aestivum
  misc_feature (1)..(550): Ceres Seq. ID no. 13656096
aaaccacacccaaacacgtagtgcacctcctccactaaaagatcatcagccttcagcagagctacactagctccaagccaccgagagaaaaatggccggcttctcgtgcacgagcacgagccatgctgcagttgcactggtttcggcgctgctgctgagcctcgcgcacggcttgctgggggctcatggagccaggaggctcatggagctgtacaagccggaccccagcgagctcctcacttaccacaacggcgccgtgctgcagggcgccatcccggtcaccgtgctctggtacggccgcttcacgccggtccagaaggccgtcgtctccgacttcctcctctcgctcaccgccgcctccccggcgccgaccccgtccgtctcgcagtggtggggcaccatcgcccagctctacctctccaaggccaagggcgccaacgccaagcgcgcgacgcaggtagcgctcgccgggcaggtctccgaagagcgctgctcgctcgggaagagcctcgcgctgcccccaagctcgcggcgctggccgccagggcca

SEQ ID NO: 65512 - protein, 153 aa, Triticum aestivum
  peptide (1)..(153): Ceres Seq. ID no. 13656097
  misc_feature (49)..(141): Pfam Name: Phosphate-induced protein 1 conserved region Pfam Description: Phosphate-induced protein 1 conserved region
  misc_feature (49)..(140): Homolog of NCBI NO: 25408357 NR Description: hypothetical protein At2g35150 [imported] -
  misc_feature (49)..(140): Homolog of NCBI NO: 18403760 NR Description: expressed protein [Arabidopsis thaliana]
  misc_feature (48)..(143): Homolog of NCBI NO: 15237656 NR Description: phi-1-related protein [Arabidopsis thaliana]
  misc_feature (51)..(140): Homolog of NCBI NO: 15219504 NR Description: phosphate-induced (phi-1) protein -related
  misc_feature (51)..(140): Homolog of NCBI NO: 11762144 NR Description: At1g35140 [Arabidopsis thaliana]
  misc_feature (15)..(140): Homolog of NCBI NO: 31074969 NR Description: erg-1 [Solanum tuberosum]
  misc_feature (16)..(140): Homolog of NCBI NO: 15236667 NR Description: phi-1 phosphate-induced protein -related
  misc_feature (15)..(140): Homolog of NCBI NO: 21593043 NR Description: putative phi-1-like phosphate-induced protein
  misc_feature (8)..(140): Homolog of NCBI NO: 3759184 NR Description: phi-1 [Nicotiana tabacum]
  misc_feature (40)..(141): Homolog of NCBI NO: 37533672 NR Description: putative phosphate-induced protein
MAGFSCTSTSHAAVALVSALLLSLAHGLLGAHGARRLMELYKPDPSELLTYHNGAVLQGAIPVTVLWYGRFTPVQKAVVSDFLLSLTAASPAPTPSVSQWWGTIAQLYLSKAKGANAKRATQVALAGQVSEERCSLGKSLALPPSSRRWPPGP

SEQ ID NO: 65513 - protein, 116 aa, Triticum aestivum
  peptide (1)..(116): Ceres Seq. ID no. 13656098
  misc_feature (12)..(104): Pfam Name: Phosphate-induced protein 1 conserved region Pfam Description: Phosphate-induced protein 1 conserved region
  misc_feature (12)..(103): Homolog of NCBI NO: 25408357 NR Description: hypothetical protein At2g35150 [imported] -
  misc_feature (12)..(103): Homolog of NCBI NO: 18403760 NR Description: expressed protein [Arabidopsis thaliana]
  misc_feature (11)..(106): Homolog of NCBI NO: 15237656 NR Description: phi-1-related protein [Arabidopsis thaliana]
  misc_feature (14)..(103): Homolog of NCBI NO: 15219504 NR Description: phosphate-induced (phi-1) protein -related
  misc_feature (14)..(103): Homolog of NCBI NO: 11762144 NR Description: At1g35140 [Arabidopsis thaliana]
  misc_feature (1)..(103): Homolog of NCBI NO: 31074969 NR Description: erg-1 [Solanum tuberosum]
  misc_feature (1)..(103): Homolog of NCBI NO: 15236667 NR Description: phi-1 phosphate-induced protein -related
  misc_feature (1)..(103): Homolog of NCBI NO: 21593043 NR Description: putative phi-1-like phosphate-induced protein
  misc_feature (1)..(103): Homolog of NCBI NO: 3759184 NR Description: phi-1 [Nicotiana tabacum]
  misc_feature (3)..(104): Homolog of NCBI NO: 37533672 NR Description: putative phosphate-induced protein
MELYKPDPSELLTYHNGAVLQGAIPVTVLWYGRFTPVQKAVVSDFLLSLTAASPAPTPSVSQWWGTIAQLYLSKAKGANAKRATQVALAGQVSEERCSLGKSLALPPSSRRWPPGP

SEQ ID NO: 65514 - protein, 91 aa, Triticum aestivum
  peptide (1)..(91): Ceres Seq. ID no. 13656099
  misc_feature (13)..(91): Homolog of NCBI NO: 14719279 NR Description: MAP kinase kinase [Zea mays]
  misc_feature (3)..(91): Homolog of NCBI NO: 32699068 NR Description: hypothetical protein FLJ35107 [Homo sapiens]
  misc_feature (3)..(91): Homolog of NCBI NO: 25143299 NR Description: pre-mRNA splicing SR protein related RSR-1 (68.2
  misc_feature (1)..(91): Homolog of NCBI NO: 25408026 NR Description: probable proline-rich protein [imported] -
  misc_feature (1)..(91): Homolog of NCBI NO: 9843651 NR Description: SRM102 [Arabidopsis thaliana]
  misc_feature (1)..(91): Homolog of NCBI NO: 30684163 NR Description: proline-rich protein -related [Arabidopsis
  misc_feature (12)..(91): Homolog of NCBI NO: 13376335 NR Description: hypothetical protein FLJ14280 [Homo sapiens]
  misc_feature (1)..(91): Homolog of NCBI NO: 31203637 NR Description: ENSANGP00000015599 [Anopheles gambiae]
  misc_feature (8)..(91): Homolog of NCBI NO: 32699068 NR Description: hypothetical protein FLJ35107 [Homo sapiens]
  misc_feature (1)..(91): Homolog of NCBI NO: 141449 NR Description: Hypothetical 35.5 kDa protein in transposon
MEPGGSWSCTSRTPASSSLTTTAPCCRAPSRSPCSGTAASRRSRRPSSPTSSSRSPPPPRRRPRPSRSGGAPSPSSTSPRPRAPTPSARRR

SEQ ID NO: 65515 - DNA, 1993 bp, Triticum aestivum
  misc_feature (1)..(1993): Ceres Seq. ID no. 13585587
ttcagactcctccctctttcggtctctacgacacgtttctttctctctccctctcccctcggctaccaaggcgtctctctcttctccaaggaggctctcgatttgcatggacaagggccacctcggtggtggcggaggaggaggaggactgctagccctggacgcctcgccgcggcagctcggcttcttgaacttgctgtcgccggcgccgttccataggagcatggaggcggacgacggcggaggcggtggcggcggcggcagggggaggaggtccatcgaggttgacttcttttccgacgagaagaagaacatgaagaagagccgggcttcgtccggggccgacgcggaggaccacaaggatcaagcctccgccgccggactcgccatcaagaaggaggacctcaccattaacctccttcccgggaacaacacgaggagcgaccggtccatggtggtcgacgacgacggagcgtcccgggccgaccaagacaggaacggcaggaacaccggcgagctggcggtgatacaggccgagctgagccgcatgaacgaggagaaccagcggctgcgagggatgttgacccaggtcaacaacagctaccatgcgctgcagatgcatctcgtcgcgctcatgcagcaaaggacccagatgcctccggtccagccgcaacaacctccgacccacgaggatggcaagaacgagagtgccatcgtgccgaggcagttcctgggtctgggcccgtcgggagccagcgctgacgtggcggaagagccctccaactcgtccacggaggtcgggagcccgcggcggtcgtcgtccaacggaaacgaggaccctgagcgcggcgaaaaccctgacggcccgtccaccgcggggtggttgcccggacgcgggatgagccagcagcagcagcagcagctgggggcggcggcgaagggccacgaccagcaagcgcaggaggccaccatgaggaaggcccgtgtctccgttcgcgcccgatccgaagccccgattatcgccgatggatgccaatggaggaagtacggtcagaagatggccaagggaaacccttgcccacccgcctactaccggtgcaccatggccaccggctgcccggtgcgcaagcaggtgcaacgatgcgccgaggaccggaccatcctcatcaccacgtacgagggcacgcacaaccacccgctcccgccggccgccatggccatggcgtctaccacgtcggccgctgcgtccatgctgctctccggctccatgcccagcgccgacggcgcggggctcatgagctccaacttcctcgcgcgcaccgtgcttccgtgctcgtccagcatggccaccatctcggcgtccgcgccgttcccgacggtcacgctcgacctcacccacgccccgcccggggcgcccaacgccatgccgctaaacgtcgcccgaccgcatgcaccggggcagttccatgttccgatgcccggcggtgggatggccccggccttcgcgatgccgccgcacatgctgtacaaccagtccaagttctctgggctgcagatgtcctccgactcggtggacgccgggcagttcgcgcagcctaggccgccgatgggcctgccaggccagctgtcagacaccgtcagcgcagcggcggctgcgatcaccgcggacccgaacttcaccgtggcgctcgcggcggccatctcgtcgatcatggccggccagcacgccgccggcaacagcaacgctaacaacagcaataataacaccagtaacaacaacgtgacgacgaccagtaacaacacgacgagcaacaacaccaacagcgagactcaatgaacggcttcgtcaagttcggaaagagttgagaaaccagatagctaggttgcaagttatacacggatggtgttccattcttctttggtcaggattagcttctcgagacgtttctttggttttgataccaagcattatatacgatcaccctttttcttt

SEQ ID NO: 65516 - protein, 611 aa, Triticum aestivum
  peptide (1)..(611): Ceres Seq. ID no. 13585588
  misc_feature (340)..(400): Pfam Name: WRKY DNA -binding domain Pfam Description: WRKY DNA -binding domain
  misc_feature (345)..(584): Homolog of NCBI NO: 13506739 NR Description: WRKY DNA-binding protein 6 [Arabidopsis thaliana]
  misc_feature (42)..(611): Homolog of NCBI NO: 34894308 NR Description: unnamed protein product [Oryza sativa (japonica
  misc_feature (378)..(584): Homolog of NCBI NO: 25404372 NR Description: hypothetical protein F19K23.22 [imported] -
  misc_feature (137)..(362): Homolog of NCBI NO: 25404372 NR Description: hypothetical protein F19K23.22 [imported] -
  misc_feature (156)..(601): Homolog of NCBI NO: 11357339 NR Description: hypothetical protein AT4g22070 - Arabidopsis
  misc_feature (94)..(591): Homolog of NCBI NO: 15233516 NR Description: WRKY family transcription factor [Arabidopsis
  misc_feature (127)..(584): Homolog of NCBI NO: 18407554 NR Description: WRKY family transcription factor [Arabidopsis
  misc_feature (94)..(601): Homolog of NCBI NO: 18415833 NR Description: WRKY family transcription factor [Arabidopsis
  misc_feature (172)..(611): Homolog of NCBI NO: 5042446 NR Description: putative WRKY DNA binding protein
  misc_feature (74)..(611): Homolog of NCBI NO: 34904618 NR Description: putative WRKY DNA binding protein
SDSSLFRSLRHVSFSLPLPSATKASLSSPRRLSICMDKGHLGGGGGGGGLLALDASPRQLGFLNLLSPAPFHRSMEADDGGGGGGGGRGRRSIEVDFFSDEKKNMKKSRASSGADAEDHKDQASAAGLAIKKEDLTINLLPGNNTRSDRSMVVDDDGASRADQDRNGRNTGELAVIQAELSRMNEENQRLRGMLTQVNNSYHALQMHLVALMQQRTQMPPVQPQQPPTHEDGKNESAIVPRQFLGLGPSGASADVAEEPSNSSTEVGSPRRSSSNGNEDPERGENPDGPSTAGWLPGRGMSQQQQQQLGAAAKGHDQQAQEATMRKARVSVRARSEAPIIADGCQWRKYGQKMAKGNPCPPAYYRCTMATGCPVRKQVQRCAEDRTILITTYEGTHNHPLPPAAMAMASTTSAAASMLLSGSMPSADGAGLMSSNFLARTVLPCSSSMATISASAPFPTVTLDLTHAPPGAPNAMPLNVARPHAPGQFHVPMPGGGMAPAFAMPPHMLYNQSKFSGLQMSSDSVDAGQFAQPRPPMGLPGQLSDTVSAAAAAITADPNFTVALAAAISSIMAGQHAAGNSNANNSNNNTSNNNVTTTSNNTTSNNTNSETQ

SEQ ID NO: 65517 - protein, 576 aa, Triticum aestivum
  peptide (1)..(576): Ceres Seq. ID no. 13585589
  misc_feature (305)..(365): Pfam Name: WRKY DNA -binding domain Pfam Description: WRKY DNA -binding domain
  misc_feature (310)..(549): Homolog of NCBI NO: 13506739 NR Description: WRKY DNA-binding protein 6 [Arabidopsis thaliana]
  misc_feature (7)..(576): Homolog of NCBI NO: 34894308 NR Description: unnamed protein product [Oryza sativa (japonica
  misc_feature (343)..(549): Homolog of NCBI NO: 25404372 NR Description: hypothetical protein F19K23.22 [imported] -
  misc_feature (102)..(327): Homolog of NCBI NO: 25404372 NR Description: hypothetical protein F19K23.22 [imported] -
  misc_feature (121)..(566): Homolog of NCBI NO: 11357339 NR Description: hypothetical protein AT4g22070 - Arabidopsis
  misc_feature (59)..(556): Homolog of NCBI NO: 15233516 NR Description: WRKY family transcription factor [Arabidopsis
  misc_feature (92)..(549): Homolog of NCBI NO: 18407554 NR Description: WRKY family transcription factor [Arabidopsis
  misc_feature (59)..(566): Homolog of NCBI NO: 18415833 NR Description: WRKY family transcription factor [Arabidopsis
  misc_feature (137)..(576): Homolog of NCBI NO: 5042446 NR Description: putative WRKY DNA binding protein
  misc_feature (39)..(576): Homolog of NCBI NO: 34904618 NR Description: putative WRKY DNA binding protein
MDKGHLGGGGGGGGLLALDASPRQLGFLNLLSPAPFHRSMEADDGGGGGGGGRGRRSIEVDFFSDEKKNMKKSRASSGADAEDHKDQASAAGLAIKKEDLTINLLPGNNTRSDRSMVVDDDGASRADQDRNGRNTGELAVIQAELSRMNEENQRLRGMLTQVNNSYHALQMHLVALMQQRTQMPPVQPQQPPTHEDGKNESAIVPRQFLGLGPSGASADVAEEPSNSSTEVGSPRRSSSNGNEDPERGENPDGPSTAGWLPGRGMSQQQQQQLGAAAKGHDQQAQEATMRKARVSVRARSEAPIIADGCQWRKYGQKMAKGNPCPPAYYRCTMATGCPVRKQVQRCAEDRTILITTYEGTHNHPLPPAAMAMASTTSAAASMLLSGSMPSADGAGLMSSNFLARTVLPCSSSMATISASAPFPTVTLDLTHAPPGAPNAMPLNVARPHAPGQFHVPMPGGGMAPAFAMPPHMLYNQSKFSGLQMSSDSVDAGQFAQPRPPMGLPGQLSDTVSAAAAAITADPNFTVALAAAISSIMAGQHAAGNSNANNSNNNTSNNNVTTTSNNTTSNNTNSETQ

SEQ ID NO: 65518 - protein, 537 aa, Triticum aestivum
  peptide (1)..(537): Ceres Seq. ID no. 13585590
  misc_feature (266)..(326): Pfam Name: WRKY DNA -binding domain Pfam Description: WRKY DNA -binding domain
  misc_feature (271)..(510): Homolog of NCBI NO: 13506739 NR Description: WRKY DNA-binding protein 6 [Arabidopsis thaliana]
  misc_feature (1)..(537): Homolog of NCBI NO: 34894308 NR Description: unnamed protein product [Oryza sativa (japonica
  misc_feature (304)..(510): Homolog of NCBI NO: 25404372 NR Description: hypothetical protein F19K23.22 [imported] -
  misc_feature (63)..(288): Homolog of NCBI NO: 25404372 NR Description: hypothetical protein F19K23.22 [imported] -
  misc_feature (82)..(527): Homolog of NCBI NO: 11357339 NR Description: hypothetical protein AT4g22070 - Arabidopsis
  misc_feature (20)..(517): Homolog of NCBI NO: 15233516 NR Description: WRKY family transcription factor [Arabidopsis
  misc_feature (53)..(510): Homolog of NCBI NO: 18407554 NR Description: WRKY family transcription factor [Arabidopsis
  misc_feature (20)..(527): Homolog of NCBI NO: 18415833 NR Description: WRKY family transcription factor [Arabidopsis
  misc_feature (98)..(537): Homolog of NCBI NO: 5042446 NR Description: putative WRKY DNA binding protein
  misc_feature (1)..(537): Homolog of NCBI NO: 34904618 NR Description: putative WRKY DNA binding protein
MEADDGGGGGGGGRGRRSIEVDFFSDEKKNMKKSRASSGADAEDHKDQASAAGLAIKKEDLTINLLPGNNTRSDRSMVVDDDGASRADQDRNGRNTGELAVIQAELSRMNEENQRLRGMLTQVNNSYHALQMHLVALMQQRTQMPPVQPQQPPTHEDGKNESAIVPRQFLGLGPSGASADVAEEPSNSSTEVGSPRRSSSNGNEDPERGENPDGPSTAGWLPGRGMSQQQQQQLGAAAKGHDQQAQEATMRKARVSVRARSEAPIIADGCQWRKYGQKMAKGNPCPPAYYRCTMATGCPVRKQVQRCAEDRTILITTYEGTHNHPLPPAAMAMASTTSAAASMLLSGSMPSADGAGLMSSNFLARTVLPCSSSMATISASAPFPTVTLDLTHAPPGAPNAMPLNVARPHAPGQFHVPMPGGGMAPAFAMPPHMLYNQSKFSGLQMSSDSVDAGQFAQPRPPMGLPGQLSDTVSAAAAAITADPNFTVALAAAISSIMAGQHAAGNSNANNSNNNTSNNNVTTTSNNTTSNNTNSETQ

SEQ ID NO: 65519 - DNA, 1402 bp, Triticum aestivum
  misc_feature (1)..(1402): Ceres Seq. ID no. 13662846
atccttcttctcactctcaggtctcagcgcgcccatcctctgccccttgggcgtctggtctggatccaagagccggccgccaactgcaatgccgtccctcctggagatcttcctgggatcctgttcctcctcggcgccgccggtggactgggaggcggaggcctacccggagtacgccgactacgccgtcctccccctgctcctcgccttcttccccgccctgcgcctcctcctcaaccagttcctcttcgaggtgttagcaagacgacttatatttggaaagggatatgacaagcttgctgaaacagatgaaaggagaaagaaaatcaataaatttaaggaatcggcatggaaatttgtttattatctttctgcagaactcttttcactatctgtaacatacaatgaatcgtggtttacaaatacaagatacttttgggtagggcctggcgagcagctgtggcccgaccaaaagatgaagctgaagcttaaggctgtatacatgtatgccgctggattttacgtatattctatctttgatcttctgttctgggaaacaagacgcaaggacttcggagtcatgatgtctcaccatgtggcaactattgttctgattgttgtgtcctatatttgcagattatctcgtcctggctcggtcattttacccctccatgatgcaagtgatatattcctagagattggaaagatggccaagtacagtagctgtgagtggctagctgttgtagcatttctactttttgtggcttcatggatccttcttcggctaatagtgtttcctttctggatcctaagaagcacaagttatgaaatagctatgatcgtggacaacgagaacagaaaaatctacagaacttcgtactactatcttttcaacactctcttgttttcacttctggtctttcacatatattggtgggtactgatttatcggatgctcgtcaaacaaattcaatccagaggtcatgttggtgaggatgtccgatccgattctgaaggcgaaaacaaccatgaagattaagctgaaggttgttggatgcttaactgaagaactgtatagttcgcagttgggaatgagaatggtgcaagcgggttgtataaagaatgagaatgtcaaggaggagctagttagcatatccattagtaggaaattcaggcacaaaacgaaaactgaaaaggctcgaatctcggtgccactggaacaagcctccttgatatgtatcttttttgtatattgaatgtataaggtgaggctatcattcagggtcttgaggcatcaatcatacatcgtgatattaatctccatatgtatgtgaagatgtcttttcagaaatactgagcctccgagttataaaaattctcttttatatatgtggtttgcttg

SEQ ID NO: 65520 - protein, 345 aa, Triticum aestivum
  peptide (1)..(345): Ceres Seq. ID no. 13662847
  misc_feature (130)..(341): Pfam Name: Longevity-assurance protein (LAG1) Pfam Description: Longevity-assurance protein (LAG1)
  misc_feature (104)..(345): Homolog of NCBI NO: 24119257 NR Description: trh3 protein [Danio rerio]
  misc_feature (44)..(160): Homolog of NCBI NO: 8920562 NR Description: Contains similarity to LAG1 homolog 1 from
  misc_feature (56)..(340): Homolog of NCBI NO: 34901974 NR Description: unknown protein [Oryza sativa (japonica
  misc_feature (64)..(342): Homolog of NCBI NO: 7658241 NR Description: LAG1 homolog 2 [Arabidopsis thaliana]
  misc_feature (64)..(342): Homolog of NCBI NO: 15230323 NR Description: longevity factor-related protein [Arabidopsis
  misc_feature (44)..(275): Homolog of NCBI NO: 30683361 NR Description: longevity assurance protein -related [Arabidopsis
  misc_feature (45)..(345): Homolog of NCBI NO: 7688742 NR Description: ASC1 [Lycopersicon esculentum]
  misc_feature (44)..(345): Homolog of NCBI NO: 18404559 NR Description: LAG1 homolog 1 [Arabidopsis thaliana]
  misc_feature (48)..(345): Homolog of NCBI NO: 16974114 NR Description: putative resistance protein [Lycopersicon
  misc_feature (44)..(345): Homolog of NCBI NO: 25518747 NR Description: hypothetical protein F13B4.7 - Arabidopsis
SFFSLSGLSAPILCPLGVWSGSKSRPPTAMPSLLEIFLGSCSSSAPPVDWEAEAYPEYADYAVLPLLLAFFPALRLLLNQFLFEVLARRLIFGKGYDKLAETDERRKKINKFKESAWKFVYYLSAELFSLSVTYNESWFTNTRYFWVGPGEQLWPDQKMKLKLKAVYMYAAGFYVYSIFDLLFWETRRKDFGVMMSHHVATIVLIVVSYICRLSRPGSVILPLHDASDIFLEIGKMAKYSSCEWLAVVAFLLFVASWILLRLIVFPFWILRSTSYEIAMIVDNENRKIYRTSYYYLFNTLLFSLLVFHIYWWVLIYRMLVKQIQSRGHVGEDVRSDSEGENNHED

SEQ ID NO: 65521 - protein, 316 aa, Triticum aestivum
  peptide (1)..(316): Ceres Seq. ID no. 13662848
  misc_feature (101)..(312): Pfam Name: Longevity-assurance protein (LAG1) Pfam Description: Longevity-assurance protein (LAG1)
  misc_feature (75)..(316): Homolog of NCBI NO: 24119257 NR Description: trh3 protein [Danio rerio]
  misc_feature (15)..(131): Homolog of NCBI NO: 8920562 NR Description: Contains similarity to LAG1 homolog 1 from
  misc_feature (27)..(311): Homolog of NCBI NO: 34901974 NR Description: unknown protein [Oryza sativa (japonica
  misc_feature (35)..(313): Homolog of NCBI NO: 7658241 NR Description: LAG1 homolog 2 [Arabidopsis thaliana]
  misc_feature (35)..(313): Homolog of NCBI NO: 15230323 NR Description: longevity factor-related protein [Arabidopsis
  misc_feature (15)..(246): Homolog of NCBI NO: 30683361 NR Description: longevity assurance protein -related [Arabidopsis
  misc_feature (16)..(316): Homolog of NCBI NO: 7688742 NR Description: ASC1 [Lycopersicon esculentum]
  misc_feature (15)..(316): Homolog of NCBI NO: 18404559 NR Description: LAG1 homolog 1 [Arabidopsis thaliana]
  misc_feature (19)..(316): Homolog of NCBI NO: 16974114 NR Description: putative resistance protein [Lycopersicon
  misc_feature (15)..(316): Homolog of NCBI NO: 25518747 NR Description: hypothetical protein F13B4.7 - Arabidopsis
MPSLLEIFLGSCSSSAPPVDWEAEAYPEYADYAVLPLLLAFFPALRLLLNQFLFEVLARRLIFGKGYDKLAETDERRKKINKFKESAWKFVYYLSAELFSLSVTYNESWFTNTRYFWVGPGEQLWPDQKMKLKLKAVYMYAAGFYVYSIFDLLFWETRRKDFGVMMSHHVATIVLIVVSYICRLSRPGSVILPLHDASDIFLEIGKMAKYSSCEWLAVVAFLLFVASWILLRLIVFPFWILRSTSYEIAMIVDNENRKIYRTSYYYLFNTLLFSLLVFHIYWWVLIYRMLVKQIQSRGHVGEDVRSDSEGENNHED

SEQ ID NO: 65522 - protein, 187 aa, Triticum aestivum
  peptide (1)..(187): Ceres Seq. ID no. 13662849
  misc_feature (1)..(183): Pfam Name: Longevity-assurance protein (LAG1) Pfam Description: Longevity-assurance protein (LAG1)
  misc_feature (1)..(187): Homolog of NCBI NO: 27769146 NR Description: Similar to RIKEN cDNA 0610013I17 gene [Xenopus
  misc_feature (1)..(187): Homolog of NCBI NO: 24119257 NR Description: trh3 protein [Danio rerio]
  misc_feature (1)..(182): Homolog of NCBI NO: 34901974 NR Description: unknown protein [Oryza sativa (japonica
  misc_feature (1)..(184): Homolog of NCBI NO: 7658241 NR Description: LAG1 homolog 2 [Arabidopsis thaliana]
  misc_feature (1)..(184): Homolog of NCBI NO: 15230323 NR Description: longevity factor-related protein [Arabidopsis
  misc_feature (1)..(117): Homolog of NCBI NO: 30683361 NR Description: longevity assurance protein -related [Arabidopsis
  misc_feature (1)..(187): Homolog of NCBI NO: 7688742 NR Description: ASC1 [Lycopersicon esculentum]
  misc_feature (1)..(187): Homolog of NCBI NO: 18404559 NR Description: LAG1 homolog 1 [Arabidopsis thaliana]
  misc_feature (1)..(187): Homolog of NCBI NO: 16974114 NR Description: putative resistance protein [Lycopersicon
  misc_feature (1)..(187): Homolog of NCBI NO: 25518747 NR Description: hypothetical protein F13B4.7 - Arabidopsis
MKLKLKAVYMYAAGFYVYSIFDLLFWETRRKDFGVMMSHHVATIVLIVVSYICRLSRPGSVILPLHDASDIFLEIGKMAKYSSCEWLAVVAFLLFVASWILLRLIVFPFWILRSTSYEIAMIVDNENRKIYRTSYYYLFNTLLFSLLVFHIYWWVLIYRMLVKQIQSRGHVGEDVRSDSEGENNHED

SEQ ID NO: 65523 - DNA, 798 bp, Triticum aestivum
  misc_feature (1)..(798): Ceres Seq. ID no. 13598579
cctaattcgctagctcgctctcgctcccgctgccgctctcaagctacctggcttctagctagctagggttcgtctacggaagctgaccgcgagctggctggccggagagaccgagcagctccgcgcgccgcagcgggcctggagctgcctagctagcaaagctcggtggagttcttgtgaagctagctagcggacgatcgaaagccgatcgacgatgcgcctcgtcgtcggaggtcacgtgagatgatgagcggcaacaaccagcaccagcagtcggcggcggcggcggcggcggaggaggagcaggagctagcgcggaagcacgcggccgcggtggctacgtcgcggcaatggtcgtcgcagacggagtcacggatagtgcgcgtgtcgcgcgtcttcggcggcaaggaccgccacagcaaggtgaagaccgtcaagggtctccgcgaccggcgcgtgcggctgtccgtgcagacggcgatccagctctacgacctgcaggaccggctgggccttaaccagcccagcaaggtcgtcgactggctgctcaacgcggcccgccacgagatcgacaagctgccgccgctccagttcccgccgcaccaggtcgacctcatggaccacatgatgacctcctcctccatgccactcatgccgcacgtcgatgacaagttctgccactttgcgtccacgctcgcccgagatggtggcgtcaaggccggggccgacgctgacggcggtggagctcaccacaacattgggaggttcggctaccaccggttcatggggctcaacaac

SEQ ID NO: 65524 - protein, 185 aa, Triticum aestivum
  peptide (1)..(185): Ceres Seq. ID no. 13598580
  misc_feature (38)..(167): Pfam Name: TCP family transcription factor Pfam Description: TCP family transcription factor
  misc_feature (43)..(131): Homolog of NCBI NO: 25369264 NR Description: probable basic helix-loop-helix DNA binding
  misc_feature (36)..(131): Homolog of NCBI NO: 18415079 NR Description: TCP family transcription factor, putative
  misc_feature (36)..(131): Homolog of NCBI NO: 7486304 NR Description: hypothetical protein F28J12.50 - Arabidopsis
  misc_feature (18)..(115): Homolog of NCBI NO: 18397402 NR Description: TCP family transcription factor, putative
  misc_feature (35)..(141): Homolog of NCBI NO: 33146716 NR Description: putative transcription factor PCF6
  misc_feature (25)..(123): Homolog of NCBI NO: 15241512 NR Description: TCP family transcription factor, putative
  misc_feature (1)..(178): Homolog of NCBI NO: 30678498 NR Description: TCP family transcription factor TFPD [Arabidopsis
  misc_feature (1)..(178): Homolog of NCBI NO: 18396089 NR Description: TCP family transcription factor TFPD [Arabidopsis
  misc_feature (23)..(118): Homolog of NCBI NO: 15239489 NR Description: TCP family transcription factor, putative
  misc_feature (1)..(167): Homolog of NCBI NO: 34909780 NR Description: P0512C01.32 [Oryza sativa (japonica
MMSGNNQHQQSAAAAAAEEEQELARKHAAAVATSRQWSSQTESRIVRVSRVFGGKDRHSKVKTVKGLRDRRVRLSVQTAIQLYDLQDRLGLNQPSKVVDWLLNAARHEIDKLPPLQFPPHQVDLMDHMMTSSSMPLMPHVDDKFCHFASTLARDGGVKAGADADGGGAHHNIGRFGYHRFMGLNN

SEQ ID NO: 65525 - protein, 184 aa, Triticum aestivum
  peptide (1)..(184): Ceres Seq. ID no. 13598581
  misc_feature (37)..(166): Pfam Name: TCP family transcription factor Pfam Description: TCP family transcription factor
  misc_feature (42)..(130): Homolog of NCBI NO: 25369264 NR Description: probable basic helix-loop-helix DNA binding
  misc_feature (35)..(130): Homolog of NCBI NO: 18415079 NR Description: TCP family transcription factor, putative
  misc_feature (35)..(130): Homolog of NCBI NO: 7486304 NR Description: hypothetical protein F28J12.50 - Arabidopsis
  misc_feature (17)..(114): Homolog of NCBI NO: 18397402 NR Description: TCP family transcription factor, putative
  misc_feature (34)..(140): Homolog of NCBI NO: 33146716 NR Description: putative transcription factor PCF6
  misc_feature (24)..(122): Homolog of NCBI NO: 15241512 NR Description: TCP family transcription factor, putative
  misc_feature (1)..(177): Homolog of NCBI NO: 30678498 NR Description: TCP family transcription factor TFPD [Arabidopsis
  misc_feature (1)..(177): Homolog of NCBI NO: 18396089 NR Description: TCP family transcription factor TFPD [Arabidopsis
  misc_feature (22)..(117): Homolog of NCBI NO: 15239489 NR Description: TCP family transcription factor, putative
  misc_feature (1)..(166): Homolog of NCBI NO: 34909780 NR Description: P0512C01.32 [Oryza sativa (japonica
MSGNNQHQQSAAAAAAEEEQELARKHAAAVATSRQWSSQTESRIVRVSRVFGGKDRHSKVKTVKGLRDRRVRLSVQTAIQLYDLQDRLGLNQPSKVVDWLLNAARHEIDKLPPLQFPPHQVDLMDHMMTSSSMPLMPHVDDKFCHFASTLARDGGVKAGADADGGGAHHNIGRFGYHRFMGLNN

SEQ ID NO: 65526 - DNA, 1664 bp, Triticum aestivum
  misc_feature (1)..(1664): Ceres Seq. ID no. 12617887
gacaaccgcaccgcaccgcgcccacacacgccacgcagcgcctcggtaccatcgcgttcctgctcgtagcttcgtgtcccgtcccacccccggcggcccgcaggatccgtccggctgcggtgatttgatttgatttgtgatttcggttcgtgcggcggcgatggggatgctgtcgcggccggaggaggtgccggcgctgctcaggctcaagctggcggcggggcggatcaggcgccagatcccgccgcaggagcactgggccttcgcctacgacatgctgcagcgggtctcccgcagcttcgcgctcctcatccagcagctaggccccgagctccgcaatgccgtctgcgtcttctacctcgtgctccgggccctggacaccgtcgaggacgacaccgccatccctaacgaggtcaagctgcccatccttcgggacttctaccgccacatctacaacccggactggctcttttcatgtggagcaaacgactacagagtgctcatggataattttaggcaagtctccacggctttcctggagctaggcgaaggataccaaaaggctattgaagaaatcactaggcgaatgggagaaggaatggctaaatttatatgcacggaggttgaaaccattgatgactatgatgagtactgccactatgtagcagggctagtaggctatggactttctaggctctttcatgctactggcacagaagatctggctccggatcatctttcaaattcaatgggtttatttctacagaaaaccaatataataagggattatttggaggacataaatgagataccaaggtgccgtatgttctggcctcgggaaatatggagtaaatatgtcgataaacttgaggatttaaaatatgaggaaaattcagaaaaggccgtgcagtgcttgaatgatatggtgaccaatgctttgatccatgcccaagattgccttcaatacatgtcagcattgaaggacaactccaattttcgattttgtgcaatacctcagataatggcaattgggacatgtgctatttgctacaataatgtgaaagtctttagaggagttgttaagatgaggcgtgggctcactgcacgggtgattgatgagacaaaatcgatatctgatgtctattctgctttctatgagttctcttcattgctagagtcgaagattgatgataacgacccaaatgctgcgctgacacggaggcgtgtggatgcaataaagaaaacttgcaagtcatccggcctgctgaagagaaggggttacgatctggagaaatcaaagtacagaatgcctatgctgatcatgatcatgcttctgttggtggctattatcttgggtgtactgtatggcaagtgatccggtcaagatggtcctcttatgttcttagtggcaccgcctcccctatgtggttttgcacgtgtacttcctgactgcagatggatggctggtttgcatgtagtattgtgctatgtaccctgctggtgccatgcatgctagttctttttgttctttgtttctgtcgtcccgtatgttgtttcagcttgtaatttgtttgaatctaggagagacttccttagtgacatgtatcctatgaatttggcgtggcgccttggttgtcaatgattctacattttgtttatttgtg

SEQ ID NO: 65527 - protein, 404 aa, Triticum aestivum
  peptide (1)..(404): Ceres Seq. ID no. 12617888
  misc_feature (40)..(327): Pfam Name: Squalene/phytoene synthase Pfam Description: Squalene/phytoene synthase
  misc_feature (3)..(401): Homolog of NCBI NO: 2780361 NR Description: squalene synthase [Panax ginseng]
  misc_feature (1)..(404): Homolog of NCBI NO: 2144186 NR Description: farnesyl-diphosphate farnesyltransferase (EC
  misc_feature (3)..(401): Homolog of NCBI NO: 27475614 NR Description: farnesyl-diphosphate farnesyltransferase
  misc_feature (1)..(402): Homolog of NCBI NO: 34394799 NR Description: putative squalene synthase
  misc_feature (1)..(404): Homolog of NCBI NO: 2463565 NR Description: squalene synthase [Oryza sativa (japonica
  misc_feature (1)..(402): Homolog of NCBI NO: 7434086 NR Description: farnesyl-diphosphate farnesyltransferase (EC
MGMLSRPEEVPALLRLKLAAGRIRRQIPPQEHWAFAYDMLQRVSRSFALLIQQLGPELRNAVCVFYLVLRALDTVEDDTAIPNEVKLPILRDFYRHIYNPDWLFSCGANDYRVLMDNFRQVSTAFLELGEGYQKAIEEITRRMGEGMAKFICTEVETIDDYDEYCHYVAGLVGYGLSRLFHATGTEDLAPDHLSNSMGLFLQKTNIIRDYLEDINEIPRCRMFWPREIWSKYVDKLEDLKYEENSEKAVQCLNDMVTNALIHAQDCLQYMSALKDNSNFRFCAIPQIMAIGTCAICYNNVKVFRGVVKMRRGLTARVIDETKSISDVYSAFYEFSSLLESKIDDNDPNAALTRRRVDAIKKTCKSSGLLKRRGYDLEKSKYRMPMLIMIMLLLVAIILGVLYGK

SEQ ID NO: 65528 - protein, 402 aa, Triticum aestivum
  peptide (1)..(402): Ceres Seq. ID no. 12617889
  misc_feature (38)..(325): Pfam Name: Squalene/phytoene synthase Pfam Description: Squalene/phytoene synthase
  misc_feature (1)..(399): Homolog of NCBI NO: 2780361 NR Description: squalene synthase [Panax ginseng]
  misc_feature (1)..(402): Homolog of NCBI NO: 2144186 NR Description: farnesyl-diphosphate farnesyltransferase (EC
  misc_feature (1)..(399): Homolog of NCBI NO: 27475614 NR Description: farnesyl-diphosphate farnesyltransferase
  misc_feature (1)..(400): Homolog of NCBI NO: 34394799 NR Description: putative squalene synthase
  misc_feature (1)..(402): Homolog of NCBI NO: 2463565 NR Description: squalene synthase [Oryza sativa (japonica
  misc_feature (1)..(400): Homolog of NCBI NO: 7434086 NR Description: farnesyl-diphosphate farnesyltransferase (EC
MLSRPEEVPALLRLKLAAGRIRRQIPPQEHWAFAYDMLQRVSRSFALLIQQLGPELRNAVCVFYLVLRALDTVEDDTAIPNEVKLPILRDFYRHIYNPDWLFSCGANDYRVLMDNFRQVSTAFLELGEGYQKAIEEITRRMGEGMAKFICTEVETIDDYDEYCHYVAGLVGYGLSRLFHATGTEDLAPDHLSNSMGLFLQKTNIIRDYLEDINEIPRCRMFWPREIWSKYVDKLEDLKYEENSEKAVQCLNDMVTNALIHAQDCLQYMSALKDNSNFRFCAIPQIMAIGTCAICYNNVKVFRGVVKMRRGLTARVIDETKSISDVYSAFYEFSSLLESKIDDNDPNAALTRRRVDAIKKTCKSSGLLKRRGYDLEKSKYRMPMLIMIMLLLVAIILGVLYGK

SEQ ID NO: 65529 - protein, 366 aa, Triticum aestivum
  peptide (1)..(366): Ceres Seq. ID no. 12617890
  misc_feature (2)..(289): Pfam Name: Squalene/phytoene synthase Pfam Description: Squalene/phytoene synthase
  misc_feature (1)..(363): Homolog of NCBI NO: 2780361 NR Description: squalene synthase [Panax ginseng]
  misc_feature (1)..(366): Homolog of NCBI NO: 2144186 NR Description: farnesyl-diphosphate farnesyltransferase (EC
  misc_feature (1)..(363): Homolog of NCBI NO: 27475614 NR Description: farnesyl-diphosphate farnesyltransferase
  misc_feature (1)..(364): Homolog of NCBI NO: 34394799 NR Description: putative squalene synthase
  misc_feature (1)..(366): Homolog of NCBI NO: 2463565 NR Description: squalene synthase [Oryza sativa (japonica
  misc_feature (1)..(364): Homolog of NCBI NO: 7434086 NR Description: farnesyl-diphosphate farnesyltransferase (EC
MLQRVSRSFALLIQQLGPELRNAVCVFYLVLRALDTVEDDTAIPNEVKLPILRDFYRHIYNPDWLFSCGANDYRVLMDNFRQVSTAFLELGEGYQKAIEEITRRMGEGMAKFICTEVETIDDYDEYCHYVAGLVGYGLSRLFHATGTEDLAPDHLSNSMGLFLQKTNIIRDYLEDINEIPRCRMFWPREIWSKYVDKLEDLKYEENSEKAVQCLNDMVTNALIHAQDCLQYMSALKDNSNFRFCAIPQIMAIGTCAICYNNVKVFRGVVKMRRGLTARVIDETKSISDVYSAFYEFSSLLESKIDDNDPNAALTRRRVDAIKKTCKSSGLLKRRGYDLEKSKYRMPMLIMIMLLLVAIILGVLYGK

SEQ ID NO: 65530 - DNA, 1752 bp, Triticum aestivum
  misc_feature (1)..(1752): Ceres Seq. ID no. 14303572
agttgtcgttccaaaggaaaaggaaaattggcagctggttgtggtgttcgctgctcgccaccgactttcccggcgccaccgcaccgtgcaccggccccaccggcggcgacgatgggtaactcacaggcctctcccttgtccgcctcctctgccagcttcgtcatggcctccagggccttctcgaagcaggcgctggacgaactgcgcgcgcacttctcctcgctcgccgcgcagtcggggacccaggggcgcgccatatcccgccccgttttccttgattatttcggggtacgtggggcgctcggcgataggctattccagttggtggcgaaggagagcagcgtggaagatggagtcaccttcgagggtttgattatcaccaaagcaacatatgaaaggggaactaaagatgaagccgatgagttcatttttcaactgtgcgatgtgatgggagatagtatcttaacaaggtctgatctggaagctgtatttgtgtccattcatgaaaccatatttgcagataataatgaagccaaggaaggttctaacaagagtacatttgaagcatttctcaactctgcggtattttcgaaggatgctgaaggggtctctgagaagtctatgtcattatcagactttagaaactggtgtattgtcatgccaaaactgaggaaattccttggaagtttgttgatgccccctgactcaggcagagccggcttccagatacctctacttcattatccagaaaacatctcctccgagttgctactcttaaataaagagtatgcttggcatataggaggtggcttctctcaacatgatgtgcaagagtggaagcttctatatcacagttctcttcatggacaaagcttcaacactttcttaggcaatgtgacgaatggagatgtacagactgttttggttattaaagatgcagaaggttccatttatggtgcatatgcatcacaaccatgggaaaggcacagtgatttttatggtgacatgaagacattccttttcaagttatatcccgaagcgtccatattttgccctacaggagcaaacaaaagtttgcaatggtgtgctgtaaacttcacctctgagaacattccaaatggcatcggctttggaggcaagccacatcactttggcctcttcctctctgcgggtttcgatcaagggcactcatttacctccagcacattcaccaatcctcccctttccaacacgagcaggttcagaccagaagttattgaatgttgggggatacaagtgaagggatcaaatgatgaaaagccggagcttgtcaaggggacggtccttgagagattcaaggaggatcggaacatgctgaagctgattggtatggcgagtgcgagtgactgagcactgaaaaaaatcacaatagcagatatttggaggttgtgtacagcactctttttatgggaaataataccttacttgtatctggttgctactcttgagttttatttagctcttggagcttttttgtttcacatccagagtgatacaaggttagctgcatggagttgttggtttatactgtatggatccaggacgtcattttctgcccagttcgagagcagggagtaactgtctgttcatttgtcaagatggatcttcgaaagctggctgctgattaaaggatgtatgaaatgtgttctaaaactaaatcagtgtagcatgtattggggtggataaagtaatgagtggatacagttcagttcg

SEQ ID NO: 65531 - protein, 462 aa, Triticum aestivum
  peptide (1)..(462): Ceres Seq. ID no. 14303573
  misc_feature (279)..(425): Homolog of NCBI NO: 13278166 NR Description: Oxr1 protein [Mus musculus]
  misc_feature (242)..(462): Homolog of NCBI NO: 19920876 NR Description: CG5149-PA [Drosophila melanogaster]
  misc_feature (266)..(462): Homolog of NCBI NO: 10047293 NR Description: KIAA1609 protein [Homo sapiens]
  misc_feature (266)..(462): Homolog of NCBI NO: 23270886 NR Description: Unknown (protein for MGC:25024) [Homo sapiens]
  misc_feature (278)..(462): Homolog of NCBI NO: 31226704 NR Description: ENSANGP00000010196 [Anopheles gambiae]
  misc_feature (277)..(462): Homolog of NCBI NO: 28077021 NR Description: RIKEN cDNA 4632415K11 [Mus musculus]
  misc_feature (188)..(302): Homolog of NCBI NO: 17065420 NR Description: Unknown protein [Arabidopsis thaliana]
  misc_feature (17)..(237): Homolog of NCBI NO: 7486284 NR Description: hypothetical protein F28A23.170 - Arabidopsis
  misc_feature (17)..(302): Homolog of NCBI NO: 22329148 NR Description: expressed protein [Arabidopsis thaliana]
  misc_feature (38)..(462): Homolog of NCBI NO: 15239986 NR Description: expressed protein [Arabidopsis thaliana]
SCRSKGKGKLAAGCGVRCSPPTFPAPPHRAPAPPAATMGNSQASPLSASSASFVMASRAFSKQALDELRAHFSSLAAQSGTQGRAISRPVFLDYFGVRGALGDRLFQLVAKESSVEDGVTFEGLIITKATYERGTKDEADEFIFQLCDVMGDSILTRSDLEAVFVSIHETIFADNNEAKEGSNKSTFEAFLNSAVFSKDAEGVSEKSMSLSDFRNWCIVMPKLRKFLGSLLMPPDSGRAGFQIPLLHYPENISSELLLLNKEYAWHIGGGFSQHDVQEWKLLYHSSLHGQSFNTFLGNVTNGDVQTVLVIKDAEGSIYGAYASQPWERHSDFYGDMKTFLFKLYPEASIFCPTGANKSLQWCAVNFTSENIPNGIGFGGKPHHFGLFLSAGFDQGHSFTSSTFTNPPLSNTSRFRPEVIECWGIQVKGSNDEKPELVKGTVLERFKEDRNMLKLIGMASASD

SEQ ID NO: 65532 - protein, 425 aa, Triticum aestivum
  peptide (1)..(425): Ceres Seq. ID no. 14303574
  misc_feature (242)..(388): Homolog of NCBI NO: 13278166 NR Description: Oxr1 protein [Mus musculus]
  misc_feature (205)..(425): Homolog of NCBI NO: 19920876 NR Description: CG5149-PA [Drosophila melanogaster]
  misc_feature (229)..(425): Homolog of NCBI NO: 10047293 NR Description: KIAA1609 protein [Homo sapiens]
  misc_feature (229)..(425): Homolog of NCBI NO: 23270886 NR Description: Unknown (protein for MGC:25024) [Homo sapiens]
  misc_feature (241)..(425): Homolog of NCBI NO: 31226704 NR Description: ENSANGP00000010196 [Anopheles gambiae]
  misc_feature (240)..(425): Homolog of NCBI NO: 28077021 NR Description: RIKEN cDNA 4632415K11 [Mus musculus]
  misc_feature (151)..(265): Homolog of NCBI NO: 17065420 NR Description: Unknown protein [Arabidopsis thaliana]
  misc_feature (1)..(200): Homolog of NCBI NO: 7486284 NR Description: hypothetical protein F28A23.170 - Arabidopsis
  misc_feature (1)..(265): Homolog of NCBI NO: 22329148 NR Description: expressed protein [Arabidopsis thaliana]
  misc_feature (1)..(425): Homolog of NCBI NO: 15239986 NR Description: expressed protein [Arabidopsis thaliana]
MGNSQASPLSASSASFVMASRAFSKQALDELRAHFSSLAAQSGTQGRAISRPVFLDYFGVRGALGDRLFQLVAKESSVEDGVTFEGLIITKATYERGTKDEADEFIFQLCDVMGDSILTRSDLEAVFVSIHETIFADNNEAKEGSNKSTFEAFLNSAVFSKDAEGVSEKSMSLSDFRNWCIVMPKLRKFLGSLLMPPDSGRAGFQIPLLHYPENISSELLLLNKEYAWHIGGGFSQHDVQEWKLLYHSSLHGQSFNTFLGNVTNGDVQTVLVIKDAEGSIYGAYASQPWERHSDFYGDMKTFLFKLYPEASIFCPTGANKSLQWCAVNFTSENIPNGIGFGGKPHHFGLFLSAGFDQGHSFTSSTFTNPPLSNTSRFRPEVIECWGIQVKGSNDEKPELVKGTVLERFKEDRNMLKLIGMASASD

SEQ ID NO: 65533 - protein, 408 aa, Triticum aestivum
  peptide (1)..(408): Ceres Seq. ID no. 14303575
  misc_feature (225)..(371): Homolog of NCBI NO: 13278166 NR Description: Oxr1 protein [Mus musculus]
  misc_feature (188)..(408): Homolog of NCBI NO: 19920876 NR Description: CG5149-PA [Drosophila melanogaster]
  misc_feature (212)..(408): Homolog of NCBI NO: 10047293 NR Description: KIAA1609 protein [Homo sapiens]
  misc_feature (212)..(408): Homolog of NCBI NO: 23270886 NR Description: Unknown (protein for MGC:25024) [Homo sapiens]
  misc_feature (224)..(408): Homolog of NCBI NO: 31226704 NR Description: ENSANGP00000010196 [Anopheles gambiae]
  misc_feature (223)..(408): Homolog of NCBI NO: 28077021 NR Description: RIKEN cDNA 4632415K11 [Mus musculus]
  misc_feature (134)..(248): Homolog of NCBI NO: 17065420 NR Description: Unknown protein [Arabidopsis thaliana]
  misc_feature (1)..(183): Homolog of NCBI NO: 7486284 NR Description: hypothetical protein F28A23.170 - Arabidopsis
  misc_feature (1)..(248): Homolog of NCBI NO: 22329148 NR Description: expressed protein [Arabidopsis thaliana]
  misc_feature (1)..(408): Homolog of NCBI NO: 15239986 NR Description: expressed protein [Arabidopsis thaliana]
MASRAFSKQALDELRAHFSSLAAQSGTQGRAISRPVFLDYFGVRGALGDRLFQLVAKESSVEDGVTFEGLIITKATYERGTKDEADEFIFQLCDVMGDSILTRSDLEAVFVSIHETIFADNNEAKEGSNKSTFEAFLNSAVFSKDAEGVSEKSMSLSDFRNWCIVMPKLRKFLGSLLMPPDSGRAGFQIPLLHYPENISSELLLLNKEYAWHIGGGFSQHDVQEWKLLYHSSLHGQSFNTFLGNVTNGDVQTVLVIKDAEGSIYGAYASQPWERHSDFYGDMKTFLFKLYPEASIFCPTGANKSLQWCAVNFTSENIPNGIGFGGKPHHFGLFLSAGFDQGHSFTSSTFTNPPLSNTSRFRPEVIECWGIQVKGSNDEKPELVKGTVLERFKEDRNMLKLIGMASASD

SEQ ID NO: 65534 - DNA, 761 bp, Triticum aestivum
  misc_feature (1)..(761): Ceres Seq. ID no. 12586642
aacacaagcagtcgatcgattcatccaaaccagagttgagcaatacgtactagcagtgagatttggcccttccaatcgagtgatttcagttcgtgtttgttggtgagagagaagagaagagaagagaggagaagatggcctccaaccagaaccaggcgagctacgcggccggcgagaccaaagcccgcaccgaggagaagaccgggcagatgatgggcgccaccaaggacaaggcggggcaggccacggaggaaaccaagcagaaggccggcgagacggccgaggccaccaagcagaaggcatcggagacggcgcagtacgcgcaggagaggtcctccgacgccgcacagtacagcaaggagtccgccgtcgccggcaaggacaagactggcaacgtgctccagcaggccggcgagacggtggcgaacgccgtggcgaacacgctaggcatgggcggtgacaacaccaacaccaccactggcgccacaaaggacagcacccccgagaagatcaccagggatccctggacgcatgcatacgtccaatctttgctgatttgcttcctttattactcgtttggtccttttacatatctgtatgtttccctcttgtgatttcagctcgtttagtgtaaatttgccttcgatttgaggtactcgatcgtgtccggttctgtaatgagttataatccatgtactttggtgtaaatggatatgtaacgaggacagtcgaaggtggcaataatattagttttcggagag

SEQ ID NO: 65535 - protein, 159 aa, Triticum aestivum
  peptide (1)..(159): Ceres Seq. ID no. 12586643
  misc_feature (35)..(100): Pfam Name: Late embryogenesis abundant protein Pfam Description: Late embryogenesis abundant protein
  misc_feature (1)..(103): Homolog of NCBI NO: 4929080 NR Description: ABA-inducible protein WRAB1 [Triticum aestivum]
  misc_feature (1)..(129): Homolog of NCBI NO: 7387829 NR Description: Late embryogenesis abundant protein, group 3
  misc_feature (1)..(133): Homolog of NCBI NO: 126081 NR Description: ABA-inducible protein PHV A1
  misc_feature (1)..(122): Homolog of NCBI NO: 25989705 NR Description: LEA1 protein [Triticum aestivum]
  misc_feature (1)..(122): Homolog of NCBI NO: 126081 NR Description: ABA-inducible protein PHV A1
  misc_feature (1)..(125): Homolog of NCBI NO: 25989709 NR Description: LEA2 protein [Triticum aestivum]
  misc_feature (1)..(120): Homolog of NCBI NO: 4929080 NR Description: ABA-inducible protein WRAB1 [Triticum aestivum]
  misc_feature (1)..(125): Homolog of NCBI NO: 25989705 NR Description: LEA1 protein [Triticum aestivum]
  misc_feature (1)..(125): Homolog of NCBI NO: 7387828 NR Description: Late embryogenesis abundant protein, group 3
  misc_feature (1)..(129): Homolog of NCBI NO: 33342178 NR Description: ABA inducible protein [Triticum aestivum]
MASNQNQASYAAGETKARTEEKTGQMMGATKDKAGQATEETKQKAGETAEATKQKASETAQYAQERSSDAAQYSKESAVAGKDKTGNVLQQAGETVANAVANTLGMGGDNTNTTTGATKDSTPEKITRDPWTHAYVQSLLICFLYYSFGPFTYLYVSLL

SEQ ID NO: 65536 - protein, 134 aa, Triticum aestivum
  peptide (1)..(134): Ceres Seq. ID no. 12586644
  misc_feature (10)..(75): Pfam Name: Late embryogenesis abundant protein Pfam Description: Late embryogenesis abundant protein
  misc_feature (1)..(78): Homolog of NCBI NO: 4929080 NR Description: ABA-inducible protein WRAB1 [Triticum aestivum]
  misc_feature (1)..(104): Homolog of NCBI NO: 7387829 NR Description: Late embryogenesis abundant protein, group 3
  misc_feature (1)..(108): Homolog of NCBI NO: 126081 NR Description: ABA-inducible protein PHV A1
  misc_feature (1)..(97): Homolog of NCBI NO: 25989705 NR Description: LEA1 protein [Triticum aestivum]
  misc_feature (1)..(97): Homolog of NCBI NO: 126081 NR Description: ABA-inducible protein PHV A1
  misc_feature (1)..(100): Homolog of NCBI NO: 25989709 NR Description: LEA2 protein [Triticum aestivum]
  misc_feature (1)..(95): Homolog of NCBI NO: 4929080 NR Description: ABA-inducible protein WRAB1 [Triticum aestivum]
  misc_feature (1)..(100): Homolog of NCBI NO: 25989705 NR Description: LEA1 protein [Triticum aestivum]
  misc_feature (1)..(100): Homolog of NCBI NO: 7387828 NR Description: Late embryogenesis abundant protein, group 3
  misc_feature (1)..(104): Homolog of NCBI NO: 33342178 NR Description: ABA inducible protein [Triticum aestivum]
MMGATKDKAGQATEETKQKAGETAEATKQKASETAQYAQERSSDAAQYSKESAVAGKDKTGNVLQQAGETVANAVANTLGMGGDNTNTTTGATKDSTPEKITRDPWTHAYVQSLLICFLYYSFGPFTYLYVSLL

SEQ ID NO: 65537 - protein, 133 aa, Triticum aestivum
  peptide (1)..(133): Ceres Seq. ID no. 12586645
  misc_feature (9)..(74): Pfam Name: Late embryogenesis abundant protein Pfam Description: Late embryogenesis abundant protein
  misc_feature (1)..(77): Homolog of NCBI NO: 4929080 NR Description: ABA-inducible protein WRAB1 [Triticum aestivum]
  misc_feature (1)..(103): Homolog of NCBI NO: 7387829 NR Description: Late embryogenesis abundant protein, group 3
  misc_feature (1)..(107): Homolog of NCBI NO: 126081 NR Description: ABA-inducible protein PHV A1
  misc_feature (1)..(96): Homolog of NCBI NO: 25989705 NR Description: LEA1 protein [Triticum aestivum]
  misc_feature (1)..(96): Homolog of NCBI NO: 126081 NR Description: ABA-inducible protein PHV A1
  misc_feature (1)..(99): Homolog of NCBI NO: 25989709 NR Description: LEA2 protein [Triticum aestivum]
  misc_feature (1)..(94): Homolog of NCBI NO: 4929080 NR Description: ABA-inducible protein WRAB1 [Triticum aestivum]
  misc_feature (1)..(99): Homolog of NCBI NO: 25989705 NR Description: LEA1 protein [Triticum aestivum]
  misc_feature (1)..(99): Homolog of NCBI NO: 7387828 NR Description: Late embryogenesis abundant protein, group 3
  misc_feature (1)..(103): Homolog of NCBI NO: 33342178 NR Description: ABA inducible protein [Triticum aestivum]
MGATKDKAGQATEETKQKAGETAEATKQKASETAQYAQERSSDAAQYSKESAVAGKDKTGNVLQQAGETVANAVANTLGMGGDNTNTTTGATKDSTPEKITRDPWTHAYVQSLLICFLYYSFGPFTYLYVSLL

SEQ ID NO: 65538 - DNA, 1470 bp, Triticum aestivum
  misc_feature (1)..(1470): Ceres Seq. ID no. 12618306
tccgtccccagatccgaccacccccctcgcctcgccgccggccccccctccacgcaaccgtactctccggggcccgcgcgccggaatggaggcggcgcgcgccaaggacaccaaggagcgcctggccggggtggagcgcctgcacgaggcgctcgacgcggcggcgcgccgcggcctctccccggccgaggtcacctcgctggtggacacctgcgtggatctgacgcgggacgccaacttccgcgtcgcgcagggggggctgcaggcgctctccgccgccgccgtgctcgccggggaccacttcaagatccacctcaacgcgctcgtccccgccgccgtcgagcgcctcggcgacggcaagcagcccgtccgcgaggccgcgcgccagctcctcgtcacgctcatggaggtttcttcaccaacaatcattctcgaaagggccggaaattatgcatggactcataagagttggagggttcgggaagagtttgtacttacagtggcaactgcagttgggcttttcgcttctacggagcttctcatgcaacgagttttactctcacccgtcctacagttgatgaatgattcgaaccaaagtgtcagagaagctgctatatcttgtattgaggaaatgtacaagaacatgggatctcagttccacgaagagttgcagcgccataatctgcctacatacatgctaaaagaaataaattcaagattgaatagaattgaaccaaaggttcccgcatctgatggtactgcaacacagcataaagttgcagcatctagatccgttagtgttaacccaaaaagaggcagcccacggacaaaaaacacaccgagggaaagcacattatttggaggtaatctgattggtgaagtgcaggattcactggcaaaggaagctgagaaagataaacaaattgcttcggaggaggaggaggaagaagagtatgtcttgctagagttagatgatgttcattattcctgcatacaaccaaatgccccttatatactctctggtttggatacattgactcctaccttggtagtaggtgatagcctgaagatgattggagaatatgaagaaacggttggcccatgctatttattttcagaaagtgatgctccaccaaagcccgttcatgaagagccggcacctcccaaagaaaacaaggacaagcaaggcagaaacatcaaggaggtgaaacatgtgacgagcgttcacaagatgctcaaattccggtcgaccggtgagggtcgtcaggagcacagagcataccgttacagggacaaggagttttgaaacacaatgctttgtctgatgcttgtgatgcacacacacagcatgcaatcctttgacccttcaaatggaatgcaaggatggtagtacttgttaaatcttaattacccactagctagcattctctatctcgaggtgaattttgtgtcctctctttctgaattatc

SEQ ID NO: 65539 - protein, 434 aa, Triticum aestivum
  peptide (1)..(434): Ceres Seq. ID no. 12618307
  misc_feature (67)..(244): Homolog of NCBI NO: 24667856 NR Description: chromosome bows CG32435-PA
  misc_feature (67)..(244): Homolog of NCBI NO: 7527326 NR Description: microtubule associated-protein orbit [Drosophila
  misc_feature (35)..(283): Homolog of NCBI NO: 13508645 NR Description: CLIP-associating protein CLASP1 [Homo sapiens]
  misc_feature (35)..(316): Homolog of NCBI NO: 13508541 NR Description: CLASP1 [Mus musculus]
  misc_feature (298)..(433): Homolog of NCBI NO: 38346622 NR Description: OSJNBa0074L08.16 [Oryza sativa (japonica
  misc_feature (135)..(318): Homolog of NCBI NO: 30680913 NR Description: expressed protein [Arabidopsis thaliana]
  misc_feature (29)..(189): Homolog of NCBI NO: 25411971 NR Description: hypothetical protein At2g20200 [imported] -
  misc_feature (29)..(318): Homolog of NCBI NO: 20259452 NR Description: unknown protein [Arabidopsis thaliana]
  misc_feature (27)..(289): Homolog of NCBI NO: 38346560 NR Description: OSJNBa0043L24.9 [Oryza sativa (japonica
  misc_feature (27)..(289): Homolog of NCBI NO: 38567848 NR Description: OSJNBb0002J11.18 [Oryza sativa (japonica
PSPDPTTPLASPPAPPPRNRTLRGPRAGMEAARAKDTKERLAGVERLHEALDAAARRGLSPAEVTSLVDTCVDLTRDANFRVAQGGLQALSAAAVLAGDHFKIHLNALVPAAVERLGDGKQPVREAARQLLVTLMEVSSPTIILERAGNYAWTHKSWRVREEFVLTVATAVGLFASTELLMQRVLLSPVLQLMNDSNQSVREAAISCIEEMYKNMGSQFHEELQRHNLPTYMLKEINSRLNRIEPKVPASDGTATQHKVAASRSVSVNPKRGSPRTKNTPRESTLFGGNLIGEVQDSLAKEAEKDKQIASEEEEEEEYVLLELDDVHYSCIQPNAPYILSGLDTLTPTLVVGDSLKMIGEYEETVGPCYLFSESDAPPKPVHEEPAPPKENKDKQGRNIKEVKHVTSVHKMLKFRSTGEGRQEHRAYRYRDKEF

SEQ ID NO: 65540 - protein, 406 aa, Triticum aestivum
  peptide (1)..(406): Ceres Seq. ID no. 12618308
  misc_feature (39)..(216): Homolog of NCBI NO: 24667856 NR Description: chromosome bows CG32435-PA
  misc_feature (39)..(216): Homolog of NCBI NO: 7527326 NR Description: microtubule associated-protein orbit [Drosophila
  misc_feature (7)..(255): Homolog of NCBI NO: 13508645 NR Description: CLIP-associating protein CLASP1 [Homo sapiens]
  misc_feature (7)..(288): Homolog of NCBI NO: 13508541 NR Description: CLASP1 [Mus musculus]
  misc_feature (270)..(405): Homolog of NCBI NO: 38346622 NR Description: OSJNBa0074L08.16 [Oryza sativa (japonica
  misc_feature (107)..(290): Homolog of NCBI NO: 30680913 NR Description: expressed protein [Arabidopsis thaliana]
  misc_feature (1)..(161): Homolog of NCBI NO: 25411971 NR Description: hypothetical protein At2g20200 [imported] -
  misc_feature (1)..(290): Homolog of NCBI NO: 20259452 NR Description: unknown protein [Arabidopsis thaliana]
  misc_feature (1)..(261): Homolog of NCBI NO: 38346560 NR Description: OSJNBa0043L24.9 [Oryza sativa (japonica
  misc_feature (1)..(261): Homolog of NCBI NO: 38567848 NR Description: OSJNBb0002J11.18 [Oryza sativa (japonica
MEAARAKDTKERLAGVERLHEALDAAARRGLSPAEVTSLVDTCVDLTRDANFRVAQGGLQALSAAAVLAGDHFKIHLNALVPAAVERLGDGKQPVREAARQLLVTLMEVSSPTIILERAGNYAWTHKSWRVREEFVLTVATAVGLFASTELLMQRVLLSPVLQLMNDSNQSVREAAISCIEEMYKNMGSQFHEELQRHNLPTYMLKEINSRLNRIEPKVPASDGTATQHKVAASRSVSVNPKRGSPRTKNTPRESTLFGGNLIGEVQDSLAKEAEKDKQIASEEEEEEEYVLLELDDVHYSCIQPNAPYILSGLDTLTPTLVVGDSLKMIGEYEETVGPCYLFSESDAPPKPVHEEPAPPKENKDKQGRNIKEVKHVTSVHKMLKFRSTGEGRQEHRAYRYRDKEF

SEQ ID NO: 65541 - protein, 300 aa, Triticum aestivum
  peptide (1)..(300): Ceres Seq. ID no. 12618309
  misc_feature (1)..(110): Homolog of NCBI NO: 24667856 NR Description: chromosome bows CG32435-PA
  misc_feature (1)..(110): Homolog of NCBI NO: 7527326 NR Description: microtubule associated-protein orbit [Drosophila
  misc_feature (1)..(149): Homolog of NCBI NO: 13508645 NR Description: CLIP-associating protein CLASP1 [Homo sapiens]
  misc_feature (1)..(182): Homolog of NCBI NO: 13508541 NR Description: CLASP1 [Mus musculus]
  misc_feature (164)..(299): Homolog of NCBI NO: 38346622 NR Description: OSJNBa0074L08.16 [Oryza sativa (japonica
  misc_feature (1)..(184): Homolog of NCBI NO: 30680913 NR Description: expressed protein [Arabidopsis thaliana]
  misc_feature (1)..(55): Homolog of NCBI NO: 25411971 NR Description: hypothetical protein At2g20200 [imported] -
  misc_feature (1)..(184): Homolog of NCBI NO: 20259452 NR Description: unknown protein [Arabidopsis thaliana]
  misc_feature (1)..(155): Homolog of NCBI NO: 38346560 NR Description: OSJNBa0043L24.9 [Oryza sativa (japonica
  misc_feature (1)..(155): Homolog of NCBI NO: 38567848 NR Description: OSJNBb0002J11.18 [Oryza sativa (japonica
MEVSSPTIILERAGNYAWTHKSWRVREEFVLTVATAVGLFASTELLMQRVLLSPVLQLMNDSNQSVREAAISCIEEMYKNMGSQFHEELQRHNLPTYMLKEINSRLNRIEPKVPASDGTATQHKVAASRSVSVNPKRGSPRTKNTPRESTLFGGNLIGEVQDSLAKEAEKDKQIASEEEEEEEYVLLELDDVHYSCIQPNAPYILSGLDTLTPTLVVGDSLKMIGEYEETVGPCYLFSESDAPPKPVHEEPAPPKENKDKQGRNIKEVKHVTSVHKMLKFRSTGEGRQEHRAYRYRDKEF

SEQ ID NO: 65542 - DNA, 1165 bp, Triticum aestivum
  misc_feature (1)..(1165): Ceres Seq. ID no. 14302761
attttctagaaccctagcacgattcccaaaacccaaagctcctcctcatcctcttccatggcgatggcgttcgcgctcccgctcctcctcgtgccccgccccatcgtctctccgagacccgctgcagcgggccgcttcctttccctctccgctcccctgtccaccgccgctcccgcccctgcccccgtcgagcccctgaagggcggcggccgcctcgcgcggctccagactctccacgcagcctcctgctgcaactccgcccccgcagcagcatctggaggagtggaggcggcccgggcgaagggcttgcagctcgtggcctggtaccttctgtctcttgacaagcatccggtggcgaccaaggctgtcacttctgctgtgctgactctggccggggacctcatctgccagcttgtaattgataaagtgccagagctagacctgaagagaacatttgtgttcacgttattgggacttgtcctggtggggccaacgttgcatttctggtacttgtatttgagtaaattagtgacgatcagcgggacatctggtgtcatttctcgcctgttacttgaccagttcatcttctctcctgttttcattggtgtcttcatgagcttactcgtaaccttggagggaaagccatctcttgtagtgccaaagcttaagcaggagtggttctcttcattgatcgcgaattggcaattgtggataccgttccagttttttaatttctattttgtcccacagaagctccaggttcttgctgctaattttgtagcccttgcatggaacgtgattttgtcatataaagctcataagaaggttatcgcggagtagtcaaataggtgagagagtagactctagggcggggtatctaagccggttgcaacatgtggcgatgtaaggctggaagaataaacctattatcagttatcctggcgtctcgtctgtgttacccaaccgatgaaacgcctgcctagtattgtaaattaacgtccatcttgtctgtcgagtgcagcccgcgatgccagttaatcatgcgttgtacaatctgtataaccgtttgtgatgggaggttgttcttggtttccgaagaattacataatgtaaaattctggggttcctagcaaatcaaaactcaggccccgggggtgttattggc

SEQ ID NO: 65543 - protein, 260 aa, Triticum aestivum
  peptide (1)..(260): Ceres Seq. ID no. 14302762
  misc_feature (192)..(258): Pfam Name: Mpv17 / PMP22 family Pfam Description: Mpv17 / PMP22 family
  misc_feature (57)..(256): Homolog of NCBI NO: 15226016 NR Description: peroxisomal membrane protein, putative (22 kDa)
  misc_feature (68)..(250): Homolog of NCBI NO: 8923892 NR Description: peroxisomal membrane protein 2, 22kDa
  misc_feature (96)..(255): Homolog of NCBI NO: 32766323 NR Description: Unknown (protein for MGC:63573) [Danio rerio]
  misc_feature (68)..(250): Homolog of NCBI NO: 6679577 NR Description: peroxisomal membrane protein 2
  misc_feature (86)..(251): Homolog of NCBI NO: 32417658 NR Description: hypothetical protein [Neurospora crassa]
  misc_feature (68)..(250): Homolog of NCBI NO: 10954089 NR Description: 22 kDa peroxisomal membrane protein PMP22 [Mus
  misc_feature (68)..(250): Homolog of NCBI NO: 13928796 NR Description: peroxisomal membrane protein 2
  misc_feature (71)..(260): Homolog of NCBI NO: 21594286 NR Description: unknown [Arabidopsis thaliana]
  misc_feature (71)..(260): Homolog of NCBI NO: 16648746 NR Description: AT5g19750/T29J13_170 [Arabidopsis thaliana]
  misc_feature (71)..(260): Homolog of NCBI NO: 15241166 NR Description: expressed protein [Arabidopsis thaliana]
MAMAFALPLLLVPRPIVSPRPAAAGRFLSLSAPLSTAAPAPAPVEPLKGGGRLARLQTLHAASCCNSAPAAASGGVEAARAKGLQLVAWYLLSLDKHPVATKAVTSAVLTLAGDLICQLVIDKVPELDLKRTFVFTLLGLVLVGPTLHFWYLYLSKLVTISGTSGVISRLLLDQFIFSPVFIGVFMSLLVTLEGKPSLVVPKLKQEWFSSLIANWQLWIPFQFFNFYFVPQKLQVLAANFVALAWNVILSYKAHKKVIAE

SEQ ID NO: 65544 - protein, 258 aa, Triticum aestivum
  peptide (1)..(258): Ceres Seq. ID no. 14302763
  misc_feature (190)..(256): Pfam Name: Mpv17 / PMP22 family Pfam Description: Mpv17 / PMP22 family
  misc_feature (55)..(254): Homolog of NCBI NO: 15226016 NR Description: peroxisomal membrane protein, putative (22 kDa)
  misc_feature (66)..(248): Homolog of NCBI NO: 8923892 NR Description: peroxisomal membrane protein 2, 22kDa
  misc_feature (94)..(253): Homolog of NCBI NO: 32766323 NR Description: Unknown (protein for MGC:63573) [Danio rerio]
  misc_feature (66)..(248): Homolog of NCBI NO: 6679577 NR Description: peroxisomal membrane protein 2
  misc_feature (84)..(249): Homolog of NCBI NO: 32417658 NR Description: hypothetical protein [Neurospora crassa]
  misc_feature (66)..(248): Homolog of NCBI NO: 10954089 NR Description: 22 kDa peroxisomal membrane protein PMP22 [Mus
  misc_feature (66)..(248): Homolog of NCBI NO: 13928796 NR Description: peroxisomal membrane protein 2
  misc_feature (69)..(258): Homolog of NCBI NO: 16648746 NR Description: AT5g19750/T29J13_170 [Arabidopsis thaliana]
  misc_feature (69)..(258): Homolog of NCBI NO: 21594286 NR Description: unknown [Arabidopsis thaliana]
  misc_feature (69)..(258): Homolog of NCBI NO: 15241166 NR Description: expressed protein [Arabidopsis thaliana]
MAFALPLLLVPRPIVSPRPAAAGRFLSLSAPLSTAAPAPAPVEPLKGGGRLARLQTLHAASCCNSAPAAASGGVEAARAKGLQLVAWYLLSLDKHPVATKAVTSAVLTLAGDLICQLVIDKVPELDLKRTFVFTLLGLVLVGPTLHFWYLYLSKLVTISGTSGVISRLLLDQFIFSPVFIGVFMSLLVTLEGKPSLVVPKLKQEWFSSLIANWQLWIPFQFFNFYFVPQKLQVLAANFVALAWNVILSYKAHKKVIAE

SEQ ID NO: 65545 - DNA, 1417 bp, Triticum aestivum
  misc_feature (1)..(1417): Ceres Seq. ID no. 13584665
aacggtggaccagacaccgcagcaccaacgcaaatcctcaccactctctcctccgcctcgcaccatcccctcgccgccgccgccgccgccgccatgttctggctccgtcgcggcgtcctcgctcaggtcctcccttcttcctccgcctctcccgtatcccctctccaccgcctcatctccgccgccgcgcccgccatctctccaaacatcagattcgccgtggaggagtacctcgtctccacctgcggcctcacgcgaccacaggccctaaaggcctccgccaagctttcccacctcaagtcccccgccaatcccgacgccgtgctcgccttcctcgccggcctcggcctctccgacgccgatgtcgccgccctcgtcgccaaggacccgcagttcctctgcgccagcgtggagagaaccctggcacccgtcgtcgccgggctctctggcctcggcttatcacgttccgacatcgcgcgcctcgcctcgctctcccgttacagattccgctgtagatccatcgtctccaagctgcagtactacatgcctttctttgggtcctttgagaatctcctccgagccctcaagaggaacttctaccttcactcggctgacctcgatgatgtggtcaagcccaacgtcgcgatgctgcgggagtgcgggctaggtgcttgtgatattgtcaagctatgcatcagtcaaccatggcttctcaccgccaacctggagcgtgtccaggcgatggtggaatgcgctgaaaacataggtgtgccccgtgcctctgggatgttcaggcatgcactgcacgctgttgcatttctcagcgaggacaagatcgcagccagggtgaagtacttgaagaacaccttcaggtggacggatgctgaggtaggcatggctgtttctaaggctccaatggtgctggcgaggtccaaggagtcgctgcagcgcaggtctgagttcctcatctccgaggtgggcttggaaccggtgtacattgctcaacggtcggaaataatcgggcacagcctagagggccggctcaggccccggtactatgctgtgaagtttctcaaggaaaatggattgctcaagcgtgacccaaactacagtaccgttttcaagattagtgagaaggcattcaggaagaagttcatattccctcacaaggaggctgcactccacctcacagaagactacgatgccgcttgcaagggggacgtgccgactaatttcagattcacataaagacgggctatgatgtaattgggtgctggttgtctgctgttgtatgactgttagatgctgggttggtcattgctaacgtgtgatggaattgataatttgatccccaaatactggtatgtaatgctatcactcagcagagaagaaaccattgattggttatgaacttctc

SEQ ID NO: 65546 - protein, 415 aa, Triticum aestivum
  peptide (1)..(415): Ceres Seq. ID no. 13584666
  misc_feature (109)..(383): Pfam Name: mTERF Pfam Description: mTERF
  misc_feature (296)..(398): Homolog of NCBI NO: 15220662 NR Description: expressed protein [Arabidopsis thaliana]
  misc_feature (46)..(322): Homolog of NCBI NO: 15220662 NR Description: expressed protein [Arabidopsis thaliana]
  misc_feature (109)..(401): Homolog of NCBI NO: 18412304 NR Description: expressed protein [Arabidopsis thaliana]
  misc_feature (72)..(400): Homolog of NCBI NO: 25511650 NR Description: T22I11.2 protein - Arabidopsis thaliana
  misc_feature (55)..(407): Homolog of NCBI NO: 21553423 NR Description: unknown [Arabidopsis thaliana]
  misc_feature (55)..(407): Homolog of NCBI NO: 15238313 NR Description: expressed protein [Arabidopsis thaliana]
  misc_feature (72)..(400): Homolog of NCBI NO: 15218140 NR Description: hypothetical protein [Arabidopsis thaliana]
  misc_feature (77)..(409): Homolog of NCBI NO: 34394750 NR Description: unknown protein [Oryza sativa (japonica
  misc_feature (36)..(400): Homolog of NCBI NO: 18415647 NR Description: expressed protein [Arabidopsis thaliana]
  misc_feature (45)..(386): Homolog of NCBI NO: 39545750 NR Description: OSJNBb0034I13.16 [Oryza sativa (japonica
NGGPDTAAPTQILTTLSSASHHPLAAAAAAAMFWLRRGVLAQVLPSSSASPVSPLHRLISAAAPAISPNIRFAVEEYLVSTCGLTRPQALKASAKLSHLKSPANPDAVLAFLAGLGLSDADVAALVAKDPQFLCASVERTLAPVVAGLSGLGLSRSDIARLASLSRYRFRCRSIVSKLQYYMPFFGSFENLLRALKRNFYLHSADLDDVVKPNVAMLRECGLGACDIVKLCISQPWLLTANLERVQAMVECAENIGVPRASGMFRHALHAVAFLSEDKIAARVKYLKNTFRWTDAEVGMAVSKAPMVLARSKESLQRRSEFLISEVGLEPVYIAQRSEIIGHSLEGRLRPRYYAVKFLKENGLLKRDPNYSTVFKISEKAFRKKFIFPHKEAALHLTEDYDAACKGDVPTNFRFT

SEQ ID NO: 65547 - protein, 384 aa, Triticum aestivum
  peptide (1)..(384): Ceres Seq. ID no. 13584667
  misc_feature (78)..(352): Pfam Name: mTERF Pfam Description: mTERF
  misc_feature (265)..(367): Homolog of NCBI NO: 15220662 NR Description: expressed protein [Arabidopsis thaliana]
  misc_feature (15)..(291): Homolog of NCBI NO: 15220662 NR Description: expressed protein [Arabidopsis thaliana]
  misc_feature (78)..(370): Homolog of NCBI NO: 18412304 NR Description: expressed protein [Arabidopsis thaliana]
  misc_feature (41)..(369): Homolog of NCBI NO: 25511650 NR Description: T22I11.2 protein - Arabidopsis thaliana
  misc_feature (24)..(376): Homolog of NCBI NO: 21553423 NR Description: unknown [Arabidopsis thaliana]
  misc_feature (24)..(376): Homolog of NCBI NO: 15238313 NR Description: expressed protein [Arabidopsis thaliana]
  misc_feature (41)..(369): Homolog of NCBI NO: 15218140 NR Description: hypothetical protein [Arabidopsis thaliana]
  misc_feature (46)..(378): Homolog of NCBI NO: 34394750 NR Description: unknown protein [Oryza sativa (japonica
  misc_feature (5)..(369): Homolog of NCBI NO: 18415647 NR Description: expressed protein [Arabidopsis thaliana]
  misc_feature (14)..(355): Homolog of NCBI NO: 39545750 NR Description: OSJNBb0034I13.16 [Oryza sativa (japonica
MFWLRRGVLAQVLPSSSASPVSPLHRLISAAAPAISPNIRFAVEEYLVSTCGLTRPQALKASAKLSHLKSPANPDAVLAFLAGLGLSDADVAALVAKDPQFLCASVERTLAPVVAGLSGLGLSRSDIARLASLSRYRFRCRSIVSKLQYYMPFFGSFENLLRALKRNFYLHSADLDDVVKPNVAMLRECGLGACDIVKLCISQPWLLTANLERVQAMVECAENIGVPRASGMFRHALHAVAFLSEDKIAARVKYLKNTFRWTDAEVGMAVSKAPMVLARSKESLQRRSEFLISEVGLEPVYIAQRSEIIGHSLEGRLRPRYYAVKFLKENGLLKRDPNYSTVFKISEKAFRKKFIFPHKEAALHLTEDYDAACKGDVPTNFRFT

SEQ ID NO: 65548 - protein, 234 aa, Triticum aestivum
  peptide (1)..(234): Ceres Seq. ID no. 13584668
  misc_feature (1)..(202): Pfam Name: mTERF Pfam Description: mTERF
  misc_feature (115)..(217): Homolog of NCBI NO: 15220662 NR Description: expressed protein [Arabidopsis thaliana]
  misc_feature (1)..(141): Homolog of NCBI NO: 15220662 NR Description: expressed protein [Arabidopsis thaliana]
  misc_feature (1)..(220): Homolog of NCBI NO: 18412304 NR Description: expressed protein [Arabidopsis thaliana]
  misc_feature (1)..(219): Homolog of NCBI NO: 25511650 NR Description: T22I11.2 protein - Arabidopsis thaliana
  misc_feature (1)..(226): Homolog of NCBI NO: 21553423 NR Description: unknown [Arabidopsis thaliana]
  misc_feature (1)..(226): Homolog of NCBI NO: 15238313 NR Description: expressed protein [Arabidopsis thaliana]
  misc_feature (1)..(219): Homolog of NCBI NO: 15218140 NR Description: hypothetical protein [Arabidopsis thaliana]
  misc_feature (1)..(228): Homolog of NCBI NO: 34394750 NR Description: unknown protein [Oryza sativa (japonica
  misc_feature (1)..(219): Homolog of NCBI NO: 18415647 NR Description: expressed protein [Arabidopsis thaliana]
  misc_feature (1)..(205): Homolog of NCBI NO: 39545750 NR Description: OSJNBb0034I13.16 [Oryza sativa (japonica
MPFFGSFENLLRALKRNFYLHSADLDDVVKPNVAMLRECGLGACDIVKLCISQPWLLTANLERVQAMVECAENIGVPRASGMFRHALHAVAFLSEDKIAARVKYLKNTFRWTDAEVGMAVSKAPMVLARSKESLQRRSEFLISEVGLEPVYIAQRSEIIGHSLEGRLRPRYYAVKFLKENGLLKRDPNYSTVFKISEKAFRKKFIFPHKEAALHLTEDYDAACKGDVPTNFRFT

SEQ ID NO: 65549 - DNA, 1506 bp, Triticum aestivum
  misc_feature (1)..(1506): Ceres Seq. ID no. 14302828
aaactcgagtctcggtcaacagacgtcgaagcatcacgaactaccgccgataactccggcggtcgccgccgatggactcctcttcgtcctccgtccctgcggctgcggagggggcgcttccggcgggggagaatctggctgtgttctggcacgagggcatgctggcccacgacgccggccgcggcgtgttcgactcgggccgcgacccgggcttcctcgacgtgctcgaccaccacccggagaacgccgaccgcgtccgcaacatggtatccatcctccgccgcgggcccatcgcgcccttcctctcttggcactccggcacccccgcccacgccagcgacctcctctccttccactccccagaatacattgaggagctcgtgcaggcgaatgccagtggacccaagaagttatgtgagggtactttcttgaactctggttcatggggcgctgcgcttctggctgccggaacaaccttatcagctgtgaggcacatactagacgggcatgggaagatagcctacgcattggtccgcccccctggccatcacgcgcagccggaccatgccgacggttactgctttctgaacaacgccgggcttgctgtgcagctggctctggattctggccgcgcaaaggttgccgttgttgacatagatgtgcactatggaaatggtaccgcagagggcttctatcgcacggacaacgtgttggcaatctctcttcacatgaagcatggtacttggggtccttcgcatctgcagagtggctcggctgatgagattggggaaggcaaggggcttgggtacaatctcaatatacctttgcctaatggcagtggggataaaggctatgagtatgcaatgaatgaattggttgtcccggcgattgacaagtttcaacctcagcttttggtttttgtcattggccaagattctagcatgtttgatccaaatggaagacagtgcttgaccatggatggttacaggaaaattggacaaataatgaggggcgtggctaatcgacatagcgatgggcaaatgttgattgtccaggaagggggttaccacatcagttattcagcatattgtctgcatgcgacactagaaggcgttctgaatcttgaggccccattgctggacgacccaatcgcatactatcccgaggatgagaagtacaccatggaagctgtcgacgtcacgaagaaacgctggaaagaatccattcccttcttgaaggacatttaaggacgcgttacgtctcttcttcgacgcagcggcaaacgacgaacctcggtctcgaatcatgtcatggtttgtattctcggaattaaatcgcactgtcaagaaaagagtgacgcagctcatgtagatgagcattaagagttttttttttcctttgtcgtttaagagaatgaatgaaaccagacattttcttgagcagtttgttgaactgagaatatgtttgttgcatcccgtccgttggattaataaagagatcatatat

SEQ ID NO: 65550 - protein, 391 aa, Triticum aestivum
  peptide (1)..(391): Ceres Seq. ID no. 14302829
  misc_feature (24)..(349): Pfam Name: Histone deacetylase family Pfam Description: Histone deacetylase family
  misc_feature (45)..(347): Homolog of NCBI NO: 15789452 NR Description: acetoin utilization protein; Aup [Halobacterium
  misc_feature (55)..(365): Homolog of NCBI NO: 11497747 NR Description: acetylpolyamine aminohydrolase (aphA)
  misc_feature (1)..(360): Homolog of NCBI NO: 22959308 NR Description: hypothetical protein [Rhodobacter sphaeroides]
  misc_feature (56)..(381): Homolog of NCBI NO: 37526255 NR Description: hypothetical protein
  misc_feature (55)..(383): Homolog of NCBI NO: 15598969 NR Description: probable acetylpolyamine aminohydrolase
  misc_feature (55)..(383): Homolog of NCBI NO: 32038919 NR Description: hypothetical protein [Pseudomonas aeruginosa
  misc_feature (65)..(389): Homolog of NCBI NO: 16226923 NR Description: At1g08460/T27G7_7 [Arabidopsis thaliana]
  misc_feature (292)..(389): Homolog of NCBI NO: 25407044 NR Description: protein T27G7.14 [imported] - Arabidopsis
  misc_feature (24)..(290): Homolog of NCBI NO: 25407044 NR Description: protein T27G7.14 [imported] - Arabidopsis
  misc_feature (24)..(389): Homolog of NCBI NO: 18390898 NR Description: HDA8 protein [Arabidopsis thaliana]
MDSSSSSVPAAAEGALPAGENLAVFWHEGMLAHDAGRGVFDSGRDPGFLDVLDHHPENADRVRNMVSILRRGPIAPFLSWHSGTPAHASDLLSFHSPEYIEELVQANASGPKKLCEGTFLNSGSWGAALLAAGTTLSAVRHILDGHGKIAYALVRPPGHHAQPDHADGYCFLNNAGLAVQLALDSGRAKVAVVDIDVHYGNGTAEGFYRTDNVLAISLHMKHGTWGPSHLQSGSADEIGEGKGLGYNLNIPLPNGSGDKGYEYAMNELVVPAIDKFQPQLLVFVIGQDSSMFDPNGRQCLTMDGYRKIGQIMRGVANRHSDGQMLIVQEGGYHISYSAYCLHATLEGVLNLEAPLLDDPIAYYPEDEKYTMEAVDVTKKRWKESIPFLKDI

SEQ ID NO: 65551 - protein, 362 aa, Triticum aestivum
  peptide (1)..(362): Ceres Seq. ID no. 14302830
  misc_feature (1)..(320): Pfam Name: Histone deacetylase family Pfam Description: Histone deacetylase family
  misc_feature (16)..(318): Homolog of NCBI NO: 15789452 NR Description: acetoin utilization protein; Aup [Halobacterium
  misc_feature (26)..(336): Homolog of NCBI NO: 11497747 NR Description: acetylpolyamine aminohydrolase (aphA)
  misc_feature (1)..(331): Homolog of NCBI NO: 22959308 NR Description: hypothetical protein [Rhodobacter sphaeroides]
  misc_feature (27)..(352): Homolog of NCBI NO: 37526255 NR Description: hypothetical protein
  misc_feature (26)..(354): Homolog of NCBI NO: 15598969 NR Description: probable acetylpolyamine aminohydrolase
  misc_feature (26)..(354): Homolog of NCBI NO: 32038919 NR Description: hypothetical protein [Pseudomonas aeruginosa
  misc_feature (36)..(360): Homolog of NCBI NO: 16226923 NR Description: At1g08460/T27G7_7 [Arabidopsis thaliana]
  misc_feature (263)..(360): Homolog of NCBI NO: 25407044 NR Description: protein T27G7.14 [imported] - Arabidopsis
  misc_feature (1)..(261): Homolog of NCBI NO: 25407044 NR Description: protein T27G7.14 [imported] - Arabidopsis
  misc_feature (1)..(360): Homolog of NCBI NO: 18390898 NR Description: HDA8 protein [Arabidopsis thaliana]
MLAHDAGRGVFDSGRDPGFLDVLDHHPENADRVRNMVSILRRGPIAPFLSWHSGTPAHASDLLSFHSPEYIEELVQANASGPKKLCEGTFLNSGSWGAALLAAGTTLSAVRHILDGHGKIAYALVRPPGHHAQPDHADGYCFLNNAGLAVQLALDSGRAKVAVVDIDVHYGNGTAEGFYRTDNVLAISLHMKHGTWGPSHLQSGSADEIGEGKGLGYNLNIPLPNGSGDKGYEYAMNELVVPAIDKFQPQLLVFVIGQDSSMFDPNGRQCLTMDGYRKIGQIMRGVANRHSDGQMLIVQEGGYHISYSAYCLHATLEGVLNLEAPLLDDPIAYYPEDEKYTMEAVDVTKKRWKESIPFLKDI

SEQ ID NO: 65552 - protein, 327 aa, Triticum aestivum
  peptide (1)..(327): Ceres Seq. ID no. 14302831
  misc_feature (1)..(285): Pfam Name: Histone deacetylase family Pfam Description: Histone deacetylase family
  misc_feature (1)..(283): Homolog of NCBI NO: 15789452 NR Description: acetoin utilization protein; Aup [Halobacterium
  misc_feature (1)..(301): Homolog of NCBI NO: 11497747 NR Description: acetylpolyamine aminohydrolase (aphA)
  misc_feature (1)..(296): Homolog of NCBI NO: 22959308 NR Description: hypothetical protein [Rhodobacter sphaeroides]
  misc_feature (1)..(317): Homolog of NCBI NO: 37526255 NR Description: hypothetical protein
  misc_feature (1)..(319): Homolog of NCBI NO: 15598969 NR Description: probable acetylpolyamine aminohydrolase
  misc_feature (1)..(319): Homolog of NCBI NO: 32038919 NR Description: hypothetical protein [Pseudomonas aeruginosa
  misc_feature (1)..(325): Homolog of NCBI NO: 16226923 NR Description: At1g08460/T27G7_7 [Arabidopsis thaliana]
  misc_feature (228)..(325): Homolog of NCBI NO: 25407044 NR Description: protein T27G7.14 [imported] - Arabidopsis
  misc_feature (1)..(226): Homolog of NCBI NO: 25407044 NR Description: protein T27G7.14 [imported] - Arabidopsis
  misc_feature (1)..(325): Homolog of NCBI NO: 18390898 NR Description: HDA8 protein [Arabidopsis thaliana]
MVSILRRGPIAPFLSWHSGTPAHASDLLSFHSPEYIEELVQANASGPKKLCEGTFLNSGSWGAALLAAGTTLSAVRHILDGHGKIAYALVRPPGHHAQPDHADGYCFLNNAGLAVQLALDSGRAKVAVVDIDVHYGNGTAEGFYRTDNVLAISLHMKHGTWGPSHLQSGSADEIGEGKGLGYNLNIPLPNGSGDKGYEYAMNELVVPAIDKFQPQLLVFVIGQDSSMFDPNGRQCLTMDGYRKIGQIMRGVANRHSDGQMLIVQEGGYHISYSAYCLHATLEGVLNLEAPLLDDPIAYYPEDEKYTMEAVDVTKKRWKESIPFLKDI

SEQ ID NO: 65553 - DNA, 1190 bp, Triticum aestivum
  misc_feature (1)..(1190): Ceres Seq. ID no. 13590967
attacctagaacatcctaatcgaaaaaacaccaaaccgcagcacacagcgccaccgcgactgcgccactccttgcgttccgagtgacagaggccatggcgctcgccacctcccaccaccgccacctcgtccgccccgccgccgcggcccctcgcgtgccgctgcgtcccctccgcttcgccgccccccgatctctcccgaggatttgttgccaatctatcaactcagctaacgtcttgggagcttcctcaatgacagctgacgacgcagttccacaaccagttgtactgatagaccaagactcagaccgtgatgcaaccattgtgcagctgagttttggagatcgtttgggggcactacttgatacgatgaaggcactcaaggacctgggccttgatgtgacgaaaggaagtgtggcaactgattcatctgtcacacaaacaaagttccacatcatgcgattagggcgtaaggttgaggaccctgacatgttggaaacaatacgactgaccatcattaacaaccttctgcagtatcatcccgaatcaagcgagaagctagctatgggtgaattttttggaattaaagcccctgagaagaaggttgatgttgacgttgcaacacatgtaattgtgcaagatgatggaccgaaaagaagcatgctttacatagagacagctgatcgaccaggcttactcttggaagtaatcaagatcattactgacgtaaacgttgatgtgggatcagctgagattgatactgagggcttggttgccaaggacaagtttcatgtgagttacagaggcgcaaaacttaacagctcgttatctcaggtgctggttaattgtttgcgctattacctccggaggcccgagacagatgaagacagctattgatgattgttctgtggcggctcgtttcgagttcctgcctatgaagccttttgcactgcaatttctgttgtaagcaaaacaaaatatggcacatgtgttccgaaaatgcattaaaactggggcgtctgatgcagttatgttctatggtcggacatgtggcccttgggagctttagcagccccatcccactggtttcctagaggaatcacattggaaagcattcacgcgtgtcgagtgtggtctgtaagttcatagtactataattcatgtgcatgtaaaaaaccaggttacgtatgtg

SEQ ID NO: 65554 - protein, 266 aa, Triticum aestivum
  peptide (1)..(266): Ceres Seq. ID no. 13590968
  misc_feature (188)..(257): Pfam Name: ACT domain Pfam Description: ACT domain
  misc_feature (188)..(258): Homolog of NCBI NO: 15221589 NR Description: uridylyltransferase-related [Arabidopsis
  misc_feature (62)..(140): Homolog of NCBI NO: 15221589 NR Description: uridylyltransferase-related [Arabidopsis
  misc_feature (188)..(258): Homolog of NCBI NO: 25370627 NR Description: protein F4N2.2 [imported] - Arabidopsis thaliana
  misc_feature (62)..(140): Homolog of NCBI NO: 25370627 NR Description: protein F4N2.2 [imported] - Arabidopsis thaliana
  misc_feature (55)..(266): Homolog of NCBI NO: 18394414 NR Description: expressed protein [Arabidopsis thaliana]
  misc_feature (41)..(266): Homolog of NCBI NO: 21592963 NR Description: unknown [Arabidopsis thaliana]
  misc_feature (41)..(266): Homolog of NCBI NO: 15238305 NR Description: ACT domain-containing protein [Arabidopsis
MALATSHHRHLVRPAAAAPRVPLRPLRFAAPRSLPRICCQSINSANVLGASSMTADDAVPQPVVLIDQDSDRDATIVQLSFGDRLGALLDTMKALKDLGLDVTKGSVATDSSVTQTKFHIMRLGRKVEDPDMLETIRLTIINNLLQYHPESSEKLAMGEFFGIKAPEKKVDVDVATHVIVQDDGPKRSMLYIETADRPGLLLEVIKIITDVNVDVGSAEIDTEGLVAKDKFHVSYRGAKLNSSLSQVLVNCLRYYLRRPETDEDSY

SEQ ID NO: 65555 - protein, 214 aa, Triticum aestivum
  peptide (1)..(214): Ceres Seq. ID no. 13590969
  misc_feature (136)..(205): Pfam Name: ACT domain Pfam Description: ACT domain
  misc_feature (136)..(206): Homolog of NCBI NO: 15221589 NR Description: uridylyltransferase-related [Arabidopsis
  misc_feature (10)..(88): Homolog of NCBI NO: 15221589 NR Description: uridylyltransferase-related [Arabidopsis
  misc_feature (136)..(206): Homolog of NCBI NO: 25370627 NR Description: protein F4N2.2 [imported] - Arabidopsis thaliana
  misc_feature (10)..(88): Homolog of NCBI NO: 25370627 NR Description: protein F4N2.2 [imported] - Arabidopsis thaliana
  misc_feature (3)..(214): Homolog of NCBI NO: 18394414 NR Description: expressed protein [Arabidopsis thaliana]
  misc_feature (1)..(214): Homolog of NCBI NO: 21592963 NR Description: unknown [Arabidopsis thaliana]
  misc_feature (1)..(214): Homolog of NCBI NO: 15238305 NR Description: ACT domain-containing protein [Arabidopsis
MTADDAVPQPVVLIDQDSDRDATIVQLSFGDRLGALLDTMKALKDLGLDVTKGSVATDSSVTQTKFHIMRLGRKVEDPDMLETIRLTIINNLLQYHPESSEKLAMGEFFGIKAPEKKVDVDVATHVIVQDDGPKRSMLYIETADRPGLLLEVIKIITDVNVDVGSAEIDTEGLVAKDKFHVSYRGAKLNSSLSQVLVNCLRYYLRRPETDEDSY

SEQ ID NO: 65556 - protein, 175 aa, Triticum aestivum
  peptide (1)..(175): Ceres Seq. ID no. 13590970
  misc_feature (97)..(166): Pfam Name: ACT domain Pfam Description: ACT domain
  misc_feature (97)..(167): Homolog of NCBI NO: 15221589 NR Description: uridylyltransferase-related [Arabidopsis
  misc_feature (1)..(49): Homolog of NCBI NO: 15221589 NR Description: uridylyltransferase-related [Arabidopsis
  misc_feature (97)..(167): Homolog of NCBI NO: 25370627 NR Description: protein F4N2.2 [imported] - Arabidopsis thaliana
  misc_feature (1)..(49): Homolog of NCBI NO: 25370627 NR Description: protein F4N2.2 [imported] - Arabidopsis thaliana
  misc_feature (1)..(175): Homolog of NCBI NO: 18394414 NR Description: expressed protein [Arabidopsis thaliana]
  misc_feature (1)..(175): Homolog of NCBI NO: 21592963 NR Description: unknown [Arabidopsis thaliana]
  misc_feature (1)..(175): Homolog of NCBI NO: 15238305 NR Description: ACT domain-containing protein [Arabidopsis
MKALKDLGLDVTKGSVATDSSVTQTKFHIMRLGRKVEDPDMLETIRLTIINNLLQYHPESSEKLAMGEFFGIKAPEKKVDVDVATHVIVQDDGPKRSMLYIETADRPGLLLEVIKIITDVNVDVGSAEIDTEGLVAKDKFHVSYRGAKLNSSLSQVLVNCLRYYLRRPETDEDSY

SEQ ID NO: 65557 - DNA, 1880 bp, Triticum aestivum
  misc_feature (1)..(1880): Ceres Seq. ID no. 13655988
acccgacccatccatcctcctaccagtccgcctcctcaaccccgccgacgcccgcgcgtgaagatcgcccgctccccggccggccgccggcgtccagagcagatacatacagatggacagccataattctacgtcgccccatgttcctgaagtaaccatggacatctcatccgcttctggagcagctgggaacaaagcttgcagaggtgctgcttgcgacttctctgacgccagtaacacctcgaaagattcaaaggagaggtctgcatccatgaagaagctcctaattgctgtgatcctttgtgttatattcatggcggttgaagtggttggaggcatcaaagcaaacagtcttgcaatcttgactgatgctgcccatctcctttcggatgttgcagcctttgccatatctttgttctccctatgggcagctggttgggaagcgacacctcagcagtcatatggatttttccgcatagagattcttggggcactggtttccattcagcttatatggctcctcgctggcatacttgtctacgaagctattatgaggctcattaatgaaagtggcgaggtacagggctccctcatgtttgctgtatcagcttttggtttgtttgttaacatcataatggcagtgttgcttggtcatgaccatgggcacggtggacatggacacagccatggtcatggccatggacattcacatgaccacgatcatggtaactcagaggatgaccattcccatcatggagatcatgagcaggggcatgtacatcaccatgagcacagccatggtacttctattaccgttacaactaatcaccactctcattcgagcactggacaacatcaggatgttgagcaaccattgcttaaacatgatggtgattgtgagagtgcccagcctggagccaagcctgctaagaagcctcgccgcaacatcaatgttcacagtgcctatctgcatgtaattggggactccatccagagcatcggcgtaatgattggaggggctctcatctggtacaagcccgaatggaaggttattgatctcatatgcaccctcatcttctctgtgattgtactgttcaccacaatcaagatgattcggaacatacttgaggtccttatggagagcacgccccgcgagatcgacgccaccaggcttgaaagtggtctccgtgagatggaaggtgtgattgctgtccatgagctgcacatctgggctatcacagtggggaaggtgctcttggcatgccatgtgacgatcacgcaggatgctgatgctgataaaatgcttgacaaggtcattgggtacatcaaggcagagtacaacatcagtcatgtgaccattcagattgagcgagagtaaggcacatgtcaggtagttggggataaaggtgtgtgcctgttaacggtctatcatcttaatgcagttaatgttagacttgcacttgcaaaggcgttgcaggttcatctagctgttgcctttggtgctggagaaatattatatgtacgcgttttcgttagcccattagttgaatgaactattcgggtggtcctagtcgtttgtattcacatggatgcaatttccagacaaattttgagccccttgtgagtttatcaacctgcatgtgtagtttcagtgacaccctttcttagcactcttatgtaaagatctgctacggtatggacagtactgggtatggatgtttattcagtttctgttagctttactaagcttgcttccagcagtttttatgtgcgaatttgcaccttgtgccattgtgtgctttctgtcagggatgtaggtcatctggtgcctaaaatgaagtgcactgctgccagttttaatgcatccattccactattgc

SEQ ID NO: 65558 - protein, 421 aa, Triticum aestivum
  peptide (1)..(421): Ceres Seq. ID no. 13655989
  misc_feature (57)..(421): Pfam Name: Cation efflux family Pfam Description: Cation efflux family
  misc_feature (27)..(200): Homolog of NCBI NO: 15228646 NR Description: zinc transporter, putative/metal tolerance
  misc_feature (223)..(420): Homolog of NCBI NO: 28315880 NR Description: putative vacuolar metal-ion transport protein
  misc_feature (7)..(206): Homolog of NCBI NO: 28315880 NR Description: putative vacuolar metal-ion transport protein
  misc_feature (197)..(216): Homolog of NCBI NO: 40287448 NR Description: heavy metal transporter MTP2 [Arabis shortii]
  misc_feature (223)..(420): Homolog of NCBI NO: 40287448 NR Description: heavy metal transporter MTP2 [Arabis shortii]
  misc_feature (1)..(197): Homolog of NCBI NO: 40287448 NR Description: heavy metal transporter MTP2 [Arabis shortii]
  misc_feature (216)..(421): Homolog of NCBI NO: 15231581 NR Description: zinc transporter, putative/metal tolerance
  misc_feature (1)..(222): Homolog of NCBI NO: 15231581 NR Description: zinc transporter, putative/metal tolerance
  misc_feature (1)..(421): Homolog of NCBI NO: 16550925 NR Description: zinc transporter [Eucalyptus grandis]
  misc_feature (1)..(421): Homolog of NCBI NO: 30420736 NR Description: zinc transporter [Oryza sativa (japonica
MDSHNSTSPHVPEVTMDISSASGAAGNKACRGAACDFSDASNTSKDSKERSASMKKLLIAVILCVIFMAVEVVGGIKANSLAILTDAAHLLSDVAAFAISLFSLWAAGWEATPQQSYGFFRIEILGALVSIQLIWLLAGILVYEAIMRLINESGEVQGSLMFAVSAFGLFVNIIMAVLLGHDHGHGGHGHSHGHGHGHSHDHDHGNSEDDHSHHGDHEQGHVHHHEHSHGTSITVTTNHHSHSSTGQHQDVEQPLLKHDGDCESAQPGAKPAKKPRRNINVHSAYLHVIGDSIQSIGVMIGGALIWYKPEWKVIDLICTLIFSVIVLFTTIKMIRNILEVLMESTPREIDATRLESGLREMEGVIAVHELHIWAITVGKVLLACHVTITQDADADKMLDKVIGYIKAEYNISHVTIQIERE

SEQ ID NO: 65559 - protein, 406 aa, Triticum aestivum
  peptide (1)..(406): Ceres Seq. ID no. 13655990
  misc_feature (42)..(406): Pfam Name: Cation efflux family Pfam Description: Cation efflux family
  misc_feature (12)..(185): Homolog of NCBI NO: 15228646 NR Description: zinc transporter, putative/metal tolerance
  misc_feature (208)..(405): Homolog of NCBI NO: 28315880 NR Description: putative vacuolar metal-ion transport protein
  misc_feature (1)..(191): Homolog of NCBI NO: 28315880 NR Description: putative vacuolar metal-ion transport protein
  misc_feature (182)..(201): Homolog of NCBI NO: 40287448 NR Description: heavy metal transporter MTP2 [Arabis shortii]
  misc_feature (208)..(405): Homolog of NCBI NO: 40287448 NR Description: heavy metal transporter MTP2 [Arabis shortii]
  misc_feature (1)..(182): Homolog of NCBI NO: 40287448 NR Description: heavy metal transporter MTP2 [Arabis shortii]
  misc_feature (201)..(406): Homolog of NCBI NO: 15231581 NR Description: zinc transporter, putative/metal tolerance
  misc_feature (1)..(207): Homolog of NCBI NO: 15231581 NR Description: zinc transporter, putative/metal tolerance
  misc_feature (1)..(406): Homolog of NCBI NO: 16550925 NR Description: zinc transporter [Eucalyptus grandis]
  misc_feature (1)..(406): Homolog of NCBI NO: 30420736 NR Description: zinc transporter [Oryza sativa (japonica
MDISSASGAAGNKACRGAACDFSDASNTSKDSKERSASMKKLLIAVILCVIFMAVEVVGGIKANSLAILTDAAHLLSDVAAFAISLFSLWAAGWEATPQQSYGFFRIEILGALVSIQLIWLLAGILVYEAIMRLINESGEVQGSLMFAVSAFGLFVNIIMAVLLGHDHGHGGHGHSHGHGHGHSHDHDHGNSEDDHSHHGDHEQGHVHHHEHSHGTSITVTTNHHSHSSTGQHQDVEQPLLKHDGDCESAQPGAKPAKKPRRNINVHSAYLHVIGDSIQSIGVMIGGALIWYKPEWKVIDLICTLIFSVIVLFTTIKMIRNILEVLMESTPREIDATRLESGLREMEGVIAVHELHIWAITVGKVLLACHVTITQDADADKMLDKVIGYIKAEYNISHVTIQIERE

SEQ ID NO: 65560 - protein, 368 aa, Triticum aestivum
  peptide (1)..(368): Ceres Seq. ID no. 13655991
  misc_feature (4)..(368): Pfam Name: Cation efflux family Pfam Description: Cation efflux family
  misc_feature (1)..(147): Homolog of NCBI NO: 15228646 NR Description: zinc transporter, putative/metal tolerance
  misc_feature (170)..(367): Homolog of NCBI NO: 28315880 NR Description: putative vacuolar metal-ion transport protein
  misc_feature (1)..(153): Homolog of NCBI NO: 28315880 NR Description: putative vacuolar metal-ion transport protein
  misc_feature (144)..(163): Homolog of NCBI NO: 40287448 NR Description: heavy metal transporter MTP2 [Arabis shortii]
  misc_feature (170)..(367): Homolog of NCBI NO: 40287448 NR Description: heavy metal transporter MTP2 [Arabis shortii]
  misc_feature (1)..(144): Homolog of NCBI NO: 40287448 NR Description: heavy metal transporter MTP2 [Arabis shortii]
  misc_feature (163)..(368): Homolog of NCBI NO: 15231581 NR Description: zinc transporter, putative/metal tolerance
  misc_feature (1)..(169): Homolog of NCBI NO: 15231581 NR Description: zinc transporter, putative/metal tolerance
  misc_feature (1)..(368): Homolog of NCBI NO: 16550925 NR Description: zinc transporter [Eucalyptus grandis]
  misc_feature (1)..(368): Homolog of NCBI NO: 30420736 NR Description: zinc transporter [Oryza sativa (japonica
MKKLLIAVILCVIFMAVEVVGGIKANSLAILTDAAHLLSDVAAFAISLFSLWAAGWEATPQQSYGFFRIEILGALVSIQLIWLLAGILVYEAIMRLINESGEVQGSLMFAVSAFGLFVNIIMAVLLGHDHGHGGHGHSHGHGHGHSHDHDHGNSEDDHSHHGDHEQGHVHHHEHSHGTSITVTTNHHSHSSTGQHQDVEQPLLKHDGDCESAQPGAKPAKKPRRNINVHSAYLHVIGDSIQSIGVMIGGALIWYKPEWKVIDLICTLIFSVIVLFTTIKMIRNILEVLMESTPREIDATRLESGLREMEGVIAVHELHIWAITVGKVLLACHVTITQDADADKMLDKVIGYIKAEYNISHVTIQIERE

SEQ ID NO: 65561 - DNA, 1621 bp, Triticum aestivum
  misc_feature (1)..(1621): Ceres Seq. ID no. 13597656
atacctctcccgtgccagccagtctcccccctccctccctccacccgccgccgccgccacccacaaaccctagaaaccctagctctcatcccctcgcccgagacagccatggcggagcacgacctgacggcgagcgtggcggcgtggatggacccccacctggtgctcccggtgctggagttcctccaggagcgcggggtctacgccgacgaggagatcctgcggggcaagatccgcctcctcggcggcaccaacatggtcgactacgccatggacatccacaagtcgctccacggcaccgacgacgtccccgccgacatggtcgcccgccgctccgaggtcgtcgagaggctccgggccctccaggaggccgtcgcgcccatagtcgccttcctctccagcccgcagctcgtgcaggagctccacgccgacaagcagtacaacctccacatgctccaggagcgccaccagatcggcccggaccagatcgaggccctctaccagtacgccaagttccagtacgagtgcgggatgtactccgacgccgccgatttcctgtcccagtaccgcgctctgtgcaccaacagcgagaggagcctgagtgccctgtgggggaagctggcggcggagatactgatgcagaactgggatgtcgcgcaggaggagctcaacaggctcaaggagatgattgattccagcagcttcacctcgtcgcctgtgaaccagctccacagcaggatatggctgatgcactggagcctcttcatcttcttcaaccatgagaatggaaggaacgggatcatcgacctcttcttccaggacaggtacctcaatgctatccagaccaacgctccccatcttctgaggtaccttgctgctgcagttgttgtcaacaagaggagaaggaacatgcttaaggaactcatcaaggtcatccagcaggagcagaacagctacaaggatcccatcattgagttcctggagtgcctgtatgtcaagtatgattttgatggcgctcagcagaagctcgtcgagtgcgagcaggttatactgaatgatcctttcctgggcaagcgcgttgaagagaggaatggcatcgctgttcctctgagagacgagttccttgaaaatgctcgcctgttcatttttgagacttactgccgtatacatcgctgcatcgatattggtgtgcttgcggagaagctgaacatgacctatgatgaagccgagttgtggataatgaacatggtcaagagttccaagctagatgccaagattgattcagtgacgggaactctcatcatgacgaccaatcgtgttgatgtccatgagcagattattgagagcatgaagaacctcaatgccaggacctacatgctagcaaagagcgtcgtggatccagggcatgcagcagcacagcaggctgctcggtgagaccaacagatgatctgcagctttgaggcggtaaaaattactttgggaactttgttgttaggcagtgacttcgttgctagtatttgaatcatattgctacagcttatgctgatgttttaaatgctttgtactccttttactcaagtttatcgtcctatgaattaatactgcaaaagacgtttaacgc

SEQ ID NO: 65562 - protein, 477 aa, Triticum aestivum
  peptide (1)..(477): Ceres Seq. ID no. 13597657
  misc_feature (321)..(437): Pfam Name: PCI domain Pfam Description: PCI domain
  misc_feature (37)..(464): Homolog of NCBI NO: 12847562 NR Description: unnamed protein product [Mus musculus]
  misc_feature (37)..(464): Homolog of NCBI NO: 4503521 NR Description: murine mammary tumor integration site 6 (oncogene
  misc_feature (276)..(473): Homolog of NCBI NO: 11281940 NR Description: translation initiation factor 3-like protein -
  misc_feature (34)..(235): Homolog of NCBI NO: 11281940 NR Description: translation initiation factor 3-like protein -
  misc_feature (34)..(473): Homolog of NCBI NO: 7689381 NR Description: eIF3e [Arabidopsis thaliana]
  misc_feature (37)..(467): Homolog of NCBI NO: 34394686 NR Description: putative eukaryotic initiation factor 3E
  misc_feature (34)..(473): Homolog of NCBI NO: 18410687 NR Description: translation initiation factor 3 -related protein
  misc_feature (37)..(125): Homolog of NCBI NO: 34900030 NR Description: putative eIF3e [Oryza sativa (japonica
  misc_feature (148)..(477): Homolog of NCBI NO: 34900030 NR Description: putative eIF3e [Oryza sativa (japonica
  misc_feature (37)..(477): Homolog of NCBI NO: 34900328 NR Description: putative translation initiation factor 3
IPLPCQPVSPLPPSTRRRRHPQTLETLALIPSPETAMAEHDLTASVAAWMDPHLVLPVLEFLQERGVYADEEILRGKIRLLGGTNMVDYAMDIHKSLHGTDDVPADMVARRSEVVERLRALQEAVAPIVAFLSSPQLVQELHADKQYNLHMLQERHQIGPDQIEALYQYAKFQYECGMYSDAADFLSQYRALCTNSERSLSALWGKLAAEILMQNWDVAQEELNRLKEMIDSSSFTSSPVNQLHSRIWLMHWSLFIFFNHENGRNGIIDLFFQDRYLNAIQTNAPHLLRYLAAAVVVNKRRRNMLKELIKVIQQEQNSYKDPIIEFLECLYVKYDFDGAQQKLVECEQVILNDPFLGKRVEERNGIAVPLRDEFLENARLFIFETYCRIHRCIDIGVLAEKLNMTYDEAELWIMNMVKSSKLDAKIDSVTGTLIMTTNRVDVHEQIIESMKNLNARTYMLAKSVVDPGHAAAQQAAR

SEQ ID NO: 65563 - protein, 441 aa, Triticum aestivum
  peptide (1)..(441): Ceres Seq. ID no. 13597658
  misc_feature (285)..(401): Pfam Name: PCI domain Pfam Description: PCI domain
  misc_feature (1)..(428): Homolog of NCBI NO: 12847562 NR Description: unnamed protein product [Mus musculus]
  misc_feature (1)..(428): Homolog of NCBI NO: 4503521 NR Description: murine mammary tumor integration site 6 (oncogene
  misc_feature (240)..(437): Homolog of NCBI NO: 11281940 NR Description: translation initiation factor 3-like protein -
  misc_feature (1)..(199): Homolog of NCBI NO: 11281940 NR Description: translation initiation factor 3-like protein -
  misc_feature (1)..(437): Homolog of NCBI NO: 7689381 NR Description: eIF3e [Arabidopsis thaliana]
  misc_feature (1)..(431): Homolog of NCBI NO: 34394686 NR Description: putative eukaryotic initiation factor 3E
  misc_feature (1)..(437): Homolog of NCBI NO: 18410687 NR Description: translation initiation factor 3 -related protein
  misc_feature (1)..(89): Homolog of NCBI NO: 34900030 NR Description: putative eIF3e [Oryza sativa (japonica
  misc_feature (112)..(441): Homolog of NCBI NO: 34900030 NR Description: putative eIF3e [Oryza sativa (japonica
  misc_feature (1)..(441): Homolog of NCBI NO: 34900328 NR Description: putative translation initiation factor 3
MAEHDLTASVAAWMDPHLVLPVLEFLQERGVYADEEILRGKIRLLGGTNMVDYAMDIHKSLHGTDDVPADMVARRSEVVERLRALQEAVAPIVAFLSSPQLVQELHADKQYNLHMLQERHQIGPDQIEALYQYAKFQYECGMYSDAADFLSQYRALCTNSERSLSALWGKLAAEILMQNWDVAQEELNRLKEMIDSSSFTSSPVNQLHSRIWLMHWSLFIFFNHENGRNGIIDLFFQDRYLNAIQTNAPHLLRYLAAAVVVNKRRRNMLKELIKVIQQEQNSYKDPIIEFLECLYVKYDFDGAQQKLVECEQVILNDPFLGKRVEERNGIAVPLRDEFLENARLFIFETYCRIHRCIDIGVLAEKLNMTYDEAELWIMNMVKSSKLDAKIDSVTGTLIMTTNRVDVHEQIIESMKNLNARTYMLAKSVVDPGHAAAQQAAR

SEQ ID NO: 65564 - protein, 428 aa, Triticum aestivum
  peptide (1)..(428): Ceres Seq. ID no. 13597659
  misc_feature (272)..(388): Pfam Name: PCI domain Pfam Description: PCI domain
  misc_feature (1)..(415): Homolog of NCBI NO: 12847562 NR Description: unnamed protein product [Mus musculus]
  misc_feature (1)..(415): Homolog of NCBI NO: 4503521 NR Description: murine mammary tumor integration site 6 (oncogene
  misc_feature (227)..(424): Homolog of NCBI NO: 11281940 NR Description: translation initiation factor 3-like protein -
  misc_feature (1)..(186): Homolog of NCBI NO: 11281940 NR Description: translation initiation factor 3-like protein -
  misc_feature (1)..(424): Homolog of NCBI NO: 7689381 NR Description: eIF3e [Arabidopsis thaliana]
  misc_feature (1)..(418): Homolog of NCBI NO: 34394686 NR Description: putative eukaryotic initiation factor 3E
  misc_feature (1)..(424): Homolog of NCBI NO: 18410687 NR Description: translation initiation factor 3 -related protein
  misc_feature (1)..(76): Homolog of NCBI NO: 34900030 NR Description: putative eIF3e [Oryza sativa (japonica
  misc_feature (99)..(428): Homolog of NCBI NO: 34900030 NR Description: putative eIF3e [Oryza sativa (japonica
  misc_feature (1)..(428): Homolog of NCBI NO: 34900328 NR Description: putative translation initiation factor 3
MDPHLVLPVLEFLQERGVYADEEILRGKIRLLGGTNMVDYAMDIHKSLHGTDDVPADMVARRSEVVERLRALQEAVAPIVAFLSSPQLVQELHADKQYNLHMLQERHQIGPDQIEALYQYAKFQYECGMYSDAADFLSQYRALCTNSERSLSALWGKLAAEILMQNWDVAQEELNRLKEMIDSSSFTSSPVNQLHSRIWLMHWSLFIFFNHENGRNGIIDLFFQDRYLNAIQTNAPHLLRYLAAAVVVNKRRRNMLKELIKVIQQEQNSYKDPIIEFLECLYVKYDFDGAQQKLVECEQVILNDPFLGKRVEERNGIAVPLRDEFLENARLFIFETYCRIHRCIDIGVLAEKLNMTYDEAELWIMNMVKSSKLDAKIDSVTGTLIMTTNRVDVHEQIIESMKNLNARTYMLAKSVVDPGHAAAQQAAR

SEQ ID NO: 65565 - DNA, 1358 bp, Triticum aestivum
  misc_feature (1)..(1358): Ceres Seq. ID no. 13584730
ggtctcctcctccgccctcccacacccaaaaagctctagggaaacccccacgcgcgcgcctggtgccggatcggatcggggatgtgggagtcggtggcgctcacgctggccggcgccgccggcaacagcatcggcaaggtcctccagaagaagggcacccacatcctcccgcccctctccttcaagctcaaggtcatacggggctacgcgctcaacaggctctggatcagcggcttcctcctggacatgtgcggcgccgccctcatgctcactgcgctctcgcaggcgtcggtctctgtcgtgcagccgattgccggctgcggcctcgccatactctgcgtcttctcccatttttacctcaaggaggtcatgaatggccttgattggcttgccatcacaatggccggtctcggcaccataggagtcggtgtaggaggggaggagcagaaagtggaagagattccccttttcagtataccttggctggtgctcaccgttctcatcttgtttgttctgctcaacacttggcttcatatctacaaaaagcaaaggcgcgaacaagagttgactggacctgaagtgatcgaggaggtcatatacggcttagaatcaggcattttgtttgggatttcatcagtgatctctaagatgggatttgtgatgtctgaaatgggctttccgaagattgttgtgccagctgccatttcttgtagtgtggcctgcagtgctgtgggatttgtttaccagactcgaggtctcaagcatgggagggcaattgttgtgtccacgtgtacatcggtggcatctattgtgtctggtgttgtggctggtatggttgcacttgacgaacatctgccgacagctcctgcaggacgtttttttctcctgcttggatggttcttcattattacgggggtgatacttcttgttacttcaacccgattgattgcgcgcctacctaagcctgtgcagaagtttttgaagagtaatatggagcgttcacacagcatcaggaggcctggaccagcccgagggaaggatcccaaccaaagcacaacaatccatgcatcgacattacatatactaacctctacaggaaaagagaaggcctagaacagctgctggtagagcaagattgtcttaacacctttgatgggtcatgttgtcgtttaaatcattatgtggatgtacaagtctagagtagcatcttaaaagtttgggccggttgctcatatactgactgcccttgttataggtctaacagaagtttggaaaatctcctgtgaattttggtcaagttacatatcatcctgtggtgagttgtaagtggtatattcatttgttctcttccctttcgg

SEQ ID NO: 65566 - protein, 343 aa, Triticum aestivum
  peptide (1)..(343): Ceres Seq. ID no. 13584731
  misc_feature (4)..(107): Pfam Name: Small Multidrug Resistance protein Pfam Description: Small Multidrug Resistance protein
  misc_feature (9)..(282): Homolog of NCBI NO: 23018792 NR Description: hypothetical protein [Thermobifida fusca]
  misc_feature (5)..(282): Homolog of NCBI NO: 29833162 NR Description: putative integral membrane protein
  misc_feature (102)..(272): Homolog of NCBI NO: 11357418 NR Description: hypothetical protein F14F18.130 - Arabidopsis
  misc_feature (1)..(145): Homolog of NCBI NO: 11357418 NR Description: hypothetical protein F14F18.130 - Arabidopsis
  misc_feature (1)..(342): Homolog of NCBI NO: 22326741 NR Description: expressed protein [Arabidopsis thaliana]
  misc_feature (1)..(343): Homolog of NCBI NO: 34910446 NR Description: P0510F09.19 [Oryza sativa (japonica
MWESVALTLAGAAGNSIGKVLQKKGTHILPPLSFKLKVIRGYALNRLWISGFLLDMCGAALMLTALSQASVSVVQPIAGCGLAILCVFSHFYLKEVMNGLDWLAITMAGLGTIGVGVGGEEQKVEEIPLFSIPWLVLTVLILFVLLNTWLHIYKKQRREQELTGPEVIEEVIYGLESGILFGISSVISKMGFVMSEMGFPKIVVPAAISCSVACSAVGFVYQTRGLKHGRAIVVSTCTSVASIVSGVVAGMVALDEHLPTAPAGRFFLLLGWFFIITGVILLVTSTRLIARLPKPVQKFLKSNMERSHSIRRPGPARGKDPNQSTTIHASTLHILTSTGKEKA

SEQ ID NO: 65567 - protein, 288 aa, Triticum aestivum
  peptide (1)..(288): Ceres Seq. ID no. 13584732
  misc_feature (1)..(52): Pfam Name: Small Multidrug Resistance protein Pfam Description: Small Multidrug Resistance protein
  misc_feature (1)..(227): Homolog of NCBI NO: 23018792 NR Description: hypothetical protein [Thermobifida fusca]
  misc_feature (1)..(227): Homolog of NCBI NO: 29833162 NR Description: putative integral membrane protein
  misc_feature (47)..(217): Homolog of NCBI NO: 11357418 NR Description: hypothetical protein F14F18.130 - Arabidopsis
  misc_feature (1)..(90): Homolog of NCBI NO: 11357418 NR Description: hypothetical protein F14F18.130 - Arabidopsis
  misc_feature (1)..(287): Homolog of NCBI NO: 22326741 NR Description: expressed protein [Arabidopsis thaliana]
  misc_feature (1)..(288): Homolog of NCBI NO: 34910446 NR Description: P0510F09.19 [Oryza sativa (japonica
MCGAALMLTALSQASVSVVQPIAGCGLAILCVFSHFYLKEVMNGLDWLAITMAGLGTIGVGVGGEEQKVEEIPLFSIPWLVLTVLILFVLLNTWLHIYKKQRREQELTGPEVIEEVIYGLESGILFGISSVISKMGFVMSEMGFPKIVVPAAISCSVACSAVGFVYQTRGLKHGRAIVVSTCTSVASIVSGVVAGMVALDEHLPTAPAGRFFLLLGWFFIITGVILLVTSTRLIARLPKPVQKFLKSNMERSHSIRRPGPARGKDPNQSTTIHASTLHILTSTGKEKA

SEQ ID NO: 65568 - protein, 282 aa, Triticum aestivum
  peptide (1)..(282): Ceres Seq. ID no. 13584733
  misc_feature (1)..(221): Homolog of NCBI NO: 23018792 NR Description: hypothetical protein [Thermobifida fusca]
  misc_feature (1)..(221): Homolog of NCBI NO: 29833162 NR Description: putative integral membrane protein
  misc_feature (41)..(211): Homolog of NCBI NO: 11357418 NR Description: hypothetical protein F14F18.130 - Arabidopsis
  misc_feature (1)..(84): Homolog of NCBI NO: 11357418 NR Description: hypothetical protein F14F18.130 - Arabidopsis
  misc_feature (1)..(281): Homolog of NCBI NO: 22326741 NR Description: expressed protein [Arabidopsis thaliana]
  misc_feature (1)..(282): Homolog of NCBI NO: 34910446 NR Description: P0510F09.19 [Oryza sativa (japonica
MLTALSQASVSVVQPIAGCGLAILCVFSHFYLKEVMNGLDWLAITMAGLGTIGVGVGGEEQKVEEIPLFSIPWLVLTVLILFVLLNTWLHIYKKQRREQELTGPEVIEEVIYGLESGILFGISSVISKMGFVMSEMGFPKIVVPAAISCSVACSAVGFVYQTRGLKHGRAIVVSTCTSVASIVSGVVAGMVALDEHLPTAPAGRFFLLLGWFFIITGVILLVTSTRLIARLPKPVQKFLKSNMERSHSIRRPGPARGKDPNQSTTIHASTLHILTSTGKEKA

SEQ ID NO: 65569 - DNA, 1722 bp, Triticum aestivum
  misc_feature (1)..(1722): Ceres Seq. ID no. 13598609
cccactttattgtgtttaaaaaaaacccaatccatactccagaagtccagatcgatcccaatggcgtcgtcggcgcttcgctgccttccaggcgacatcccgccgacgacgctgctcaccctaccaaacgagatgctcgaggaaatcctcctctgcctctccgacgccggcgacctcgtccgcgcctccatggcccgagtctccatccgccgcctcgtcacgaatcaccgcttcctccgccggttccgcactcgctacccgccgtctctactgggcatcgtctctccccttccccggccccgctgggaccggccgctgctgcaactggcccagccgccgcacccctccgcggccgccgcggccgctttctccgggcttgacgacgccgccgccgccgacttctcatgcgccttcctccccaaccccgcgcgctggcgtaggcgcgacttgcgggacggccgcgccctcttttccggcgtcccagagggcaccaatttcgactgccacgtctttgtcagggacctggctgtctgtgaccccctgtcccggcgctacatcctgctaccttccatccccgacgacctagccgccttggtgcagccacccgacgtgctgcgtttcgagcccttccttgctcctccggcggccgaggatgaggacggcttgtctttcagagttatttgcttggtgcagtgcaaaaccaagctggtcctcctcatcttctcttcaggttcaggtgctgaacaatggcgtgctgttacatttgacaattggatcagtttgctcacaggatcaggtaaccagccagagtcataccggcggtcagtaatacgccactatgcacacggctacttctgttgggtgctttctccggcaagcaagttgctcatgctcgacacacgcagcatgggtttctcagttgtggacctcccagatggcaccggtgaaaatgaagcacaggttgccattttggaggcagcgaatggaaggattaagatgtttattaatgagcatttcacaactgaactcaggtattatgtgttgcaaaatgatggagttggtgcaaaccagtggctgtcagaggcaacgttcaatttacccgtaaataatggcggctatatattcatgggcgtagcggggggatacttactcctacaagggcttggagaagacgaccaatatccattccatttggtttcgttgaatctgaagactttacagcttgagttgttccttgcatcaaagcgcaataacaagggtgctcatctgtttgccggtttcccaccatccttgtctttaccaactcttcgacatgatatgactgatgcctgcatttctaattcagatatctgatattgatgccgctgggagatgaaaccttgacgtctggaggtatggagcagcaacttggagcattatgtactggatggaatcatcaggctttccttttgagacggacgcaggcttgtttgcggtgctgactgttgtgcggctcggtgcttattttcagatatgtcatgggtgaatagttgtgataatctaccaaattagattcacaaatcaaatattactagataatttctatttttggaacctttgtttttatcagatatgcaatgtgactagaagcagggtgatatataccatcttctttgtttttgtttttgtgtaagtggtacaaatcggagatatacaaattggttctaccatcttctttgtttt

SEQ ID NO: 65570 - protein, 450 aa, Triticum aestivum
  peptide (1)..(450): Ceres Seq. ID no. 13598610
  misc_feature (38)..(386): Homolog of NCBI NO: 32480316 NR Description: OSJNBa0042D13.1 [Oryza sativa (japonica
  misc_feature (34)..(436): Homolog of NCBI NO: 37530886 NR Description: hypothetical protein [Oryza sativa (japonica
  misc_feature (30)..(436): Homolog of NCBI NO: 37530888 NR Description: hypothetical protein [Oryza sativa (japonica
  misc_feature (34)..(436): Homolog of NCBI NO: 34393352 NR Description: hypothetical protein [Oryza sativa (japonica
  misc_feature (34)..(409): Homolog of NCBI NO: 34393351 NR Description: hypothetical protein [Oryza sativa (japonica
  misc_feature (21)..(436): Homolog of NCBI NO: 34393354 NR Description: hypothetical protein [Oryza sativa (japonica
PTLLCLKKTQSILQKSRSIPMASSALRCLPGDIPPTTLLTLPNEMLEEILLCLSDAGDLVRASMARVSIRRLVTNHRFLRRFRTRYPPSLLGIVSPLPRPRWDRPLLQLAQPPHPSAAAAAAFSGLDDAAAADFSCAFLPNPARWRRRDLRDGRALFSGVPEGTNFDCHVFVRDLAVCDPLSRRYILLPSIPDDLAALVQPPDVLRFEPFLAPPAAEDEDGLSFRVICLVQCKTKLVLLIFSSGSGAEQWRAVTFDNWISLLTGSGNQPESYRRSVIRHYAHGYFCWVLSPASKLLMLDTRSMGFSVVDLPDGTGENEAQVAILEAANGRIKMFINEHFTTELRYYVLQNDGVGANQWLSEATFNLPVNNGGYIFMGVAGGYLLLQGLGEDDQYPFHLVSLNLKTLQLELFLASKRNNKGAHLFAGFPPSLSLPTLRHDMTDACISNSDI

SEQ ID NO: 65571 - protein, 430 aa, Triticum aestivum
  peptide (1)..(430): Ceres Seq. ID no. 13598611
  misc_feature (18)..(366): Homolog of NCBI NO: 32480316 NR Description: OSJNBa0042D13.1 [Oryza sativa (japonica
  misc_feature (14)..(416): Homolog of NCBI NO: 37530886 NR Description: hypothetical protein [Oryza sativa (japonica
  misc_feature (10)..(416): Homolog of NCBI NO: 37530888 NR Description: hypothetical protein [Oryza sativa (japonica
  misc_feature (14)..(416): Homolog of NCBI NO: 34393352 NR Description: hypothetical protein [Oryza sativa (japonica
  misc_feature (14)..(389): Homolog of NCBI NO: 34393351 NR Description: hypothetical protein [Oryza sativa (japonica
  misc_feature (1)..(416): Homolog of NCBI NO: 34393354 NR Description: hypothetical protein [Oryza sativa (japonica
MASSALRCLPGDIPPTTLLTLPNEMLEEILLCLSDAGDLVRASMARVSIRRLVTNHRFLRRFRTRYPPSLLGIVSPLPRPRWDRPLLQLAQPPHPSAAAAAAFSGLDDAAAADFSCAFLPNPARWRRRDLRDGRALFSGVPEGTNFDCHVFVRDLAVCDPLSRRYILLPSIPDDLAALVQPPDVLRFEPFLAPPAAEDEDGLSFRVICLVQCKTKLVLLIFSSGSGAEQWRAVTFDNWISLLTGSGNQPESYRRSVIRHYAHGYFCWVLSPASKLLMLDTRSMGFSVVDLPDGTGENEAQVAILEAANGRIKMFINEHFTTELRYYVLQNDGVGANQWLSEATFNLPVNNGGYIFMGVAGGYLLLQGLGEDDQYPFHLVSLNLKTLQLELFLASKRNNKGAHLFAGFPPSLSLPTLRHDMTDACISNSDI

SEQ ID NO: 65572 - protein, 406 aa, Triticum aestivum
  peptide (1)..(406): Ceres Seq. ID no. 13598612
  misc_feature (1)..(342): Homolog of NCBI NO: 32480316 NR Description: OSJNBa0042D13.1 [Oryza sativa (japonica
  misc_feature (1)..(392): Homolog of NCBI NO: 37530886 NR Description: hypothetical protein [Oryza sativa (japonica
  misc_feature (1)..(392): Homolog of NCBI NO: 37530888 NR Description: hypothetical protein [Oryza sativa (japonica
  misc_feature (1)..(392): Homolog of NCBI NO: 34393352 NR Description: hypothetical protein [Oryza sativa (japonica
  misc_feature (1)..(365): Homolog of NCBI NO: 34393351 NR Description: hypothetical protein [Oryza sativa (japonica
  misc_feature (1)..(392): Homolog of NCBI NO: 34393354 NR Description: hypothetical protein [Oryza sativa (japonica
MLEEILLCLSDAGDLVRASMARVSIRRLVTNHRFLRRFRTRYPPSLLGIVSPLPRPRWDRPLLQLAQPPHPSAAAAAAFSGLDDAAAADFSCAFLPNPARWRRRDLRDGRALFSGVPEGTNFDCHVFVRDLAVCDPLSRRYILLPSIPDDLAALVQPPDVLRFEPFLAPPAAEDEDGLSFRVICLVQCKTKLVLLIFSSGSGAEQWRAVTFDNWISLLTGSGNQPESYRRSVIRHYAHGYFCWVLSPASKLLMLDTRSMGFSVVDLPDGTGENEAQVAILEAANGRIKMFINEHFTTELRYYVLQNDGVGANQWLSEATFNLPVNNGGYIFMGVAGGYLLLQGLGEDDQYPFHLVSLNLKTLQLELFLASKRNNKGAHLFAGFPPSLSLPTLRHDMTDACISNSDI

SEQ ID NO: 65573 - DNA, 1045 bp, Triticum aestivum
  misc_feature (1)..(1045): Ceres Seq. ID no. 13584734
atgtgccattgctgcagttgcgtgacacgctcgcctaactcccgcacgcaccccctccaccctccgctgcccgtggccggctgtaccgcaccattcccacacaccctcacttagctagctgctcccattattctcacctgtccccatttgatccatcttctgatcgtctacccgctcgccttctctttccctgcgagcagcccaggccggaggcatgtcggccaagaagatcgtggtgaagctggagctccatgacaacaaggacaagcagaaggccatgaaggccgtctccgtcctcgtcggcatcgatgccatatccatggacctggcgtcgcgcaagatgacggtgatcggcacggtggacccggtgcacgtggtgagcaagctgcgcaagggctgggcggcctacatcgagtccgtcggcccggccaaggagcccgagaagaaagaggagaagaaggaggaggccaagaaggagggagacggggccaagaaggaaggcggcgacggcggcgacgccaagaaggagggcgacgggaagaaggagggcgacgggaagaaggacggcgacaagaaggaggagggtgacggcaagaaggacggcgacgggaagaaggacggcgacaagaaggaggagggcgatggcaagaaggacgaccagaagaagcccgccgccgtggccccgctgccgttcccgcaccacatgccgctgccgcaccacatgccgccgccctacatgtacaacgcggactacatgatgaaccagtaccggccggcgccgccggcctacccgccgccgtacgtgccgccgcagcactactacgtgcggaacatgagcatggaggagaacccaaactcgtgcgtcatctgctaagtcaaagtcgatccctcgatcgcgcgcgtacgtcccgagaggcgaccatgcatgcatctgtgtatagtagtattttctcgaccgtttttacgagaccagcaaagtttgcaagatgaaactgtacaactagtagtctactatagcactacgtacgtacatacgtacatttgt

SEQ ID NO: 65574 - protein, 219 aa, Triticum aestivum
  peptide (1)..(219): Ceres Seq. ID no. 13584735
  misc_feature (6)..(75): Pfam Name: Heavy-metal-associated domain Pfam Description: Heavy-metal-associated domain
  misc_feature (4)..(159): Homolog of NCBI NO: 15223416 NR Description: heavy-metal-associated domain-containing protein
  misc_feature (27)..(219): Homolog of NCBI NO: 34902246 NR Description: Unknown protein [Oryza sativa (japonica
  misc_feature (3)..(177): Homolog of NCBI NO: 37536388 NR Description: hypothetical protein [Oryza sativa (japonica
  misc_feature (3)..(128): Homolog of NCBI NO: 34902246 NR Description: Unknown protein [Oryza sativa (japonica
MSAKKIVVKLELHDNKDKQKAMKAVSVLVGIDAISMDLASRKMTVIGTVDPVHVVSKLRKGWAAYIESVGPAKEPEKKEEKKEEAKKEGDGAKKEGGDGGDAKKEGDGKKEGDGKKDGDKKEEGDGKKDGDGKKDGDKKEEGDGKKDDQKKPAAVAPLPFPHHMPLPHHMPPPYMYNADYMMNQYRPAPPAYPPPYVPPQHYYVRNMSMEENPNSCVIC

SEQ ID NO: 65575 - protein, 198 aa, Triticum aestivum
  peptide (1)..(198): Ceres Seq. ID no. 13584736
  misc_feature (1)..(54): Pfam Name: Heavy-metal-associated domain Pfam Description: Heavy-metal-associated domain
  misc_feature (1)..(138): Homolog of NCBI NO: 15223416 NR Description: heavy-metal-associated domain-containing protein
  misc_feature (6)..(198): Homolog of NCBI NO: 34902246 NR Description: Unknown protein [Oryza sativa (japonica
  misc_feature (1)..(156): Homolog of NCBI NO: 37536388 NR Description: hypothetical protein [Oryza sativa (japonica
  misc_feature (1)..(107): Homolog of NCBI NO: 34902246 NR Description: Unknown protein [Oryza sativa (japonica
MKAVSVLVGIDAISMDLASRKMTVIGTVDPVHVVSKLRKGWAAYIESVGPAKEPEKKEEKKEEAKKEGDGAKKEGGDGGDAKKEGDGKKEGDGKKDGDKKEEGDGKKDGDGKKDGDKKEEGDGKKDDQKKPAAVAPLPFPHHMPLPHHMPPPYMYNADYMMNQYRPAPPAYPPPYVPPQHYYVRNMSMEENPNSCVIC

SEQ ID NO: 65576 - protein, 184 aa, Triticum aestivum
  peptide (1)..(184): Ceres Seq. ID no. 13584737
  misc_feature (41)..(116): Pfam Name: Histone deacetylase family Pfam Description: Histone deacetylase family
  misc_feature (1)..(124): Homolog of NCBI NO: 15223416 NR Description: heavy-metal-associated domain-containing protein
  misc_feature (1)..(184): Homolog of NCBI NO: 34902246 NR Description: Unknown protein [Oryza sativa (japonica
  misc_feature (1)..(142): Homolog of NCBI NO: 37536388 NR Description: hypothetical protein [Oryza sativa (japonica
  misc_feature (1)..(93): Homolog of NCBI NO: 34902246 NR Description: Unknown protein [Oryza sativa (japonica
MDLASRKMTVIGTVDPVHVVSKLRKGWAAYIESVGPAKEPEKKEEKKEEAKKEGDGAKKEGGDGGDAKKEGDGKKEGDGKKDGDKKEEGDGKKDGDGKKDGDKKEEGDGKKDDQKKPAAVAPLPFPHHMPLPHHMPPPYMYNADYMMNQYRPAPPAYPPPYVPPQHYYVRNMSMEENPNSCVIC

SEQ ID NO: 65577 - DNA, 1249 bp, Triticum aestivum
  misc_feature (1)..(1249): Ceres Seq. ID no. 13597715
agggtttttctcactgccagcacgccactccccctccccaccccccttcagcagcgcaacacaccaacgccgccgccgcgccgccagcccaccgggagcaccgccggagaaaccagccatggatcggtaccagcgggtcgagaagccgcggcccgaggccgccgccatcagcgagaacgagatccgtatcaccacacagggcctcatccgcaactacgtcacctacgccacctccctcctccaggaaaaacgggtgaaagaaattgtgttgaaggccatgggacaagctatcagcaagacagtggctattactgagatcataaagaaaaggatccctgggttgcatcaagatacaacaatcagttcagtcagtattactgatgtatgggaacccattgaggaaggccttgtaccattggagatgactcgtcatgtttcaatgatctcaatctccttgtcacctaaggagctcgacacaagttcacccggatatcaagctccattgcatgcagagccacttaaaccaaggtaccagcaagttcagcgatatcaacaacagcaccagccaagacaaaatcaaggtcaaacagattcatatgtacgtggaagaggcagagggagaggaaggggctggggtggtaggggaggatatggtggaggttatggtgggtatgataataaccaaggaggttatggtggatatagcaaccagggaggatatggccacaaccaaggtgggtatggcaatcatggaggttacggccacaaccaaggtgggtatggcaaccagggaggttacggcaaccagggagggtacggccaaaaccaaggtggatatggagggggttatggttatgaccaaggtggatatgggggatatgataatggtggctggaattacaaccagaacagaggccgtggtggcggtggacgaggaagaggcaactggggatacagtggtccaggatacgagcgcggtggacgaggtgcaggcggcccaggtggcccaggcggcaggggatacgtgcggggccgtggtcggatgggtcctggccgcgggcggggcaaccagaactattaggtcacatagtgctgtattgttgcaaaaaaagagagaaaaaggtacgcgttctgtgaatcggaaccgaaccttgcgctgtttcattgtgaaccatcgactaggcttcccagtttttagctataattgccaatggtatctgtaccattgcttccattctgtgggattttg

SEQ ID NO: 65578 - protein, 359 aa, Triticum aestivum
  peptide (1)..(359): Ceres Seq. ID no. 13597716
  misc_feature (183)..(338): Pfam Name: Herpesvirus latent membrane protein 1 (LMP1) Pfam Description: Herpesvirus latent membrane protein 1 (LMP1)
  misc_feature (201)..(359): Homolog of NCBI NO: 4507353 NR Description: TBP-associated factor 15 isoform 2
  misc_feature (201)..(359): Homolog of NCBI NO: 28279785 NR Description: Similar to TAF15 RNA polymerase II, TATA box
  misc_feature (185)..(359): Homolog of NCBI NO: 30794412 NR Description: TAF15 RNA polymerase II, TATA box binding protein
  misc_feature (81)..(355): Homolog of NCBI NO: 25404999 NR Description: protein T4O12.22 [imported] - Arabidopsis
  misc_feature (40)..(195): Homolog of NCBI NO: 15231369 NR Description: hypothetical protein [Arabidopsis thaliana]
  misc_feature (40)..(315): Homolog of NCBI NO: 24417384 NR Description: unknown [Arabidopsis thaliana]
  misc_feature (40)..(309): Homolog of NCBI NO: 34897552 NR Description: OSJNBa0042L16.13 [Oryza sativa (japonica
  misc_feature (40)..(358): Homolog of NCBI NO: 25518088 NR Description: T20H2.2 protein - Arabidopsis thaliana
  misc_feature (40)..(358): Homolog of NCBI NO: 18394837 NR Description: glycine-rich protein [Arabidopsis thaliana]
  misc_feature (40)..(355): Homolog of NCBI NO: 18410994 NR Description: expressed protein [Arabidopsis thaliana]
GFFSLPARHSPSPPPFSSATHQRRRRAASPPGAPPEKPAMDRYQRVEKPRPEAAAISENEIRITTQGLIRNYVTYATSLLQEKRVKEIVLKAMGQAISKTVAITEIIKKRIPGLHQDTTISSVSITDVWEPIEEGLVPLEMTRHVSMISISLSPKELDTSSPGYQAPLHAEPLKPRYQQVQRYQQQHQPRQNQGQTDSYVRGRGRGRGRGWGGRGGYGGGYGGYDNNQGGYGGYSNQGGYGHNQGGYGNHGGYGHNQGGYGNQGGYGNQGGYGQNQGGYGGGYGYDQGGYGGYDNGGWNYNQNRGRGGGGRGRGNWGYSGPGYERGGRGAGGPGGPGGRGYVRGRGRMGPGRGRGNQNY

SEQ ID NO: 65579 - protein, 320 aa, Triticum aestivum
  peptide (1)..(320): Ceres Seq. ID no. 13597717
  misc_feature (144)..(299): Pfam Name: Herpesvirus latent membrane protein 1 (LMP1) Pfam Description: Herpesvirus latent membrane protein 1 (LMP1)
  misc_feature (162)..(320): Homolog of NCBI NO: 4507353 NR Description: TBP-associated factor 15 isoform 2
  misc_feature (162)..(320): Homolog of NCBI NO: 28279785 NR Description: Similar to TAF15 RNA polymerase II, TATA box
  misc_feature (146)..(320): Homolog of NCBI NO: 30794412 NR Description: TAF15 RNA polymerase II, TATA box binding protein
  misc_feature (42)..(316): Homolog of NCBI NO: 25404999 NR Description: protein T4O12.22 [imported] - Arabidopsis
  misc_feature (1)..(156): Homolog of NCBI NO: 15231369 NR Description: hypothetical protein [Arabidopsis thaliana]
  misc_feature (1)..(276): Homolog of NCBI NO: 24417384 NR Description: unknown [Arabidopsis thaliana]
  misc_feature (1)..(270): Homolog of NCBI NO: 34897552 NR Description: OSJNBa0042L16.13 [Oryza sativa (japonica
  misc_feature (1)..(319): Homolog of NCBI NO: 25518088 NR Description: T20H2.2 protein - Arabidopsis thaliana
  misc_feature (1)..(319): Homolog of NCBI NO: 18394837 NR Description: glycine-rich protein [Arabidopsis thaliana]
  misc_feature (1)..(316): Homolog of NCBI NO: 18410994 NR Description: expressed protein [Arabidopsis thaliana]
MDRYQRVEKPRPEAAAISENEIRITTQGLIRNYVTYATSLLQEKRVKEIVLKAMGQAISKTVAITEIIKKRIPGLHQDTTISSVSITDVWEPIEEGLVPLEMTRHVSMISISLSPKELDTSSPGYQAPLHAEPLKPRYQQVQRYQQQHQPRQNQGQTDSYVRGRGRGRGRGWGGRGGYGGGYGGYDNNQGGYGGYSNQGGYGHNQGGYGNHGGYGHNQGGYGNQGGYGNQGGYGQNQGGYGGGYGYDQGGYGGYDNGGWNYNQNRGRGGGGRGRGNWGYSGPGYERGGRGAGGPGGPGGRGYVRGRGRMGPGRGRGNQNY

SEQ ID NO: 65580 - protein, 267 aa, Triticum aestivum
  peptide (1)..(267): Ceres Seq. ID no. 13597718
  misc_feature (91)..(246): Pfam Name: Herpesvirus latent membrane protein 1 (LMP1) Pfam Description: Herpesvirus latent membrane protein 1 (LMP1)
  misc_feature (109)..(267): Homolog of NCBI NO: 4507353 NR Description: TBP-associated factor 15 isoform 2
  misc_feature (109)..(267): Homolog of NCBI NO: 28279785 NR Description: Similar to TAF15 RNA polymerase II, TATA box
  misc_feature (93)..(267): Homolog of NCBI NO: 30794412 NR Description: TAF15 RNA polymerase II, TATA box binding protein
  misc_feature (1)..(263): Homolog of NCBI NO: 25404999 NR Description: protein T4O12.22 [imported] - Arabidopsis
  misc_feature (1)..(103): Homolog of NCBI NO: 15231369 NR Description: hypothetical protein [Arabidopsis thaliana]
  misc_feature (1)..(223): Homolog of NCBI NO: 24417384 NR Description: unknown [Arabidopsis thaliana]
  misc_feature (1)..(217): Homolog of NCBI NO: 34897552 NR Description: OSJNBa0042L16.13 [Oryza sativa (japonica
  misc_feature (1)..(266): Homolog of NCBI NO: 25518088 NR Description: T20H2.2 protein - Arabidopsis thaliana
  misc_feature (1)..(266): Homolog of NCBI NO: 18394837 NR Description: glycine-rich protein [Arabidopsis thaliana]
  misc_feature (1)..(263): Homolog of NCBI NO: 18410994 NR Description: expressed protein [Arabidopsis thaliana]
MGQAISKTVAITEIIKKRIPGLHQDTTISSVSITDVWEPIEEGLVPLEMTRHVSMISISLSPKELDTSSPGYQAPLHAEPLKPRYQQVQRYQQQHQPRQNQGQTDSYVRGRGRGRGRGWGGRGGYGGGYGGYDNNQGGYGGYSNQGGYGHNQGGYGNHGGYGHNQGGYGNQGGYGNQGGYGQNQGGYGGGYGYDQGGYGGYDNGGWNYNQNRGRGGGGRGRGNWGYSGPGYERGGRGAGGPGGPGGRGYVRGRGRMGPGRGRGNQNY

SEQ ID NO: 65581 - protein, 247 aa, Triticum aestivum
  peptide (1)..(247): Ceres Seq. ID no. 13597719
MQSHLNQGTSKFSDINNSTSQDKIKVKQIHMYVEEAEGEEGAGVVGEDMVEVMVGMIITKEVMVDIATREDMATTKVGMAIMEVTATTKVGMATREVTATREGTAKTKVDMEGVMVMTKVDMGDMIMVAGITTRTEAVVAVDEEEATGDTVVQDTSAVDEVQAAQVAQAAGDTCGAVVGWVLAAGGATRTIRSHSAVLLQKKREKGTRSVNRNRTLRCFIVNHRLGFPVFSYNCQWYLYHCFHSVGF

SEQ ID NO: 65582 - DNA, 1227 bp, Triticum aestivum
  misc_feature (1)..(1227): Ceres Seq. ID no. 13598613
acctagaacatcctaatcgaaaagtttttgcttttatttggagcgtctcctccgtgctcagcgggctactgccctgcagcagatcccgcggccccgatgcctcctcccgccgccccgacgcctcctcccgccgagccgctgccaaattcgccagattctacctcccccacggaggaggctgaggcggatgcgggaggcacgccgtcgagggccgggccggtggggacagtaagctggggaactgggaccctcgtcggcgtattcaccgggcttctctacggcggggccaaggaggccaacgccaacgtcagcaaagatgctgaagtgatgttgaagatgggaagcaccacagacaagcgcgaacaatataggttgatgagagatgccatggagaaaaggttcattcgggttgccaaaggctcactagttggtggtgctcgccttgggatgttcactgcaactttctttggcatacagaaccttcttattgagaaccgtggggtgcatgatgtattcaatattgttggagctggctcggctaccgcagctgcttttgggcttatattgcctggttcaccaatgtggcgtgcaaggaatgtattggttggatctgctctcggtgccggaatttgctttccacttggttgggtacagttgaagctggcagagaaggccaatcttgagattgaaaattcaaaatcgccatcggatttacaaggcaatcaaagtcgtgtgggggctgctatagacagactagagaacagcctgaggaagtaacagtttgtacccatgcaaggagccaaggatctgttgtcaacacccatggctatttcgcttttgttttgttcatgtactttccataggaatgcggttacttttgaagtggtaatggcagcaagggaaactgtctcttgtatgaagataaatttggatacaaatacttacttgctggagctgggatatttctagttaaggtacctgtttgggtgtttgtgccattatgacctctatgatcagcattgtgcatagtattagtattcgtgacttctcgttagcttgacaatacctcggaaggatgctgccatctcttattttcttggaaagtttgtatcggtgatccatcacaaactatgcttgtttggtttgatgctcatgtatgctaaattttgccttggcagaattttgtcaaaaaaaaaaaaaaaaaagcttatcgataccgtcgacctc

SEQ ID NO: 65583 - protein, 226 aa, Triticum aestivum
  peptide (1)..(226): Ceres Seq. ID no. 13598614
  misc_feature (21)..(194): Homolog of NCBI NO: 9758300 NR Description: contains similarity to unknown
  misc_feature (26)..(226): Homolog of NCBI NO: 15242587 NR Description: expressed protein [Arabidopsis thaliana]
  misc_feature (1)..(226): Homolog of NCBI NO: 34903198 NR Description: unnamed protein product [Oryza sativa (japonica
MPPPAAPTPPPAEPLPNSPDSTSPTEEAEADAGGTPSRAGPVGTVSWGTGTLVGVFTGLLYGGAKEANANVSKDAEVMLKMGSTTDKREQYRLMRDAMEKRFIRVAKGSLVGGARLGMFTATFFGIQNLLIENRGVHDVFNIVGAGSATAAAFGLILPGSPMWRARNVLVGSALGAGICFPLGWVQLKLAEKANLEIENSKSPSDLQGNQSRVGAAIDRLENSLRK

SEQ ID NO: 65584 - protein, 149 aa, Triticum aestivum
  peptide (1)..(149): Ceres Seq. ID no. 13598615
  misc_feature (1)..(117): Homolog of NCBI NO: 9758300 NR Description: contains similarity to unknown
  misc_feature (1)..(149): Homolog of NCBI NO: 15242587 NR Description: expressed protein [Arabidopsis thaliana]
  misc_feature (1)..(149): Homolog of NCBI NO: 34903198 NR Description: unnamed protein product [Oryza sativa (japonica
MLKMGSTTDKREQYRLMRDAMEKRFIRVAKGSLVGGARLGMFTATFFGIQNLLIENRGVHDVFNIVGAGSATAAAFGLILPGSPMWRARNVLVGSALGAGICFPLGWVQLKLAEKANLEIENSKSPSDLQGNQSRVGAAIDRLENSLRK

SEQ ID NO: 65585 - protein, 146 aa, Triticum aestivum
  peptide (1)..(146): Ceres Seq. ID no. 13598616
  misc_feature (1)..(114): Homolog of NCBI NO: 9758300 NR Description: contains similarity to unknown
  misc_feature (1)..(146): Homolog of NCBI NO: 15242587 NR Description: expressed protein [Arabidopsis thaliana]
  misc_feature (1)..(146): Homolog of NCBI NO: 34903198 NR Description: unnamed protein product [Oryza sativa (japonica
MGSTTDKREQYRLMRDAMEKRFIRVAKGSLVGGARLGMFTATFFGIQNLLIENRGVHDVFNIVGAGSATAAAFGLILPGSPMWRARNVLVGSALGAGICFPLGWVQLKLAEKANLEIENSKSPSDLQGNQSRVGAAIDRLENSLRK

SEQ ID NO: 65586 - DNA, 1325 bp, Triticum aestivum
  misc_feature (1)..(1325): Ceres Seq. ID no. 12625980
ttccattgcttgcttgctcctctgttctcttctccttgcattattatttccctccgtctccttcctcgcatccagccgcaactctccccctcctttgacttgcttccaagaaagccgatcgccatgcgcgtgcagtgcgacgtctgcggcctcgagccggccgccgtgctctgctgcgccgacgaggccgcgctctgctccccctgcaaccgccgcgtccaccgcgccaacaagctcgccggcaagcaccgccgcctcaccctcctccagccctccccggccgccaacgacgccgccgcgccgctctgcgacgtctgcaaggagcggagggggctcgtgttctgcgtggaggaccgggcgatcctgtgcgccgactgcgacgagcccattcacagcgccaacgagctcacggccaagcacagccgcttcctcctcgtcggtgccaagctctccgccgaccccgtggaccaggagatcccctccccggacgggagctccgtcgagcaggacgactgctcggcctcggccgccgaggaagcccctgcagttcatgacgccagccacgccggaggaggaggaggaggaagcagcatctcagactacctcaccaacatctgccccggctggcaagtcgacgaactcctcttcgacgacgccgccttcgtcgccaagcagaaggggcgcgacgagcaggtgccgttcctggacgccgacctgttcgacgtggtcgccgccgagcgtccggggaagcgcggcgcgtgggcgccccacgtgccgcatacgccggttccggcctggggcctgcaggagtttccggccgctttggtggccccggcggcggcggcgaaggccaagcaggggcacgtgcgggagtggtaccacagcgacagcgacagcgacgtgttcgccgtgccggagatcacgtcgccgccggccaagcgggcgcggccgtcgtcgttctggtgcctgtgaaccagctagcgcggcggccaaccacccacgccgccgcagcaaccgggcgagctacgtacccgtgactcgatcgatccatcactagtgtaatctttgctcgttgtagcttggtgtgaccgaagtagtaccgaactctagtagcgcatctatggtagtagagtacgctgttttatgcatataagaatgttgctgtcgtatcataaataagtagcgaacgaatcgtgatctccttcaactcttcaactctatcagacattcagacctgaaaactaaattgcacgcatctccaagcaagtaatgtgtatgggactgcattttcgagagaaaaagtaatgtatgcttctgttctactc

SEQ ID NO: 65587 - protein, 351 aa, Triticum aestivum
  peptide (1)..(351): Ceres Seq. ID no. 12625981
  misc_feature (57)..(241): Pfam Name: Equine herpesvirus glycoprotein gp2 Pfam Description: Equine herpesvirus glycoprotein gp2
  misc_feature (24)..(341): Homolog of NCBI NO: 13592175 NR Description: ppg3 [Leishmania major]
  misc_feature (34)..(252): Homolog of NCBI NO: 5420387 NR Description: proteophosphoglycan [Leishmania major]
  misc_feature (17)..(251): Homolog of NCBI NO: 5420387 NR Description: proteophosphoglycan [Leishmania major]
  misc_feature (24)..(257): Homolog of NCBI NO: 11359723 NR Description: proteophosphoglycan, membrane-associated
  misc_feature (23)..(348): Homolog of NCBI NO: 11360318 NR Description: probable mucin DKFZp434C196.1 - human (fragment)
  misc_feature (17)..(244): Homolog of NCBI NO: 11359723 NR Description: proteophosphoglycan, membrane-associated
  misc_feature (18)..(251): Homolog of NCBI NO: 13592175 NR Description: ppg3 [Leishmania major]
  misc_feature (17)..(351): Homolog of NCBI NO: 13592175 NR Description: ppg3 [Leishmania major]
  misc_feature (17)..(340): Homolog of NCBI NO: 13592175 NR Description: ppg3 [Leishmania major]
  misc_feature (17)..(341): Homolog of NCBI NO: 13592175 NR Description: ppg3 [Leishmania major]
SIACLLLCSLLLALLFPSVSFLASSRNSPPPLTCFQESRSPCACSATSAASSRPPCSAAPTRPRSAPPATAASTAPTSSPASTAASPSSSPPRPPTTPPRRSATSARSGGGSCSAWRTGRSCAPTATSPFTAPTSSRPSTAASSSSVPSSPPTPWTRRSPPRTGAPSSRTTARPRPPRKPLQFMTPATPEEEEEEAASQTTSPTSAPAGKSTNSSSTTPPSSPSRRGATSRCRSWTPTCSTWSPPSVRGSAARGRPTCRIRRFRPGACRSFRPLWWPRRRRRRPSRGTCGSGTTATATATCSPCRRSRRRRPSGRGRRRSGACEPASAAANHPRRRSNRASYVPVTRSIHH

SEQ ID NO: 65588 - protein, 323 aa, Triticum aestivum
  peptide (1)..(323): Ceres Seq. ID no. 12625982
  misc_feature (98)..(145): Pfam Name: B-box zinc finger Pfam Description: B-box zinc finger
  misc_feature (42)..(307): Homolog of NCBI NO: 3618310 NR Description: zinc finger protein [Oryza sativa (japonica
  misc_feature (148)..(215): Homolog of NCBI NO: 7485796 NR Description: hypothetical protein F19H22.170 - Arabidopsis
  misc_feature (42)..(154): Homolog of NCBI NO: 7485796 NR Description: hypothetical protein F19H22.170 - Arabidopsis
  misc_feature (106)..(322): Homolog of NCBI NO: 3618312 NR Description: zinc finger protein [Oryza sativa (japonica
  misc_feature (148)..(215): Homolog of NCBI NO: 26452767 NR Description: putative zinc finger protein [Arabidopsis
  misc_feature (148)..(215): Homolog of NCBI NO: 22329252 NR Description: CONSTANS B-box zinc finger family protein
  misc_feature (42)..(154): Homolog of NCBI NO: 26452767 NR Description: putative zinc finger protein [Arabidopsis
  misc_feature (42)..(154): Homolog of NCBI NO: 22329252 NR Description: CONSTANS B-box zinc finger family protein
  misc_feature (42)..(219): Homolog of NCBI NO: 38344979 NR Description: OSJNBa0011L07.9 [Oryza sativa (japonica
  misc_feature (42)..(223): Homolog of NCBI NO: 3618312 NR Description: zinc finger protein [Oryza sativa (japonica
FHCLLAPLFSSPCIIISLRLLPRIQPQLSPSFDLLPRKPIAMRVQCDVCGLEPAAVLCCADEAALCSPCNRRVHRANKLAGKHRRLTLLQPSPAANDAAAPLCDVCKERRGLVFCVEDRAILCADCDEPIHSANELTAKHSRFLLVGAKLSADPVDQEIPSPDGSSVEQDDCSASAAEEAPAVHDASHAGGGGGGSSISDYLTNICPGWQVDELLFDDAAFVAKQKGRDEQVPFLDADLFDVVAAERPGKRGAWAPHVPHTPVPAWGLQEFPAALVAPAAAAKAKQGHVREWYHSDSDSDVFAVPEITSPPAKRARPSSFWCL

SEQ ID NO: 65589 - protein, 282 aa, Triticum aestivum
  peptide (1)..(282): Ceres Seq. ID no. 12625983
  misc_feature (57)..(104): Pfam Name: B-box zinc finger Pfam Description: B-box zinc finger
  misc_feature (1)..(266): Homolog of NCBI NO: 3618310 NR Description: zinc finger protein [Oryza sativa (japonica
  misc_feature (107)..(174): Homolog of NCBI NO: 7485796 NR Description: hypothetical protein F19H22.170 - Arabidopsis
  misc_feature (1)..(113): Homolog of NCBI NO: 7485796 NR Description: hypothetical protein F19H22.170 - Arabidopsis
  misc_feature (65)..(281): Homolog of NCBI NO: 3618312 NR Description: zinc finger protein [Oryza sativa (japonica
  misc_feature (107)..(174): Homolog of NCBI NO: 26452767 NR Description: putative zinc finger protein [Arabidopsis
  misc_feature (107)..(174): Homolog of NCBI NO: 22329252 NR Description: CONSTANS B-box zinc finger family protein
  misc_feature (1)..(113): Homolog of NCBI NO: 26452767 NR Description: putative zinc finger protein [Arabidopsis
  misc_feature (1)..(113): Homolog of NCBI NO: 22329252 NR Description: CONSTANS B-box zinc finger family protein
  misc_feature (1)..(178): Homolog of NCBI NO: 38344979 NR Description: OSJNBa0011L07.9 [Oryza sativa (japonica
  misc_feature (1)..(182): Homolog of NCBI NO: 3618312 NR Description: zinc finger protein [Oryza sativa (japonica
MRVQCDVCGLEPAAVLCCADEAALCSPCNRRVHRANKLAGKHRRLTLLQPSPAANDAAAPLCDVCKERRGLVFCVEDRAILCADCDEPIHSANELTAKHSRFLLVGAKLSADPVDQEIPSPDGSSVEQDDCSASAAEEAPAVHDASHAGGGGGGSSISDYLTNICPGWQVDELLFDDAAFVAKQKGRDEQVPFLDADLFDVVAAERPGKRGAWAPHVPHTPVPAWGLQEFPAALVAPAAAAKAKQGHVREWYHSDSDSDVFAVPEITSPPAKRARPSSFWCL

SEQ ID NO: 65590 - DNA, 1642 bp, Triticum aestivum
  misc_feature (1)..(1642): Ceres Seq. ID no. 15176783
aacagccaagcttcttctactgctagtctgaaggcagtagttactgctagtatcactatcgtgagttgccgactatttgtcaatggcggccttcgcaaagatcgccatggagtgcgtgcacgatcccctcatctggctacttattgcgtcggtggccttggtcatcctgcgaagacggcggctgaacccgccgctccctccgggccccaagccgctgccgatcatcggcaacatgatgatggcggaccagctgactcaccgtggcctggcggcgctggcgaagcagtacggcgggttgctgcacctccgcctgggctcgctccgcgtcttcgcggtgtcgaccccggagtacgcgcgcgaggtgctccaggcgcaggacggcgacttctggcaccgcccagcctccatcgccgtccgctacctcacctacggctgctccgacatggcgttcgcgcgcgacgggccctactggcgccagatgcgcaagctgtgcgtcacgaggctcttcagccgccggcgcgccgagacgtggctcgccgtgcgcgacgggtacggggagctcgcccgggccgtcggcaggtccggcggcgaggccgtgaacctcggcgagctcatcttcaagcacaccgtgagcgtcatcttccgggccgccttcggcgtccgcgacgtccaaggactggacgagttcatccccatgttcaaggagttctccaagctcttagaagcgttccacgtcggtgacttcttcccttggcttagctggatgggccgacggggcttcgaccgccgcctccgcaccgtgcgcgccgctctcgggacgtttgtggacaagatcattgacgagcacgtgaggaggggcaagaaccccgacgacgccgacgccgacatggtagacggcctactcgcgttactcgctgatgcgaaccaagccagcggggaggacgacctccgcttcacccgcgacaacgtcagggccatgatgatggacatgttgtttggcggaccagacacagtggggttcaccatcgagtgggcgatggcagagatgatccattgccctcacatcctcctgcggctgcagcaggagctcgccgacgttgtggggctcgaccggattgttaccgaatcggacctcggcaagctccccttcctcaagtgcgtcgtcaaggagacgctccgactgcacccgccgatcccgatccacctccacgggacgaccaaagattgcgtcctcggtggctactcggtgcccaggggctcccgtgtcttcatcaacgcgtgggcgatcaaccgcgacggcgaggcgtggaaggaccctgacacgttccggccgtcgaggttcatgccagacggggaagccgccgggctggatctcaagggcggttgctatgagttgttgtcgttcgggtcgggtcgacgctcgtgcccggcacaggggcttggtcagcacgccgtggagttcgccgtcgcgcagcttgtgcatgggttcgactggaagctacccggcgacatgaaaccgacggagctcgacatgagcgacatgaacggtgtcaccgtgtcccgcgccacacggctctacgcggttcccacgccccggctcacttgtcctttgtgatattaattgaaacatcgctcttgttgt

SEQ ID NO: 65591 - protein, 510 aa, Triticum aestivum
  peptide (1)..(510): Ceres Seq. ID no. 15176784
  misc_feature (39)..(498): Pfam Name: Cytochrome P450 Pfam Description: Cytochrome P450
  misc_feature (15)..(510): Homolog of NCBI NO: 5002354 NR Description: ferulate-5-hydroxylase
  misc_feature (19)..(508): Homolog of NCBI NO: 10197654 NR Description: cytochrome p450-dependent monooxygenase [Brassica
  misc_feature (28)..(510): Homolog of NCBI NO: 15234332 NR Description: cytochrome P450 84A1 / ferulate-5-hydroxylase
  misc_feature (28)..(510): Homolog of NCBI NO: 12578893 NR Description: ferulate-5-hydroxylase [Arabidopsis thaliana]
  misc_feature (28)..(510): Homolog of NCBI NO: 12578901 NR Description: ferulate-5-hydroxylase [Arabidopsis thaliana]
  misc_feature (12)..(508): Homolog of NCBI NO: 10197652 NR Description: cytochrome p450-dependent monooxygenase [Brassica
  misc_feature (12)..(508): Homolog of NCBI NO: 10197650 NR Description: cytochrome p450-dependent monooxygenase [Brassica
  misc_feature (19)..(510): Homolog of NCBI NO: 6688937 NR Description: ferulate-5-hydroxylase [Populus balsamifera
  misc_feature (20)..(510): Homolog of NCBI NO: 5731998 NR Description: aldehyde 5-hydroxylase [Liquidambar styraciflua]
  misc_feature (7)..(510): Homolog of NCBI NO: 27476080 NR Description: Hypothetical protein [Oryza sativa (japonica
MAAFAKIAMECVHDPLIWLLIASVALVILRRRRLNPPLPPGPKPLPIIGNMMMADQLTHRGLAALAKQYGGLLHLRLGSLRVFAVSTPEYAREVLQAQDGDFWHRPASIAVRYLTYGCSDMAFARDGPYWRQMRKLCVTRLFSRRRAETWLAVRDGYGELARAVGRSGGEAVNLGELIFKHTVSVIFRAAFGVRDVQGLDEFIPMFKEFSKLLEAFHVGDFFPWLSWMGRRGFDRRLRTVRAALGTFVDKIIDEHVRRGKNPDDADADMVDGLLALLADANQASGEDDLRFTRDNVRAMMMDMLFGGPDTVGFTIEWAMAEMIHCPHILLRLQQELADVVGLDRIVTESDLGKLPFLKCVVKETLRLHPPIPIHLHGTTKDCVLGGYSVPRGSRVFINAWAINRDGEAWKDPDTFRPSRFMPDGEAAGLDLKGGCYELLSFGSGRRSCPAQGLGQHAVEFAVAQLVHGFDWKLPGDMKPTELDMSDMNGVTVSRATRLYAVPTPRLTCPL

SEQ ID NO: 65592 - protein, 502 aa, Triticum aestivum
  peptide (1)..(502): Ceres Seq. ID no. 15176785
  misc_feature (31)..(490): Pfam Name: Cytochrome P450 Pfam Description: Cytochrome P450
  misc_feature (7)..(502): Homolog of NCBI NO: 5002354 NR Description: ferulate-5-hydroxylase
  misc_feature (11)..(500): Homolog of NCBI NO: 10197654 NR Description: cytochrome p450-dependent monooxygenase [Brassica
  misc_feature (20)..(502): Homolog of NCBI NO: 15234332 NR Description: cytochrome P450 84A1 / ferulate-5-hydroxylase
  misc_feature (20)..(502): Homolog of NCBI NO: 12578893 NR Description: ferulate-5-hydroxylase [Arabidopsis thaliana]
  misc_feature (20)..(502): Homolog of NCBI NO: 12578901 NR Description: ferulate-5-hydroxylase [Arabidopsis thaliana]
  misc_feature (4)..(500): Homolog of NCBI NO: 10197652 NR Description: cytochrome p450-dependent monooxygenase [Brassica
  misc_feature (4)..(500): Homolog of NCBI NO: 10197650 NR Description: cytochrome p450-dependent monooxygenase [Brassica
  misc_feature (11)..(502): Homolog of NCBI NO: 6688937 NR Description: ferulate-5-hydroxylase [Populus balsamifera
  misc_feature (12)..(502): Homolog of NCBI NO: 5731998 NR Description: aldehyde 5-hydroxylase [Liquidambar styraciflua]
  misc_feature (1)..(502): Homolog of NCBI NO: 27476080 NR Description: Hypothetical protein [Oryza sativa (japonica
MECVHDPLIWLLIASVALVILRRRRLNPPLPPGPKPLPIIGNMMMADQLTHRGLAALAKQYGGLLHLRLGSLRVFAVSTPEYAREVLQAQDGDFWHRPASIAVRYLTYGCSDMAFARDGPYWRQMRKLCVTRLFSRRRAETWLAVRDGYGELARAVGRSGGEAVNLGELIFKHTVSVIFRAAFGVRDVQGLDEFIPMFKEFSKLLEAFHVGDFFPWLSWMGRRGFDRRLRTVRAALGTFVDKIIDEHVRRGKNPDDADADMVDGLLALLADANQASGEDDLRFTRDNVRAMMMDMLFGGPDTVGFTIEWAMAEMIHCPHILLRLQQELADVVGLDRIVTESDLGKLPFLKCVVKETLRLHPPIPIHLHGTTKDCVLGGYSVPRGSRVFINAWAINRDGEAWKDPDTFRPSRFMPDGEAAGLDLKGGCYELLSFGSGRRSCPAQGLGQHAVEFAVAQLVHGFDWKLPGDMKPTELDMSDMNGVTVSRATRLYAVPTPRLTCPL

SEQ ID NO: 65593 - protein, 460 aa, Triticum aestivum
  peptide (1)..(460): Ceres Seq. ID no. 15176786
  misc_feature (1)..(448): Pfam Name: Cytochrome P450 Pfam Description: Cytochrome P450
  misc_feature (1)..(460): Homolog of NCBI NO: 5002354 NR Description: ferulate-5-hydroxylase
  misc_feature (1)..(458): Homolog of NCBI NO: 10197654 NR Description: cytochrome p450-dependent monooxygenase [Brassica
  misc_feature (1)..(460): Homolog of NCBI NO: 15234332 NR Description: cytochrome P450 84A1 / ferulate-5-hydroxylase
  misc_feature (1)..(460): Homolog of NCBI NO: 12578893 NR Description: ferulate-5-hydroxylase [Arabidopsis thaliana]
  misc_feature (1)..(460): Homolog of NCBI NO: 12578901 NR Description: ferulate-5-hydroxylase [Arabidopsis thaliana]
  misc_feature (1)..(458): Homolog of NCBI NO: 10197652 NR Description: cytochrome p450-dependent monooxygenase [Brassica
  misc_feature (1)..(458): Homolog of NCBI NO: 10197650 NR Description: cytochrome p450-dependent monooxygenase [Brassica
  misc_feature (1)..(460): Homolog of NCBI NO: 6688937 NR Description: ferulate-5-hydroxylase [Populus balsamifera
  misc_feature (1)..(460): Homolog of NCBI NO: 5731998 NR Description: aldehyde 5-hydroxylase [Liquidambar styraciflua]
  misc_feature (1)..(460): Homolog of NCBI NO: 27476080 NR Description: Hypothetical protein [Oryza sativa (japonica
MMMADQLTHRGLAALAKQYGGLLHLRLGSLRVFAVSTPEYAREVLQAQDGDFWHRPASIAVRYLTYGCSDMAFARDGPYWRQMRKLCVTRLFSRRRAETWLAVRDGYGELARAVGRSGGEAVNLGELIFKHTVSVIFRAAFGVRDVQGLDEFIPMFKEFSKLLEAFHVGDFFPWLSWMGRRGFDRRLRTVRAALGTFVDKIIDEHVRRGKNPDDADADMVDGLLALLADANQASGEDDLRFTRDNVRAMMMDMLFGGPDTVGFTIEWAMAEMIHCPHILLRLQQELADVVGLDRIVTESDLGKLPFLKCVVKETLRLHPPIPIHLHGTTKDCVLGGYSVPRGSRVFINAWAINRDGEAWKDPDTFRPSRFMPDGEAAGLDLKGGCYELLSFGSGRRSCPAQGLGQHAVEFAVAQLVHGFDWKLPGDMKPTELDMSDMNGVTVSRATRLYAVPTPRLTCPL

SEQ ID NO: 65594 - DNA, 1270 bp, Triticum aestivum
  misc_feature (1)..(1270): Ceres Seq. ID no. 13656662
ccaaggccaggcgcggcaccgccactcccgcgcctccctcccctatggcacgtcctccctcccaggcctcggctgtcttctccgtcggcggcgagggcgccgcactcttcctctccgtcgccggcgagggcgccgcgccctaaactccgaggctactgagaacttcacagtatataacttgattgggagaggaagctgcggttcagtgtacagagcaaagctaaaccaaaaacagatggttgtggcagtgaaagtttttgaccttgacatgcaaggcgcggataaaagtttcatctcagaatgtaaagcactgagaaacattcggcaccgtaatcttcttccaattctgactgcatgctcaacaattgataaccaaggccgggatttcaaagctctagtctaccagttcatgcccaacggcaacctggacacttggctgcacccggcaggagatggaaaagccccaaagcaactggacctctctcaaagaatgaaaatagctgttgatatagccgatgcattgcaatatatacaccatgactgtgagaatcctattgttcactgtgatttgaagcccagcaatatcctcctagattatgatatgacagctcgtttgggggactttggcatcgcaaggttgtacatcaaatccaaatcagcggcagctggaggttcgagttcaatgggtacaataactctgaggggcacgattggatatattgctccagagtatgcgggaggtggctacctatcgacgtctggagacgcgtacagttttgggatagtgctgctggagatgctgacaggaagaaggccgaccgaccctatgttctgcgaggggcttgacatcgtgaactttgtcaagaggaactttccggatcagatacttgatatccttgacgcttctctccgagaagaatgtcaagactgttctcaggataatctggaaggagaaaacgaagtccaccggtgcctgctgtccttgctgaaagtggcactttcttgcgcaagccaggatcctaacgaacgaatgaacatgagagaagcagctactgaattgcacgcgatcgacacattgtatgtgtcttgaagcggatgctatgtgctagagctgtatcatacatacataccagctgatgtgaagcgtgtaactagagctgtatcgtacgttcgtactatagtggccgtgtagaacttttgtactcgaaaaatttatttgttgggctgtggctttgttcctagcctttgaaatgctcatctttttgcaaag

SEQ ID NO: 65595 - protein, 362 aa, Triticum aestivum
  peptide (1)..(362): Ceres Seq. ID no. 13656663
  misc_feature (50)..(362): Homolog of NCBI NO: 37533650 NR Description: putative Receptor-like protein kinase
  misc_feature (51)..(356): Homolog of NCBI NO: 15232726 NR Description: leucine-rich repeat transmembrane protein kinase,
  misc_feature (51)..(356): Homolog of NCBI NO: 37533018 NR Description: putative receptor protein kinase
  misc_feature (25)..(362): Homolog of NCBI NO: 37575361 NR Description: receptor protein kinase [Triticum turgidum]
  misc_feature (50)..(356): Homolog of NCBI NO: 34914440 NR Description: putative protein kinase Xa21
  misc_feature (27)..(360): Homolog of NCBI NO: 34895894 NR Description: putative protein kinase Xa21
  misc_feature (26)..(361): Homolog of NCBI NO: 34895898 NR Description: putative protein kinase Xa21
  misc_feature (49)..(361): Homolog of NCBI NO: 34895902 NR Description: putative protein kinase Xa21
  misc_feature (27)..(362): Homolog of NCBI NO: 34895882 NR Description: putative protein kinase Xa21
  misc_feature (26)..(362): Homolog of NCBI NO: 34915440 NR Description: putative protein kinase Xa21, receptor type
QGQARHRHSRASLPYGTSSLPGLGCLLRRRRGRRTLPLRRRRGRRALNSEATENFTVYNLIGRGSCGSVYRAKLNQKQMVVAVKVFDLDMQGADKSFISECKALRNIRHRNLLPILTACSTIDNQGRDFKALVYQFMPNGNLDTWLHPAGDGKAPKQLDLSQRMKIAVDIADALQYIHHDCENPIVHCDLKPSNILLDYDMTARLGDFGIARLYIKSKSAAAGGSSSMGTITLRGTIGYIAPEYAGGGYLSTSGDAYSFGIVLLEMLTGRRPTDPMFCEGLDIVNFVKRNFPDQILDILDASLREECQDCSQDNLEGENEVHRCLLSLLKVALSCASQDPNERMNMREAATELHAIDTLYVS

SEQ ID NO: 65596 - protein, 284 aa, Triticum aestivum
  peptide (1)..(284): Ceres Seq. ID no. 13656664
  misc_feature (1)..(284): Homolog of NCBI NO: 37533650 NR Description: putative Receptor-like protein kinase
  misc_feature (1)..(278): Homolog of NCBI NO: 15232726 NR Description: leucine-rich repeat transmembrane protein kinase,
  misc_feature (1)..(278): Homolog of NCBI NO: 37533018 NR Description: putative receptor protein kinase
  misc_feature (1)..(284): Homolog of NCBI NO: 37575361 NR Description: receptor protein kinase [Triticum turgidum]
  misc_feature (1)..(278): Homolog of NCBI NO: 34914440 NR Description: putative protein kinase Xa21
  misc_feature (1)..(282): Homolog of NCBI NO: 34895894 NR Description: putative protein kinase Xa21
  misc_feature (1)..(283): Homolog of NCBI NO: 34895898 NR Description: putative protein kinase Xa21
  misc_feature (1)..(283): Homolog of NCBI NO: 34895902 NR Description: putative protein kinase Xa21
  misc_feature (1)..(284): Homolog of NCBI NO: 34895882 NR Description: putative protein kinase Xa21
  misc_feature (1)..(284): Homolog of NCBI NO: 34915440 NR Description: putative protein kinase Xa21, receptor type
MVVAVKVFDLDMQGADKSFISECKALRNIRHRNLLPILTACSTIDNQGRDFKALVYQFMPNGNLDTWLHPAGDGKAPKQLDLSQRMKIAVDIADALQYIHHDCENPIVHCDLKPSNILLDYDMTARLGDFGIARLYIKSKSAAAGGSSSMGTITLRGTIGYIAPEYAGGGYLSTSGDAYSFGIVLLEMLTGRRPTDPMFCEGLDIVNFVKRNFPDQILDILDASLREECQDCSQDNLEGENEVHRCLLSLLKVALSCASQDPNERMNMREAATELHAIDTLYVS

SEQ ID NO: 65597 - protein, 273 aa, Triticum aestivum
  peptide (1)..(273): Ceres Seq. ID no. 13656665
  misc_feature (1)..(273): Homolog of NCBI NO: 37533650 NR Description: putative Receptor-like protein kinase
  misc_feature (1)..(267): Homolog of NCBI NO: 15232726 NR Description: leucine-rich repeat transmembrane protein kinase,
  misc_feature (1)..(267): Homolog of NCBI NO: 37533018 NR Description: putative receptor protein kinase
  misc_feature (1)..(273): Homolog of NCBI NO: 37575361 NR Description: receptor protein kinase [Triticum turgidum]
  misc_feature (1)..(267): Homolog of NCBI NO: 34914440 NR Description: putative protein kinase Xa21
  misc_feature (1)..(271): Homolog of NCBI NO: 34895894 NR Description: putative protein kinase Xa21
  misc_feature (1)..(272): Homolog of NCBI NO: 34895898 NR Description: putative protein kinase Xa21
  misc_feature (1)..(272): Homolog of NCBI NO: 34895902 NR Description: putative protein kinase Xa21
  misc_feature (1)..(273): Homolog of NCBI NO: 34895882 NR Description: putative protein kinase Xa21
  misc_feature (1)..(273): Homolog of NCBI NO: 34915440 NR Description: putative protein kinase Xa21, receptor type
MQGADKSFISECKALRNIRHRNLLPILTACSTIDNQGRDFKALVYQFMPNGNLDTWLHPAGDGKAPKQLDLSQRMKIAVDIADALQYIHHDCENPIVHCDLKPSNILLDYDMTARLGDFGIARLYIKSKSAAAGGSSSMGTITLRGTIGYIAPEYAGGGYLSTSGDAYSFGIVLLEMLTGRRPTDPMFCEGLDIVNFVKRNFPDQILDILDASLREECQDCSQDNLEGENEVHRCLLSLLKVALSCASQDPNERMNMREAATELHAIDTLYVS

SEQ ID NO: 65598 - DNA, 1024 bp, Triticum aestivum
  misc_feature (1)..(1024): Ceres Seq. ID no. 15179804
agaaccagtaacccgcactgcgcccactccgatctccccagtcccctccaaatccctcgccggaaccctagccccgcgccgccgccatgcctccgcgccgctctaagggaggggccgggggcaagcccgaccccgaagccaccgacgccgagcccgtagacgagaccacggtcgacgccatgtccgaagacgaggccgacgacgacaactccaaggaggagtccgctgagagcggagctgaggatacggacggcgaggactccaaggaggaagccgccgagaccaaggccgagcagatggatgcggagcatcaaagagggaagccgccgagaccaaggccgaggagacggtcgccgaacctgaagccaatggtgcagatgcggagaccaaagtcgaggcggcggatgccaaagtcgaagaggaagccgccgagagcgactctgagcgcgaggcggatgccggggaagccgatccagaagcggaagcagaggaaaccgacggcgagaatgacaagcaagccgctcgggccgacggcgagagtggagaggaagctgctgggtctggtggcgaggatgaagaagaagccgccggcacagacggcgacaacgccgctgatgttggtggcgagaaggtagatgcggattctcaagccgaaggtgagggtactgatgccgagcctgatgctctcgaggaatcccctcctccctcccctccagcccgtagccgccgccgcaagcgagtggtcaaacctgacccgcccactgaggatgacgaggaagaggagacccctctgcccccacgccggcgccgacgtcgcaaagcaggggaacgtggcgactctccaccgccactgccggacaacctccggtgccgcagaagtgatggtaagaagtggcgctgctcagctcgtgcactccccactgtcagcttttgcgagtatcactatgccaaggctagcaagggcaagaaaccgccagccgatggggaggtccttgccgtggctctccaacggcaaaagaagaac

SEQ ID NO: 65599 - protein, 182 aa, Triticum aestivum
  peptide (1)..(182): Ceres Seq. ID no. 15179805
  misc_feature (12)..(74): Pfam Name: S-antigen protein Pfam Description: S-antigen protein
  misc_feature (5)..(76): Homolog of NCBI NO: 9631239 NR Description: orf 48 [Ateline herpesvirus 3]
  misc_feature (6)..(76): Homolog of NCBI NO: 9631239 NR Description: orf 48 [Ateline herpesvirus 3]
  misc_feature (15)..(76): Homolog of NCBI NO: 9631239 NR Description: orf 48 [Ateline herpesvirus 3]
  misc_feature (11)..(79): Homolog of NCBI NO: 23479255 NR Description: hypothetical protein [Plasmodium yoelii yoelii]
  misc_feature (12)..(65): Homolog of NCBI NO: 31207045 NR Description: ENSANGP00000021340 [Anopheles gambiae]
  misc_feature (7)..(74): Homolog of NCBI NO: 9631239 NR Description: orf 48 [Ateline herpesvirus 3]
  misc_feature (1)..(76): Homolog of NCBI NO: 21309834 NR Description: glutamic acid-rich protein cNBL1500 [Trichinella
  misc_feature (1)..(76): Homolog of NCBI NO: 21309836 NR Description: glutamic acid-rich protein cNBL1700 [Trichinella
  misc_feature (15)..(76): Homolog of NCBI NO: 2133786 NR Description: NF-180 - sea lamprey
  misc_feature (13)..(74): Homolog of NCBI NO: 2133786 NR Description: NF-180 - sea lamprey
MPPRRSKGGAGGKPDPEATDAEPVDETTVDAMSEDEADDDNSKEESAESGAEDTDGEDSKEEAAETKAEQMDAEHQRGKPPRPRPRRRSPNLKPMVQMRRPKSRRRMPKSKRKPPRATLSARRMPGKPIQKRKQRKPTARMTSKPLGPTARVERKLLGLVARMKKKPPAQTATTPLMLVARR

SEQ ID NO: 65600 - protein, 151 aa, Triticum aestivum
  peptide (1)..(151): Ceres Seq. ID no. 15179806
  misc_feature (1)..(45): Homolog of NCBI NO: 9631239 NR Description: orf 48 [Ateline herpesvirus 3]
  misc_feature (1)..(45): Homolog of NCBI NO: 9631239 NR Description: orf 48 [Ateline herpesvirus 3]
  misc_feature (1)..(45): Homolog of NCBI NO: 9631239 NR Description: orf 48 [Ateline herpesvirus 3]
  misc_feature (1)..(48): Homolog of NCBI NO: 23479255 NR Description: hypothetical protein [Plasmodium yoelii yoelii]
  misc_feature (1)..(34): Homolog of NCBI NO: 31207045 NR Description: ENSANGP00000021340 [Anopheles gambiae]
  misc_feature (1)..(43): Homolog of NCBI NO: 9631239 NR Description: orf 48 [Ateline herpesvirus 3]
  misc_feature (1)..(45): Homolog of NCBI NO: 21309834 NR Description: glutamic acid-rich protein cNBL1500 [Trichinella
  misc_feature (1)..(45): Homolog of NCBI NO: 21309836 NR Description: glutamic acid-rich protein cNBL1700 [Trichinella
  misc_feature (1)..(45): Homolog of NCBI NO: 2133786 NR Description: NF-180 - sea lamprey
  misc_feature (1)..(43): Homolog of NCBI NO: 2133786 NR Description: NF-180 - sea lamprey
MSEDEADDDNSKEESAESGAEDTDGEDSKEEAAETKAEQMDAEHQRGKPPRPRPRRRSPNLKPMVQMRRPKSRRRMPKSKRKPPRATLSARRMPGKPIQKRKQRKPTARMTSKPLGPTARVERKLLGLVARMKKKPPAQTATTPLMLVARR

SEQ ID NO: 65601 - protein, 129 aa, Triticum aestivum
  peptide (1)..(129): Ceres Seq. ID no. 15179807
MRILKPKVRVLMPSLMLSRNPLLPPLQPVAAAASEWSNLTRPLRMTRKRRPLCPHAGADVAKQGNVATLHRHCRTTSGAAEVMVRSGAAQLVHSPLSAFASITMPRLARARNRQPMGRSLPWLSNGKRR

SEQ ID NO: 65602 - DNA, 713 bp, Triticum aestivum
  misc_feature (1)..(713): Ceres Seq. ID no. 12618682
ctctctctcgtttatctctctgttcgatccagatcgagatggtcggcgcccgcaaccacctcgcttggcctcgccggccaccacctcgccgccggtcatccactttccccttcggctcgccgttaccggacccggcaccgtcgcccccacaggcccgctggcgcacgccacctcgtcgccttcgccctttgccccgggcgccgttggccccatcgcctcgggcccacgccggcctctacttcgcccatggcgtcgccggccacgtctcccttcgcccacctctgcttcgcccatggcgccgccagctctgtcgccccccgccgacctctgcttcgcccatggcgcagctggccccgtcgccccccgccagcctctgcttcgcccatggcaccgccggccccgtcgccccctccggcttctgccggccccggccacgtcgccctcgcgtgcctccgctaccctcgacgctgcaccgcctcacacctcgaggagcggcagcagctcctcgggcatcagtgtgctgcggaagggggagggagagtggtgcggctgctccggcgagcacgggcacagggggtggttgcaggttggcgcaggcgtgcagatcgagctcaatatggatgcgcatgctggatcttgggctgctatactctttgtaatattttcatgtgtaatccgttcatctaattaatagagcagttttgccttggatc

SEQ ID NO: 65603 - protein, 229 aa, Triticum aestivum
  peptide (1)..(229): Ceres Seq. ID no. 12618683
  misc_feature (50)..(166): Pfam Name: Herpesvirus glycoprotein D Pfam Description: Herpesvirus glycoprotein D
SLSFISLFDPDRDGRRPQPPRLASPATTSPPVIHFPLRLAVTGPGTVAPTGPLAHATSSPSPFAPGAVGPIASGPRRPLLRPWRRRPRLPSPTSASPMAPPALSPPADLCFAHGAAGPVAPRQPLLRPWHRRPRRPLRLLPAPATSPSRASATLDAAPPHTSRSGSSSSGISVLRKGEGEWCGCSGEHGHRGWLQVGAGVQIELNMDAHAGSWAAILFVIFSCVIRSSN

SEQ ID NO: 65604 - protein, 228 aa, Triticum aestivum
  peptide (1)..(228): Ceres Seq. ID no. 12618684
  misc_feature (65)..(196): Pfam Name: Ribonuclease (pollen allergen) Pfam Description: Ribonuclease (pollen allergen)
LSLVYLSVRSRSRWSAPATTSLGLAGHHLAAGHPLSPSARRYRTRHRRPHRPAGARHLVAFALCPGRRWPHRLGPTPASTSPMASPATSPFAHLCFAHGAASSVAPRRPLLRPWRSWPRRPPPASASPMAPPAPSPPPASAGPGHVALACLRYPRRCTASHLEERQQLLGHQCAAEGGGRVVRLLRRARAQGVVAGWRRRADRAQYGCACWILGCYTLCNIFMCNPFI

SEQ ID NO: 65605 - protein, 218 aa, Triticum aestivum
  peptide (1)..(218): Ceres Seq. ID no. 12618685
LSRLSLCSIQIEMVGARNHLAWPRRPPPRRRSSTFPFGSPLPDPAPSPPQARWRTPPRRLRPLPRAPLAPSPRAHAGLYFAHGVAGHVSLRPPLLRPWRRQLCRPPPTSASPMAQLAPSPPASLCFAHGTAGPVAPSGFCRPRPRRPRVPPLPSTLHRLTPRGAAAAPRASVCCGRGRESGAAAPASTGTGGGCRLAQACRSSSIWMRMLDLGLLYSL

SEQ ID NO: 65606 - protein, 132 aa, Triticum aestivum
  peptide (1)..(132): Ceres Seq. ID no. 12618686
  misc_feature (1)..(69): Pfam Name: Herpesvirus glycoprotein D Pfam Description: Herpesvirus glycoprotein D
MAPPALSPPADLCFAHGAAGPVAPRQPLLRPWHRRPRRPLRLLPAPATSPSRASATLDAAPPHTSRSGSSSSGISVLRKGEGEWCGCSGEHGHRGWLQVGAGVQIELNMDAHAGSWAAILFVIFSCVIRSSN

SEQ ID NO: 65607 - DNA, 818 bp, Triticum aestivum
  misc_feature (1)..(818): Ceres Seq. ID no. 12625567
agttgcttcatcgtgacgagcagcccggacagcaattagggcaatcaatcagtccatttctttccctctccctccagcagctcggctctctctggtctctgcccgccatggcggccaagctgacccaggagcaggcggacgagtgcaaggaggtgttcgacctgttcgacggcgacgaggacggccgcatcgccgccggcgagctggtcacggcgctccactcgctgggccagaacgtggacgaggccgaggcgcggggcttcctcgaggacgccggcgcgggcggcgccggcgccgtcgccatcgacctccccacgttcctggccgtggccgcgcgcaaggccaacgccggcgtatcggccaagggactggcccagtgcctcgacgcgttcgacgacgacgggagcggcgtcatccccgcggagcagctgcggcaggtgatgctcacccacggcgaccggctcacggaggaggaggccgacgagctggtccgcaaggccgacccccgcggcgagggccgcgtccagtgcaaggagctcgtcaaggtgctcatgaacaacaagtgatcggcgagcttctctgatctgatgcgtcgatcgatcggccgatctggggaccggtgaagtgttgtcctccggtgaggaaatggtgccatgtttcttgatttggtgatgtactcctactggttttgctgtaatattggattggatgcgaatgctctgcatacgcgaagtcctggctgcaatatgtatgctgcgtttgtttcgttgtatgtatgtattgtatgcatacacaaattgctttaacgacgattttgc

SEQ ID NO: 65608 - protein, 187 aa, Triticum aestivum
  peptide (1)..(187): Ceres Seq. ID no. 12625568
  misc_feature (36)..(184): Homolog of NCBI NO: 4959625 NR Description: calmodulin mutant SYNCAM13 [synthetic construct]
  misc_feature (36)..(184): Homolog of NCBI NO: 4959142 NR Description: calmodulin mutant SYNCAM2 [synthetic construct]
  misc_feature (36)..(184): Homolog of NCBI NO: 1085679 NR Description: calmodulin - Macrocystis pyrifera
  misc_feature (36)..(185): Homolog of NCBI NO: 115519 NR Description: Calmodulin (CaM)
  misc_feature (36)..(184): Homolog of NCBI NO: 4959590 NR Description: calmodulin mutant SYNCAM3 [synthetic construct]
  misc_feature (36)..(184): Homolog of NCBI NO: 4959602 NR Description: calmodulin mutant SYNCAM8 [synthetic construct]
  misc_feature (36)..(184): Homolog of NCBI NO: 4959618 NR Description: calmodulin mutant SYNCAM45 [synthetic construct]
  misc_feature (36)..(184): Homolog of NCBI NO: 4959151 NR Description: calmodulin mutant SYNCAM48 [synthetic construct]
  misc_feature (36)..(184): Homolog of NCBI NO: 4959149 NR Description: calmodulin mutant SYNCAM46 [synthetic construct]
  misc_feature (36)..(184): Homolog of NCBI NO: 4959593 NR Description: calmodulin mutant SYNCAM5 [synthetic construct]
LLHRDEQPGQQLGQSISPFLSLSLQQLGSLWSLPAMAAKLTQEQADECKEVFDLFDGDEDGRIAAGELVTALHSLGQNVDEAEARGFLEDAGAGGAGAVAIDLPTFLAVAARKANAGVSAKGLAQCLDAFDDDGSGVIPAEQLRQVMLTHGDRLTEEEADELVRKADPRGEGRVQCKELVKVLMNNK

SEQ ID NO: 65609 - protein, 152 aa, Triticum aestivum
  peptide (1)..(152): Ceres Seq. ID no. 12625569
  misc_feature (1)..(149): Homolog of NCBI NO: 4959625 NR Description: calmodulin mutant SYNCAM13 [synthetic construct]
  misc_feature (1)..(149): Homolog of NCBI NO: 4959142 NR Description: calmodulin mutant SYNCAM2 [synthetic construct]
  misc_feature (1)..(149): Homolog of NCBI NO: 1085679 NR Description: calmodulin - Macrocystis pyrifera
  misc_feature (1)..(150): Homolog of NCBI NO: 115519 NR Description: Calmodulin (CaM)
  misc_feature (1)..(149): Homolog of NCBI NO: 4959590 NR Description: calmodulin mutant SYNCAM3 [synthetic construct]
  misc_feature (1)..(149): Homolog of NCBI NO: 4959618 NR Description: calmodulin mutant SYNCAM45 [synthetic construct]
  misc_feature (1)..(149): Homolog of NCBI NO: 4959602 NR Description: calmodulin mutant SYNCAM8 [synthetic construct]
  misc_feature (1)..(149): Homolog of NCBI NO: 4959151 NR Description: calmodulin mutant SYNCAM48 [synthetic construct]
  misc_feature (1)..(149): Homolog of NCBI NO: 4959149 NR Description: calmodulin mutant SYNCAM46 [synthetic construct]
  misc_feature (1)..(149): Homolog of NCBI NO: 4959593 NR Description: calmodulin mutant SYNCAM5 [synthetic construct]
MAAKLTQEQADECKEVFDLFDGDEDGRIAAGELVTALHSLGQNVDEAEARGFLEDAGAGGAGAVAIDLPTFLAVAARKANAGVSAKGLAQCLDAFDDDGSGVIPAEQLRQVMLTHGDRLTEEEADELVRKADPRGEGRVQCKELVKVLMNNK

SEQ ID NO: 65610 - DNA, 723 bp, Triticum aestivum
  misc_feature (1)..(723): Ceres Seq. ID no. 13597990
caaggaaatctcttcatgtcatccgcgatggctggaagtccacaacatggagcatggcaatacccgttggtttgcaggagcgctggaaccgtgactgtgtatttgatgttaaagacatcagcttggagccatgcctttctgatcgcatggctatgctgagcagcaagaccatgaaggaacttcaagtgggacaccccatcctaagcatggatgatgacatcgtttacttgctttctgaaaccacacccaagcacatggacaagttggcactgatgtttgctattgatgtgaagaagtcaacactgcgaggattggctgagcttgatgtcaagaagttcgattacctgtccagcttctgcactagtgagatctgcaggggtacctgagcaatattaaggtaacttctttatgctggtagaagcgagctctatcgaataaacaaactgaagagggtaaaccatctgaggttcctgcgaagaactggctaggacaaagaaatttcaaccatgtttgttgaaacttgggagctggatgtgaccttggagattgaatttctttagttgatttatcatgtattacatgtaatgcaactatctgggttatattgcttgcttatgtacttgtcccggtcaaaaaaaagtgctagtgaacttgtgtgggctaaatgtcttggttgaaccatgtttttatgtgttttgatttggttttaattgttctgtatgc

SEQ ID NO: 65611 - protein, 127 aa, Triticum aestivum
  peptide (1)..(127): Ceres Seq. ID no. 13597991
  misc_feature (11)..(54): Homolog of NCBI NO: 18855020 NR Description: unknown protein [Oryza sativa]
  misc_feature (53)..(119): Homolog of NCBI NO: 18855020 NR Description: unknown protein [Oryza sativa]
  misc_feature (1)..(125): Homolog of NCBI NO: 34910024 NR Description: P0413G02.13 [Oryza sativa (japonica
RKSLHVIRDGWKSTTWSMAIPVGLQERWNRDCVFDVKDISLEPCLSDRMAMLSSKTMKELQVGHPILSMDDDIVYLLSETTPKHMDKLALMFAIDVKKSTLRGLAELDVKKFDYLSSFCTSEICRGT

SEQ ID NO: 65612 - protein, 110 aa, Triticum aestivum
  peptide (1)..(110): Ceres Seq. ID no. 13597992
  misc_feature (1)..(37): Homolog of NCBI NO: 18855020 NR Description: unknown protein [Oryza sativa]
  misc_feature (36)..(102): Homolog of NCBI NO: 18855020 NR Description: unknown protein [Oryza sativa]
  misc_feature (1)..(108): Homolog of NCBI NO: 34910024 NR Description: P0413G02.13 [Oryza sativa (japonica
MAIPVGLQERWNRDCVFDVKDISLEPCLSDRMAMLSSKTMKELQVGHPILSMDDDIVYLLSETTPKHMDKLALMFAIDVKKSTLRGLAELDVKKFDYLSSFCTSEICRGT

SEQ ID NO: 65613 - protein, 79 aa, Triticum aestivum
  peptide (1)..(79): Ceres Seq. ID no. 13597993
  misc_feature (5)..(71): Homolog of NCBI NO: 18855020 NR Description: unknown protein [Oryza sativa]
  misc_feature (1)..(77): Homolog of NCBI NO: 34910024 NR Description: P0413G02.13 [Oryza sativa (japonica
MAMLSSKTMKELQVGHPILSMDDDIVYLLSETTPKHMDKLALMFAIDVKKSTLRGLAELDVKKFDYLSSFCTSEICRGT

SEQ ID NO: 65614 - DNA, 612 bp, Triticum aestivum
  misc_feature (1)..(612): Ceres Seq. ID no. 13657000
attgctttctgtaatctcaaaatcgattaaccgtatccgtctccacctttaagctttccaatggcggaaccctaagctaattccacgcctcccacctcgcgcagcgcgcatggaccagccggcgtcggacgccggcggctttctcgaggtccgcctcttctacgtgcgcctatcgccccgcggctccggagctgccgccccgccacggctctcgctggccatccaccacgccggggccgaggcctccccctcctcgctccctctccgcctcgaccgccgcgacccagtctctggcgaggccacctacgtctccaccgcggccgcgcgcctccccccacccgacgcctccttcgaggttgcagaccaccgcgacgccgccctcctccgaggcacccttcgacggtgccctgacgccaaggccgattcccctgcctgggcgatcgactgcgtccccgccgatgcagcggtggcctcagcctcggcctttgaggtctatgttgccgggtactgtgcaggcgaacccgccgttctcacgcgagccctgcggctggccaccccggaagaggctgctggcgggttggttcgccggcgatgtttaaacacaataaagtg

SEQ ID NO: 65615 - protein, 167 aa, Triticum aestivum
  peptide (1)..(167): Ceres Seq. ID no. 13657001
  misc_feature (4)..(161): Homolog of NCBI NO: 28812134 NR Description: P0443G08.30 [Oryza sativa (japonica
MDQPASDAGGFLEVRLFYVRLSPRGSGAAAPPRLSLAIHHAGAEASPSSLPLRLDRRDPVSGEATYVSTAAARLPPPDASFEVADHRDAALLRGTLRRCPDAKADSPAWAIDCVPADAAVASASAFEVYVAGYCAGEPAVLTRALRLATPEEAAGGLVRRRCLNTIK

SEQ ID NO: 65616 - DNA, 644 bp, Triticum aestivum
  misc_feature (1)..(644): Ceres Seq. ID no. 13656267
ttcacacatgggtgcttatagttatttttgttttatgtatttttatcaacccttctcatagatgaatctgtaatatcttatggtggtcagttataggatttggataattatctgcatttgcctatctgggatgtgatgctagaatatatattatgctaagtctgatttaacaatgtttaagatcttggaggcagccgacaccatgttctatctcctgggatcatgctaatgcttaaatgaactgcagtagaatagcggaagttgaagcaagtaaagaaaaaatcatgctaatgcttatagattctagaaacagtaacgtgatgaaatatgcaccttagtagtcttcacctttcttgttaactactactttcttctttggtctgtgctaattatttactttttggaaaatctttgccatgtttcatcttgctcttctcaacttattacagttggatgatggcttggagttctccttcactgataagaggcgttttgcaaaaatacgattgcttgacaatccagaagctgtccctccaatttctgaacttggaccagatgccctatgcgaaccaatgcagcttgatgattttgtacaatcttttggtagaaagaatgctccaataaatgtttaaacacaataaagt

SEQ ID NO: 65617 - protein, 71 aa, Triticum aestivum
  peptide (1)..(71): Ceres Seq. ID no. 13656268
  misc_feature (10)..(69): Homolog of NCBI NO: 18404050 NR Description: mutM homologue-1 [Arabidopsis thaliana]
  misc_feature (10)..(69): Homolog of NCBI NO: 11358645 NR Description: probable formamidopyrimidine-DNA glycosylase 1
  misc_feature (10)..(69): Homolog of NCBI NO: 30695252 NR Description: mutM homologue-1 [Arabidopsis thaliana]
  misc_feature (11)..(69): Homolog of NCBI NO: 34015259 NR Description: putative glycosylase [Oryza sativa (japonica
  misc_feature (12)..(69): Homolog of NCBI NO: 35215102 NR Description: formamidopyrimidine-DNA glycosylase-like
MFHLALLNLLQLDDGLEFSFTDKRRFAKIRLLDNPEAVPPISELGPDALCEPMQLDDFVQSFGRKNAPINV

SEQ ID NO: 65618 - protein, 56 aa, Triticum aestivum
  peptide (1)..(56): Ceres Seq. ID no. 13656269
MMAWSSPSLIRGVLQKYDCLTIQKLSLQFLNLDQMPYANQCSLMILYNLLVERMLQ

SEQ ID NO: 65619 - protein, 55 aa, Triticum aestivum
  peptide (1)..(55): Ceres Seq. ID no. 13656270
MAWSSPSLIRGVLQKYDCLTIQKLSLQFLNLDQMPYANQCSLMILYNLLVERMLQ

SEQ ID NO: 65620 - DNA, 1533 bp, Triticum aestivum
  misc_feature (1)..(1533): Ceres Seq. ID no. 13656285
aacacacaacatccatcccccgcccggccgcgctcaatccccacccccactgtttccaggtccgattttctgccccggatccttgctcagttgctccgtcgatcaccatgaagatgccaagttcatcgtgctgagagcgggacgctgacaggtggtgggcgtggtgagcgcgctgcgggaggccaagttcgtcccgcagatcgtcagcgtcggaccggatcaggccgagaagaaacctgaccgcatcgcctccgtctggcagcccgacgggtctactctattgttctggttgcagagagatcgacatggatctgctgctaccgccgatcagtgcttctcttggtgccatgggctcccttgcacacaagctggatgcgctcctcgatacagaacacaaggatgagatggggaaactcggaacccggctgctggagctctccaaggcacgagaccctcccgttacagcgaggatctggatgaaggatgtgcgtgaactatcctatgatatggagaactttgtcgacactgaagaagattggatccacaacatgtcaccattcatgggccgtgtgaaggaagcaaatgcacggtacgagaggtacaggcttgagagcatccccagccacacagatgtctttccaatcatccaccaccgtggccgggagacaggtctagtcgtcggccttcatgacaagggtggcccggttgataggctctgccaattgctgaccgatggagatgagcagctcaaggtgttatccattgtcggtgttggagggatcgggaagaccacgcttgccaaacagctatggcgtgagcacaaactcagggactacttccactgccgggcttttgtccggacggccaagaaaccagacatgaggaggatcctaaggagcatactcgcacaagttcgtccgcaccaaccacctgatgctagcgaggtggacgacctcattcacgatctcaccgagcatctacaggataaaaggagaagtgatggcaagaaacaagcaagtgtggagctaccgaatgacccgcgatcatcggtgcaggtgatcgtaatcaagatagtggacattacagacaagcggtggaagtccagtgccttcaaagtcctttcgaagctccataggaccaattcggtagcggcaaacgaggaggaggggacgctaactgtggtgggggacctggacccggtggtcgtagtgctggcattacagaaggccaaactcaatgtgcagatcgtcagaacggggttgatgaacaaacccgagggacgcaaaatgcctggacgtaacccgcccgagggacaacagaagcctgaatctaacccaccccagctgccgcacagtctcatcaccccgtactcccctccctaccggccacccccctaccgtcaacaccgccacgaggtccaccagtcccgggaggaccccaactcatgtgtcatccagtgatttttttgcaggggtattgtggattgtattcatcwtaaayaatgttagagcatctactgggaggggggaaagg

SEQ ID NO: 65621 - protein, 384 aa, Triticum aestivum
  peptide (1)..(384): Ceres Seq. ID no. 15219816
  misc_feature (134)..(229): Pfam Name: NB-ARC domain Pfam Description: NB-ARC domain
  misc_feature (74)..(230): Homolog of NCBI NO: 4680207 NR Description: disease resistance protein RPM1 homolog [Sorghum
  misc_feature (155)..(229): Homolog of NCBI NO: 28555875 NR Description: NBS-LRR disease resistance protein homologue
  misc_feature (47)..(73): Homolog of NCBI NO: 28629809 NR Description: pi-ta protein [Oryza sativa (japonica
  misc_feature (47)..(73): Homolog of NCBI NO: 12642090 NR Description: Pi-ta protein [Oryza sativa]
  misc_feature (134)..(229): Homolog of NCBI NO: 28629809 NR Description: pi-ta protein [Oryza sativa (japonica
  misc_feature (134)..(229): Homolog of NCBI NO: 12642090 NR Description: Pi-ta protein [Oryza sativa]
  misc_feature (4)..(73): Homolog of NCBI NO: 37533576 NR Description: putative disease resistance protein
  misc_feature (82)..(229): Homolog of NCBI NO: 37533576 NR Description: putative disease resistance protein
  misc_feature (1)..(72): Homolog of NCBI NO: 20513858 NR Description: RGH2B [Hordeum vulgare]
  misc_feature (54)..(228): Homolog of NCBI NO: 20513858 NR Description: RGH2B [Hordeum vulgare]
MDLLLPPISASLGAMGSLAHKLDALLDTEHKDEMGKLGTRLLELSKARDPPVTARIWMKDVRELSYDMENFVDTEEDWIHNMSPFMGRVKEANARYERYRLESIPSHTDVFPIIHHRGRETGLVVGLHDKGGPVDRLCQLLTDGDEQLKVLSIVGVGGIGKTTLAKQLWREHKLRDYFHCRAFVRTAKKPDMRRILRSILAQVRPHQPPDASEVDDLIHDLTEHLQDKRRSDGKKQASVELPNDPRSSVQVIVIKIVDITDKRWKSSAFKVLSKLHRTNSVAANEEEGTLTVVGDLDPVVVVLALQKAKLNVQIVRTGLMNKPEGRKMPGRNPPEGQQKPESNPPQLPHSLITPYSPPYRPPPYRQHRHEVHQSREDPNSCVIQ

SEQ ID NO: 65622 - protein, 370 aa, Triticum aestivum
  peptide (1)..(370): Ceres Seq. ID no. 15219817
  misc_feature (120)..(215): Pfam Name: NB-ARC domain Pfam Description: NB-ARC domain
  misc_feature (60)..(216): Homolog of NCBI NO: 4680207 NR Description: disease resistance protein RPM1 homolog [Sorghum
  misc_feature (141)..(215): Homolog of NCBI NO: 28555875 NR Description: NBS-LRR disease resistance protein homologue
  misc_feature (33)..(59): Homolog of NCBI NO: 28629809 NR Description: pi-ta protein [Oryza sativa (japonica
  misc_feature (33)..(59): Homolog of NCBI NO: 12642090 NR Description: Pi-ta protein [Oryza sativa]
  misc_feature (120)..(215): Homolog of NCBI NO: 28629809 NR Description: pi-ta protein [Oryza sativa (japonica
  misc_feature (120)..(215): Homolog of NCBI NO: 12642090 NR Description: Pi-ta protein [Oryza sativa]
  misc_feature (1)..(59): Homolog of NCBI NO: 37533576 NR Description: putative disease resistance protein
  misc_feature (68)..(215): Homolog of NCBI NO: 37533576 NR Description: putative disease resistance protein
  misc_feature (1)..(58): Homolog of NCBI NO: 20513858 NR Description: RGH2B [Hordeum vulgare]
  misc_feature (40)..(214): Homolog of NCBI NO: 20513858 NR Description: RGH2B [Hordeum vulgare]
MGSLAHKLDALLDTEHKDEMGKLGTRLLELSKARDPPVTARIWMKDVRELSYDMENFVDTEEDWIHNMSPFMGRVKEANARYERYRLESIPSHTDVFPIIHHRGRETGLVVGLHDKGGPVDRLCQLLTDGDEQLKVLSIVGVGGIGKTTLAKQLWREHKLRDYFHCRAFVRTAKKPDMRRILRSILAQVRPHQPPDASEVDDLIHDLTEHLQDKRRSDGKKQASVELPNDPRSSVQVIVIKIVDITDKRWKSSAFKVLSKLHRTNSVAANEEEGTLTVVGDLDPVVVVLALQKAKLNVQIVRTGLMNKPEGRKMPGRNPPEGQQKPESNPPQLPHSLITPYSPPYRPPPYRQHRHEVHQSREDPNSCVIQ

SEQ ID NO: 65623 - protein, 351 aa, Triticum aestivum
  peptide (1)..(351): Ceres Seq. ID no. 15219818
  misc_feature (101)..(196): Pfam Name: NB-ARC domain Pfam Description: NB-ARC domain
  misc_feature (41)..(197): Homolog of NCBI NO: 4680207 NR Description: disease resistance protein RPM1 homolog [Sorghum
  misc_feature (122)..(196): Homolog of NCBI NO: 28555875 NR Description: NBS-LRR disease resistance protein homologue
  misc_feature (14)..(40): Homolog of NCBI NO: 28629809 NR Description: pi-ta protein [Oryza sativa (japonica
  misc_feature (14)..(40): Homolog of NCBI NO: 12642090 NR Description: Pi-ta protein [Oryza sativa]
  misc_feature (101)..(196): Homolog of NCBI NO: 28629809 NR Description: pi-ta protein [Oryza sativa (japonica
  misc_feature (101)..(196): Homolog of NCBI NO: 12642090 NR Description: Pi-ta protein [Oryza sativa]
  misc_feature (1)..(40): Homolog of NCBI NO: 37533576 NR Description: putative disease resistance protein
  misc_feature (49)..(196): Homolog of NCBI NO: 37533576 NR Description: putative disease resistance protein
  misc_feature (1)..(39): Homolog of NCBI NO: 20513858 NR Description: RGH2B [Hordeum vulgare]
  misc_feature (21)..(195): Homolog of NCBI NO: 20513858 NR Description: RGH2B [Hordeum vulgare]
MGKLGTRLLELSKARDPPVTARIWMKDVRELSYDMENFVDTEEDWIHNMSPFMGRVKEANARYERYRLESIPSHTDVFPIIHHRGRETGLVVGLHDKGGPVDRLCQLLTDGDEQLKVLSIVGVGGIGKTTLAKQLWREHKLRDYFHCRAFVRTAKKPDMRRILRSILAQVRPHQPPDASEVDDLIHDLTEHLQDKRRSDGKKQASVELPNDPRSSVQVIVIKIVDITDKRWKSSAFKVLSKLHRTNSVAANEEEGTLTVVGDLDPVVVVLALQKAKLNVQIVRTGLMNKPEGRKMPGRNPPEGQQKPESNPPQLPHSLITPYSPPYRPPPYRQHRHEVHQSREDPNSCVIQ

SEQ ID NO: 65624 - DNA, 1545 bp, Triticum aestivum
  misc_feature (1)..(1545): Ceres Seq. ID no. 12780574
cactccagcatccagacccgagccattccccgagcagccaagccacacgcacacgcacgcgcacccgcacggaaaccctagctcccgcggcgcacctaccgcaggcgtacagtcagtcggtcggccgcgagagtctgccggcggatggtgtcgatgagcacgacgcccaagccgctcgaggccggggcggcggcggccgccgtggggggaggcggaggggacggagggggagggggaggcgggaaggggaaggagcagcagcaggtggtgccggtggccgcggggccgccgatggccgtgccggcggacgcggcggcggcggcggaggacgccaggatgaaggtcaggaagccctacaccatcaccaagtcccgggagagctggaccgagcccgagcacgacaagttcctcgaggccctgcagctgtttgatcgtgattggaaaaagatagaagcatttgttggctcaaaaactgtgatacagataaggagccatgcacagaagtactttttgaaggttcaaaagaacggtacaggcgaacatttaccaccgcctcggccgaagcgtaaagcagcacatccatatccgcagaaggcctctaaaactgcccctgtagcaccccaagctgttttatcacaacaacctgctcctcctccccctcctccgagggagcaagatggtgttgatgtgtctatggatgcatctatggttgtaccaaacacaaatgcaaatgcggtggtgccttcctgggacaatgctcttgttcaacctacacaagttacaagtgccattgccacaaataactgctctagtagtatagagagccaatctggaacatggccaacctctgaagcagttgaacaagaaaatgtgctgccacaaatgcgggctatgccagatttttcacaagtatacaacttcctgggaagtgtattcgatccagatacaactggacatttgcagaggttaaaggcaatggatcctattgatgtggaaacggtactactgctcatgcgaaatctatcggtgaacttgattaacccagaatttgaggcccataggcagttgctctcgtcgtatggttctggtggagacgaaaataaacctgaaggcatggaaaatttcgggtcccagagtagccatctcccatccatggtaacgagtgagtgagcgaacatcagccattcaccatggcagcttcagttgtttccgagagacgcttgtgttctccttgtattggtcctgtcggcgtctagtctggctatttatgaatgttggttggggcagtgacatttgtacagcttccgaaatggtgctctaaccctaggctagggttgcttaccaagttggtgtagatagccagttttgcgtgctcaagcaattcttttccctagggcggggcatagctcaagatggttcttgtatgtatacaccgataagtatgtgcttgtggatgtacatatgtgttattgtgtaaacgtttgagatactgcgagtatcctatcaaggcaaataataagctgaataataaatccagcttggcgt

SEQ ID NO: 65625 - protein, 341 aa, Triticum aestivum
  peptide (1)..(341): Ceres Seq. ID no. 12780575
  misc_feature (77)..(122): Pfam Name: Myb-like DNA-binding domain Pfam Description: Myb-like DNA-binding domain
  misc_feature (236)..(341): Homolog of NCBI NO: 27125815 NR Description: MYB29 protein [Oryza sativa (japonica
  misc_feature (60)..(314): Homolog of NCBI NO: 15234118 NR Description: myb family transcription factor; protein id:
  misc_feature (40)..(315): Homolog of NCBI NO: 14596213 NR Description: putative protein [Arabidopsis thaliana]
  misc_feature (40)..(315): Homolog of NCBI NO: 18414039 NR Description: myb family transcription factor
  misc_feature (61)..(314): Homolog of NCBI NO: 25517982 NR Description: F22L4.6 protein - Arabidopsis thaliana
  misc_feature (61)..(314): Homolog of NCBI NO: 15223419 NR Description: myb family transcription factor; protein id:
  misc_feature (43)..(312): Homolog of NCBI NO: 30680926 NR Description: myb family transcription factor [Arabidopsis
  misc_feature (52)..(309): Homolog of NCBI NO: 8953721 NR Description: contains similarity to MYB-related DNA-binding
  misc_feature (52)..(326): Homolog of NCBI NO: 30696221 NR Description: myb family transcription factor [Arabidopsis
  misc_feature (52)..(326): Homolog of NCBI NO: 30696225 NR Description: myb family transcription factor [Arabidopsis
MVSMSTTPKPLEAGAAAAAVGGGGGDGGGGGGGKGKEQQQVVPVAAGPPMAVPADAAAAAEDARMKVRKPYTITKSRESWTEPEHDKFLEALQLFDRDWKKIEAFVGSKTVIQIRSHAQKYFLKVQKNGTGEHLPPPRPKRKAAHPYPQKASKTAPVAPQAVLSQQPAPPPPPPREQDGVDVSMDASMVVPNTNANAVVPSWDNALVQPTQVTSAIATNNCSSSIESQSGTWPTSEAVEQENVLPQMRAMPDFSQVYNFLGSVFDPDTTGHLQRLKAMDPIDVETVLLLMRNLSVNLINPEFEAHRQLLSSYGSGGDENKPEGMENFGSQSSHLPSMVTSE

SEQ ID NO: 65626 - protein, 338 aa, Triticum aestivum
  peptide (1)..(338): Ceres Seq. ID no. 12780576
  misc_feature (74)..(119): Pfam Name: Myb-like DNA-binding domain Pfam Description: Myb-like DNA-binding domain
  misc_feature (233)..(338): Homolog of NCBI NO: 27125815 NR Description: MYB29 protein [Oryza sativa (japonica
  misc_feature (57)..(311): Homolog of NCBI NO: 15234118 NR Description: myb family transcription factor; protein id:
  misc_feature (37)..(312): Homolog of NCBI NO: 14596213 NR Description: putative protein [Arabidopsis thaliana]
  misc_feature (37)..(312): Homolog of NCBI NO: 18414039 NR Description: myb family transcription factor
  misc_feature (58)..(311): Homolog of NCBI NO: 25517982 NR Description: F22L4.6 protein - Arabidopsis thaliana
  misc_feature (58)..(311): Homolog of NCBI NO: 15223419 NR Description: myb family transcription factor; protein id:
  misc_feature (40)..(309): Homolog of NCBI NO: 30680926 NR Description: myb family transcription factor [Arabidopsis
  misc_feature (49)..(306): Homolog of NCBI NO: 8953721 NR Description: contains similarity to MYB-related DNA-binding
  misc_feature (49)..(323): Homolog of NCBI NO: 30696221 NR Description: myb family transcription factor [Arabidopsis
  misc_feature (49)..(323): Homolog of NCBI NO: 30696225 NR Description: myb family transcription factor [Arabidopsis
MSTTPKPLEAGAAAAAVGGGGGDGGGGGGGKGKEQQQVVPVAAGPPMAVPADAAAAAEDARMKVRKPYTITKSRESWTEPEHDKFLEALQLFDRDWKKIEAFVGSKTVIQIRSHAQKYFLKVQKNGTGEHLPPPRPKRKAAHPYPQKASKTAPVAPQAVLSQQPAPPPPPPREQDGVDVSMDASMVVPNTNANAVVPSWDNALVQPTQVTSAIATNNCSSSIESQSGTWPTSEAVEQENVLPQMRAMPDFSQVYNFLGSVFDPDTTGHLQRLKAMDPIDVETVLLLMRNLSVNLINPEFEAHRQLLSSYGSGGDENKPEGMENFGSQSSHLPSMVTSE

SEQ ID NO: 65627 - protein, 292 aa, Triticum aestivum
  peptide (1)..(292): Ceres Seq. ID no. 12780577
  misc_feature (28)..(73): Pfam Name: Myb-like DNA-binding domain Pfam Description: Myb-like DNA-binding domain
  misc_feature (187)..(292): Homolog of NCBI NO: 27125815 NR Description: MYB29 protein [Oryza sativa (japonica
  misc_feature (11)..(265): Homolog of NCBI NO: 15234118 NR Description: myb family transcription factor; protein id:
  misc_feature (1)..(266): Homolog of NCBI NO: 14596213 NR Description: putative protein [Arabidopsis thaliana]
  misc_feature (1)..(266): Homolog of NCBI NO: 18414039 NR Description: myb family transcription factor
  misc_feature (12)..(265): Homolog of NCBI NO: 25517982 NR Description: F22L4.6 protein - Arabidopsis thaliana
  misc_feature (12)..(265): Homolog of NCBI NO: 15223419 NR Description: myb family transcription factor; protein id:
  misc_feature (1)..(263): Homolog of NCBI NO: 30680926 NR Description: myb family transcription factor [Arabidopsis
  misc_feature (3)..(260): Homolog of NCBI NO: 8953721 NR Description: contains similarity to MYB-related DNA-binding
  misc_feature (3)..(277): Homolog of NCBI NO: 30696221 NR Description: myb family transcription factor [Arabidopsis
  misc_feature (3)..(277): Homolog of NCBI NO: 30696225 NR Description: myb family transcription factor [Arabidopsis
MAVPADAAAAAEDARMKVRKPYTITKSRESWTEPEHDKFLEALQLFDRDWKKIEAFVGSKTVIQIRSHAQKYFLKVQKNGTGEHLPPPRPKRKAAHPYPQKASKTAPVAPQAVLSQQPAPPPPPPREQDGVDVSMDASMVVPNTNANAVVPSWDNALVQPTQVTSAIATNNCSSSIESQSGTWPTSEAVEQENVLPQMRAMPDFSQVYNFLGSVFDPDTTGHLQRLKAMDPIDVETVLLLMRNLSVNLINPEFEAHRQLLSSYGSGGDENKPEGMENFGSQSSHLPSMVTSE

SEQ ID NO: 65628 - DNA, 1257 bp, Triticum aestivum
  misc_feature (1)..(1257): Ceres Seq. ID no. 15178472
actgctgctgcgaacacaggctttttcccagccccacggttggggggtcgcttgcatcacacccacgccgcctccgaaaagcgccgcaaatccgtcccagctgcgcggcttccatggctgccgcggcggctgcaggggactccggcgagcagccgctgctccacctcaagctcgccttcctcgccctggagccccccgcctgcgtcctcaccctcgccagaaaggctggtggaggttctgtcacgccacatgttcaaaattttattttggagaactgtgttggcactaatgtagggggaggtccagattgtacatatgtgaaaactattcttaaaaaggttatagctgaggcggaattatcgtcagatattgtgattgatgaactctatgaggaatttggccgttgtatgtcgtcaagggcaaataacccagagcttagcctggccaagatctacaaggagatatcttttctttctcctgcatatgagaatgtatcctcgaatccagtaagtttggttgctcgattattatgttctactaacatgctcgaaggggatacagggtgctgtctttggccatcaagtttattcttatctgagtttattctttcattcccagaacttttcgccaaaaaatgctgctttgagctaggttctggtgttggtttggttggtgtatgtctaaaccatgttggtgcttccaaggtagagtgcaaatatctttcctgggaagaagcgtgtgaaagcgatttaagagactaccagagagacatagttcttggtgcagacattatatacaacccgtcctgcgtgccccacctggtacgagtactttgtatgctacttagaggcgatgatggacgacatgaaagtgtcaatgcggcaaccaacggagaaattggtgacgaagtatctgggaccaccgcaaccggaggtcctgtggcctatattgccacggtcattcggaatgcagacactttcaattgctttgccaaggcagctgctgatgcgaagttgtctgttgtcaacattaccagcagcgcagctccatccagttttcttccttacatgatctcatatgatagatcgagcgtgcaacttcttaagattacactattatcctaagttgctggtgagtgcagctcctgtcagtctgttttgacgttgctacttaaacgtttattgcagagacatcaatcttatcggaatatcagtcgttcgtatcaagtctgtcctaaagtgtttccttcctgtgtcc

SEQ ID NO: 65629 - protein, 373 aa, Triticum aestivum
  peptide (1)..(373): Ceres Seq. ID no. 15178473
  misc_feature (184)..(227): Homolog of NCBI NO: 29835170 NR Description: Unknown (protein for MGC:59002) [Mus musculus]
  misc_feature (231)..(280): Homolog of NCBI NO: 29835170 NR Description: Unknown (protein for MGC:59002) [Mus musculus]
  misc_feature (231)..(280): Homolog of NCBI NO: 34868598 NR Description: similar to RIKEN cDNA 2610015J01 [Rattus
  misc_feature (100)..(227): Homolog of NCBI NO: 34868598 NR Description: similar to RIKEN cDNA 2610015J01 [Rattus
  misc_feature (231)..(280): Homolog of NCBI NO: 26383095 NR Description: unnamed protein product [Mus musculus]
  misc_feature (100)..(227): Homolog of NCBI NO: 26383095 NR Description: unnamed protein product [Mus musculus]
  misc_feature (232)..(370): Homolog of NCBI NO: 15240919 NR Description: expressed protein [Arabidopsis thaliana]
  misc_feature (43)..(235): Homolog of NCBI NO: 15240919 NR Description: expressed protein [Arabidopsis thaliana]
CCCEHRLFPSPTVGGSLASHPRRLRKAPQIRPSCAASMAAAAAAGDSGEQPLLHLKLAFLALEPPACVLTLARKAGGGSVTPHVQNFILENCVGTNVGGGPDCTYVKTILKKVIAEAELSSDIVIDELYEEFGRCMSSRANNPELSLAKIYKEISFLSPAYENVSSNPVSLVARLLCSTNMLEGDTGCCLWPSSLFLSEFILSFPELFAKKCCFELGSGVGLVGVCLNHVGASKVECKYLSWEEACESDLRDYQRDIVLGADIIYNPSCVPHLVRVLCMLLRGDDGRHESVNAATNGEIGDEVSGTTATGGPVAYIATVIRNADTFNCFAKAAADAKLSVVNITSSAAPSSFLPYMISYDRSSVQLLKITLLS

SEQ ID NO: 65630 - protein, 336 aa, Triticum aestivum
  peptide (1)..(336): Ceres Seq. ID no. 15178474
  misc_feature (147)..(190): Homolog of NCBI NO: 29835170 NR Description: Unknown (protein for MGC:59002) [Mus musculus]
  misc_feature (194)..(243): Homolog of NCBI NO: 29835170 NR Description: Unknown (protein for MGC:59002) [Mus musculus]
  misc_feature (194)..(243): Homolog of NCBI NO: 34868598 NR Description: similar to RIKEN cDNA 2610015J01 [Rattus
  misc_feature (63)..(190): Homolog of NCBI NO: 34868598 NR Description: similar to RIKEN cDNA 2610015J01 [Rattus
  misc_feature (194)..(243): Homolog of NCBI NO: 26383095 NR Description: unnamed protein product [Mus musculus]
  misc_feature (63)..(190): Homolog of NCBI NO: 26383095 NR Description: unnamed protein product [Mus musculus]
  misc_feature (195)..(333): Homolog of NCBI NO: 15240919 NR Description: expressed protein [Arabidopsis thaliana]
  misc_feature (6)..(198): Homolog of NCBI NO: 15240919 NR Description: expressed protein [Arabidopsis thaliana]
MAAAAAAGDSGEQPLLHLKLAFLALEPPACVLTLARKAGGGSVTPHVQNFILENCVGTNVGGGPDCTYVKTILKKVIAEAELSSDIVIDELYEEFGRCMSSRANNPELSLAKIYKEISFLSPAYENVSSNPVSLVARLLCSTNMLEGDTGCCLWPSSLFLSEFILSFPELFAKKCCFELGSGVGLVGVCLNHVGASKVECKYLSWEEACESDLRDYQRDIVLGADIIYNPSCVPHLVRVLCMLLRGDDGRHESVNAATNGEIGDEVSGTTATGGPVAYIATVIRNADTFNCFAKAAADAKLSVVNITSSAAPSSFLPYMISYDRSSVQLLKITLLS

SEQ ID NO: 65631 - protein, 238 aa, Triticum aestivum
  peptide (1)..(238): Ceres Seq. ID no. 15178475
  misc_feature (49)..(92): Homolog of NCBI NO: 29835170 NR Description: Unknown (protein for MGC:59002) [Mus musculus]
  misc_feature (96)..(145): Homolog of NCBI NO: 29835170 NR Description: Unknown (protein for MGC:59002) [Mus musculus]
  misc_feature (96)..(145): Homolog of NCBI NO: 34868598 NR Description: similar to RIKEN cDNA 2610015J01 [Rattus
  misc_feature (1)..(92): Homolog of NCBI NO: 34868598 NR Description: similar to RIKEN cDNA 2610015J01 [Rattus
  misc_feature (96)..(145): Homolog of NCBI NO: 26383095 NR Description: unnamed protein product [Mus musculus]
  misc_feature (1)..(92): Homolog of NCBI NO: 26383095 NR Description: unnamed protein product [Mus musculus]
  misc_feature (97)..(235): Homolog of NCBI NO: 15240919 NR Description: expressed protein [Arabidopsis thaliana]
  misc_feature (1)..(100): Homolog of NCBI NO: 15240919 NR Description: expressed protein [Arabidopsis thaliana]
MSSRANNPELSLAKIYKEISFLSPAYENVSSNPVSLVARLLCSTNMLEGDTGCCLWPSSLFLSEFILSFPELFAKKCCFELGSGVGLVGVCLNHVGASKVECKYLSWEEACESDLRDYQRDIVLGADIIYNPSCVPHLVRVLCMLLRGDDGRHESVNAATNGEIGDEVSGTTATGGPVAYIATVIRNADTFNCFAKAAADAKLSVVNITSSAAPSSFLPYMISYDRSSVQLLKITLLS

SEQ ID NO: 65632 - DNA, 640 bp, Triticum aestivum
  misc_feature (1)..(640): Ceres Seq. ID no. 13663039
acaccaaaacaaccagatctcaggctcatagctcagacaatggagaagtccccagccacagcaggataccatcatgcaccacttttccaagagccacttggtattctcatccttttcatcctcacctggtgcatctcgaagcttcaaagtctccttcccacttcttgttgccaatcctgcacttgtactgtctccccgacaacctcgacgccggtcctcgccgagacgaagatatcgaaggcaccaaataagagtgaatatgatgagatgaatgcgacgcagtcagatgccgaggtagccatgagaaagatgggacttgattttgatcaagagaaaagctgcgaatatatttctacgcttttcgatgaagacgagccaagcttcaaggaagtgaaaatggcattcttggtttttgatgagaacaatgatgggtacatcgatgcattggatttgcgacgagtcctccacaacttagggttaggcgaccgggtaggggtcaatgagtctgagcagatgattgctagatatgacatgaacaataacaagaggttagatttgatggagttcactaaggttttggaggacagcttttgctagacccctttatttctgtatttttttcctatatctgtagatgcat

SEQ ID NO: 65633 - protein, 198 aa, Triticum aestivum
  peptide (1)..(198): Ceres Seq. ID no. 13663040
  misc_feature (130)..(155): Pfam Name: EF hand Pfam Description: EF hand
  misc_feature (123)..(193): Homolog of NCBI NO: 20137483 NR Description: Calmodulin (CaM)
  misc_feature (109)..(194): Homolog of NCBI NO: 15221358 NR Description: calcium-binding protein, putative [Arabidopsis
  misc_feature (78)..(194): Homolog of NCBI NO: 15241500 NR Description: calcium-binding protein, putative [Arabidopsis
  misc_feature (109)..(194): Homolog of NCBI NO: 15236276 NR Description: calcium-binding protein, putative [Arabidopsis
  misc_feature (78)..(193): Homolog of NCBI NO: 24581540 NR Description: CG31960-PA [Drosophila melanogaster]
  misc_feature (68)..(197): Homolog of NCBI NO: 15232816 NR Description: calcium-binding EF-hand family protein
  misc_feature (86)..(198): Homolog of NCBI NO: 34913268 NR Description: P0519E12.12 [Oryza sativa (japonica
  misc_feature (88)..(197): Homolog of NCBI NO: 15228558 NR Description: calcium-binding EF-hand family protein
  misc_feature (58)..(198): Homolog of NCBI NO: 18421893 NR Description: calcium-binding EF-hand family protein
  misc_feature (58)..(198): Homolog of NCBI NO: 9758343 NR Description: gene_id:MIJ24.17~unknown protein [Arabidopsis
TPKQPDLRLIAQTMEKSPATAGYHHAPLFQEPLGILILFILTWCISKLQSLLPTSCCQSCTCTVSPTTSTPVLAETKISKAPNKSEYDEMNATQSDAEVAMRKMGLDFDQEKSCEYISTLFDEDEPSFKEVKMAFLVFDENNDGYIDALDLRRVLHNLGLGDRVGVNESEQMIARYDMNNNKRLDLMEFTKVLEDSFC

SEQ ID NO: 65634 - protein, 185 aa, Triticum aestivum
  peptide (1)..(185): Ceres Seq. ID no. 13663041
  misc_feature (117)..(142): Pfam Name: EF hand Pfam Description: EF hand
  misc_feature (110)..(180): Homolog of NCBI NO: 20137483 NR Description: Calmodulin (CaM)
  misc_feature (96)..(181): Homolog of NCBI NO: 15221358 NR Description: calcium-binding protein, putative [Arabidopsis
  misc_feature (65)..(181): Homolog of NCBI NO: 15241500 NR Description: calcium-binding protein, putative [Arabidopsis
  misc_feature (96)..(181): Homolog of NCBI NO: 15236276 NR Description: calcium-binding protein, putative [Arabidopsis
  misc_feature (65)..(180): Homolog of NCBI NO: 24581540 NR Description: CG31960-PA [Drosophila melanogaster]
  misc_feature (55)..(184): Homolog of NCBI NO: 15232816 NR Description: calcium-binding EF-hand family protein
  misc_feature (73)..(185): Homolog of NCBI NO: 34913268 NR Description: P0519E12.12 [Oryza sativa (japonica
  misc_feature (75)..(184): Homolog of NCBI NO: 15228558 NR Description: calcium-binding EF-hand family protein
  misc_feature (45)..(185): Homolog of NCBI NO: 18421893 NR Description: calcium-binding EF-hand family protein
  misc_feature (45)..(185): Homolog of NCBI NO: 9758343 NR Description: gene_id:MIJ24.17~unknown protein [Arabidopsis
MEKSPATAGYHHAPLFQEPLGILILFILTWCISKLQSLLPTSCCQSCTCTVSPTTSTPVLAETKISKAPNKSEYDEMNATQSDAEVAMRKMGLDFDQEKSCEYISTLFDEDEPSFKEVKMAFLVFDENNDGYIDALDLRRVLHNLGLGDRVGVNESEQMIARYDMNNNKRLDLMEFTKVLEDSFC

SEQ ID NO: 65635 - protein, 109 aa, Triticum aestivum
  peptide (1)..(109): Ceres Seq. ID no. 13663042
  misc_feature (41)..(66): Pfam Name: EF hand Pfam Description: EF hand
  misc_feature (34)..(104): Homolog of NCBI NO: 20137483 NR Description: Calmodulin (CaM)
  misc_feature (20)..(105): Homolog of NCBI NO: 15221358 NR Description: calcium-binding protein, putative [Arabidopsis
  misc_feature (1)..(105): Homolog of NCBI NO: 15241500 NR Description: calcium-binding protein, putative [Arabidopsis
  misc_feature (20)..(105): Homolog of NCBI NO: 15236276 NR Description: calcium-binding protein, putative [Arabidopsis
  misc_feature (1)..(104): Homolog of NCBI NO: 24581540 NR Description: CG31960-PA [Drosophila melanogaster]
  misc_feature (1)..(108): Homolog of NCBI NO: 15232816 NR Description: calcium-binding EF-hand family protein
  misc_feature (1)..(109): Homolog of NCBI NO: 34913268 NR Description: P0519E12.12 [Oryza sativa (japonica
  misc_feature (1)..(108): Homolog of NCBI NO: 15228558 NR Description: calcium-binding EF-hand family protein
  misc_feature (1)..(109): Homolog of NCBI NO: 18421893 NR Description: calcium-binding EF-hand family protein
  misc_feature (1)..(109): Homolog of NCBI NO: 9758343 NR Description: gene_id:MIJ24.17~unknown protein [Arabidopsis
MNATQSDAEVAMRKMGLDFDQEKSCEYISTLFDEDEPSFKEVKMAFLVFDENNDGYIDALDLRRVLHNLGLGDRVGVNESEQMIARYDMNNNKRLDLMEFTKVLEDSFC

SEQ ID NO: 65636 - DNA, 860 bp, Triticum aestivum
  misc_feature (1)..(860): Ceres Seq. ID no. 13663127
ctctctctctctttccgtgccactccccaatccgttctccaatcccactcccctatgccggcgtccgggacgcgctcccggggccgcccgccgcagccggtggaggagggggcgcgcgacgaagaagcgccggtggaggaggcgggcgagctcggcgccgacggcgatgcggcggttcgtgcgttaccggctcacccggtgagctctaccagctcgggtgatgaggatggggaggaggcgggggatggggatgatgaggacgcggaggggacgctcctccccagctgccccgtgtgtatgaatccgtggaccgccgatggcgagcatcgcgtaagttgcattccttgtgggcatgtctatggcagatcttgcttagaaaaatggttagcacagtgtggaaagaaaagtgccatgtgtcctcagtgcggcaagatgtttagacaaaagaacattatcaacctctatgcaccagagattgttgttccaaataatgatcttgaaaagcaagtattgtcactgagagataaaaatgaatttcttgagaatcaacaacaaaaattaattgaggagattgcattggagcagcaaaaggagaaagaggcgctggaggagggaggcgatgcagctcaagagtgacgtggtactggtgccggtccaaatgtttgtgtagaacagaggaagcagctagcggaagtcaaacattgatgtgtttgtaatgcacggtgtcggctgaggactaatgtacggagattgtagtcatgtgctcacctgatacatggataatgattttcagttcagtacccagaattttgagttctagtgatggttagtgtcttatgtctaagtgatcaaattgaata

SEQ ID NO: 65637 - protein, 211 aa, Triticum aestivum
  peptide (1)..(211): Ceres Seq. ID no. 13663128
  misc_feature (96)..(142): Pfam Name: Zinc finger, C3HC4 type (RING finger) Pfam Description: Zinc finger, C3HC4 type (RING finger)
  misc_feature (85)..(196): Homolog of NCBI NO: 37589541 NR Description: FLJ10520 protein [Homo sapiens]
  misc_feature (86)..(211): Homolog of NCBI NO: 34851762 NR Description: similar to CDNA sequence BC027246 [Rattus
  misc_feature (96)..(208): Homolog of NCBI NO: 19074263 NR Description: hypothetical protein [Encephalitozoon cuniculi]
  misc_feature (18)..(187): Homolog of NCBI NO: 37514840 NR Description: Unknown (protein for MGC:6881) [Mus musculus]
  misc_feature (18)..(187): Homolog of NCBI NO: 31542200 NR Description: cDNA sequence BC027246 [Mus musculus]
  misc_feature (85)..(203): Homolog of NCBI NO: 31213435 NR Description: ENSANGP00000021894 [Anopheles gambiae]
  misc_feature (84)..(204): Homolog of NCBI NO: 21356599 NR Description: CG13025-PA [Drosophila melanogaster]
  misc_feature (67)..(202): Homolog of NCBI NO: 11357373 NR Description: hypothetical protein F12E4.210 - Arabidopsis
  misc_feature (24)..(191): Homolog of NCBI NO: 34902396 NR Description: Hypothetical protein [Oryza sativa (japonica
  misc_feature (35)..(204): Homolog of NCBI NO: 37536588 NR Description: hypothetical protein [Oryza sativa (japonica
LSLSFRATPQSVLQSHSPMPASGTRSRGRPPQPVEEGARDEEAPVEEAGELGADGDAAVRALPAHPVSSTSSGDEDGEEAGDGDDEDAEGTLLPSCPVCMNPWTADGEHRVSCIPCGHVYGRSCLEKWLAQCGKKSAMCPQCGKMFRQKNIINLYAPEIVVPNNDLEKQVLSLRDKNEFLENQQQKLIEEIALEQQKEKEALEEGGDAAQE

SEQ ID NO: 65638 - protein, 193 aa, Triticum aestivum
  peptide (1)..(193): Ceres Seq. ID no. 13663129
  misc_feature (78)..(124): Pfam Name: Zinc finger, C3HC4 type (RING finger) Pfam Description: Zinc finger, C3HC4 type (RING finger)
  misc_feature (67)..(178): Homolog of NCBI NO: 37589541 NR Description: FLJ10520 protein [Homo sapiens]
  misc_feature (68)..(193): Homolog of NCBI NO: 34851762 NR Description: similar to CDNA sequence BC027246 [Rattus
  misc_feature (78)..(190): Homolog of NCBI NO: 19074263 NR Description: hypothetical protein [Encephalitozoon cuniculi]
  misc_feature (1)..(169): Homolog of NCBI NO: 37514840 NR Description: Unknown (protein for MGC:6881) [Mus musculus]
  misc_feature (1)..(169): Homolog of NCBI NO: 31542200 NR Description: cDNA sequence BC027246 [Mus musculus]
  misc_feature (67)..(185): Homolog of NCBI NO: 31213435 NR Description: ENSANGP00000021894 [Anopheles gambiae]
  misc_feature (66)..(186): Homolog of NCBI NO: 21356599 NR Description: CG13025-PA [Drosophila melanogaster]
  misc_feature (49)..(184): Homolog of NCBI NO: 11357373 NR Description: hypothetical protein F12E4.210 - Arabidopsis
  misc_feature (6)..(173): Homolog of NCBI NO: 34902396 NR Description: Hypothetical protein [Oryza sativa (japonica
  misc_feature (17)..(186): Homolog of NCBI NO: 37536588 NR Description: hypothetical protein [Oryza sativa (japonica
MPASGTRSRGRPPQPVEEGARDEEAPVEEAGELGADGDAAVRALPAHPVSSTSSGDEDGEEAGDGDDEDAEGTLLPSCPVCMNPWTADGEHRVSCIPCGHVYGRSCLEKWLAQCGKKSAMCPQCGKMFRQKNIINLYAPEIVVPNNDLEKQVLSLRDKNEFLENQQQKLIEEIALEQQKEKEALEEGGDAAQE

SEQ ID NO: 65639 - protein, 112 aa, Triticum aestivum
  peptide (1)..(112): Ceres Seq. ID no. 13663130
  misc_feature (1)..(43): Pfam Name: Zinc finger, C3HC4 type (RING finger) Pfam Description: Zinc finger, C3HC4 type (RING finger)
  misc_feature (1)..(97): Homolog of NCBI NO: 37589541 NR Description: FLJ10520 protein [Homo sapiens]
  misc_feature (1)..(112): Homolog of NCBI NO: 34851762 NR Description: similar to CDNA sequence BC027246 [Rattus
  misc_feature (1)..(109): Homolog of NCBI NO: 19074263 NR Description: hypothetical protein [Encephalitozoon cuniculi]
  misc_feature (1)..(88): Homolog of NCBI NO: 37514840 NR Description: Unknown (protein for MGC:6881) [Mus musculus]
  misc_feature (1)..(88): Homolog of NCBI NO: 31542200 NR Description: cDNA sequence BC027246 [Mus musculus]
  misc_feature (1)..(104): Homolog of NCBI NO: 31213435 NR Description: ENSANGP00000021894 [Anopheles gambiae]
  misc_feature (1)..(105): Homolog of NCBI NO: 21356599 NR Description: CG13025-PA [Drosophila melanogaster]
  misc_feature (1)..(103): Homolog of NCBI NO: 11357373 NR Description: hypothetical protein F12E4.210 - Arabidopsis
  misc_feature (1)..(92): Homolog of NCBI NO: 34902396 NR Description: Hypothetical protein [Oryza sativa (japonica
  misc_feature (1)..(105): Homolog of NCBI NO: 37536588 NR Description: hypothetical protein [Oryza sativa (japonica
MNPWTADGEHRVSCIPCGHVYGRSCLEKWLAQCGKKSAMCPQCGKMFRQKNIINLYAPEIVVPNNDLEKQVLSLRDKNEFLENQQQKLIEEIALEQQKEKEALEEGGDAAQE

SEQ ID NO: 65640 - DNA, 811 bp, Triticum aestivum
  misc_feature (1)..(811): Ceres Seq. ID no. 12626276
acaaaagccctccctaaaagcctctccctcatttttcttagctgccaaagctttcttctgttgctatttcttcactccattgctgtcttctcagcagctcaatttgctcatcacactcaaaaacaagctagctaagcgagccaggtccatttcccgcgctcatggggttgcaagagatggcgaagctgcagctgcaccgccatggcggcatgcgagtggaagcccacgcccccgtcgacgacgaccaggcggcggtccgcgggaggaggaagaaggcgacggcggcagcggtctggattgcagtgccgctcaggcccgtcaaggtcggccgccgaagacacggcggcggcgacagcagcggcgaggcaggggaggtggaggagaaggaagtggaagaggaggaggaggtgacgacgccgagaggggaagggtgcaggataccctgggaggcggcgacgtgcccgccggcgcccaagaaggcgaggacggcggtggcgatcttcgccgaccgccggtgcaaccgcgacgacggggaggcgacggagtacttccgcgtgccggcggacctggactccgtgttcgccgtcagccgggtcgccgaggccaactgaatgattcgtccatgctcgcgcgcgtgtagagctgcaagtgcgagcgatcaagtccagttaaaagacaagagacagaggagatgatccaataatgcagctgtaaaaatttcgcattgtcgatgcaatggatttatcttagttaattacttctctttcagtgtaaatgtaaattaatcgaggtcgaggagtgcatctgtact

SEQ ID NO: 65641 - protein, 212 aa, Triticum aestivum
  peptide (1)..(212): Ceres Seq. ID no. 12626277
  misc_feature (121)..(211): Homolog of NCBI NO: 12597573 NR Description: p6.9 [Heliocoverpa armigera nucleopolyhedrovirus
  misc_feature (47)..(198): Homolog of NCBI NO: 22901742 NR Description: Y-box protein Ct-p50 [Chironomus tentans]
  misc_feature (47)..(198): Homolog of NCBI NO: 22901740 NR Description: Y-box protein Ct-p40 [Chironomus tentans]
QKPSLKASPSFFLAAKAFFCCYFFTPLLSSQQLNLLITLKNKLAKRARSISRAHGVARDGEAAAAPPWRHASGSPRPRRRRPGGGPREEEEGDGGSGLDCSAAQARQGRPPKTRRRRQQRRGRGGGGEGSGRGGGGDDAERGRVQDTLGGGDVPAGAQEGEDGGGDLRRPPVQPRRRGGDGVLPRAGGPGLRVRRQPGRRGQLNDSSMLARV

SEQ ID NO: 65642 - protein, 149 aa, Triticum aestivum
  peptide (1)..(149): Ceres Seq. ID no. 12626278
MGLQEMAKLQLHRHGGMRVEAHAPVDDDQAAVRGRRKKATAAAVWIAVPLRPVKVGRRRHGGGDSSGEAGEVEEKEVEEEEEVTTPRGEGCRIPWEAATCPPAPKKARTAVAIFADRRCNRDDGEATEYFRVPADLDSVFAVSRVAEAN

SEQ ID NO: 65643 - protein, 144 aa, Triticum aestivum
  peptide (1)..(144): Ceres Seq. ID no. 12626279
MAKLQLHRHGGMRVEAHAPVDDDQAAVRGRRKKATAAAVWIAVPLRPVKVGRRRHGGGDSSGEAGEVEEKEVEEEEEVTTPRGEGCRIPWEAATCPPAPKKARTAVAIFADRRCNRDDGEATEYFRVPADLDSVFAVSRVAEAN

SEQ ID NO: 65644 - DNA, 1434 bp, Triticum aestivum
  misc_feature (1)..(1434): Ceres Seq. ID no. 13657014
cccttctgacctacccaagctccagtccaccgccgctgtgccctagaactgccgccgcgcccgccctcgtcgctggcgccctccctgtctcgtagcgtccctgctctcttccccccacgcgcaatcttgaacttcggttttgagatccgcccctgctgtcggttgcaggtttgcagagggctcgtcgacatgtcttgggcgccaatcgagaatgaccctggtgtttttacggagctgttgcaacagttgcaattgaagggtctccaagttgatgaactctactcacttgatcttgatgccctcaatgatcttcagccaatttatgggcttatagttctgtacaaatggcgacctccagaaaaagatgagcgccctgttatcaaggatgcagtcccaaatctgttctttgctaatcagataattaacagtgcatgtgcaacccaagctattgtttctgttctgttgaactcttctggcatcacccttagcgaggacctaaaaaagctcaaggagtttgcaaaggacatgccgccagagctcaaaggattggctatagtgaattgtgaaagcattcgtatgaccagtaactcatttgcaaagtcagatgactactctgaggaacagaaatccaaggatgatgatgtctaccatttcattagctatgttcctgttgacggcgtcctgtatgagcttgatggactaaaggaaggaccgattagcctgggaaaatgcccaggtggtattggggagatggggtggctgaagatggtgcagcctgtcatccaggaacgcgttgataagttctctcagaatgagataaggttcagtgtcatggctatcacaaagaaccggaaggaaattttcatcatggagctcaaggaacttcagaggaagagggagaacctcttatcacaaatgggtgatccttctgccaatcggcaaaggccatccattgagcggtcactcgcagaggttgctgctcagattgaggctgtgaccgagaagatcataatggaggaagagaaggcaaagaagtggaagacagagaacatcaggaggaagcacaactacgtgcctttcttgttcaatttcctcaagatcctcgaggagaagcagcaactgaagcccctgatagagaaggcgaaacagaattctcacagccgtaaccctaagtgaaacctgcgttgtaaattttttatcgtcttggttgttttggttttgtgtagagatggctgactgactttgtttcctagctgaatgggccttgtagttctagtcctagacaggccatatatcgataccgtcctggtttattcaggcagatcttaaaccattcatgtaggggggacactctgactccttatcagaattatatgtgcatcagagggttttttccctgtctaattcttcccaagctttaactgaaagtttgac

SEQ ID NO: 65645 - protein, 328 aa, Triticum aestivum
  peptide (1)..(328): Ceres Seq. ID no. 13657015
  misc_feature (3)..(325): Homolog of NCBI NO: 15930175 NR Description: Unknown (protein for MGC:9314) [Homo sapiens]
  misc_feature (3)..(325): Homolog of NCBI NO: 30584639 NR Description: Homo sapiens ubiquitin carboxyl-terminal
  misc_feature (3)..(325): Homolog of NCBI NO: 7706753 NR Description: ubiquitin C-terminal hydrolase UCH37
  misc_feature (3)..(325): Homolog of NCBI NO: 9625047 NR Description: ubiquitin C-terminal hydrolase 37
  misc_feature (3)..(325): Homolog of NCBI NO: 18203574 NR Description: Ubiquitin carboxyl-terminal hydrolase isozyme L5 (Ubiquitin thiolesterase L5) (Ubiquitin C-terminal hydrolase
  misc_feature (3)..(325): Homolog of NCBI NO: 5738242 NR Description: ubiquitin C-terminal hydrolase UCH-L5 [Mus
  misc_feature (42)..(320): Homolog of NCBI NO: 6686411 NR Description: F1E22.3 [Arabidopsis thaliana]
  misc_feature (1)..(317): Homolog of NCBI NO: 15237324 NR Description: ubiquitin C-terminal hydrolase-related protein
  misc_feature (1)..(320): Homolog of NCBI NO: 15724238 NR Description: F5I14.29/F5I14.29 [Arabidopsis thaliana]
  misc_feature (1)..(320): Homolog of NCBI NO: 18408331 NR Description: expressed protein [Arabidopsis thaliana]
MSWAPIENDPGVFTELLQQLQLKGLQVDELYSLDLDALNDLQPIYGLIVLYKWRPPEKDERPVIKDAVPNLFFANQIINSACATQAIVSVLLNSSGITLSEDLKKLKEFAKDMPPELKGLAIVNCESIRMTSNSFAKSDDYSEEQKSKDDDVYHFISYVPVDGVLYELDGLKEGPISLGKCPGGIGEMGWLKMVQPVIQERVDKFSQNEIRFSVMAITKNRKEIFIMELKELQRKRENLLSQMGDPSANRQRPSIERSLAEVAAQIEAVTEKIIMEEEKAKKWKTENIRRKHNYVPFLFNFLKILEEKQQLKPLIEKAKQNSHSRNPK

SEQ ID NO: 65646 - protein, 216 aa, Triticum aestivum
  peptide (1)..(216): Ceres Seq. ID no. 13657016
  misc_feature (1)..(213): Homolog of NCBI NO: 15930175 NR Description: Unknown (protein for MGC:9314) [Homo sapiens]
  misc_feature (1)..(213): Homolog of NCBI NO: 30584639 NR Description: Homo sapiens ubiquitin carboxyl-terminal
  misc_feature (1)..(213): Homolog of NCBI NO: 7706753 NR Description: ubiquitin C-terminal hydrolase UCH37
  misc_feature (1)..(213): Homolog of NCBI NO: 9625047 NR Description: ubiquitin C-terminal hydrolase 37
  misc_feature (1)..(213): Homolog of NCBI NO: 18203574 NR Description: Ubiquitin carboxyl-terminal hydrolase isozyme L5 (Ubiquitin thiolesterase L5) (Ubiquitin C-terminal hydrolase
  misc_feature (1)..(213): Homolog of NCBI NO: 5738242 NR Description: ubiquitin C-terminal hydrolase UCH-L5 [Mus
  misc_feature (1)..(208): Homolog of NCBI NO: 6686411 NR Description: F1E22.3 [Arabidopsis thaliana]
  misc_feature (1)..(205): Homolog of NCBI NO: 15237324 NR Description: ubiquitin C-terminal hydrolase-related protein
  misc_feature (1)..(208): Homolog of NCBI NO: 15724238 NR Description: F5I14.29/F5I14.29 [Arabidopsis thaliana]
  misc_feature (1)..(208): Homolog of NCBI NO: 18408331 NR Description: expressed protein [Arabidopsis thaliana]
MPPELKGLAIVNCESIRMTSNSFAKSDDYSEEQKSKDDDVYHFISYVPVDGVLYELDGLKEGPISLGKCPGGIGEMGWLKMVQPVIQERVDKFSQNEIRFSVMAITKNRKEIFIMELKELQRKRENLLSQMGDPSANRQRPSIERSLAEVAAQIEAVTEKIIMEEEKAKKWKTENIRRKHNYVPFLFNFLKILEEKQQLKPLIEKAKQNSHSRNPK

SEQ ID NO: 65647 - protein, 199 aa, Triticum aestivum
  peptide (1)..(199): Ceres Seq. ID no. 13657017
  misc_feature (1)..(196): Homolog of NCBI NO: 30584639 NR Description: Homo sapiens ubiquitin carboxyl-terminal
  misc_feature (1)..(196): Homolog of NCBI NO: 15930175 NR Description: Unknown (protein for MGC:9314) [Homo sapiens]
  misc_feature (1)..(196): Homolog of NCBI NO: 7706753 NR Description: ubiquitin C-terminal hydrolase UCH37
  misc_feature (1)..(196): Homolog of NCBI NO: 9625047 NR Description: ubiquitin C-terminal hydrolase 37
  misc_feature (1)..(196): Homolog of NCBI NO: 18203574 NR Description: Ubiquitin carboxyl-terminal hydrolase isozyme L5 (Ubiquitin thiolesterase L5) (Ubiquitin C-terminal hydrolase
  misc_feature (1)..(196): Homolog of NCBI NO: 5738242 NR Description: ubiquitin C-terminal hydrolase UCH-L5 [Mus
  misc_feature (1)..(191): Homolog of NCBI NO: 6686411 NR Description: F1E22.3 [Arabidopsis thaliana]
  misc_feature (1)..(188): Homolog of NCBI NO: 15237324 NR Description: ubiquitin C-terminal hydrolase-related protein
  misc_feature (1)..(191): Homolog of NCBI NO: 15724238 NR Description: F5I14.29/F5I14.29 [Arabidopsis thaliana]
  misc_feature (1)..(191): Homolog of NCBI NO: 18408331 NR Description: expressed protein [Arabidopsis thaliana]
MTSNSFAKSDDYSEEQKSKDDDVYHFISYVPVDGVLYELDGLKEGPISLGKCPGGIGEMGWLKMVQPVIQERVDKFSQNEIRFSVMAITKNRKEIFIMELKELQRKRENLLSQMGDPSANRQRPSIERSLAEVAAQIEAVTEKIIMEEEKAKKWKTENIRRKHNYVPFLFNFLKILEEKQQLKPLIEKAKQNSHSRNPK

SEQ ID NO: 65648 - DNA, 568 bp, Triticum aestivum
  misc_feature (1)..(568): Ceres Seq. ID no. 13656228
gaggctcggcgtggctcggctggcatttgcttgtcctgtttctcgtggccgcctacttgtaatccgctgccagccaaatcgctagctcactccctccctcgtcagcctccggcagatcctcctccataccgctcgaagctccgccctcctcctcccgacacctcgagatctccgccccggacccatttcttccccaccaaggtccagcgccgtccggccggccctccctgttgcaggcaggcgacgccgccgccgccatgtccaagtcgggagccctggatctcgcgtccggccttggcgggaagatcgacaaggaacaggtcaaatccgcggtcgacgagtatgagaaatatcatggatattacggagggaaggaggaatcgaggaaatccaactacaccgatatggttaataaatactatgatcttgctactagcttctatgagtatggctggggtgaatccttccactttgctcacaggtggaatggggaatctttaagggaaagcatcaaacgacacgagcactttctggccttacagcttgagttgaaaccaggcatgaaggt

SEQ ID NO: 65649 - protein, 166 aa, Triticum aestivum
  peptide (1)..(166): Ceres Seq. ID no. 13656229
  misc_feature (17)..(94): Pfam Name: Extensin-like region Pfam Description: Extensin-like region
  misc_feature (17)..(92): Homolog of NCBI NO: 7488998 NR Description: extensin class I (clone uG-18) - tomato
  misc_feature (14)..(92): Homolog of NCBI NO: 7488998 NR Description: extensin class I (clone uG-18) - tomato
  misc_feature (17)..(92): Homolog of NCBI NO: 3204132 NR Description: extensin [Cicer arietinum]
  misc_feature (17)..(92): Homolog of NCBI NO: 169345 NR Description: hydroxyproline-rich glycoprotein
  misc_feature (17)..(92): Homolog of NCBI NO: 81870 NR Description: hydroxyproline-rich glycoprotein (clone Hyp3.6) -
  misc_feature (17)..(92): Homolog of NCBI NO: 7488998 NR Description: extensin class I (clone uG-18) - tomato
  misc_feature (17)..(92): Homolog of NCBI NO: 7488998 NR Description: extensin class I (clone uG-18) - tomato
  misc_feature (17)..(93): Homolog of NCBI NO: 3204132 NR Description: extensin [Cicer arietinum]
  misc_feature (17)..(92): Homolog of NCBI NO: 1076556 NR Description: extensin-like protein - cowpea (fragment)
  misc_feature (17)..(94): Homolog of NCBI NO: 4033606 NR Description: Extensin [Adiantum capillus-veneris]
EARRGSAGICLSCFSWPPTCNPLPAKSLAHSLPRQPPADPPPYRSKLRPPPPDTSRSPPRTHFFPTKVQRRPAGPPCCRQATPPPPCPSREPWISRPALAGRSTRNRSNPRSTSMRNIMDITEGRRNRGNPTTPIWLINTMILLLASMSMAGVNPSTLLTGGMGNL

SEQ ID NO: 65650 - protein, 103 aa, Triticum aestivum
  peptide (1)..(103): Ceres Seq. ID no. 13656230
  misc_feature (7)..(102): Homolog of NCBI NO: 21434843 NR Description: cephalopod [Arabidopsis thaliana]
  misc_feature (7)..(102): Homolog of NCBI NO: 15240691 NR Description: 24-sterol C-methyltransferase [Arabidopsis
  misc_feature (1)..(102): Homolog of NCBI NO: 7443720 NR Description: probable sterol 24-C-methyltransferase (EC
  misc_feature (1)..(102): Homolog of NCBI NO: 3603295 NR Description: S-adenosyl-methionine
  misc_feature (1)..(102): Homolog of NCBI NO: 7443719 NR Description: sterol 24-C-methyltransferase (EC 2.1.1.41) -
  misc_feature (1)..(102): Homolog of NCBI NO: 3560474 NR Description: S-adenosyl-methionine-sterol-C- methyltransferase
  misc_feature (1)..(102): Homolog of NCBI NO: 34393309 NR Description: cycloartenol-C24-methyltransferase
  misc_feature (1)..(102): Homolog of NCBI NO: 3560531 NR Description: cycloartenol-C24-methyltransferase [Oryza sativa
  misc_feature (1)..(102): Homolog of NCBI NO: 7443716 NR Description: sterol 24-C-methyltransferase (EC 2.1.1.41)
  misc_feature (1)..(102): Homolog of NCBI NO: 7443715 NR Description: sterol 24-C-methyltransferase (EC 2.1.1.41) -
MSKSGALDLASGLGGKIDKEQVKSAVDEYEKYHGYYGGKEESRKSNYTDMVNKYYDLATSFYEYGWGESFHFAHRWNGESLRESIKRHEHFLALQLELKPGMK

SEQ ID NO: 65651 - DNA, 1510 bp, Triticum aestivum
  misc_feature (1)..(1510): Ceres Seq. ID no. 13657170
acgcactaccaattaccaaataccaatccacgcatcagagctcagaagctaggccagcgccatgggagaagctgcagctgttgtcgccgcctcgcgcgacggcttcttcggcctgggcgagtgcaagggccaggtggtgatcgacggcgagcaggtgccactggtcctgacgccgggcagcgaggaggtgagcggccacgaccacaaggcgctggtggcggccctggtggccaaccgagagtgggtggaggagaaggtggtggccaacagcggcgtgctgctgcgcggcttcggcgtccgcgacgccgtggagttcgacgccatcgtggacgcgctcgggtggccggacatccggtacgtcggccccgccccgcgcacccacgtccacggccgcatctggaccgccaacgagggccccctcgaggagttcatctactaccaccacgagatggtcctcatcaaggagttcccggggaaggtgatcctgttctgcgaggtgccgccgccggagggcggggagacgccgttcgtgccgagcttccgggtgacggagcgcgcgctgcaggagttcccggacatggtggaggagctggacgccaaggggctccgctacaccttcaccgcgctgagcaaggacgacaccaagtccatgcgggggcgagggtgggaggacgccttcgccaccaccgacaaggccgtggccgagcagagagcccgcgcgctggggatggacgtggagtggctgccggaggaaggcggcgtgaggaccatcctcgggccgaggcagctgacgcgggtgttcccgggccggaagggccggcggatgtggttcaacacggtggtggggatgcacggcaaggagctcagctccgccacgttcgccgacggctccgagataccggcggacttcgtgcgccggtgcggcgagatcatcgaggaggagagcatccagttccggtgggagaagggcgacgtgctcatcctcgacaacctcgcaacgctccacggccgccggccgtcgctggcgcccaggagggtcctcgtcgccacatgcaagtgatctcatttcatgcatcacccaccttaactaattggttagttaattaagcttgagggtggacctggcttgattaactaattaatcttagttggtgctggggatgctgcatttggctcttctataataagctgccttgagttactacggtaaaatggctttgtgcattgtgatgcagaagctgggtactcccttttcagaaaaaaaaaagttactacggtaaaataagagctgaaggtttgattaagtcagtcggcttaatacttattacagccaaagaggggtgcggtagtttctcccttataattagtaattttgcatccatcattatgctttttcttttatatttcatccatcattatgctgggtgacatgcattacgacatgtaaggcttatttccttcgagtgatatattaagagatgcatgcagcagtgttatgcatcttctcttt

SEQ ID NO: 65652 - protein, 368 aa, Triticum aestivum
  peptide (1)..(368): Ceres Seq. ID no. 13657171
  misc_feature (43)..(283): Pfam Name: Protein of unknown function (DUF390) Pfam Description: Protein of unknown function (DUF390)
  misc_feature (37)..(353): Homolog of NCBI NO: 23019401 NR Description: hypothetical protein [Thermobifida fusca]
  misc_feature (38)..(347): Homolog of NCBI NO: 13562004 NR Description: major ampullate spidroin 2-like protein [Nephila
  misc_feature (38)..(347): Homolog of NCBI NO: 13562004 NR Description: major ampullate spidroin 2-like protein [Nephila
  misc_feature (20)..(256): Homolog of NCBI NO: 22959503 NR Description: hypothetical protein [Rhodobacter sphaeroides]
  misc_feature (48)..(349): Homolog of NCBI NO: 29247944 NR Description: GLP_26_54603_52153 [Giardia lamblia ATCC 50803]
  misc_feature (10)..(349): Homolog of NCBI NO: 22957039 NR Description: hypothetical protein [Rhodobacter sphaeroides]
  misc_feature (37)..(332): Homolog of NCBI NO: 11362193 NR Description: hypothetical protein
  misc_feature (53)..(352): Homolog of NCBI NO: 22960097 NR Description: hypothetical protein [Rhodobacter sphaeroides]
  misc_feature (12)..(349): Homolog of NCBI NO: 25989121 NR Description: putative PHA synthase [Streptomyces aureofaciens]
  misc_feature (38)..(347): Homolog of NCBI NO: 10140993 NR Description: putative immediate early protein [Alcelaphine
THYQLPNTNPRIRAQKLGQRHGRSCSCCRRLARRLLRPGRVQGPGGDRRRAGATGPDAGQRGGERPRPQGAGGGPGGQPRVGGGEGGGQQRRAAARLRRPRRRGVRRHRGRARVAGHPVRRPRPAHPRPRPHLDRQRGPPRGVHLLPPRDGPHQGVPGEGDPVLRGAAAGGRGDAVRAELPGDGARAAGVPGHGGGAGRQGAPLHLHRAEQGRHQVHAGARVGGRLRHHRQGRGRAESPRAGDGRGVAAGGRRREDHPRAEAADAGVPGPEGPADVVQHGGGDARQGAQLRHVRRRLRDTGGLRAPVRRDHRGGEHPVPVGEGRRAHPRQPRNAPRPPAVAGAQEGPRRHMQVISFHASPTLTNWLVN

SEQ ID NO: 65653 - protein, 332 aa, Triticum aestivum
  peptide (1)..(332): Ceres Seq. ID no. 13657172
  misc_feature (59)..(332): Homolog of NCBI NO: 22985582 NR Description: hypothetical protein [Burkholderia fungorum]
  misc_feature (69)..(328): Homolog of NCBI NO: 9937235 NR Description: SyrP-like protein [Streptomyces verticillus]
  misc_feature (19)..(328): Homolog of NCBI NO: 23128402 NR Description: hypothetical protein [Nostoc punctiforme]
  misc_feature (51)..(329): Homolog of NCBI NO: 29830181 NR Description: putative SyrP-like protein [Streptomyces
  misc_feature (29)..(329): Homolog of NCBI NO: 23468398 NR Description: hypothetical protein [Pseudomonas syringae pv.
  misc_feature (29)..(329): Homolog of NCBI NO: 1890776 NR Description: syringomycin biosynthesis enzyme
  misc_feature (50)..(329): Homolog of NCBI NO: 26541507 NR Description: putative regulatory protein [Streptomyces
  misc_feature (22)..(328): Homolog of NCBI NO: 23128425 NR Description: hypothetical protein [Nostoc punctiforme]
  misc_feature (28)..(332): Homolog of NCBI NO: 15232542 NR Description: expressed protein [Arabidopsis thaliana]
  misc_feature (8)..(329): Homolog of NCBI NO: 34906388 NR Description: P0710E05.6 [Oryza sativa (japonica
MGEAAAVVAASRDGFFGLGECKGQVVIDGEQVPLVLTPGSEEVSGHDHKALVAALVANREWVEEKVVANSGVLLRGFGVRDAVEFDAIVDALGWPDIRYVGPAPRTHVHGRIWTANEGPLEEFIYYHHEMVLIKEFPGKVILFCEVPPPEGGETPFVPSFRVTERALQEFPDMVEELDAKGLRYTFTALSKDDTKSMRGRGWEDAFATTDKAVAEQRARALGMDVEWLPEEGGVRTILGPRQLTRVFPGRKGRRMWFNTVVGMHGKELSSATFADGSEIPADFVRRCGEIIEEESIQFRWEKGDVLILDNLATLHGRRPSLAPRRVLVATCK

SEQ ID NO: 65654 - protein, 203 aa, Triticum aestivum
  peptide (1)..(203): Ceres Seq. ID no. 13657173
  misc_feature (1)..(203): Homolog of NCBI NO: 22985582 NR Description: hypothetical protein [Burkholderia fungorum]
  misc_feature (1)..(199): Homolog of NCBI NO: 9937235 NR Description: SyrP-like protein [Streptomyces verticillus]
  misc_feature (1)..(199): Homolog of NCBI NO: 23128402 NR Description: hypothetical protein [Nostoc punctiforme]
  misc_feature (1)..(200): Homolog of NCBI NO: 29830181 NR Description: putative SyrP-like protein [Streptomyces
  misc_feature (1)..(200): Homolog of NCBI NO: 23468398 NR Description: hypothetical protein [Pseudomonas syringae pv.
  misc_feature (1)..(200): Homolog of NCBI NO: 1890776 NR Description: syringomycin biosynthesis enzyme
  misc_feature (1)..(200): Homolog of NCBI NO: 26541507 NR Description: putative regulatory protein [Streptomyces
  misc_feature (1)..(199): Homolog of NCBI NO: 23128425 NR Description: hypothetical protein [Nostoc punctiforme]
  misc_feature (1)..(203): Homolog of NCBI NO: 15232542 NR Description: expressed protein [Arabidopsis thaliana]
  misc_feature (1)..(200): Homolog of NCBI NO: 34906388 NR Description: P0710E05.6 [Oryza sativa (japonica
MVLIKEFPGKVILFCEVPPPEGGETPFVPSFRVTERALQEFPDMVEELDAKGLRYTFTALSKDDTKSMRGRGWEDAFATTDKAVAEQRARALGMDVEWLPEEGGVRTILGPRQLTRVFPGRKGRRMWFNTVVGMHGKELSSATFADGSEIPADFVRRCGEIIEEESIQFRWEKGDVLILDNLATLHGRRPSLAPRRVLVATCK

SEQ ID NO: 65655 - DNA, 1498 bp, Triticum aestivum
  misc_feature (1)..(1498): Ceres Seq. ID no. 14302388
gtacgctgccacgccagagcagagcagagcagaatccggtagccagatcgaacgccccaccctctctccctccctccctcgcccccttccgatcgagcccgtcgccatggcgccgccccgcgtcggcctgctcctcgccctcgccttgtgcctcgcgttcgcgcgcgcggacgcggccgtgagggagctcagggtcgggtactacgcgcagacgtgcccccgcgcggaggagatcgtgcggcgcgtcatggcccgcgcgctcgcgcgcgaggcccgcagcgtcgcctccgtcatgcgcctccagttccacgactgcttcgtcaacggatgcgacgggtcggtgctgatggacgcgacgccgacgatggcgggggagaaggaggcgctctccaacatcaactccctccgctccttcgaggtcgtggacgaggtcaagagcgccctggaggagcagtgccccggcgtcgtctcctgcgccgacatcatcatcatggccgcccgcgacgccgtcgtgctgactggtggacccaactgggacgtgaggctcgggcgcgaggacagtctgacggcgagccaggaggactcggacaacatcatgccgagcccgcgcgccaacgcgagcgcgctcatccgcctcttcgccggctacaagctcaccgtcaccgacctcgtcgcgctctccggctcgcactccatcggcgaggcccgctgcttctccatcgtcttccgcctctacaaccagtcgggctccggccgccccgacccccacatggacccggcctaccgccaggcgctcgacgcgctctgccccctcaccggcgaccagaacgtcaccggcggcctggacgctaccccggtcgtcttcgacaaccagtacttcaaggacctggtccacctccgcggattcctcaactccgaccagacgctcttctccgacaacgaggggacccggcgggtggtgacgcagttcagccagaaccaggacgccttcttcagggccttcatcgaggggatggtcaagctgggcgagctccagaaccccaggaagggggagatccggcgcaactgccgcgtcgccaacggcgggcggccgccgctggagaagcaggtcgcgccgttccgggtgctggacttctgaacctggttctacggtaggcctgtaggtgtctcacgggagctctggtgtgggagcgatccatatgcttgacataggtttggtcgtgtcgcagttctgtgcctacccaagaatggtttcaggtctggctactgcttattgctaattgttgaggaataatagagaaattgatgcctctggtactttgattgccaaaggctgcattaaggtttgcttctttgttgattctccaaagattagctagcgatagtgcaagatgcttacttagagagatggttacaagaacaaataatgattttaagagtcatagaactagcgcttaatgtttagtttggttttaaaactttgaaaatatgaaattgc

SEQ ID NO: 65656 - protein, 378 aa, Triticum aestivum
  peptide (1)..(378): Ceres Seq. ID no. 14302389
  misc_feature (79)..(326): Pfam Name: Peroxidase Pfam Description: Peroxidase
  misc_feature (44)..(360): Homolog of NCBI NO: 1402918 NR Description: peroxidase [Arabidopsis thaliana]
  misc_feature (43)..(360): Homolog of NCBI NO: 18420061 NR Description: peroxidase, putative [Arabidopsis thaliana]
  misc_feature (43)..(360): Homolog of NCBI NO: 21593604 NR Description: peroxidase ATP N [Arabidopsis thaliana]
  misc_feature (43)..(360): Homolog of NCBI NO: 1403134 NR Description: peroxidase [Arabidopsis thaliana]
  misc_feature (41)..(360): Homolog of NCBI NO: 15224114 NR Description: peroxidase, putative [Arabidopsis thaliana]
  misc_feature (66)..(360): Homolog of NCBI NO: 21537275 NR Description: putative peroxidase [Arabidopsis thaliana]
  misc_feature (43)..(360): Homolog of NCBI NO: 15224116 NR Description: peroxidase, putative [Arabidopsis thaliana]
  misc_feature (43)..(360): Homolog of NCBI NO: 15234394 NR Description: peroxidase, putative [Arabidopsis thaliana]
  misc_feature (41)..(367): Homolog of NCBI NO: 15227200 NR Description: putative peroxidase [Arabidopsis thaliana]
  misc_feature (49)..(364): Homolog of NCBI NO: 19698448 NR Description: gaiacol peroxidase [Gossypium hirsutum]
YAATPEQSRAESGSQIERPTLSPSLPRPLPIEPVAMAPPRVGLLLALALCLAFARADAAVRELRVGYYAQTCPRAEEIVRRVMARALAREARSVASVMRLQFHDCFVNGCDGSVLMDATPTMAGEKEALSNINSLRSFEVVDEVKSALEEQCPGVVSCADIIIMAARDAVVLTGGPNWDVRLGREDSLTASQEDSDNIMPSPRANASALIRLFAGYKLTVTDLVALSGSHSIGEARCFSIVFRLYNQSGSGRPDPHMDPAYRQALDALCPLTGDQNVTGGLDATPVVFDNQYFKDLVHLRGFLNSDQTLFSDNEGTRRVVTQFSQNQDAFFRAFIEGMVKLGELQNPRKGEIRRNCRVANGGRPPLEKQVAPFRVLDF

SEQ ID NO: 65657 - protein, 343 aa, Triticum aestivum
  peptide (1)..(343): Ceres Seq. ID no. 14302390
  misc_feature (44)..(291): Pfam Name: Peroxidase Pfam Description: Peroxidase
  misc_feature (9)..(325): Homolog of NCBI NO: 1402918 NR Description: peroxidase [Arabidopsis thaliana]
  misc_feature (8)..(325): Homolog of NCBI NO: 18420061 NR Description: peroxidase, putative [Arabidopsis thaliana]
  misc_feature (8)..(325): Homolog of NCBI NO: 21593604 NR Description: peroxidase ATP N [Arabidopsis thaliana]
  misc_feature (8)..(325): Homolog of NCBI NO: 1403134 NR Description: peroxidase [Arabidopsis thaliana]
  misc_feature (6)..(325): Homolog of NCBI NO: 15224114 NR Description: peroxidase, putative [Arabidopsis thaliana]
  misc_feature (31)..(325): Homolog of NCBI NO: 21537275 NR Description: putative peroxidase [Arabidopsis thaliana]
  misc_feature (8)..(325): Homolog of NCBI NO: 15224116 NR Description: peroxidase, putative [Arabidopsis thaliana]
  misc_feature (8)..(325): Homolog of NCBI NO: 15234394 NR Description: peroxidase, putative [Arabidopsis thaliana]
  misc_feature (6)..(332): Homolog of NCBI NO: 15227200 NR Description: putative peroxidase [Arabidopsis thaliana]
  misc_feature (14)..(329): Homolog of NCBI NO: 19698448 NR Description: gaiacol peroxidase [Gossypium hirsutum]
MAPPRVGLLLALALCLAFARADAAVRELRVGYYAQTCPRAEEIVRRVMARALAREARSVASVMRLQFHDCFVNGCDGSVLMDATPTMAGEKEALSNINSLRSFEVVDEVKSALEEQCPGVVSCADIIIMAARDAVVLTGGPNWDVRLGREDSLTASQEDSDNIMPSPRANASALIRLFAGYKLTVTDLVALSGSHSIGEARCFSIVFRLYNQSGSGRPDPHMDPAYRQALDALCPLTGDQNVTGGLDATPVVFDNQYFKDLVHLRGFLNSDQTLFSDNEGTRRVVTQFSQNQDAFFRAFIEGMVKLGELQNPRKGEIRRNCRVANGGRPPLEKQVAPFRVLDF

SEQ ID NO: 65658 - protein, 296 aa, Triticum aestivum
  peptide (1)..(296): Ceres Seq. ID no. 14302391
  misc_feature (1)..(244): Pfam Name: Peroxidase Pfam Description: Peroxidase
  misc_feature (1)..(278): Homolog of NCBI NO: 1402918 NR Description: peroxidase [Arabidopsis thaliana]
  misc_feature (1)..(278): Homolog of NCBI NO: 18420061 NR Description: peroxidase, putative [Arabidopsis thaliana]
  misc_feature (1)..(278): Homolog of NCBI NO: 21593604 NR Description: peroxidase ATP N [Arabidopsis thaliana]
  misc_feature (1)..(278): Homolog of NCBI NO: 1403134 NR Description: peroxidase [Arabidopsis thaliana]
  misc_feature (1)..(278): Homolog of NCBI NO: 15224114 NR Description: peroxidase, putative [Arabidopsis thaliana]
  misc_feature (1)..(278): Homolog of NCBI NO: 21537275 NR Description: putative peroxidase [Arabidopsis thaliana]
  misc_feature (1)..(278): Homolog of NCBI NO: 15224116 NR Description: peroxidase, putative [Arabidopsis thaliana]
  misc_feature (1)..(278): Homolog of NCBI NO: 15234394 NR Description: peroxidase, putative [Arabidopsis thaliana]
  misc_feature (1)..(285): Homolog of NCBI NO: 15227200 NR Description: putative peroxidase [Arabidopsis thaliana]
  misc_feature (1)..(282): Homolog of NCBI NO: 19698448 NR Description: gaiacol peroxidase [Gossypium hirsutum]
MARALAREARSVASVMRLQFHDCFVNGCDGSVLMDATPTMAGEKEALSNINSLRSFEVVDEVKSALEEQCPGVVSCADIIIMAARDAVVLTGGPNWDVRLGREDSLTASQEDSDNIMPSPRANASALIRLFAGYKLTVTDLVALSGSHSIGEARCFSIVFRLYNQSGSGRPDPHMDPAYRQALDALCPLTGDQNVTGGLDATPVVFDNQYFKDLVHLRGFLNSDQTLFSDNEGTRRVVTQFSQNQDAFFRAFIEGMVKLGELQNPRKGEIRRNCRVANGGRPPLEKQVAPFRVLDF

SEQ ID NO: 65659 - DNA, 981 bp, Triticum aestivum
  misc_feature (1)..(981): Ceres Seq. ID no. 13546266
tatctcataatatggcactgttcaatggcaatcacatccgtgttgacatggcgtgtccacctcgtaaaaagctaagaggagaaggacctctttatgacagaaagaggacagtgtttgttggtaaccttccattcgatgtaaaggatgaggagctctaccagctgttctgcggtcccagtggaccacaaggtgatgttgaagctatacgagttgtcagagatccagattcaagcctaggaaagggtatcgcctatgttctattcaaaacaagggaaggcgctaactctgttgtcaaaaaacgtggccttaagatcagagatcgcgttttgaggctcacccatgcaaaggcagccgatgcgacgccgaagaaggcagattctgggaaaaagcgcggcactccaaaacagacacctttcacgccaggcagcaagtcccgcgaaggcagcgacagcaacaaacgcaaggcgccggcaagcctgtcttaccaaggcctgaagtcgaccaaatctggcgtcgtgaagaaggtgaaggtggcccggcgccccgtcaaccaaggcaagcagcaaggcaggcctagcgagacgggacaaagcgagagcgcccgcaaagccaagcggcccgccgtggcagccaggaaggcgaagcagctgaacaagaaacgcaagcaggacggctcgacgcccgagaacacgcaccggagcaagaaggcgaggaagtagccgtccgtccctgtcgtggatcgttcgcttcactttgtaatgggagtgttgagagttttggacaagatgaggtcctggtgatagctgccttgggttgaacgaggaagaaaatacgaggttgatgttgctgatgtaatgctgggaagtgtcgagtgtagtcatttggtacttgcctttggagtcgtagcccctgtactaatgtcaaaatgatgctcatctatgcaacatcatgtactgacaccatttttgcgttgcttgttct

SEQ ID NO: 65660 - protein, 238 aa, Triticum aestivum
  peptide (1)..(238): Ceres Seq. ID no. 13546267
  misc_feature (37)..(111): Pfam Name: RNA recognition motif. (a.k.a. RRM, RBD, or RNP domain) Pfam Description: RNA recognition motif. (a.k.a. RRM, RBD, or RNP
  misc_feature (2)..(112): Homolog of NCBI NO: 7498869 NR Description: hypothetical protein F11A10.2 - Caenorhabditis
  misc_feature (2)..(180): Homolog of NCBI NO: 17539754 NR Description: RNA recognition motif containing protein (43.9
  misc_feature (31)..(180): Homolog of NCBI NO: 39593884 NR Description: Hypothetical protein CBG06224 [Caenorhabditis
  misc_feature (3)..(221): Homolog of NCBI NO: 6324532 NR Description: Nucleolar Protein
  misc_feature (1)..(214): Homolog of NCBI NO: 19115130 NR Description: putative RNA-binding protein [Schizosaccharomyces
  misc_feature (1)..(238): Homolog of NCBI NO: 21554835 NR Description: unknown [Arabidopsis thaliana]
  misc_feature (1)..(238): Homolog of NCBI NO: 15237960 NR Description: RNA recognition motif (RRM)-containing protein
  misc_feature (1)..(238): Homolog of NCBI NO: 29126350 NR Description: unknown protein [Oryza sativa (japonica
SHNMALFNGNHIRVDMACPPRKKLRGEGPLYDRKRTVFVGNLPFDVKDEELYQLFCGPSGPQGDVEAIRVVRDPDSSLGKGIAYVLFKTREGANSVVKKRGLKIRDRVLRLTHAKAADATPKKADSGKKRGTPKQTPFTPGSKSREGSDSNKRKAPASLSYQGLKSTKSGVVKKVKVARRPVNQGKQQGRPSETGQSESARKAKRPAVAARKAKQLNKKRKQDGSTPENTHRSKKARK

SEQ ID NO: 65661 - protein, 235 aa, Triticum aestivum
  peptide (1)..(235): Ceres Seq. ID no. 13546268
  misc_feature (34)..(108): Pfam Name: RNA recognition motif. (a.k.a. RRM, RBD, or RNP domain) Pfam Description: RNA recognition motif. (a.k.a. RRM, RBD, or RNP
  misc_feature (1)..(109): Homolog of NCBI NO: 7498869 NR Description: hypothetical protein F11A10.2 - Caenorhabditis
  misc_feature (1)..(177): Homolog of NCBI NO: 17539754 NR Description: RNA recognition motif containing protein (43.9
  misc_feature (28)..(177): Homolog of NCBI NO: 39593884 NR Description: Hypothetical protein CBG06224 [Caenorhabditis
  misc_feature (1)..(218): Homolog of NCBI NO: 6324532 NR Description: Nucleolar Protein
  misc_feature (1)..(211): Homolog of NCBI NO: 19115130 NR Description: putative RNA-binding protein [Schizosaccharomyces
  misc_feature (1)..(235): Homolog of NCBI NO: 21554835 NR Description: unknown [Arabidopsis thaliana]
  misc_feature (1)..(235): Homolog of NCBI NO: 15237960 NR Description: RNA recognition motif (RRM)-containing protein
  misc_feature (1)..(235): Homolog of NCBI NO: 29126350 NR Description: unknown protein [Oryza sativa (japonica
MALFNGNHIRVDMACPPRKKLRGEGPLYDRKRTVFVGNLPFDVKDEELYQLFCGPSGPQGDVEAIRVVRDPDSSLGKGIAYVLFKTREGANSVVKKRGLKIRDRVLRLTHAKAADATPKKADSGKKRGTPKQTPFTPGSKSREGSDSNKRKAPASLSYQGLKSTKSGVVKKVKVARRPVNQGKQQGRPSETGQSESARKAKRPAVAARKAKQLNKKRKQDGSTPENTHRSKKARK

SEQ ID NO: 65662 - protein, 223 aa, Triticum aestivum
  peptide (1)..(223): Ceres Seq. ID no. 13546269
  misc_feature (22)..(96): Pfam Name: RNA recognition motif. (a.k.a. RRM, RBD, or RNP domain) Pfam Description: RNA recognition motif. (a.k.a. RRM, RBD, or RNP
  misc_feature (1)..(97): Homolog of NCBI NO: 7498869 NR Description: hypothetical protein F11A10.2 - Caenorhabditis
  misc_feature (1)..(165): Homolog of NCBI NO: 17539754 NR Description: RNA recognition motif containing protein (43.9
  misc_feature (16)..(165): Homolog of NCBI NO: 39593884 NR Description: Hypothetical protein CBG06224 [Caenorhabditis
  misc_feature (1)..(206): Homolog of NCBI NO: 6324532 NR Description: Nucleolar Protein
  misc_feature (1)..(199): Homolog of NCBI NO: 19115130 NR Description: putative RNA-binding protein [Schizosaccharomyces
  misc_feature (1)..(223): Homolog of NCBI NO: 21554835 NR Description: unknown [Arabidopsis thaliana]
  misc_feature (1)..(223): Homolog of NCBI NO: 15237960 NR Description: RNA recognition motif (RRM)-containing protein
  misc_feature (1)..(223): Homolog of NCBI NO: 29126350 NR Description: unknown protein [Oryza sativa (japonica
MACPPRKKLRGEGPLYDRKRTVFVGNLPFDVKDEELYQLFCGPSGPQGDVEAIRVVRDPDSSLGKGIAYVLFKTREGANSVVKKRGLKIRDRVLRLTHAKAADATPKKADSGKKRGTPKQTPFTPGSKSREGSDSNKRKAPASLSYQGLKSTKSGVVKKVKVARRPVNQGKQQGRPSETGQSESARKAKRPAVAARKAKQLNKKRKQDGSTPENTHRSKKARK

SEQ ID NO: 65663 - DNA, 1396 bp, Triticum aestivum
  misc_feature (1)..(1396): Ceres Seq. ID no. 14301514
gttgattaccaaagactagtcctggtgttgccgcttttcactttccccctcccccctctcatcggatctggactctggagaggagacgagattcgccggcgatggcagaggagtcgtgggaggagggtcgggggttggacttcctcgagagcctgggcccggacatctccgccaccgtcttcagcctgctcgacgaccccgccgacctcgcgcgcgccaccaccgtctcccgctcctggcgccgattcgttattgcaaaccagttcagcaagatcctgtgcctgcgggtttatccggaggtgtccaacttcacacgtgttgagttgagcagcatcagcagtgcacaccgaaatgctggatcaagtgcttgtgctgggctggagaagctcgggagggatcatagggtgtatatgcatcttagccatggccttctctcgccgtacgaccccaaggattgcatcagtcactgcatgggcgcatccagcactgatcgtttccctgaggaggccatagaaaataccattgaaccggttgatcgtcaggagagtaaactgtcttattggtcgagtggtggccagaaagatcctgctgtgccagaatgcctgatatatagccttcagtcagagctgtgtcttgttgatgaaatcaggatacggccattaaaagcattttttcgatatggtcatccgatatattcagcaaaacacgtccggttccgcttgggctatctaaaaccaccccactggtctgaaacacatgtatatgttgaaagtgatgcggagctgattgatgatagcaactatatctggacgtacacatctccagaatttccaatgctacaggaaaatgtgatgcagtcttttaagctaccacactcagttctatgtattggtggagtggtgaagattgagcttcttggcagggtccacaaggacacgtttgatggtcggtactacatatgtgtgtctcatgtccaactagtcgggaagccactgtcagaagattttggggtcgccccgagcaaaaatgatgtagttctcagttactatctggattatcgtagattcgggggacgatcacagcaaagtacatgactttgcgatgaggatctggcacttcggtatgtcttgagggataggagaactgaaccatgagtgttagcacgctgtcctgtgggtacataaaagagatgcaacagaggagaagcttccatacaagtgaagcatatctcgtcgagctcgtgtctatcggtttcgaataaaagaagtcctttgtgatcccgtgggaaactgaaaatgtatttgtttgtgtaactgacaaggacgaaagagacgcatgattgactcgcttgttataaaatcactgctaatattattaagatcgagtgagtccatct

SEQ ID NO: 65664 - protein, 330 aa, Triticum aestivum
  peptide (1)..(330): Ceres Seq. ID no. 14301515
  misc_feature (15)..(61): Pfam Name: F-box domain Pfam Description: F-box domain
  misc_feature (238)..(322): Homolog of NCBI NO: 28850404 NR Description: hypothetical protein [Dictyostelium discoideum]
  misc_feature (101)..(209): Homolog of NCBI NO: 28850404 NR Description: hypothetical protein [Dictyostelium discoideum]
  misc_feature (239)..(313): Homolog of NCBI NO: 18308222 NR Description: unknown protein [Oryza sativa]
  misc_feature (50)..(218): Homolog of NCBI NO: 7452420 NR Description: hypothetical protein A_TM018A10.10 - Arabidopsis
  misc_feature (145)..(304): Homolog of NCBI NO: 28393062 NR Description: putative F-box protein [Arabidopsis thaliana]
  misc_feature (12)..(304): Homolog of NCBI NO: 18411435 NR Description: F-box protein family [Arabidopsis thaliana]
  misc_feature (1)..(323): Homolog of NCBI NO: 31193913 NR Description: unknown protein [Oryza sativa (japonica
MAEESWEEGRGLDFLESLGPDISATVFSLLDDPADLARATTVSRSWRRFVIANQFSKILCLRVYPEVSNFTRVELSSISSAHRNAGSSACAGLEKLGRDHRVYMHLSHGLLSPYDPKDCISHCMGASSTDRFPEEAIENTIEPVDRQESKLSYWSSGGQKDPAVPECLIYSLQSELCLVDEIRIRPLKAFFRYGHPIYSAKHVRFRLGYLKPPHWSETHVYVESDAELIDDSNYIWTYTSPEFPMLQENVMQSFKLPHSVLCIGGVVKIELLGRVHKDTFDGRYYICVSHVQLVGKPLSEDFGVAPSKNDVVLSYYLDYRRFGGRSQQST

SEQ ID NO: 65665 - protein, 227 aa, Triticum aestivum
  peptide (1)..(227): Ceres Seq. ID no. 14301516
  misc_feature (135)..(219): Homolog of NCBI NO: 28850404 NR Description: hypothetical protein [Dictyostelium discoideum]
  misc_feature (1)..(106): Homolog of NCBI NO: 28850404 NR Description: hypothetical protein [Dictyostelium discoideum]
  misc_feature (136)..(210): Homolog of NCBI NO: 18308222 NR Description: unknown protein [Oryza sativa]
  misc_feature (1)..(115): Homolog of NCBI NO: 7452420 NR Description: hypothetical protein A_TM018A10.10 - Arabidopsis
  misc_feature (42)..(201): Homolog of NCBI NO: 28393062 NR Description: putative F-box protein [Arabidopsis thaliana]
  misc_feature (1)..(201): Homolog of NCBI NO: 18411435 NR Description: F-box protein family [Arabidopsis thaliana]
  misc_feature (1)..(220): Homolog of NCBI NO: 31193913 NR Description: unknown protein [Oryza sativa (japonica
MHLSHGLLSPYDPKDCISHCMGASSTDRFPEEAIENTIEPVDRQESKLSYWSSGGQKDPAVPECLIYSLQSELCLVDEIRIRPLKAFFRYGHPIYSAKHVRFRLGYLKPPHWSETHVYVESDAELIDDSNYIWTYTSPEFPMLQENVMQSFKLPHSVLCIGGVVKIELLGRVHKDTFDGRYYICVSHVQLVGKPLSEDFGVAPSKNDVVLSYYLDYRRFGGRSQQST

SEQ ID NO: 65666 - protein, 207 aa, Triticum aestivum
  peptide (1)..(207): Ceres Seq. ID no. 14301517
  misc_feature (115)..(199): Homolog of NCBI NO: 28850404 NR Description: hypothetical protein [Dictyostelium discoideum]
  misc_feature (1)..(86): Homolog of NCBI NO: 28850404 NR Description: hypothetical protein [Dictyostelium discoideum]
  misc_feature (116)..(190): Homolog of NCBI NO: 18308222 NR Description: unknown protein [Oryza sativa]
  misc_feature (1)..(95): Homolog of NCBI NO: 7452420 NR Description: hypothetical protein A_TM018A10.10 - Arabidopsis
  misc_feature (22)..(181): Homolog of NCBI NO: 28393062 NR Description: putative F-box protein [Arabidopsis thaliana]
  misc_feature (1)..(181): Homolog of NCBI NO: 18411435 NR Description: F-box protein family [Arabidopsis thaliana]
  misc_feature (1)..(200): Homolog of NCBI NO: 31193913 NR Description: unknown protein [Oryza sativa (japonica
MGASSTDRFPEEAIENTIEPVDRQESKLSYWSSGGQKDPAVPECLIYSLQSELCLVDEIRIRPLKAFFRYGHPIYSAKHVRFRLGYLKPPHWSETHVYVESDAELIDDSNYIWTYTSPEFPMLQENVMQSFKLPHSVLCIGGVVKIELLGRVHKDTFDGRYYICVSHVQLVGKPLSEDFGVAPSKNDVVLSYYLDYRRFGGRSQQST

SEQ ID NO: 65667 - DNA, 1311 bp, Triticum aestivum
  misc_feature (1)..(1311): Ceres Seq. ID no. 15170183
aacatccaaatcgaaaaacagtagagagtatggctcgtggcgcccctctgcttgcagcagcagtggtagctgttgtggcacttgggtctgtaggggcgacagagcaggaggccgccggcttgaggcagcctccggtggcgcagggcctgtcgttcgagttctaccggcagagctgccccagggcagagtccatcgtgcgtgacttcgtccgggacgccgtccgcaaggacatcggcctcgccgccggcctgctccgcctccacttccacgattgcttcgtgcagggctgcgacgcgtcggtgcttctggacgggtcggccacggggccgggggagcagcaggcgccacccaacctcacgctccgcccgtccgccttcaaggccgtcaacgacatccgggaccggctggagcgtgagtgccgcggcgccgtcgtctcctgctccgacatcctggccctcgccgcccgcgactcggtggtcgcctcgggcgggccggagtaccgcgtgcccctcggccgccgcgacagccccaggttcgccacggcacaggacgtgctgtccggtcttcccccgccgtcctcgaacgtgccgtccctcctcgatgtgctccgggagatcggcctcgacgccaccgacctcgtcgcgctctccggcggccacaccgtggggctcgggcactgcacctccttcgacgaccgcctcttccctcgcccggaccccaccatgagcccggacttccttggcaggctgaaacgaacgtgtccatccaagggcaccgacgcgcgcacagtgctggacgtgcgcaccccaaacgtgttcgacaacaagtactacgtgaacctggtgaaccgggaggggctcttcgtgtccgaccaggacctcttcacgaacgccaccacccggcccatcgtggagcgcttcgcgcgcagccagcgtgacttcttcgaccagttcggcgtatccatggtcaagatgggccagatcaaggtgctcactggcgaccagggccaggttcgccgcaactgctccgctcgcaaccccgggactgctgacgggctccagtggtcgtccctggtgcagaccgtcgtcgacgccacccggagagcctcggtttgtaaatctatggtcgacaagtctatgtagtgtgtactgtacctggactagtagctgttagccatgcatgtggtaataaaaactgagcagggcaacccatggtcgacgaggctgtgtacgtacctgtgtaatgtaccttgtcgtgactcaaacgtgtgctaggctgctagctagcagacctacggtgaccagttagttt

SEQ ID NO: 65668 - protein, 379 aa, Triticum aestivum
  peptide (1)..(379): Ceres Seq. ID no. 15170184
  misc_feature (65)..(309): Pfam Name: Peroxidase Pfam Description: Peroxidase
  misc_feature (40)..(345): Homolog of NCBI NO: 39546236 NR Description: OSJNBa0089N06.6 [Oryza sativa (japonica
  misc_feature (13)..(345): Homolog of NCBI NO: 39545735 NR Description: OSJNBa0071I13.13 [Oryza sativa (japonica
  misc_feature (46)..(345): Homolog of NCBI NO: 5777624 NR Description: CAA303712.1 protein [Oryza sativa]
  misc_feature (10)..(364): Homolog of NCBI NO: 34905826 NR Description: putative peroxidase [Oryza sativa (japonica
  misc_feature (10)..(351): Homolog of NCBI NO: 100603 NR Description: peroxidase (EC 1.11.1.7) BP-2A precursor - barley
  misc_feature (10)..(364): Homolog of NCBI NO: 421984 NR Description: peroxidase (EC 1.11.1.7) BP-2B - barley
  misc_feature (16)..(357): Homolog of NCBI NO: 34905838 NR Description: putative peroxidase [Oryza sativa (japonica
  misc_feature (42)..(347): Homolog of NCBI NO: 2624498 NR Description: Crystal Structure Of Barley Grain Peroxidase 1
  misc_feature (10)..(363): Homolog of NCBI NO: 82410 NR Description: peroxidase (EC 1.11.1.7) BP1 precursor - barley
  misc_feature (10)..(364): Homolog of NCBI NO: 22001285 NR Description: peroxidase 1 [Triticum aestivum]
HPNRKTVESMARGAPLLAAAVVAVVALGSVGATEQEAAGLRQPPVAQGLSFEFYRQSCPRAESIVRDFVRDAVRKDIGLAAGLLRLHFHDCFVQGCDASVLLDGSATGPGEQQAPPNLTLRPSAFKAVNDIRDRLERECRGAVVSCSDILALAARDSVVASGGPEYRVPLGRRDSPRFATAQDVLSGLPPPSSNVPSLLDVLREIGLDATDLVALSGGHTVGLGHCTSFDDRLFPRPDPTMSPDFLGRLKRTCPSKGTDARTVLDVRTPNVFDNKYYVNLVNREGLFVSDQDLFTNATTRPIVERFARSQRDFFDQFGVSMVKMGQIKVLTGDQGQVRRNCSARNPGTADGLQWSSLVQTVVDATRRASVCKSMVDKSM

SEQ ID NO: 65669 - protein, 370 aa, Triticum aestivum
  peptide (1)..(370): Ceres Seq. ID no. 15170185
  misc_feature (56)..(300): Pfam Name: Peroxidase Pfam Description: Peroxidase
  misc_feature (31)..(336): Homolog of NCBI NO: 39546236 NR Description: OSJNBa0089N06.6 [Oryza sativa (japonica
  misc_feature (4)..(336): Homolog of NCBI NO: 39545735 NR Description: OSJNBa0071I13.13 [Oryza sativa (japonica
  misc_feature (37)..(336): Homolog of NCBI NO: 5777624 NR Description: CAA303712.1 protein [Oryza sativa]
  misc_feature (1)..(355): Homolog of NCBI NO: 34905826 NR Description: putative peroxidase [Oryza sativa (japonica
  misc_feature (1)..(342): Homolog of NCBI NO: 100603 NR Description: peroxidase (EC 1.11.1.7) BP-2A precursor - barley
  misc_feature (1)..(355): Homolog of NCBI NO: 421984 NR Description: peroxidase (EC 1.11.1.7) BP-2B - barley
  misc_feature (7)..(348): Homolog of NCBI NO: 34905838 NR Description: putative peroxidase [Oryza sativa (japonica
  misc_feature (33)..(338): Homolog of NCBI NO: 2624498 NR Description: Crystal Structure Of Barley Grain Peroxidase 1
  misc_feature (1)..(354): Homolog of NCBI NO: 82410 NR Description: peroxidase (EC 1.11.1.7) BP1 precursor - barley
  misc_feature (1)..(355): Homolog of NCBI NO: 22001285 NR Description: peroxidase 1 [Triticum aestivum]
MARGAPLLAAAVVAVVALGSVGATEQEAAGLRQPPVAQGLSFEFYRQSCPRAESIVRDFVRDAVRKDIGLAAGLLRLHFHDCFVQGCDASVLLDGSATGPGEQQAPPNLTLRPSAFKAVNDIRDRLERECRGAVVSCSDILALAARDSVVASGGPEYRVPLGRRDSPRFATAQDVLSGLPPPSSNVPSLLDVLREIGLDATDLVALSGGHTVGLGHCTSFDDRLFPRPDPTMSPDFLGRLKRTCPSKGTDARTVLDVRTPNVFDNKYYVNLVNREGLFVSDQDLFTNATTRPIVERFARSQRDFFDQFGVSMVKMGQIKVLTGDQGQVRRNCSARNPGTADGLQWSSLVQTVVDATRRASVCKSMVDKSM

SEQ ID NO: 65670 - DNA, 1346 bp, Triticum aestivum
  misc_feature (1)..(1346): Ceres Seq. ID no. 12780534
gcacgctttcccctcctccaagctttcccccaccggcctcccccgtctcctgcccccacccattcgccgctgaccccccttccagaaccttccagaagcgaacgagagagcccgcaggggcggcgcaggggcatggcgatggcgacgcacacgggggtcgccgcctccaaggtcctcatcctcgtcggcgcaggcctgacgggatcgatcgtgctccggaatggccgcttgtcggatgtattggcggagctccaggagctcatgaagggcgtaaatcaaggagaaggctcgagcgcctatgacatggctcttatccaagctcagattcggcatttagcccaagaagtcagagatttaactttgtcaaagcccattaccatattgagtggcaaatcggactcgggaggcagtttatcgtcctacatactgccagcagctgcagttggagcattaggttattgctatatgtggtgtaagggatggtccttgtcagatgtcatgtttgtcacaaaacgcaatatggccagtgctgtcgacagcatgtcgaagcaattggagcaagtttcatcagcactagcagcaaccaaaagacatttaacaaaacgccttgagaatttggatggcaaaatggacgaacaagtggaagtctccaaacaaatccggaatgaggtcactgatgttaaaactgacctgtcccaaattggctttgatgttgaagcaattcaacagatggtagctggactggaagagaagattgagttgcttgacaataaacaggatgcggctaatgctggtatatggtatctctgccgaatggcaggaggtataaaagagggaataaatgccaagtttttccaagaagcggatgaaaaactcaagctcttagaccttgctcaaactgaaaagaagccagtgaagggtctcgaattgtttctggagagcaccaaggaggtaaaggcactcgactccaagccaaagaccatcatgcagaacgacgtcaagaaaccgacgaaaacgttcgacgtgcccataaaaagcgctgcggtgcacaggtcaaacaggttcttaattcgtaaagaaggcctcgcgctgtgattgacgcggatcgcctcgtggtgtacattgcgttcttggttgctttgtttgatagaaaaaatatagaagaagaataacctgcatcccatgtggtgattttccaggatagacaggttgatacgtctgaaggcaatttgtattcgtttctttgtatttttgcgtcatttcatgtttggtctgaagttgttcgcttgtaaacaagtgacataaaggaataaataattaaaacacgtttcgcattcttacatcct

SEQ ID NO: 65671 - protein, 364 aa, Triticum aestivum
  peptide (1)..(364): Ceres Seq. ID no. 12780535
  misc_feature (57)..(266): Homolog of NCBI NO: 22329773 NR Description: Expressed protein
  misc_feature (53)..(266): Homolog of NCBI NO: 30688826 NR Description: expressed protein [Arabidopsis thaliana]
  misc_feature (58)..(259): Homolog of NCBI NO: 34894218 NR Description: P0439B06.30 [Oryza sativa (japonica
  misc_feature (45)..(269): Homolog of NCBI NO: 34906300 NR Description: unnamed protein product [Oryza sativa (japonica
  misc_feature (47)..(300): Homolog of NCBI NO: 7487252 NR Description: hypothetical protein At2g02730 [imported] -
  misc_feature (47)..(300): Homolog of NCBI NO: 15227027 NR Description: expressed protein
  misc_feature (47)..(318): Homolog of NCBI NO: 25361065 NR Description: protein T7N9.6 [imported] - Arabidopsis thaliana
  misc_feature (47)..(318): Homolog of NCBI NO: 21537323 NR Description: unknown [Arabidopsis thaliana]
  misc_feature (47)..(318): Homolog of NCBI NO: 18396143 NR Description: bZIP family transcription factor
  misc_feature (47)..(352): Homolog of NCBI NO: 18390460 NR Description: expressed protein
ARFPLLQAFPHRPPPSPAPTHSPLTPLPEPSRSERESPQGRRRGMAMATHTGVAASKVLILVGAGLTGSIVLRNGRLSDVLAELQELMKGVNQGEGSSAYDMALIQAQIRHLAQEVRDLTLSKPITILSGKSDSGGSLSSYILPAAAVGALGYCYMWCKGWSLSDVMFVTKRNMASAVDSMSKQLEQVSSALAATKRHLTKRLENLDGKMDEQVEVSKQIRNEVTDVKTDLSQIGFDVEAIQQMVAGLEEKIELLDNKQDAANAGIWYLCRMAGGIKEGINAKFFQEADEKLKLLDLAQTEKKPVKGLELFLESTKEVKALDSKPKTIMQNDVKKPTKTFDVPIKSAAVHRSNRFLIRKEGLAL

SEQ ID NO: 65672 - protein, 320 aa, Triticum aestivum
  peptide (1)..(320): Ceres Seq. ID no. 12780536
  misc_feature (13)..(222): Homolog of NCBI NO: 22329773 NR Description: Expressed protein
  misc_feature (9)..(222): Homolog of NCBI NO: 30688826 NR Description: expressed protein [Arabidopsis thaliana]
  misc_feature (14)..(215): Homolog of NCBI NO: 34894218 NR Description: P0439B06.30 [Oryza sativa (japonica
  misc_feature (1)..(225): Homolog of NCBI NO: 34906300 NR Description: unnamed protein product [Oryza sativa (japonica
  misc_feature (3)..(256): Homolog of NCBI NO: 7487252 NR Description: hypothetical protein At2g02730 [imported] -
  misc_feature (3)..(256): Homolog of NCBI NO: 15227027 NR Description: expressed protein
  misc_feature (3)..(274): Homolog of NCBI NO: 25361065 NR Description: protein T7N9.6 [imported] - Arabidopsis thaliana
  misc_feature (3)..(274): Homolog of NCBI NO: 21537323 NR Description: unknown [Arabidopsis thaliana]
  misc_feature (3)..(274): Homolog of NCBI NO: 18396143 NR Description: bZIP family transcription factor
  misc_feature (3)..(308): Homolog of NCBI NO: 18390460 NR Description: expressed protein
MAMATHTGVAASKVLILVGAGLTGSIVLRNGRLSDVLAELQELMKGVNQGEGSSAYDMALIQAQIRHLAQEVRDLTLSKPITILSGKSDSGGSLSSYILPAAAVGALGYCYMWCKGWSLSDVMFVTKRNMASAVDSMSKQLEQVSSALAATKRHLTKRLENLDGKMDEQVEVSKQIRNEVTDVKTDLSQIGFDVEAIQQMVAGLEEKIELLDNKQDAANAGIWYLCRMAGGIKEGINAKFFQEADEKLKLLDLAQTEKKPVKGLELFLESTKEVKALDSKPKTIMQNDVKKPTKTFDVPIKSAAVHRSNRFLIRKEGLAL

SEQ ID NO: 65673 - protein, 318 aa, Triticum aestivum
  peptide (1)..(318): Ceres Seq. ID no. 12780537
  misc_feature (11)..(220): Homolog of NCBI NO: 22329773 NR Description: Expressed protein
  misc_feature (7)..(220): Homolog of NCBI NO: 30688826 NR Description: expressed protein [Arabidopsis thaliana]
  misc_feature (12)..(213): Homolog of NCBI NO: 34894218 NR Description: P0439B06.30 [Oryza sativa (japonica
  misc_feature (1)..(223): Homolog of NCBI NO: 34906300 NR Description: unnamed protein product [Oryza sativa (japonica
  misc_feature (1)..(254): Homolog of NCBI NO: 7487252 NR Description: hypothetical protein At2g02730 [imported] -
  misc_feature (1)..(254): Homolog of NCBI NO: 15227027 NR Description: expressed protein
  misc_feature (1)..(272): Homolog of NCBI NO: 25361065 NR Description: protein T7N9.6 [imported] - Arabidopsis thaliana
  misc_feature (1)..(272): Homolog of NCBI NO: 21537323 NR Description: unknown [Arabidopsis thaliana]
  misc_feature (1)..(272): Homolog of NCBI NO: 18396143 NR Description: bZIP family transcription factor
  misc_feature (1)..(306): Homolog of NCBI NO: 18390460 NR Description: expressed protein
MATHTGVAASKVLILVGAGLTGSIVLRNGRLSDVLAELQELMKGVNQGEGSSAYDMALIQAQIRHLAQEVRDLTLSKPITILSGKSDSGGSLSSYILPAAAVGALGYCYMWCKGWSLSDVMFVTKRNMASAVDSMSKQLEQVSSALAATKRHLTKRLENLDGKMDEQVEVSKQIRNEVTDVKTDLSQIGFDVEAIQQMVAGLEEKIELLDNKQDAANAGIWYLCRMAGGIKEGINAKFFQEADEKLKLLDLAQTEKKPVKGLELFLESTKEVKALDSKPKTIMQNDVKKPTKTFDVPIKSAAVHRSNRFLIRKEGLAL

SEQ ID NO: 65674 - DNA, 1263 bp, Triticum aestivum
  misc_feature (1)..(1263): Ceres Seq. ID no. 12780542
gaagaatcgctcctcccttcacgccgtcacgccgccactcacctgccgccgacagcccgccactcgcctcgacggccgtcgcccgtcgcgggtccccgaccgtactccccgccgccccctctccccctcctacatcgtcgccgccgtttcctcagttgctccccccgaccccccacacccccaaagccccctctgtactaccccgcccctcctctccattccttcgggtagcccaacgccgaccatgggtttcgcgcagctcgtcatcggccccgccggcagcggcaagtcgacctactgctctggtctgtatcaacattgcgagacggtgggcaggaggattcatatggtcaacctggatccagctgcagagcacttcagctatcccgtatctactgacattagagagctcatatcactggatgatgtcatggaggagcttgggatgggaccaaatggcggcctcatctattgcatggagcaccttgaagacaatttggatgattggttggatgaacaattggagaactacttggatgatgactatcttgtgtttgattgtccaggccagattgaactcttcactcatgttccagttctgcgtaactttgttgagtatctgaaacggaaaaatttcactgtttgcgctgtgtaccttttggattcgcagtttgtcagtgatgtcacaaaatacattagcggttgcatggcttctctttctgctatgattcaacttgagcttcctcatatcaacatcctttcaaagatggacctggtttccaataaaaaagatgtagaagactatctgaaccctgaggcacaggttcttctgtcacagctgaatcggcagatggcacctcggtttcacaagttaaacaaggctttagctgaactggttgatgattacaacatggtgaatttcataccacttgatttgaggaaggagagcagcattcagtatgtgctgtcaaacatcgacaactgcatccagtacggggaagacgccgatgtgaaggttagggacttcattcccgaggaggatgattaaccattttgatcgagcagaagcaacaaattagccagtatcatgtagaatgggtccatgggaggaggaattcaccgcacatggtagtatctgtttcaatcaatcattggtcgaaaaaacaagacataatgcatctgcgaagagtgtgtgggtcaccttctttcttatgcgtgtggttgactagcaattgcttgtgtaaacaaaccatcatcctcttc

SEQ ID NO: 65675 - protein, 348 aa, Triticum aestivum
  peptide (1)..(348): Ceres Seq. ID no. 12780543
  misc_feature (88)..(331): Pfam Name: Conserved hypothetical ATP binding protein Pfam Description: Conserved hypothetical ATP binding protein
  misc_feature (87)..(338): Homolog of NCBI NO: 6323272 NR Description: Protein required for cell viability; Ylr243wp
  misc_feature (84)..(338): Homolog of NCBI NO: 21361523 NR Description: protein x 0004 [Homo sapiens]
  misc_feature (84)..(338): Homolog of NCBI NO: 21410245 NR Description: protein x 0004 [Homo sapiens]
  misc_feature (84)..(338): Homolog of NCBI NO: 21312642 NR Description: RIKEN cDNA A930018B01 [Mus musculus]
  misc_feature (84)..(338): Homolog of NCBI NO: 34872358 NR Description: similar to RIKEN cDNA A930018B01 [Rattus
  misc_feature (84)..(346): Homolog of NCBI NO: 37606123 NR Description: SI:zK83D9.3 (novel protein similar to human x
  misc_feature (82)..(176): Homolog of NCBI NO: 7487264 NR Description: hypothetical protein T20K18.140 - Arabidopsis
  misc_feature (161)..(348): Homolog of NCBI NO: 7487264 NR Description: hypothetical protein T20K18.140 - Arabidopsis
  misc_feature (82)..(348): Homolog of NCBI NO: 18413871 NR Description: putative protein
  misc_feature (82)..(347): Homolog of NCBI NO: 18071342 NR Description: putative ATP(GTP)-binding protein
KNRSSLHAVTPPLTCRRQPATRLDGRRPSRVPDRTPRRPLSPSYIVAAVSSVAPPDPPHPQSPLCTTPPLLSIPSGSPTPTMGFAQLVIGPAGSGKSTYCSGLYQHCETVGRRIHMVNLDPAAEHFSYPVSTDIRELISLDDVMEELGMGPNGGLIYCMEHLEDNLDDWLDEQLENYLDDDYLVFDCPGQIELFTHVPVLRNFVEYLKRKNFTVCAVYLLDSQFVSDVTKYISGCMASLSAMIQLELPHINILSKMDLVSNKKDVEDYLNPEAQVLLSQLNRQMAPRFHKLNKALAELVDDYNMVNFIPLDLRKESSIQYVLSNIDNCIQYGEDADVKVRDFIPEEDD

SEQ ID NO: 65676 - protein, 267 aa, Triticum aestivum
  peptide (1)..(267): Ceres Seq. ID no. 12780544
  misc_feature (7)..(250): Pfam Name: Conserved hypothetical ATP binding protein Pfam Description: Conserved hypothetical ATP binding protein
  misc_feature (6)..(257): Homolog of NCBI NO: 6323272 NR Description: Protein required for cell viability; Ylr243wp
  misc_feature (3)..(257): Homolog of NCBI NO: 21361523 NR Description: protein x 0004 [Homo sapiens]
  misc_feature (3)..(257): Homolog of NCBI NO: 21410245 NR Description: protein x 0004 [Homo sapiens]
  misc_feature (3)..(257): Homolog of NCBI NO: 21312642 NR Description: RIKEN cDNA A930018B01 [Mus musculus]
  misc_feature (3)..(257): Homolog of NCBI NO: 34872358 NR Description: similar to RIKEN cDNA A930018B01 [Rattus
  misc_feature (3)..(265): Homolog of NCBI NO: 37606123 NR Description: SI:zK83D9.3 (novel protein similar to human x
  misc_feature (1)..(95): Homolog of NCBI NO: 7487264 NR Description: hypothetical protein T20K18.140 - Arabidopsis
  misc_feature (80)..(267): Homolog of NCBI NO: 7487264 NR Description: hypothetical protein T20K18.140 - Arabidopsis
  misc_feature (1)..(267): Homolog of NCBI NO: 18413871 NR Description: putative protein
  misc_feature (1)..(266): Homolog of NCBI NO: 18071342 NR Description: putative ATP(GTP)-binding protein
MGFAQLVIGPAGSGKSTYCSGLYQHCETVGRRIHMVNLDPAAEHFSYPVSTDIRELISLDDVMEELGMGPNGGLIYCMEHLEDNLDDWLDEQLENYLDDDYLVFDCPGQIELFTHVPVLRNFVEYLKRKNFTVCAVYLLDSQFVSDVTKYISGCMASLSAMIQLELPHINILSKMDLVSNKKDVEDYLNPEAQVLLSQLNRQMAPRFHKLNKALAELVDDYNMVNFIPLDLRKESSIQYVLSNIDNCIQYGEDADVKVRDFIPEEDD

SEQ ID NO: 65677 - protein, 233 aa, Triticum aestivum
  peptide (1)..(233): Ceres Seq. ID no. 12780545
  misc_feature (1)..(216): Pfam Name: Conserved hypothetical ATP binding protein Pfam Description: Conserved hypothetical ATP binding protein
  misc_feature (1)..(223): Homolog of NCBI NO: 6323272 NR Description: Protein required for cell viability; Ylr243wp
  misc_feature (1)..(223): Homolog of NCBI NO: 21361523 NR Description: protein x 0004 [Homo sapiens]
  misc_feature (1)..(223): Homolog of NCBI NO: 21410245 NR Description: protein x 0004 [Homo sapiens]
  misc_feature (1)..(223): Homolog of NCBI NO: 21312642 NR Description: RIKEN cDNA A930018B01 [Mus musculus]
  misc_feature (1)..(223): Homolog of NCBI NO: 34872358 NR Description: similar to RIKEN cDNA A930018B01 [Rattus
  misc_feature (1)..(231): Homolog of NCBI NO: 37606123 NR Description: SI:zK83D9.3 (novel protein similar to human x
  misc_feature (1)..(61): Homolog of NCBI NO: 7487264 NR Description: hypothetical protein T20K18.140 - Arabidopsis
  misc_feature (46)..(233): Homolog of NCBI NO: 7487264 NR Description: hypothetical protein T20K18.140 - Arabidopsis
  misc_feature (1)..(233): Homolog of NCBI NO: 18413871 NR Description: putative protein
  misc_feature (1)..(232): Homolog of NCBI NO: 18071342 NR Description: putative ATP(GTP)-binding protein
MVNLDPAAEHFSYPVSTDIRELISLDDVMEELGMGPNGGLIYCMEHLEDNLDDWLDEQLENYLDDDYLVFDCPGQIELFTHVPVLRNFVEYLKRKNFTVCAVYLLDSQFVSDVTKYISGCMASLSAMIQLELPHINILSKMDLVSNKKDVEDYLNPEAQVLLSQLNRQMAPRFHKLNKALAELVDDYNMVNFIPLDLRKESSIQYVLSNIDNCIQYGEDADVKVRDFIPEEDD

SEQ ID NO: 65678 - DNA, 1168 bp, Triticum aestivum
  misc_feature (1)..(1168): Ceres Seq. ID no. 14302462
acagcggtcgtgccactcaacattattgccagatccattcctcccgtgcgagagcgacaggcagacagcggccgtgccgtgccggtggcgcgcggcaagcggcgacggccatggagctcctgcgggacagcatccccatggtgtccctggccgccgcggccgccgcgctgtacgcgcgcatggcctcgtcgctcctccgccccggcctcccgcgcctcgtctcgctgctcccgctcttcccattcctcgccgccgctcccctggccctcacttcctccgccatcgtccggggcaccgccgccttcttcctgacctggctctgcacgttcaagctcgccctcctcgccgccggccgcgggccgctcgaccccgcgctccccgtgctgccgttcctcttcaccacgctgctccccgtcaagctccgcccctccggtgcgggagcatccaaagccaagccgctgccgtcgctcgtctcttgcgcggccaaggtcgccgccatagccgccatcctcggcatctaccagtacaacgctcggctgcacccctacgcgcgccggacgctgtacggcgtccacatatactgcttcctggacctcttcttcccctgcatcgcggcggccgccggcgcgctcggcatggagacggagccgcagttcgaccgcccctacctggcctcctcgctgcgggacttctggggccgccggtggaacctcatggtgtcggccatcctccggccgtcggtgtacatccccgtgcttgcgcgcgccgggagccccgccggcgtgctggccaccttcctggtgtccgggctgatgcacgagggcatggtgtactacctcagcttccggcggccggacggccggatgaccgccttcttcctgctccatggcgtctgctgcgtcgccgaggggtggtgcgcccggcggtgggcggcgagggggtggccgtcgccgtcgcgggccgtggcgacggtgattgtggtggtgttcgtcgcccgcacgtcgttctggctcttcttcccgccgttgtgcagggacggaggcgaggagaagctgctggcggagtgggctgccctggcggccttcttcctcgacgccggcagaaagattaatggcattgtacgttcaaccgactaacgaaggaaaataaacactctcaaaagtttaac

SEQ ID NO: 65679 - protein, 377 aa, Triticum aestivum
  peptide (1)..(377): Ceres Seq. ID no. 14302463
  misc_feature (86)..(344): Pfam Name: MBOAT family Pfam Description: MBOAT family
  misc_feature (43)..(354): Homolog of NCBI NO: 15240497 NR Description: long-chain-alcohol O-fatty-acyltransferase (wax
  misc_feature (57)..(369): Homolog of NCBI NO: 15231093 NR Description: long-chain-alcohol O-fatty-acyltransferase (wax
  misc_feature (47)..(354): Homolog of NCBI NO: 27728718 NR Description: wax synthase isoform 3 [Vitis vinifera]
  misc_feature (49)..(369): Homolog of NCBI NO: 34911838 NR Description: wax synthase-like protein
  misc_feature (43)..(361): Homolog of NCBI NO: 27728716 NR Description: wax synthase isoform 2 [Vitis vinifera]
  misc_feature (43)..(361): Homolog of NCBI NO: 27728714 NR Description: wax synthase isoform 1 [Vitis vinifera]
  misc_feature (57)..(374): Homolog of NCBI NO: 28812087 NR Description: putative wax synthase isoform protein
  misc_feature (40)..(375): Homolog of NCBI NO: 38345253 NR Description: OSJNBb0011N17.14 [Oryza sativa (japonica
  misc_feature (43)..(366): Homolog of NCBI NO: 38345254 NR Description: OSJNBb0011N17.15 [Oryza sativa (japonica
  misc_feature (37)..(377): Homolog of NCBI NO: 38347115 NR Description: OSJNBa0009K15.12 [Oryza sativa (japonica
SGRATQHYCQIHSSRARATGRQRPCRAGGARQAATAMELLRDSIPMVSLAAAAAALYARMASSLLRPGLPRLVSLLPLFPFLAAAPLALTSSAIVRGTAAFFLTWLCTFKLALLAAGRGPLDPALPVLPFLFTTLLPVKLRPSGAGASKAKPLPSLVSCAAKVAAIAAILGIYQYNARLHPYARRTLYGVHIYCFLDLFFPCIAAAAGALGMETEPQFDRPYLASSLRDFWGRRWNLMVSAILRPSVYIPVLARAGSPAGVLATFLVSGLMHEGMVYYLSFRRPDGRMTAFFLLHGVCCVAEGWCARRWAARGWPSPSRAVATVIVVVFVARTSFWLFFPPLCRDGGEEKLLAEWAALAAFFLDAGRKINGIVRSTD
